United States Patent Application Publication US 2007/0067865 A1 - sequence listing, part 38

SEQ ID NO: 235988 - DNA, 445 bp, Gossypium hirsutum
cttctactcaagaggagcagcagcttcactttgtggtgttttccttcatgtctcaaggccatatggcccctatgattgacattgctagattgctggcacagcgaggcgtgatcgtaaccatcattacaacgcctcaaaaggcagctaggttcaaggcaaccctcgatcgtgccatggaatcggggctcttcatccgtctacttgaggtacagtttccatgtgctgaatttggattgccagaagggtgcgagagcttcgacatgctgccttcctttagcttagcctggaatttctaccaagctaccgacgcgcttgaaacgccagttaaaaaactgttacctgagctaacgccaagccccaactgtatcctttctgatgtgttgtttgcgttcacactcgacattgccaaccagtttcagattccgaggatcgtgttccatggagt

SEQ ID NO: 235989 - DNA, 151 bp, Gossypium hirsutum
  unsure (1)..(151): unsure at all n locations
ccctctcgtccgcttaccttatgtaggcttagagcaggggtgcttttataagattcttgtgtgccgtttcggaagaaacctcgnaaaagttcaagggattgcccggggttctttgggtgttaccggatttatacatagacgtcaaaaacaa

SEQ ID NO: 235990 - DNA, 109 bp, Gossypium hirsutum
  unsure (1)..(109): unsure at all n locations
ngtttctgagccactgaccagggctcgctttgagggggggaactttgatctgttcagatggaccatggcacctgtgaagaaagcaatggaagatgctggtttggagaag

SEQ ID NO: 235991 - DNA, 118 bp, Gossypium hirsutum
cccatgcgtccgtttggttaattcagatccctcgactctacaatgtttacaaagagatggggattgttacttcatttcagaacattcttgacaacatttttatacctctgtttgaggt

SEQ ID NO: 235992 - DNA, 336 bp, Gossypium hirsutum
ggtgctactcttcagagacctttcgctcggccactcagagagagagtcaactccactgccattgcaaacgaaacctcgaatgctaccgagcaagcttacctcaaccgatctccaatctccactcggacaactcgcttctcaactcaccgactccgacctccgactcactgcttatgacgtcttcctcgccgtatgccgtacctcctcttcgaaacctctctcctcttccgcttccgcttccgcttccgcttccaattctgattcgctgggttacaactcgcctagtcaaaacaacaaccactcacctaattcgcccgcgttgcaacgctcgcttac

SEQ ID NO: 235993 - DNA, 370 bp, Gossypium hirsutum
gtttggtttttgcggagaaaatatgagagagtatatggggtgtttggataacgtggaagcgattaagaggcttaaatcgacggagagaggggagagatttgaacgacattgcccggagaaagggaaaggattgaattgcttggttccagctccaaaaggatatcgacctccgatcccctggcctaggagccgcgatgaggtatggttcaacaatgttcctcatacacgtctagtagaagacataggtggccaaaattggatttctagaaaagggaaggataaatccaaggttcctggaggtggcacacagttcatacatggggcagatcaatacctgaatcagatctctaagatggtccctgatattaca

SEQ ID NO: 235994 - DNA, 447 bp, Gossypium hirsutum
aggcttgtttttcacacacacaaaaaaaagtacttggttttttctctctttggacaagacaaaatggcgaacgcggcatctggaatggctgttgatgatgaatgtaagctaaaatttttggagctaaaggcaaagaggaactaccgctacataatattcaagattcaggaccagcaagtggtggtggagaaagttgggaacccaggatctacctatgaggagttcactgcttctttacctgctgacgagtgtcgctattctgtcttcgattttgatttcaccactgatgagaattgccaaaaaagcaaaatcttcttcattgcatggtcacccgatacatcaagggtgaggagtaagatggtgtacgctagctcaaaagacagattcaaaagagaattggatgggattcaagtcgagttacatgcaacggatcctagtgaaatgagc

SEQ ID NO: 235995 - DNA, 375 bp, Gossypium hirsutum
gttcctgggccacagaattcctttcttggtagccgggggatttgttgcagacagttgttcatggccgcacaccaagaagcagaaccgtcatggcaggaactgcttggtagcaaaaactgggactcgctgctggatcctcttcacttctgacttcgcaaactcatcctccgctgcggtgacttctgccaggccacatatgacgccttcaacaacgaccaaaattccaagttctgcggttcaagccgctatggcaagtcctctttcttcgacaaagtaatgctggaatctgcctccgattacaaagtagaatcgtttctctatgccactgctcacgtcactctccctcaagcctttatgctccactccaggtcaagg

SEQ ID NO: 235996 - DNA, 446 bp, Gossypium hirsutum
acactctctctgtcccttcgcattggactgttgattggccgtcaatggcggctccagaggcctcaaccgccgccgtaccgactctatataccaataacaccttgcgaaatgctttcggcggtgttctctctttcttcatcctcctcctgatcggagttctcgctttctcgatccgtcttttctctgttataaaatacgagagtgttattcatgagttcgatccttactttaattacagagtcactcagtttcttacaaagaagggaatttataaacaaatacaacactttgtcctcaactttctagtgttaactgcggaaatgcttgtggagcaatctgtaatatatggatctatgaattattcatttgcgccagagggtgccgttataatatgcttcacgtcaggaactactgggaggccaaagggagttgtcataagccataca

SEQ ID NO: 235997 - DNA, 471 bp, Gossypium hirsutum
cttttatcggtgtttgataaaaggtcaattagagtggttgattttcgttgctaatattaaagatcggtgtggtgaagaaagatggatttcgcttgtagttttaagcgtcctatggtatttcatggtggtgaagggagtattagtagctataggatgctggatccgttatgtcctagatttaaatgtaggaatttgagttacagtgttgttgatcccatgattggatccaaaactcggtgtttgaagaaaatgaggaaaagtatggcttatggtggttgtttaagttcgaatttggttttcgggggggaatttaaccgtcatttgtgcagtgcgtactctagtaggtcgttgtgttacggtttgcgtgatgtgtcgaaagtaagagtagttaggctgtgttgtcaaggtaatgattcgctggcttatgctgatgggaatggtcggaatgtggaatttgcagagagtggtgat

SEQ ID NO: 235998 - DNA, 498 bp, Gossypium hirsutum
atcaaatcccagcttagcaacctcacaaattttttgggtaaaaaacccatctttctggttctaaactcacccccatccatctcttttgcatataccttcagtcactaagcaatagcagccactactgcaaatggcttccaacaaaacctgtgctgtccttacagttttctctcttcttcttttcaacttatcattcaccaatgcttgccattcatgcaagccaccaaagcccattccaccacctgctgcatgccctccaccaccagcaaagcctgcttcttgccctaaggacacattgaagctaggtgtttgtgctgacctacttggactggtaaacatagtggtgggaacacctccttcgagcaaatgctgtgctttgctccaaggcttggctgatttagaagctgccctttgcctttgcaccgccattaaagccaatgtgcttggggccaacctcaacatccctattacccttagcttactccttagtgcatgtca

SEQ ID NO: 235999 - DNA, 478 bp, Gossypium hirsutum
tgggttttgctctccttccagttttggtctcagttggcaccatttagtactctgctgctcaaagcttcaaatgtagctcgagcgacccgagtacatgtcatgcattggtcggctacatcactgttaacaacaccaacctcggcgccattcaatccctttttagcgtcaaaaacctcaggagtctccttggatccaacaacttacctctcaacaccaagcgcagctatgccatacccgcacaacaggtcatcaaagtccccatcaattgtttgtgcaacaacaacactggaacttccagcggtgctcctatctacaccgttcaaccaggtgacgggctctaccacattgcagctgaggtgttctcgcggttactgctttaccagcaaattgcagcagccaataatattagggatgccaatttgataacgattggggacaagctcaaaatccccttgccctgtagctgcgatgaagtgga

SEQ ID NO: 236000 - DNA, 455 bp, Gossypium hirsutum
cggacgcgtgggtttcagcacaacagatgcgttagctcaccgcccccacctgcgtttctccaatttcagtattggtcatctccctgccgattaatttcctttcagaaaaccctaattccacactctctcttttttttttacattacatcaaaagcagagaaaagcaaagtggaggaggaaagatgttagcaatagcaaggcaaaggatgttggggcaatcatttaagaagattctgcctgcagtgtcagtcttgagaagttactcatctgctgcaaaacagattacagtgagagaggcattaaactctgctcttgatgaggagatgtcggctgatccaaaagtctttttgatgggggaagaagttggagaatatcaaggtgcatacaagataaccaagggacttttggagaagtatggacctgaaagggttcttgatactccaattactgaggct

SEQ ID NO: 236001 - DNA, 399 bp, Gossypium hirsutum
cttttatgggttctcaccggaaaatcgtacttgggtctcaccggccgcctagaaaaacaaagcaaatatagagcgaaaaccgactatttttcctcatttctttcttgtgttccattttttcaagtgaaatcccaaaatggttgtaaattttagctttgtttttttagtttcggtcctgatattgtgtttgggagtgaactcagagccagttcaagacaagcaagctctccttgcgttcctttcaaggaccagacactcgaaccggatccaatggaactcatcaacttcagcctgcgattgggtcggtgtccaatgcgatgcgaaccgctcttttgtttatactcttaggctcccagctgtgggtctcgttggctcgattccgcctaacaccatcggtcg

SEQ ID NO: 236002 - DNA, 535 bp, Gossypium hirsutum
ctttttgaaattattatttaaaaaaaaaaaccttttgttcctttctctcctcctttggcgaccgctaaaacgtttcctggtcttaatccaaattccgatcggaagatcaagttagggctttcagtcgattttcaatggaaagaatcagaagagcttcgcatgcaggatcttggtacactgataacccaaaaaaactggcggaagagcttgatggatggatcacggcggctggcttgcctaaatcctctgatgtaagaggtgtaattgctccgcatgcaggttattcatattcaggtcgtgctgcggcctatgctttcggaaatatagacccaacaaacatttctcgggtattccttcttggtccatctcaccattattacactccaaaatgtgctctgtcaactgctacagtatacaagacaccaataggggacctacctattgatttggaagtcatcgaatagctgaaagctacaggaaaatttgaactgatgaatcttcgtgttgatgaagctgagcatagcatggaaatgca

SEQ ID NO: 236003 - DNA, 480 bp, Gossypium hirsutum
gttggatcatctaggaagagaaagtatctgatggttatcggaattaatacggctttcagcagcaggaaaagaagagactcagttcgtgctacatggatgccacaaggtgaaaagaggaagaaattggaggatgaaaaaggcattatcgttcgctttgttattggccatagtgctacatcgggtggtattttggaccgagcaattgaagcagaggataagaagcatggagacttcttgaggctggaccatgttgaaggttaccttgaattgtctgcaaagaccaagatatattttgctactgctgttgctttgtgggatgcagatttttatgttaaagtcgatgacgatgtccatgtaaatatagcaacacttggagaaactctagttagacaccgaaagaagcctcgtgtatatatcggatgcatgaaatctggtcccgtcctctctcaaaaaggagttagataccatgaacccgagcac

SEQ ID NO: 236004 - DNA, 311 bp, Gossypium hirsutum
cccactctttcgcttcaccatgccaattccttttggggggatcgttttacatttttattccgtggttagacacttcttactcgccgtcgtaaactgctgccactatacccatttggagtgcttcttctccttttatcttcaacccgcgcaataatagatcgagtcgagccgagcccgaaatatacgctctaaacaaagccatgaagggttcagggatcttgatccctacatccaaagcaatcatgtagagcacacttctatgacggctcatgagcacgtagccatgacaaagggcgagcactacgccgaca

SEQ ID NO: 236005 - DNA, 500 bp, Gossypium hirsutum
accatattgtcttgtctgctgcaactcttgtctttggggctcatcttatcttcagctgcatcaatccaaaccccgaagcattatgttgtatacatgggaagctcagctggtgaaactgcagaatcagatcatccgcaattactgtccacagtaattccaagggaggaaagagaaaggatttcaattacaaatcattataatcatgcattgagaggattctctgcaatgcttactgatgatgaagcttctgagttgtctggacgaaatggggtggtatcggtttttcccgattcaattcttcagttacatacaacacgatcgtgggatttcttagacgacaactcaaaccctaagttgaatcatggatcatatctgcctcataaatctacttatgatgtcattattggcatgatcgatacaggaatttgggccgagtctccaagtttcaaagatgaaggaatgggagaaatacctaaaagatggaaaggagtctgcatgga

SEQ ID NO: 236006 - DNA, 415 bp, Gossypium hirsutum
ttggttgtattgacttggaggtcgttattaaggatgtcaagggagtggaaatactactggcttcgccttatcctttatatgatccttacactgtgcattggaacagtattttcaggcttggggcattctttgtcttcagttgtgaaaagagtcgctgcaatttttgtatttgtgtcatttacttcacttttaagcatcgcgggagtacctgcactactcaaagaagtcaagatttatgcgagcgaggagtcaaaccagcattcaggagctttagtctttttgttcggccaacttctgtccagcatcccattcctgttcctcatctccatatcatcgagtctcgtcttctatttcttaataggattgcgagatggattcagcttgctgatgtacttcgtgctgaatttctttatgt

SEQ ID NO: 236007 - DNA, 365 bp, Gossypium hirsutum
tcgtttattgttatggagttgtgtgagggtggaggggtgctttacaagatattgggggaaaaggacagccgctatagtgaaaaagatgcagcatttgttgtacggcagatgctcaaagttgctgccgaatgtcatttacatggcttggttcatcgtgacatgaaacctgagaatttcctatttaagtcaaccaaagaggactcacctctgaaggctacagattttggtttgtcagactttatcagacctgggaagaggtttcaagatattgttggcagtgcctactatgttgctcctgaagtattgaaaagaaagtcagggccggaatcagatgtatggaatattggtgtaattacctacatttt

SEQ ID NO: 236008 - DNA, 288 bp, Gossypium hirsutum
tcttttagccttgaaagctttgcctggtaatggggggcttttttatacttatttgggggaacaactcgagattgttcgcaggttacctgatgctcaccctcaatatgaaaccctcaacaatacttttgtgagggcgcttgttacaatgcacaatatgcctaggattaggatcatggactcgtcgacgttaactgaacatactttgattactaatacacgtaagacgttcgatagagcactttgagcgtcgcctgtgactcaacatgatcggatttgggaaccttattt

SEQ ID NO: 236009 - DNA, 269 bp, Gossypium hirsutum
tcgttctcgcgtccggttttgaaggtgacaggggggggcacattacacagcggggcggtttcttgaccttgttcttcttctagttggttccaatggaaaagctggaacacctcaaatctgccgtcgctgctctttctgaaatcagtgaaagtgagaaaaacggattcatcaaccttgtctaccgctatctcagtggagaagctcagcacatagagtggagtaagatccagactccaactgatgaagtgggtggtccttatgacaccttg

SEQ ID NO: 236010 - DNA, 316 bp, Gossypium hirsutum
acgcgtggggatcagaataagaaaaggggggcttttttagaatgtcatgggggcttaagccagaattagttgaaagggatgttaaggacaaggtggatgacaaagaagacaacagtggatttatagacaaggtcaagggtttcattcatgacattggtgagaagatcgaggaaacaatcggctttggcaagcctactgcagatgtagctgagattcacctcccttgtatcaatcttgagaaagcagaaattgtcgttgatgtcctcataaagaacccaaaccctggtccaatccccctcgtcgacattgactacct

SEQ ID NO: 236011 - DNA, 419 bp, Gossypium hirsutum
catggtggtatattcggaccatttgtgatatggggactgtgtggatttctttgggttttagtatggctatctgcaacctcaagtacccccgatcgaagtccccagatctcaaaatatgagttggattacataatgaacaagagacagaaatcccatgcagtggaaagcaagcctaagaccaaaatgatccctccattcagaagattgctttctaaaatgccaacatggtccctaattgttgcaaatgccatgcatagctggggcttctttgttattctctcatggatgcctatctactttaactcggtccatcatgttgatctcagacaagcagcatggtttagtgctgttccatggtgcatgatggcgctaacaggatacttagctggtttatggtcagacattgataaggaatggta

SEQ ID NO: 236012 - DNA, 381 bp, Gossypium hirsutum
tcttttacgcgtccgtgaagatctattttttggggggttttttgaaggcaaaagctaaacaatggggtgctcattttctggtttgaatgcattgtacgatgccgttaatggcggaggggacgtttggatcaacgagaacaggttcaagatcgtgaggcagctcggtgaaggtgggttcgcctacgtttacctggtgaaggaagtcgtatccgattcctcttcagctttggccagtggcttagccaaaaaagtcaaggacccttcacatctttctgatgatagaacttatgcaattaagaaagttcttattcagaataatgagcagttggatttggttcgagaggagaaccgtgtttcatccttgtttagtcatcctaacct

SEQ ID NO: 236013 - DNA, 376 bp, Gossypium hirsutum
ttgggatccgttccaagaagtcctgcgcgggggtagcagcttggttgcggctgcttcgcccgaatcacggttcgagcttacgaagctagactggaaggaaaccccggaagctcacgtgttcaaagcggaccttccagggctgaagaagaacgaggtgaaggtggaagtagaggaggggcgagttctctgcattcgcggggagaagagcgtggagaaagaagtgagcggcgggacgtggcatcgcgttgaacgcagcagcggtgcgttcgtaaggcgtttcaggttgcctgaggatgccaagcttgataagctgacggcgtgtttggagcggggggtgctcaccgtcacagttcctaagaaagagctcaaacacccc

SEQ ID NO: 236014 - DNA, 391 bp, Gossypium hirsutum
ttcacgcgtccgggcgaagtcaggttacgggacaaaccatggatgaaaagctgggtaggatggtaactcgtgtagtgcttccacgtgttgtcatgcattcacgacatcactatggggcattctcagaaaattgtactggctcagagctagaagatgggggaggacgtggcacatcatgatctcattgggaaaaaaggcttttgatgaatgagataatgacaggatcacgggatacaagatcagttgtttcaaaaatgacactggcgatgttggaggatagtggatggtatcaagctaactatagcatggcggatcgcatcgattggggacggcaccaaggaacggatatcggtacttctacttgcaatctctggaagggagcatatcattg

SEQ ID NO: 236015 - DNA, 401 bp, Gossypium hirsutum
cggagacatttgctgacttccggatggagtgctgtggtaaataagaagaagctgggctctggagatgcggtgctttttctgaggggtgaagatggagaactgaggcttggagtccgaagagctgctcaaattaaagatggctcttcttttccatcttcttgcagccagcagttgaattgcagcaattttgcagatgtggttcatgctgtttctatgaaaagtgtattcagcatttactacaatccaagggccagttcatcggacttcgtaatacccgtgcataaattctggaagtgtcttgatccctcattttctattggaatgaggttcaaaatgcaatttgaagctgaagatgcagcagaaagaagacactcaggagtaataactggaattagtgatat

SEQ ID NO: 236016 - DNA, 394 bp, Gossypium hirsutum
atttgaacttcaaaaattagggtttcgaggcggggactttaccatagcttgccaattctatttcttcgtcatccctttggtttttaatagaaattaaatttgataatctccttactgtgtttgatttccttcaaaaatggcggaacacttagcctccatcttcggtaccgagaaggaccgtgttaattgtcccttttatttcaagattggagcttgccggcacggtgaccggtgctcacgtctccataaccggccaacgatctccccaaccatccttctttccaacatgtatcagcggccagatatgatcactcccggagtagatccccaaggacagcccatagatcctcgcaagatccaggaacatttcgaggatttctacgaggatatctac

SEQ ID NO: 236017 - DNA, 521 bp, Gossypium hirsutum
cccactcgtccgcagacaacggggaaggaaaatgcaaggggcgtggaaaccagattgttggtcttcttttttctcaatttgcttttacttttgcttccaacgttcttcttgggacaccaacttccgtacgccatggcccctcctatgaaaattgttttcggattgttaacatttgtcactgttggaatgataatcggggctttgtttcagctagcattcatacgcgggttagaagattcatacggtgatgactttccaactacaaaattacatagacgtcagagtgatggatatcttaagttgccaagaggtatgagtcactggcacggtgacaaagaagcagaaattttgcgtcttggagttgtcaaacttgaaataataagctggtcacctcgaataattgtacttcataatttccttagcaatgaggaatgtgactaccttagagccattgcccgccctcgacttcaagtttccactgtggtagatgtaaaaactgggaagggaattaagagtaatgt

SEQ ID NO: 236018 - DNA, 460 bp, Gossypium hirsutum
cctactcgtccgcccacgcgtccgagaggttcatatgcaagggagaccattgaactgtgaagctggtagaaaaagccggttctatggggaagatggggagcaatgtggagtagaacagttagctctacagtattatgcaacagaaggtggatggcagggtgtccatacagagagtggtatatggatgactatcttcgggcttctcatgtgggatattttattttcagatgtaccaaatgttttccgcaccagattccagactgctccattggatatggatactgatcatttttatctggcaagaaagagccttatcgagccccaactacaaaaaatccacgatggtttggctgaagagattctcaaaacatcatgggaattgcatatgggaacagcttgtagaggagttaattgggaccaacactccctttccgaccttcgagcagctgtttcatgtatc

SEQ ID NO: 236019 - DNA, 521 bp, Gossypium hirsutum
tcttttcttttttcttttccttaggttaatgcgcttaaatataaatcaatatacattctagctatcttactaattcctctttctctctctctctctctctttaatttttcaaaaaaatggataacaaaccatgcaaatcccaagatgttgaagtgagaaacgggccatggacaatggaagaagatttgattctcatcaactatattgctactcatggtgaaggtgtttggaataatcttgctaaagctgctgggttgaaacgtaccggaaaaagttgccggctccgttggctgaattatcttcgtccggacgttcgtcgaggcaatatcactcccgaagaacaactcttgatcatggaactgcatgctaagtgggggaataggtggtcaaaaatagcaaagcatctgcctgggaggacagataatgaaataaagaactattggaggactagaatccagaaacacatcaacaaacaagcagaaatgttttcttttaatatcagtaccccagaattacttgat

SEQ ID NO: 236020 - DNA, 469 bp, Gossypium hirsutum
ttactaaacgaaagagctcttagagtccagagagggtggtgcacaggagctcaaaggaggacggctcttcttcttcttcggatgaggatgctaaaccctcgtgcatctctcgggtgaagcatagattgcgtcgtcatcgccttcgtcgccgtcgtagaagcgattcttctcataaaaaactctttgccgccgaggatttcgctggcattgctcaccttactctcatcaacgcggagatgaagtttaaggacaaatggctggcatgtgtttcgtttggggagcaaacgtttcgaacaaatgtttctactgaaacagacaagcctgtttggaactgtgagagaaaacttcttttggaaaaaaatggacctcttgttgccagaatctcagtatttgagacgaacagattatcaaaaaataacctcatagggtactgtgagatcaatctacttgactatctgacacaggattc

SEQ ID NO: 236021 - DNA, 505 bp, Gossypium hirsutum
tttaccaagtttcacattgggttactaccattaatcttctttttttctttataagcctactgtctctcgcctttcttctcccccacacattcaaaatcctattccttttctcctttttctttttctcagacaagatgggttctcagggatcggttatggctatgcttttgctgatgatgttcactttatcatcagcttccgacatgtccattatatcctacgatgaagcccatcccgacaagtcaacgtctagttggagaacagacgacgaagttatggccatgtacgaggagtggcttgtaaagcatggaaaaacatacaacggtttgggtgagaaagagaggaggctccagatttttaaggataaccttagatcttgtagggaaggcgatggaggggagggtgagagactagggatgcttcttgaagtggccattgcttgctgttcgagttgtagtgaacaaaggcccacaatgtggcaagttctgaagatgttacaggagat

SEQ ID NO: 236022 - DNA, 530 bp, Gossypium hirsutum
gtttagggtcttatgaccactgtccattcgattgctgcatcccaaaagaccggtggtggtccatcaatgaaggattggagaggtggtagagctgcctccttcaatatcattcccagcagcactggagctgccaaggctgttggcaaagttttgccagcattgaatggcaagctcactggaatggctttccgtgttcccactgttgatgtctctgtggttgacttaacagtgagacttgaaaaggctgctagttatgaagatattaaggctgccatcaagaaagaatctgaaaccaacttgaagggaattcttggttacgtggatgaagatttggtctcaacagactttgttggagattccaggtctagcattttcgatgctaaggctggaattgctttgagcgacaaatttgtgaagcttgttgcttggtatgataacgagtggggttacagtacccgagtgattgacttgatcagacacatggcttctgttaactgagtgattttcgtgtaacagtcgttacatcatgg

SEQ ID NO: 236023 - DNA, 527 bp, Gossypium hirsutum
caatgcaatgcatagtgtttttctcattcgctcatgcttttgaagcttgccatctcaaccgcacccgcagcagccaccatctttaaagctgttcttagcaaaggagtttcactaaacatggcgcacaaacttgttcaagtgactttgtgtttgtgggtttttacaagcttacttctcccctctcccactgctgccctataccgggtcagtttgaagaaacaaagattgaatcttaatagatttaaggctgctagaattgcaatgaatggatggggtatgcttcataactatggaagttcagatggagaagtaatacctctgaaaaactacatggatgcccaatattatggagtgatagccattggctcacctccacaaaacttcaccgtcttatttgacactggcagttccaatctgtgggttccttcttccaagtgctacttctctattgcttgctatttccattcaaagtacaagtctagccggtcaagtacatacacaaagattggaaaaccttgtgaaataaa

SEQ ID NO: 236024 - DNA, 513 bp, Gossypium hirsutum
cctacgcgtccgcggacgcgtgggcttttccgacgcaaattgaacgagtttttggatcgttttcctttgcaatcaatctgaaatttttaaaattttcactcttttggtccatcaatttcagattcgaaaaaaaaaaaattatgagcgcgtataaacgcgtggttcaattagggtttgatgcgtattccagttccctcgttaacaaatttggatcccggcagatttctcaacttgttaattccaacggaaagcgtgcatttctcgtcgatacattggctctggttcgaagtttggaagcggaaggcgtgccatcaaaacaagcagaggcaataacagcagcaatcaccgaagtgttaaacgacagcttggagaatgtttctcattcttttgtttctaaagcagaaatgcagaagactgagatgctccaagaagccaatttgtcaaagtttaaatctgaagtaaaaagttctcaggattatcatttttctatgttgcaacgtgaaactgaaaaac

SEQ ID NO: 236025 - DNA, 521 bp, Gossypium hirsutum
cggacacctatttttgttcttttttctggaaatgcaaaattcaaacctaacctggaaagcttcgtctcaatctcttttccttaaggtattgttttggcaggaattgttcaacatgtctactacgccaagtgatccacttcttcaagtggaaacaacttgcggaacccttttatatgaacttcagataatctgggatgaagttggggagacagatactgatcgggatgaaatgctgcttgagcttgaacgagaatgcctggaagtatacagaagaaaggtagatcaggcaaatcgctgtagagctcagctaagacagacaattgctgattctgaagccgaacttgctgccatctgttcagcaatgggggagaggccagtgcatattaggcagtcagatcaaaatgctggaagcttgaaggaggaactcagcaaaattcttccacaattggaagaaatgaagaaacggaaaatagaaagaagaaatcaatttgtacaagttttacaacagatacaaattatca

SEQ ID NO: 236026 - DNA, 523 bp, Gossypium hirsutum
ttataatctccaaagctagaatggtttcaaaatggcatgatgtgtactcctcttgggatgatgaattcaaaaaactggtgcaaagcttccccaaagagaaaggctgggcaggatccaatctttatttctatcaaggtttttggtgcccctctcttgttctaaaagcttttatttctttccagaaacattttcaagcatttaattctgatatcatcgttgctacttttccaaaatgtggtactacttggctcaaggccttgactttctccactttgtaccgcaatcagttcccatgggatgaaaatccattgctcacctttggccctcaccaacttgttcgtttcttcgagtatgatctttacttgaacaacccttttcctgatcttcgaaatgtttgtgcttatcagccaaggcttttttccacccacgccccttatgctactttgccaacttccattaaggattctggctgtaagattgtttacatatgtagaaaccccatggatatgttcatttctctttg

SEQ ID NO: 236027 - DNA, 332 bp, Gossypium hirsutum
ttcttctgaatctccatctccttggggggattcttagaaacatgacgtgggattgcataaagagaatgaaagaattgcaagcaagtgagcaatcatctgatcataagatgcttcgattgagtgtagaaactggtggatgttcggggtttcaatacgtgtttgatttggatgacataacaaacccagatgacagagtttttgtgagggaaggggtaaagatggtagtcgatgatatttcctatgatcctgtaaaaggagcaaccatcgattatgtccaggagttaattcgttctgcattcgtggtgactacaaatcctagtgcagttggaggg

SEQ ID NO: 236028 - DNA, 519 bp, Gossypium hirsutum
cttgtctttcaagctttccgtttgttaacagaggctttaaaccgaagctgagatcgcttcacagttctttctcttctccagagatctctctccatctcatttggagctcaatatatcaaattcatcagcttaaaaatggcggccgtcgccgttcaccatttcgctcagtgcatcacttgccatgcttggagtcccgatcactccatggtagcattttgcccaaataataatgaggttcacatttataaattggtgaatgacaagtgggagaaagttcatgttcttcagaagcatgatcaaattgtttctgggatagactggagtggaaagtcaaacagaattgtttctgtatctcatgatcggaattcatatgtttggaaccgagaaggaccagagtgggtaccaactcttgttattcttaggctcaatcgtgctgcactttgtgttcggtggagccccaaagaaaacaagtttgctgttggaagtggtgctaaaactgtgtgcgtatgctattatgag

SEQ ID NO: 236029 - DNA, 433 bp, Gossypium hirsutum
ttgtatttccagatcaaatcacaacatcatcgggggttttaaacacaatccccgtgggtccaaccaacgcttcagaaacctcgatcttcttcaagaagacattaatggtaagaaggagattaaaatcggtttagttaatatcaattccaatgaagaaatccaatatcaactacccggttcagttgttagtaccgtccacgttcgcttcgatcgtgtttccaagaagagaaaatgggaggattttttccccttccggatcgatgaaaaccagcagaattgtccggagattccgatgccagccctggagaagtaccaggatctggacgtggtggtggcgaagctgccatgcaaagggtggagcgggaaaagcgggatgagggatgtgtttttgcttcaagtgaatttggtggtggcgaatatattggtagagagt

SEQ ID NO: 236030 - DNA, 465 bp, Gossypium hirsutum
tttctaagcagctagaagtgcagcacgagccaaggctttcttcggtgaatcgtttgaggagcaatgagtaaaaaaaaaaaccctatggtattcttcgatgtttcaattggtggagatctggtggaaagaattattatcgagctttttgcagatgttgttcctaagacagctgagaatttccgggcactctgtacaggtgaaaagggcattggcaaatctaccgggaaacccttgcactataaaggaactttttttcatcgaataatcaaaggattcatggcccaaggtggtgacttttcaaagggaaatggcactggcggagaaagtatttatggagggaagtttgcagatgagaattttaaactgactcatgacggacctggtgttctctctatggcaaacagtggtccaaacacaaacggatctcaattctttataaccttcaagcgccaacctcatcttgat

SEQ ID NO: 236031 - DNA, 276 bp, Gossypium hirsutum
aacagttacatgaaggaaaagagggaaaaaagagaggaaggaaacataaagggatttggactttggacggaaaaaaaatagagaaagaaaacggggaaaggaggggacaagagaatggaagagaaagatgaaggattagcaatggcgaatgatttcttttggtcatatacagatgaacctcatgcttcaaggagacgtcagatcctctctaaataccctcaaattaaagagctttttggtccggatccctttgctttccttaagattggtgtggtt

SEQ ID NO: 236032 - DNA, 346 bp, Gossypium hirsutum
  unsure (1)..(346): unsure at all n locations
caggatggtccgaggcttttgagctagcagccaaattctgctatggccttgcagtagatttaacagcagggaatatatctggtccctgatgcctgttgccgtttattccattggggttctttttaaaaaagagggctttaagactgacactatggccaacatgttgtcgatctctttaggggtcgctattgctgcttatggtgaagctaaatttgatacctggggagtgatgttgcagctgggagccgttgcttttgaggctaccaggttggttatgatccagatcttgcttacttctaaagggatcaccttgaatccgattacttctctgtattatattgcnnaa

SEQ ID NO: 236033 - DNA, 192 bp, Gossypium hirsutum
tctacgcgtccgcggacgcgtggggaaggaaccagatgaggttgtaatatttcgagatgggacgtacctaaccctgaaagaagtttttgagagcctggatttaactggatatgatttaaatgtggaccttcttgatgttcatgcagacaaaagtaccttccaatcgtttgataaatttaaccttaagtataa

SEQ ID NO: 236034 - DNA, 286 bp, Gossypium hirsutum
gattcatcaaacaacaatgtcgtggcgaacttacgttgatgatcacttgatgtgtgaaatcgagaacggccatcatttatcctccggtgctattctcggactcgatggaagtgtttgggcccagagctccgcttttcctacgtttaagcctgaagagattactgccatcatgaaagattttgatgaacctgggtcccttgcaccaactgggctgcaccttggtggcgccaagtacatggtcatccagggagagcctggagctgtggttcgtgggaagaagggcacg

SEQ ID NO: 236035 - DNA, 476 bp, Gossypium hirsutum
actagatcagctcccactacatcttcaataccaaaatcagcttcccttacttcttcacttatgaaatcagctcctgctacatcttctgttacaaaatcaggtactgctgcgtcttccataacaaaaccatcagctgccactacatcaaaaagctcagtacaatcacggggcacatctccaaccgtgaagtctaggccttggaaagcatctgagatgcctggattttcgcttgaaacaccaccaaatttaaggacatcattgccagaaagaccggtatcagcctcacgggggaggccagcagcacctggtgccagatcatcttctgttgaggccaattctagtggaagaccaagacgccagtcctgctcgcctgctagaagtagggcatcaagtggcagttttggtaatgggagctccattcgttctgtgcgtagagcagatgccaatggcagtgacaacgaaagtccagtagtgat

SEQ ID NO: 236036 - DNA, 385 bp, Gossypium hirsutum
cttttagcaagaaacaaaccaaaaaaaagcttctaaaccgatggctaagaaggaaacccaagaattccaatttgttgtttacaataccatgactcagcaaaaagaggttttcaagcccaaaatccctggaaaagttcgcatgtatgtctgcggtgtcactgcctatgatttcagtcaccttggccatgctcgtgctgccgtttcctttgatgtcctttacaggtaccttaagcatttgggttatgaggttacttatgtcaggaattttactgatgttgatgataagataattcgtcgagccaatgagactggagaagatccaataagtttgagtgaccggtactgttaagaatataatatagatttgagtgatctacagtgcctt

SEQ ID NO: 236037 - DNA, 282 bp, Gossypium hirsutum
cactcaactgctgccatggggctgctgaataaaaaatgcagcatatggtggtaggtcatgtttattgcgacacttgccgtgttgaatttgagaccaaactcagcgaacccattagtggagcagtagtgaaattggaatgtaggaaccgtaccgacgaagcgattaccttccagagccaagaaatagtggctgacaatttcggagactaccacatcatagtggaaggcgattatgaggaatcagactgcgatgttgctttggtgaggagtccaagggctgatt

SEQ ID NO: 236038 - DNA, 132 bp, Gossypium hirsutum
tcccgggtcgttccacgcctccgggtaacaggagcaatgggcccagtgcgatgatggctccaaatggcgaaggttaccagttgatgatctcctcccttcaaagtggaaatgttctgataatgtttgggattc

SEQ ID NO: 236039 - DNA, 509 bp, Gossypium hirsutum
aattaacacccaattgaccaccatgtttaaattaatcaacatcctaaccatccttgtgctacttacatttagttcggaaattgcagatgccgcacctccgtgccaggaggttatcgtgtcgattaccccttgcttgagcttcataaaaggccaacccgatccggcaccaggatgttgttcgggtgctaaagggcttgctaagcaagctaacaccaaactagataggcaaggaatatgcgagtgccttaaaggtgtattgccaaaaataggaccatatgaccctaaaagattccctcttattgcccagaaatgtggtatcaatactttaattcctccaatttctgccactactgattgcaccaaggtgtgaagagtgaagtggggggaatgtgaaaatgaagagcatgccaaatgaataaaaaaatgggcagaacttttcataaattgatctgtaatcaaccccttgtattgcacttaagttatgattaattaaataataattacaattt

SEQ ID NO: 236040 - DNA, 99 bp, Gossypium hirsutum
cattggtgcaccagagcagatcataactctttgcaactgcatagcagatgtaaggaacaaagttcatgcagttattgataaatttgccgaacgcgggct

SEQ ID NO: 236041 - DNA, 378 bp, Gossypium hirsutum
ataaaacacccaattgaccaccatgttcaaattaggtcaacattctaaccatccttgtgctatttacattaattctattatatcgtagattccgttacctccgtgccaggaggttatcgtgtcgattaccccttgcttgagcttcataaaaggcttatccttatactctatttgtttgttgttcgggcgctaatgggcttgctaagcaagctaacaccaaactagataggcaaggaatatgcgagtgccttaaaggtgtattgccaaaaataggaccatatgaccctaaaagattccctcttattgcccagaaatgtggtatcaatactttaattcctccaatttctgccactactgattgcaccaaggtgtgaagag

SEQ ID NO: 236042 - DNA, 480 bp, Gossypium hirsutum
gttcgtgttgagccaaatctgtctttcaataatgtttcaaatccacagaaaccgaacctgtttatcagtaaattgaacctctgctgcgaggcttgtaattctagtgatcctgataaaggtactgccgagcaagatcttaaacggcgaacattgatagagcttgttgattttgtttcttcggggtctgcaaagttcaatgaagcagcaattgctgcaatgtgtaaaatgtgtgctattaacctgttccgagtttttccacctaaatatcggtccaataccgctagtggtgaagctgacgatgaagaaccaatgtttgatcccgcctggtccagtttacaactcgtatatgatctatttcttcagtttatcagttacagttctcttgatgcaaaggtcgcaaaaaagtacatagatcagccttttattttgagattacttgacctatttgagtccgaggatccccgggaaagagtctgtttg

SEQ ID NO: 236043 - DNA, 378 bp, Gossypium hirsutum
tttattcgtgggtttctttataccctccacactaaaccaaaacgcaggaagtactgaatctctgaaacgcaaatctcgctttgggaaaatcctcaaatggcagaccaaccgcagatttatgaactcaacaatggaaccgtggttgttaagatcaccaactatggctgcactatcacctcattgtaaattagccgatgtcgtcctgggattcgacactgtcgaaccgtacgtgaaaggtgcttgaccttattttggatgcattgtgggaagggttgcaaacaggataaaaaatggcaagtttactcttaatggaacggagtacactttgccaatcaacaagcctccaaacagtctccacggtggattcaagggttttga

SEQ ID NO: 236044 - DNA, 396 bp, Gossypium hirsutum
tttgttcctgaaaagtgcagaagtaaggcaaataaaagattctggggaaacaaatgccgatgagaaaattaggaataaactgatatacaaagagactagcaaaagatggataaatttaagaatatgttgaaacccaagccgaacccacagcaattactaagagattggcaaagaaagcttcgtcaagagtgtcgtaacattgaacgccaaatcagagatgttcagagagaggagaaaagtgtacaaaaagcaattagagaagctgccaagagaaatgacatggggtctgctaagattggagttcactttaaaaggatatggccctaatatgatgaataatataggcacttgcaaaagaaattgtaatgtcaagaaaagctgtgaaccgtctatatg

SEQ ID NO: 236045 - DNA, 423 bp, Gossypium hirsutum
tttaaataaaaaataaaaaagtgtaaaaacccagagctccaatgccttggagttcttaaaaagacttggtttttatagattttgaatattattgaaaatcaaagtctgggttttttttttgggggcggggcttttaaaaaatggggacaaaaacattatttgcagctgttcttattacatggttggctgcttttcaatgttgtaatggacataattttaattacaaagaagcccttacgaaatccctaatgttcttagaagcacaaagatcgggtaaactccctgctgataatagaatacattggagaggagattctgcactcgatgatggaaaagaagcaaatgtagaccttgttggaggatattacgatgccggcgataacgtgaaatacgggatgccgatggcgtttacgatcactacct

SEQ ID NO: 236046 - DNA, 429 bp, Gossypium hirsutum
tctgttgattgcagaggttcggagacaggatgatggcagtaccgttttaagtgaagaggagaaaggaagggttgcactaaaggaagaagtattgaaacaaatacgagagactgaactattcaaaaatgtgacgggatatttgggatttgagcgttcattgtgcgaaagtgaggcacctttgggttacacagatagcttggctgacattgcggcaaatgtttgttgtcaagtagctggacttctaactgggaaaattaggtcgttaaacgggtgctgtaaagatataaaacttcgaaaatctgtgtgtaaggagcctgtcacagtggtttctggaactagaactactgatggcactgaacaaatggttgatatgctgattccgtcatctgaaacaaagcccagttgttcatttgattttgaccaaaatag

SEQ ID NO: 236047 - DNA, 434 bp, Gossypium hirsutum
ttgtttaatttcaaggtagggagggagtcgctgaattgattgctagagagatccagatattgaagtgcagtcatattactcaagcatggggagatttgtccatggagatggttataaaacaggattagttgcttcaagagcaggctgtcacagaggcattccggaataaacccttgcaagttattaccagacaaatctaagtaataaagagaaggtaatgccccctttccccagcagagatgagaggcattttctattgagttgccttgcagattcagctgctgaaggtgcttgagactgtgaagctctacagaggacaaaattaggaaattatacataaaaagaaaggctgatccaattatagtttatatagtgaaacaacagtggttaccttcaggtgaagtgaatcccgcaatctgattccctcccagatg

SEQ ID NO: 236048 - DNA, 486 bp, Gossypium hirsutum
ttaattcccatggctttaatcaagaaacttcgcaaggcgaaaagggaggctccaccaggtgagaagccagaaccagtcagaacccacctccgaaatatgatcatcgtacccgaaatgattggtagcattatcggtgtgtacaatggcaagacattcaatcaggttgagatcaagcccgaaatgatcagccattaccttgctgagttctctatttcgtacaagccagttaagcacgggagacccggtatcggtgctactcattcttcaaggttcatccctctgaagtgaagccctttcatgctgcttggagcctcaatttggggtttactatttgagagttaaattttgtttgttgcactcttagtaatgaaaatttcacacccttttggttgcttttttagataatgagacttgacaatgttttaaagagtggtttgtttcatctattagttatgatagctggagatgtccttagattttgtgatg

SEQ ID NO: 236049 - DNA, 486 bp, Gossypium hirsutum
tcgtttttttcgatttttttctcaaaattgttgtttgaataattagagaagattaattgtttgaaagctgcggtgagctaaagctatggggagagggaaaatagtgataaggaggatcgataactcgacgagcaggcaagtaactttttcgaaacgaaggaatggattgctgaagaaagctaaagagctcgcgatcttgtgcgatgctgaagttggagtaatgattttctccagcaccggaaagctctacgatttcgctagcaccagcatgaaatcagtaatcgagcgatacaacaaaataaaggaggaacatcaacaaccggagaatccaacctctgaagtcaagttatggcaaagggaggcagcagttcttagacaacaactgcaaaacctgcaagaaaatcacaggcaaatgatgggtgaggaactctctggattgaccgtaaaagatttacagaatttggagagccagttggaaatgagcct

SEQ ID NO: 236050 - DNA, 440 bp, Gossypium hirsutum
ttcgttcacgcgtccggttttacccgaccttgttttacaatgttgttaggaacaagattcagcctgagttccggtggtgggatagagttgatgagtttatactgttaggtgctgttccatttcctactgatgttccaaggctaaaggagaatggtgttcgtggagtaatcacactaaacgagccttacgaaactctggttcctacatctctttatcataattatggcattaaccatttggtgatccctacaagagactactactttgcaccatctttgacatcaatatgccaagcaattgatttcattcatagaaatgtgtcacttgggcaagctacatatgtccactgtaaagctggtcgtggccgcagcacaaccattgtattgtgttacctggtatactataagcagatgacacctgtttctgcatatgattatgtg

SEQ ID NO: 236051 - DNA, 458 bp, Gossypium hirsutum
tttctttctaaattgtttgatgaaatcaaaagtacagttggagatcgaacagtagaggagaaagatgttgaaaacatgaagtatttacaagcaatagtgaaagaagtgttacgtaagcacccaccaacctactttttactaactcatgcagcgactgaggcaacaactttgggtggattcaacatccccattgatgcaaatctcgaggttttcttgcctgggattagtgaagatcccaaaatctggtcaaacccagaaaagttcgatcctgatagattctatatagggaaagaagatgcagatataacaggtgtaacaatggtgaaaatgataccatttggtgctgggaggaggatttgtcctggattaacaatggccactgttcacattcacctaatgttagcaagaatggttcaggaatttgaatggactgcttatccccctaattctgacattga

SEQ ID NO: 236052 - DNA, 454 bp, Gossypium hirsutum
ctcacgcgtccgcccacgcgtccgttggtacaagacaacttttaacgcaccgggaggcaatgaaccgttagctttagatatgagtagcatgggaaaagggcaagtatggataaatggccagagcataggacgccactggcctggatatatagctcgaggtagttgcggtgattgtgattatgccggaacttatactgacaagaaatgtagaactaactgtggagagccttctcaaagatggtaccatgttccacgttcgtgggtgaagccgagtggaaaccttttggttgtgtttgaagaatggggtggtgatccaactaggattgctttggttaaaagaactgcaactgcatgaagaagctctcagttgaagctgcctgcaattggtgtctaaagagatagatttgtgataatgaagctcagttagttcatattcagtacatatatactcagt

SEQ ID NO: 236053 - DNA, 287 bp, Gossypium hirsutum
gaaagctgaaatggtgacgatagtagtagctacaactagcgatccggcctcaatcaatccagcctacgccctcttggccatgcccggttggctccccgtgcctgctccctctttattgcaacagggaatcaaaagttttgctaataaaaatgtgcgatttcttcaacacgacaaaggcattgtcgaagaggacgatttggatcgccgttgggaggaagctaccggcgaggctgtcgatgaggttattttctttagcaaacacaccgctgtttccaaccgccctgctc

SEQ ID NO: 236054 - DNA, 361 bp, Gossypium hirsutum
tggacgcgtgggctggaggaagcctgcaactggccattttaaatgcacagattaagtggccagctggacctaaactacagtatcctgaagctcttcaccaattcgtgacttggatgcttcagcctcagcctagtgttcgcccttgcatagatgatatcatatttcacgtcgacaagttaatctcgaagtttttacagtgaaatatcataagagggattagggtgagaaggaaagggcattcaatcagtaatggacgagttgatcatctacattttagcaacttcttataaacgtgagtttcttcacaagtcttcgaaatacttctgaagtgacagcagtagcaatttctttatgaaaaagt

SEQ ID NO: 236055 - DNA, 282 bp, Gossypium hirsutum
tcgatacaagaacatggtcgagggaaagtgctggagactgtggttgagattcaagacaggcatgatgcagcgaaagagatcgagaaaagtttgctggaactgcactcaggtgtttttggatatggcggtgatggtggaggcacaaggtgaacaaatggatgattttgagcatcatgtgatgaatgcaagccattatgtgaaagatggttccaaagagctcaacactgcgaaacagtatcaaaggagcaccaggaagtgtatgtgtattgggattattctttt

SEQ ID NO: 236056 - DNA, 218 bp, Gossypium hirsutum
tccacgcgtccggaggacattaatggagtacagtggtattcccttgtacagatgcagaaactgcaaaaatccacttgctcttatcgacgatcttctttctaaaaacttcatagcgaaatcagggaaagcatatatgttcgaacatgcaatgaacatcgtgttgggtcccaaatacgacaagcagttgataactggtcggttcagcattgctgatgtat

SEQ ID NO: 236057 - DNA, 386 bp, Gossypium hirsutum
ttctttgatttttattgtctttgatgctatagccctcttcatatcattggctgttgtggtagtgcaaacctcgattgtagttatacacagaaaagcaaagaagcagatgatggcagttattaataagctcatgtggttggcttgtgtactgattacagttgcatttctagccctttcatatattgtagttggagatgagtggtggttagctaatctagttactggtatagggactgttatcattgcatcaacattggggacattgtgtcattgggtgattgtgaaccgtattgaggctttaaaactacgcagcatccggagatcttcaatgaatagtggatctcgatcattttcaatgtcatatgtgtctgacacggagattctga

SEQ ID NO: 236058 - DNA, 374 bp, Gossypium hirsutum
tccacgcgtccgcccacgcgtccgcccacgcgtccgtgttaagctaggagccaacaagttctctgagagacaacctattgggacatcagctcaaacagacaaggactacaaggagccaccaccggcaccattgtttgagcctgatgagctcaagtcatggtctttctacagagccggaatcgctgagtttgttgctaccttcttgttcctttacatcactgtcttgactgtcatgggtgtctctcaatctaagaccaaatgtactactgttggtattcaaggcattgcttgggcctttggtggcatgatctttgctcttgtttattgtaccgctggcatttcaggtggccatattaacccagctgtgacctttg

SEQ ID NO: 236059 - DNA, 324 bp, Gossypium hirsutum
ttcttttcgaaaggaatggctgaagcagaccaccaaattctctctgctgagatcaaacttgggtcacagtactatttctatatggagacacaaactactctagctgttccagatgaagatgacagtatggtggtgtacagctctattcaatgccctcaaattgcacatgaaacattagctcaatgtcttggtcttcccgcaaacaacattcgtgttattacaagaaggattggaggaggttttggtggaaagaccataaaagccgtctctgttgctgcagcctgcgctgttgcagcttacaaattacagcgaccagttcggaca

SEQ ID NO: 236060 - DNA, 265 bp, Gossypium hirsutum
ttagtatgttaggtactacagagacttcgttttggaactcaacaaggctcttgctgctgaccccaggattgagatttgcatgctccctgttggcgatggaatcaccctttgccgccgtgtcaaatgaaccaccaccaatgctaccgtcgccacagccgctactaccacccaagatcgacaaactttcatattttttttgtgcaatttcaaatatggtgtaaatttaatttggcatttataaacgcaatgcctatctaccattatc

SEQ ID NO: 236061 - DNA, 248 bp, Gossypium hirsutum
tccacgcgtccgcccacgcgtccgcccacgcgtccgatttatgaaaggtatacatggaaaatttattctgaaaggctgatgacattggctggagtatatggtttctggaagtacgtctcaaaactcgagaggcgtgagacccgaagatatcttgaaatgttctacatcctcaagttccgtgaattggtaaaatctgttcccttggccagtgatgattaaaagcttaatccctggttgcgctcgtaggg

SEQ ID NO: 236062 - DNA, 388 bp, Gossypium hirsutum
ttatgatgatacagactcagacagaactaaggggaagaagcttgatgtcggattttcggggactactaaacagtgggaggatacattcggcaaaagatactcgaagtcgggggccatgtatagagggaattctccatctcctcttgcagctattccttgcattcccgacattttacctaagaaaatagatgcaacaaatgagtttccgaacattattaagcttcctgagatgaggattgtagaggtacttttggagattgttgcagttaagaacttaccggacgaaaagaaggggaatctctttgtcttgttaagtaaaactcaacccgatgtattctgtaatactaagcagaaactgactattttatctgagtctgggaagaaacag

SEQ ID NO: 236063 - DNA, 414 bp, Gossypium hirsutum
ttcacgcgtccgctttcagcaactgatatcaggagtgagttattgccatgcaatgaaaatttgtcatagggatcttaagctggaaaacacgctgttagatgggagtactgtgccgagacttaaaatatgagactttggctactctaaggaaccccaacctacattgcaccagaggtcttgtctaggaaacaatatgatgtgaagacttagccctcgatctcgatgaacagatctcgcagctcatacaatgtaagccactttcgaaacagcaggttagagcattatgcgacaaggcaaaggaaatattaatggaagaaagcaatgtccaggattggactggtttgaactttcaggaaataatggatgaagtagaaaaaattcgaataacggtgcatactttggctttctgttccg

SEQ ID NO: 236064 - DNA, 364 bp, Gossypium hirsutum
  unsure (1)..(364): unsure at all n locations
ttcatctgcacttctgtatcttcatgaagagtgggagcagtgtgtggtgcatcgagacattaaatcaagcaatgtaatgcttgattctagtttcaatgtcaagcttggtgacttcggattggctaaactaatggaccatgagctaggtcctaaaacaactggattggctggaactttaggctacttggctccagagtacataagcacaggtagggctagtaaggagtcagatgtttatagctttggggtagtccttttagaaattgcaactggaaggaaatctgttgatcctggaagaaaatctgacatgggattggttgagtggtnntttggggtctttatgggacaggagagctaattttgg

SEQ ID NO: 236065 - DNA, 420 bp, Gossypium hirsutum
cttttacttctgttttttttctatcaagactctgtttttgccctgtttttttgtcttaccatccaactttctccaaccaaaaacaaaacaacatgggggctctcgattatatttcaaacttttgtactgtctctagaagaagaaccaaacgcaaaccaatgcagacagttgaaatcaaagttaaaatggactgtgatggctgtgaaagaagagtgaaaaatgctgtaaccaacatgaaaggtgtaaaaagtgttgaagtgaaccggaaacagagcagggtaacggtgacggggaacgtggaacccaacagagtgttgaagagagtgaagagcacggggaaaagagcggagttttggccgtacataccgcaacatgtggtgtattatccgtacgcatccggggcgtacgataaaaaggcac

SEQ ID NO: 236066 - DNA, 280 bp, Gossypium hirsutum
ttagaattcaacagatttaataaatggaggaaacgagggatttcgcgtgtgccgatcgtgcaagaagtgattgtgaagccaactcgtgcgacagtaagcatcttaaatgatggatccattgttgttgaagttggagggattgagatgggccagggtctatggaccaaagcgaaacaaacggctgcatatggtcttagtttgataaaatgtgatggcagtgaagagcttttggataaagtaagagttattcaagctgatacattgagtttgattaaggggg

SEQ ID NO: 236067 - DNA, 439 bp, Gossypium hirsutum
  unsure (1)..(439): unsure at all n locations
gcgttccttttaaccattgtataaatggacccatcaagaatctccctccgtcgattccacctccccgacgtcgacgacttcctaaaatgggcaagcgacgacaaagttactcgttatctcagatggaacaccatcacttccagggaagaggccttgtcgtatctccagaaagttgctataccccaaacttatcgtcgctccatttgtttagacgatcgttccatcggatacgtttcgatcaagccaggatccggcaatgataaaagcagagctcgccttgggtatgcagtgagtgcagggtaccggggacaagggattgctacagnctgcgttgaagaggccggttgctaatgccttcacagagttccaaggcctagtaagggtttgaagctttggtagaggtagaaaatatagggtctcaaagggtgttggagaaggt

SEQ ID NO: 236068 - DNA, 444 bp, Gossypium hirsutum
ttaaaagagagagaaaagaaaagaaaagaaatggaaaatctggctattctactactagtgattttcttggtagccatgccaatggcgtattgcgtcaaagaaggtgccgaggaagtagatgaatggttcgacaagcttccatacgcaaaacaaaaggttactaagctccatttcttcttccacgacagatttgctggaaaacacaacagaaccgccgtccgggtcgcccacggaccggagaccgacaaatcaccaacctcatgtggtctcgttttcatcatggatgacccattaacagaaaggatgaatccgacatccaaagagttgggtcgagctcaagggctgtacgcattttctgggcaagacgaactgagcctgttgatgtcgtttacttggtgtttaccaccggcgagttcaacggcagcactgttactgtacttggga

SEQ ID NO: 236069 - DNA, 416 bp, Gossypium hirsutum
ttattactacaataatctgaaagaaaacgaccttgagtatggaggagagcatcaaaattttttggaggctttaagccctagctgcctgtcccttatgaatcatcttcgcatttatatccctgaagtaattacttttaaaattctgcatttgatttgttctgaactttgaaattcagttggcattgaaatgttctaattttcatgggttccacagctgtttccggaactcaacaagatagtattcttggacgatgatgttgtagtacaacatgacatatcatctttgtggacattggatctcaatgggaaaatcgttggtgccgtcgttgattcatggtgtggagaaaactgctgtccaggaaggaaatacaaggactacttgaatttttcacaccccggaattccatctcacctcg

SEQ ID NO: 236070 - DNA, 450 bp, Gossypium hirsutum
tttccatggtcgcttctggcactacaggagtagctgtccctatacaaactcagccttctgctactttctctagttctccacatcagcttgcctaccaacaagctcagcacttccaccaccaacagcagcagcaacaacagcagcagcttcaaatgttctgggctaaccaaatgcatgaaattgagcaaacaacagacttcaagaatcacagtctcccacttgctcggataaaaaagataatgaaagcagacgaagatgtgcggatgatatcagcagaggctcctgtaatttttgcgaaagcttgcgaaatgttcgtcttggaactgactttacgctcttggatccatacagaagagaacaaaaggaggacactacagaagaatgatatagcagccgctatttcgaggactgatgtctttgattcttggttgatattattccagggatgag

SEQ ID NO: 236071 - DNA, 496 bp, Gossypium hirsutum
  unsure (1)..(496): unsure at all n locations
tgagcttatacgaggttctcaatgttgcaaagacggcatctcagcaggagattaagaaagcatattataagttggccttgagactacatcctgataaaaatcctggtgatgaggaagctaaagagaaatttcagcaattgcaaaaggtgatatccattctcggtgatgaggagaaacgagctgtctatgaccaaactggttgcgtcgatgatgctgaccttgctgnagatgttgttgagaatttgaaaacctttttcagggctatgtataaaaaggtcactgaggctgatattgaagagtttgaagtgaactataggggatctgactcagagaagaaagatttatttgatctttataaagaagtgcaagggcaatatgaataagctttttctgttcaatgctttgttcagatcctaagcttgattcacaccgtttcaaggatttgcttgatgaagcaatagctgccggggaactgaaagaaacaaaagcctacagg

SEQ ID NO: 236072 - DNA, 425 bp, Gossypium hirsutum
ttaaaagctagagtgttggcgattgaggttattccgttttcgaggggaagtgtatgggagcaacctccaccagacttatcatcgtttttgtacaagaatcagatagtttacttgggaatgtcgcttgttccttctgttacagagttgatactggctgaatttctttaccttcaatatgaatatgagcagaagcctatttacttgtacataaactccactggaacaaccaaggtggcgagaagttgggttatgactaaactataggctgcatagattgaccataaatttactcattaaagctgactttacaaattttgctgttggatttgcttccaaatttgggctaaacacaactgcttgtttcttgtacgtattacactcaaaggttaaactctatgccaaacatatgggaaaatcaactgagc

SEQ ID NO: 236073 - DNA, 401 bp, Gossypium hirsutum
ttaaggcactccttaccatgatggtctcttcttctttgatgttttcttccctgctagctatcctaaagaaccaccacatgtttactatcactctggcggacttcgactcaacccaaatttgtatgactgtgggaaagtttgccttagtcttcttaacacctggtctggtaaaaagaacgagagatggatacctggcatgtcaactatgctccaagttctggtatccattcaagctctaatcttgaatcagaagccttactttaatgagccaggttgggaacgtcttagtggcacaccaaaaggtgaattaatgtccaggcaatacaatgaagagacatttatcttgtcactaaagacaatgatctattcaatgaggaggcctccaaggcattttgaggact

SEQ ID NO: 236074 - DNA, 405 bp, Gossypium hirsutum
tttcacgcgtccgatttgatggtgctgaggccttcgcaagggaacaaggtcttgagactgttgagatgagccattttatcacccctgaaaacattgaaagacttaagcaggcacaagaatctgacagagttcagcttgattacactcaaccaattccaaaggaggtgccaaaagaagctgcagttgctgatggtgatagccagattggcactgttggatgtgtggctgttgacagtgaaggaagtttggctactgcaacatcaactggtggaatagtgaacaaaatggtaggccggattggggacacaccaatcatcggtgcagggacttatgcgaaccatctctgtgccatttctgctacaggcagaggagaagcaataatccgtggtaccatcgcaagggatg

SEQ ID NO: 236075 - DNA, 378 bp, Gossypium hirsutum
tctcacgcgtccgatttgagattgtcaaataataagctcgttggtagcataccagctggtttatttgatctgggattggaagatatggatctttctgataataggttaaacggttcgatcccgagaggttcaagtagtcttttcgagtctcttcgaaacttggatctgtctagaaacaatcttgaaggtacaattcctgcagaaatggggctttttgctaacctgaggtacttgaacttatcttggaacaagcttgaatcaagcataccaccagaactcgggttatttccaaacctgaccgtgttggatcttcgaaacaatgctttatccggtgatgttgcaggggatatatgtgaatctgggagcttggttattctt

SEQ ID NO: 236076 - DNA, 412 bp, Gossypium hirsutum
tttagtgctgctactgaatgtggttgcctaggaggtgctggtgaagcagggctgccattactgttcataatggcattgattgtgctcggactatttacggtgattggcatattttatagtgttctggttgctacaatggttgggcaaaggatttggcagcgtcactatcacatactcgcaaaaagaatgctgacaaaggaatatgttgttgaggatgttgatggagaaatgaatggatctgactggtctcctcctcctctcccacctgaccatattcagcagctgaaaacacttggccttctatgagttcagaattatattgccattgacaaaaacaacataatgtaaagatggactgactccccattctcgtaggtcagtcttgactacaggcttgttatgaatccactta

SEQ ID NO: 236077 - DNA, 389 bp, Gossypium hirsutum
tttacttcaattcacctaaggcagataattcactggcccttgtttctttgggagaaccacaacaagcacctactgcatcacagcagaatgccctcgttctctttgatatgttctctgatggtagcaacacctccaattctgtcaacacccagtcttcaggtttggctggacaaaccaaccctttgactcctcaaattcagcagcagcaccagcagcagcacaattttcatgcaaatggaactgcaccaaacatgggagcacctcctcaatatgagcagccatatgctcaaggcaccgttcctgcctggaatggtcagctggttcagcagcaacagccgccctcacctgtcaatggtgctgagagcagtggctcactaccaccaccaccc

SEQ ID NO: 236078 - DNA, 388 bp, Gossypium hirsutum
tctagagaaaagtcaaggagtgccagaaataagcaagctggtggtgctatcgtcatggatgctgatgctacctctgcactgcacaagaagggagtgtctacaacagatgattccttcaaattcatatggttccagccccatgaaagtgtaataaaggccatatacaatggctctgagtttatggaaaatgcaactgctggcaatgatgttggcataattttggaatctacgagtttctatgctgagcaaggtggtcagatttttgatactggatatcttgatggttcctttggctccttccaagtatgtaatgttcaaatttttggaggttttgtacttcatattggttctctttctggagcttctggcaaattctctgttggtgata

SEQ ID NO: 236079 - DNA, 440 bp, Gossypium hirsutum
ctgttggacgtgtacaagataaaagttgaacttctatgaatttgatgtatttaggttggttgaaaaaagctatagcttacagaaggttgtaccttaatggccaataatctgggtaacttaatattgcgagcagctagactctattcattgacattctctgatcaatcaatgagtttcttaatgcaggttccattatatgtggcaacaaaaatggcatcaatcaaaagatcgtctttctttgttccatcaacagacggatatgctcgtgcagcaatgcagtggataggctatgaacctcattgcacaccctactggccccattccatcctttggggcttagcttattcactgccagagagtgtggctgatgcatggcgtttgcgctcttgtcttggcattcgaaagagggggcaaatgaaagattctaggaagaaggaatg

SEQ ID NO: 236080 - DNA, 463 bp, Gossypium hirsutum
tcctttctgttcttttatatggttctactactggtttctgtcgcgttttctcttcggaaagctgtcgttttccggcgatttttaattttggtgcctctaattccgatactggtggcttcgctgccgccttcattcaacctaagcctcctaatggagacaccttttttggaatgccgtctggaagagtatgtgatggacgactcatcgttgatttcaccgctgagagtttgggtttgcccttcttaagctcttacttgaattcactggcaaccaatttctcacatggtgcgaattttgcaacggtgtcttccaccataagattaccaacggctgatgttatcccccaaggccaggagaaatatatgcaagtctaatgccaagggaggaaacttttgccaaggcattatacactttcgacatcggccaaaatgatctcacgcatagtctctttcttaacatgagc

SEQ ID NO: 236081 - DNA, 329 bp, Gossypium hirsutum
ttcacgcgtgcgtctgctgcatccaactcctaggatgatcctgctaaggaggctgcaaagttcactgctcaggatatcatcatgaaccatactggacaaatcggaaacggatatgcccgagtcctctgctgccacacctcacacattgctgataagtttgctgaactattgaccaagattgacaggcgatctggtcaggagctcgagaaggaacccaagctcttgaagaatggcgatgctggaatgattcagatgattcccaccaagcccatggttgtggagaccttttctgtgtacccacccttgggacgttttgctgtgagggacat

SEQ ID NO: 236082 - DNA, 475 bp, Gossypium hirsutum
ttgaccatgatgctcaaaggcttgacgatggctttcacttcttcaaaaccaacatatttgacaaaaaccgagaatgtttcaagaaacttgcagaagatcagcatcccaagttcttggtgatttcatgctcggattcacgagtaagcccttcagtcgttttgaatttcaaaccaggagaagccttcgccggccgcaatattgctaatatggttcctcaatttgaccagttgagacacactgaaattggttcagtcatcgagtatgcagttaaagaacttcaggtggacaacatattgataatgggacatagccgttgtggtggcataaagaggcttatgagtcttccagatcaaactcaaacatatgacttcattgatgagtgggtgaaaattggtttgccagcaaagaaaaaggtactggaagaagctggtgacctgtgtcccgaacaacaaagaacgctttgcgaaaaggaatc

SEQ ID NO: 236083 - DNA, 130 bp, Gossypium hirsutum
gtaaaataaagctaaaagaaaatgcctgctgtaggtggaatcgggccgggtaccggcaaggaatacccgggtaatctcaccctatacgtccttgtcacctgtattgttgcagctatggggggtttgattt

SEQ ID NO: 236084 - DNA, 308 bp, Gossypium hirsutum
tccacgcgtccgcccacgcgttcgcccacgcgtccgatttgagaccaccaaatactactgcactgtgattgatgcgcctggacaccgtgactttatcaagaacatgattactggtacctcgcaggctgactgtgctgttttgattattgattccaccactggtggttttgaggttggtatctccaaggatggttagactcgtgagcatgctttgcttgcttttacccttggtgtcaagcaaatgatttgctgttgcaacatgatggatgccattacccatcaatacttgcaggctaggaatgatgaaa

SEQ ID NO: 236085 - DNA, 307 bp, Gossypium hirsutum
ttagcttgcagttcgtgtctcggaatgcgggttggctccattgttgtcttctggctctacaagcgagttctctggaagcctttttgtatcatacggttatgcagccccggaaatcgagttcggaagctatacttgccagagtgatgtctatagcacttggcgtcgtaatgttagaactgctcaccgggcgagaatccttcgataggtcacggcctctgggggagcaatttctcgttagatgggcaattcagcagcttcacgatatcgatgcattagttaggatggttgatatcaccctaaatggagt

SEQ ID NO: 236086 - DNA, 386 bp, Gossypium hirsutum
  unsure (1)..(386): unsure at all n locations
tccacgcgtccgtgtctttgtgaagaacactctcccacctactgccgccttgatgtccgcgatttacgaggaaaacagggatgaggatggctttctttacatgacttacagtggagaaaacacatttggttcccctttacttttagcatgattcaatgcaatggaaaagcttatgtatatatagctcaaagaaaaggtgtaaattctatatggtgtttacttgtgtaaatgctttgccctttacgatggtgtttacttttaactgtctggacttggaaccttgtttttctgtaaatttaatgtctgaaactaactttatcactgnaaaaaaaaaaaaaaaaaaaaaaaaaaaaaaatagaaaaaagaaaataaaaaaataaaatgg

SEQ ID NO: 236087 - DNA, 493 bp, Gossypium hirsutum
  unsure (1)..(493): unsure at all n locations
tttgctctctttgttcttcgttctctttattcttcgctctacatttattcaaataaagataatgttgtaaagtatacaccagatcagattaggaaaatggaagaatcagataagattcgaagagctagtgaacctatagagcttgttaaattgattaagcgaataaagcatgaattttcaagtgatgaatcgttggccgaattgccacgggcggttaagcataagataactgatgaaatcttacagagattgagaagtttgagaccaaatgccagtatcagtgaccagcaagaagcggttgaaacctggcgcaaggagaaactaaaagaagccaaaacgttggccctcggaggagaggggttgaattcaactcttttgcaagaggaagagnggatgttagtaaaagccttgcagtccaattgggctgcactatcggaagaaatcggcctctggatacccactgaagtcattaatcaagaacatgatgataagc

SEQ ID NO: 236088 - DNA, 331 bp, Gossypium hirsutum
tccacgcgtacgtccacgcgttcgatcgtattgaacgctcttgagagcaagtacaagccaagctatagaggggatggagaagaggaaaagagatcgtgcttaacggattacattacacgtcttgaaagcaaatacaagccgggttatggagggaacgatgttgaggtaaagactgctaacgattcattcattaccaccgattacatgagatacatcgtgaaatactatagcgttcacggataatggaagcaccatgatcttaaggtcaaagactctaaaacccttctctttggtgaaaaacccgtcactgttttcggaatcaggaaccctg

SEQ ID NO: 236089 - DNA, 180 bp, Gossypium hirsutum
ttcacgcgtacgggatcctgctgctagtgacttgccttaattggatagcttggttcccattcttgttgttcgacactgactggatggggaaagagatttacggaggaaaagacaaggttgatgaccttcaggaagagcttgacattgatgttatggtatcatggagagcctgagagaaac

SEQ ID NO: 236090 - DNA, 368 bp, Gossypium hirsutum
acccgtccgtaaaaactaaacagaatggctagcctggcagcagatatgtttgtaggaagggaaagatttgctacatcactattgatgcggctcaccacaatatgtcatcatatgcctttgcgaagatcaaagctgaccccacgagattgtggctggtcaaaagatctgagtccagcgtttgtgccgacgtcactgagtatcacccgaatattaagaactggcagattgaaagctatggaaaggcacaacagttccgcagaccaaaagttcacttgcgctgtagtcctggacaatccatctctttcattaaattcgccagttttggaactcctttgggaacttgtggaagttaccagcaaggcccttgc

SEQ ID NO: 236091 - DNA, 373 bp, Gossypium hirsutum
  unsure (1)..(373): unsure at all n locations
tccacgcgtccgcccacgcgtccgcccacgcgtccgcccacgcgtccgatgtggcttagtggtgcggaagctctgggaactgatgcagttcctgggtttttacccactgaggacattgtagaaaagaaagatgatgaagaattggcagtttctgctgatgaagatcagaacttatgtgcattatgtggtgaacccttcgatgatttttatagtgatgaaacagaggagtggatgtataggggggggctgtctacatgaatgcacccagtgggtcagttgaaggcattgatagttcgcagttaggtcccatagtgcatgctaaatgcaggtcagagtctgntggtggttccccctgaagattttgtacggtatg

SEQ ID NO: 236092 - DNA, 342 bp, Gossypium hirsutum
gccaacaagtgccttggatccgatttcgacacaaaacatagaggatgtgatagtgaagcttaagaagaaaaggagaatgacagttgtaatggtttcccacagcatcaagcaaatccaaagggttgcagatgttgtttgccttcttgtgaatggtgaaattgttgagattttgaagcctagtgaactctctgaagccaagcatcccatggcacaaaggtttcttcagctaagttcttaatttactttctatatagttgttatatttccctttttttctttgtgcttaggatttgatgttaatttggtttaaacaatgttcagcattgcaagtttatttgttgt

SEQ ID NO: 236093 - DNA, 228 bp, Gossypium hirsutum
tccacgcgtccgcccacgcgtccggccagtggtggaaccggagaagaagaggaacacagagggcatcactaggtacttagagaaggtgccgtattagtgtgcactcgttgtgcccggggtcgaccagcaggcttcaatagcaggcccagaccacccatctttgtcaccagtgatagccctaatgcactgaggagtcacgttatggaaatagctaatggttctgatgta

SEQ ID NO: 236094 - DNA, 489 bp, Gossypium hirsutum
ttaaactggtgtggagcctttagcattgatgtcacaacttgctacagtgataaccgatgttcttgctggcagttatgatttctcccaagaaaggcgcagaaggaagttctttcgacggcagccattgtccaaagaagatatggagaaactacgacaagcattgaaaacgttatctgaggctgaaaaacaactgaggatgtcaaatgacaaattaacatggttaacggcagctttgcttcagcttgctcctgatcagcagtatatattgcctatttcttcttctggtactagttctcgtcatagtccattgcctctaaatgacttgggtggaagagaaattgtccataaaggtggtgagcttgtcgagctgcgtaataacaacactagagtgttgtcaacgaatgctaggcctgaaaatctctatgccggaagttcaggggattttgaaaccagtatcatgaaggggaagagacatgctttagctgggat

SEQ ID NO: 236095 - DNA, 499 bp, Gossypium hirsutum
ttcacgcgtccgcaatttttgtaggagaggcttccaaacgatcccgttgtccggcggcgcctcccctgccaagatgtcaacggagttctattcgttcgggccatataagatagaccccaaggaagtcttctactccacccccctttcctatgccatggtcaacctccgtcctgttgttcctggtcatgtacttgtctgcccaaggcgtgaagttaagcgatttgctgatctcactgttgaagagacccaagatttatggctaacagctcagaagattggtggaagacttgagtgcttccataaggcgtcatcactcacttttaccatccaagatgggccaaaggcagggcagacagttccccatgttcacattcatatacttccaaggaaagatggtgactttgagaggaatgatgaaatttatgatgaaatagatgtgaaagagaacgaactgaaggaaaagctcaacttagataaagaaaggaaggacagaagcctg

SEQ ID NO: 236096 - DNA, 372 bp, Gossypium hirsutum
tgtgatgattcagaaagggataaaggaaattcctgagttgttcatcattgggaacccagacatgacaattgtggcatttggatctgctgttctggacatatttgaagtcaatgatatcatgtctggtaaaggttggcatttaaatgcattgcagaggcccaacagcattcatatctgtgtcactcttcaacatgtaccagtagttgatgccttcctccaggatttgagggaagccgtacaaactgtgaaagaaaacccagggccgataagtggaggtctagcacccatatacggtgcagcagggaggatgccagatcgcggcatggctcaagatttgttggtaaattacatggatggttcatgctagtgccc

SEQ ID NO: 236097 - DNA, 342 bp, Gossypium hirsutum
tcttctggaagtaatcttgagcagactatccaacaattgattgatatgggtggtggcagctgggacaaagaaacagtaactcgtgcacttcgagctgcttataacaaccccgagcgagcagtgtattatctatattctggaattcctgaattggcagaagtggctgttccagtgcctcattttccttcaagtcaaaccactgaatccggtgctgccccagttgctcctgtttcaggggctcctaattcatcacctttgaacatgtttcctcaggaaacactctccggtgccgatgctggaggacttggatccctggatttcctccgaaacaatcaacagttc

SEQ ID NO: 236098 - DNA, 338 bp, Gossypium hirsutum
tcctccttttcagcttctactctaaaagggtcctgcttttaatgcttgagcttctgtctcggctttactagctcgctcattcagttctccagcatctttttgagcatgagaaatactattctcaagattatttatcttctccaagcactgctggtattgaacatgattagcttctctttcagcctgtaatttggtgagggcatccttcaaagtctggacttcagcttcagcttgacttgctcgttcatttaatccctgggaatcctcttgtgcacgagagacttctctctctaggttcgctaatctatccaagctctgctggtactcaagtaggcctg

SEQ ID NO: 236099 - DNA, 358 bp, Gossypium hirsutum
tgtgatgccatacaagaagtagaagtaggtaaaaatgaggtggacaaagacaaatgagagccaaatgacctaaccagagaagaagaagactcaaataagtaaaggccattcgagtgtctaccaatctccttcatcctgccattggagagatcctgcaaaaggcagaaatcagggttaaaaacgactgcacaatgtaaatcgtgagccgatttggaaacagaaataagattgtaatgaaaggtgggaacacaaagaacatcagtaaaggtaatatgaggagataaaataaaagaaccagaatgagtaataggagaatgtttaccatttggaagctgaacaaatcgggagttaagagggt

SEQ ID NO: 236100 - DNA, 287 bp, Gossypium hirsutum
tctcacgcgtccggagaaagagaaaccctagccagtcatagccacccacaaccacaagattcaacccaaatcaaaacacacagagctcggcagaaatctgctgtgttttagggtttgagttgcaaaggtctcaagaaaaaaatggaagaaatcacccaaggagtcaacaacatcaacttggccgccgattcccacaagaagaaccggattcaagtctccaataccaaaaagcccttgtttttctacgttaatctcgccaagagatatatgcaacagtacaatgaggt

SEQ ID NO: 236101 - DNA, 314 bp, Gossypium hirsutum
tccacgcgtccggggaaaactctggctgaggtttgctgtgattctttgaaagaattcaaccccatggttcatgttgctgtggaaacaggcgatatatcaacatttggtgtcgagttctttgaaaagtttgatgctgtgatcatcagttgttgctctcttggaaaaaaagaaattgatcaatcaaaagtgtcggaaattatcaaagcgtgtagcattttatacagttgagtgtagaggctcttgtggcgaaatgttcgtcgatttacaggactataaatattcaaagaaaaagctcgaggaaaccattgaatgcc

SEQ ID NO: 236102 - DNA, 213 bp, Gossypium hirsutum
ctcacgcgtccgcccacgcgtccgagctcctctttcgttcttttgttcactaagtattgtaaaagatggccgacggtgaggatattcaacccctcgtctgtgataatggaactggaatggtgaaggccggttttgctggtgatgatgctccaagggcagtttttcccagtatcgttggtcgtccccgacacactggtgttatggttgggatgg

SEQ ID NO: 236103 - DNA, 369 bp, Gossypium hirsutum
tctgtaaaccacggccctctataatactcttacacacatagaatctcacttttttgttttctggacttctttgacgaaaataggaactcttagaaatggcgatgaaaagcttcagcgttttcttcttcgttctactcctcctcgcttctcctattctccaagttgctaggtgtcaatctgaagcggaggcagatgttgcagaagctgttgaagaaggtgaacttgggattgttggtgaggaagctcaggatttcggttctgggaattttgactcggctccaggagttgaaactctctgtcttttccctaaaaacagtgccaaatttatatcagccggagaagagactgaactccttgttggggtggaaa

SEQ ID NO: 236104 - DNA, 258 bp, Gossypium hirsutum
tctacgcgtccgcccacgcgtccgcgatttttgcttttgtataacagatatctgtatgatattctgaccaaggccagtgtggttaagaagaaaattccagttctcatttgttgcaataaatccgacaaagtgactgcacataccaaggtgtttatcagaaagcaaatagaaaaggaaattgagaaactgcgggcatcaagaagtgcaatatcagcagctgatatttcaaatgatttcactctcggagtatctggagaa

SEQ ID NO: 236105 - DNA, 277 bp, Gossypium hirsutum
atccgtcagaacggctgactgctcatgaagtattatgtcatccttggatttgtgaaaatggcgttgccccggataaggcactggacccagcagtactttctcgcctcaaacaattctcagcaatgaataaattaaagaagatggctttacgggtaatagctgaaagcctctccgaggaggagattgctggcttgcgagaaatgtttacggctatggatactgataacagtggtgcaatcacatttgatgaactcaaagctggtttgcgaagttatgg

SEQ ID NO: 236106 - DNA, 357 bp, Gossypium hirsutum
  unsure (1)..(357): unsure at all n locations
tttagtggctttcctatcttcattttcattcgacttctccgacaaaggaaaccagagaaaaatgaccaagtgttacccaaccgttagcgaggagtaccaaaacgccgttcaaaaggctaagaggaagctaagaggtctcatcgctgagaagaactgtgctccactcatgctccgtctagcgtggcactcagctggaacttttgatgtcaagaccaagaccggaggtccattcggaaccatgaagcaacctgctgagctcgctcatgctgctaacaacggtctcgattntgcagtcaggcttctcgagccgatcaggagcagttccctatcctttcatacgctgacttctatcagctt

SEQ ID NO: 236107 - DNA, 490 bp, Gossypium hirsutum
tttcacaggtgcgcatggtcgaagatgatttgatgtacaacacatttctagaggtatatgagaaccactgtgcaaggaatgatcgagagccggatcttcctattacctatttcaaggagcagttaaaccaagccatatcaggacaaatttcacctgaagctgttgtagatctccgcctccaagcttataacgatataacgaagagtcttgtagcagatggtatcttttcccagtatatgtacaagaccctgcccagtggcaatcatatgtgggcttttaagaagcaatttgctatccagttagctctgtcaagtttcatgtctttcatgctacaaatcggtggaaggtctccaaataagatattatttgcaaaaaacacggggaaaatattccaaacagattttcatcctgcatatgatgtgaatggaatgattgaattcagtgagccggtgcctttccgtctgacaaggaacatgcaagcattcttctc

SEQ ID NO: 236108 - DNA, 346 bp, Gossypium hirsutum
aagttggaacactattgcaagcaaagcaggtaactaatccaagtaattgaatagatttctttttcctttgttttaaccttgtttttgcaggtttgaagaggtgtggtaaaagttgcaggctgagatggatgaattatctgaggcctaatattaagagaggaaatatatcagagcaagaagaggacttgatccttaggcttcacaagctccttggaaacaggtggtctttgattgcgggaagattaccaggaagaacagataacgagatcaagaactactggaattctcatttgagcaaaaaaataaagcagaaagagaaacaaggctgcaaagatgaaaagagatc

SEQ ID NO: 236109 - DNA, 379 bp, Gossypium hirsutum
tccacgcgtccgcccacgcgtccgcccacgcgtccgcggacgcgtgggggcttcttctttttccaggttttcccagactttgcttctccttgtggttttctggggaatcaccagcagcagcaatgctcaactttcaaccgattattactcagaatcatgcccaaacttgctttcaactgtcaaattcactgttcattctgctataatgaaagaggcccgcatgggtgcttcactgcttcgactcttcttccatgactgctttgttattggatgtgactggatcattgctactggacgacacgtcgtcgttcacgggagagaaaaatgcagtcccaaatcgaaactcactcggggattcaatgtgattgacgacatcaag

SEQ ID NO: 236110 - DNA, 330 bp, Gossypium hirsutum
tccacgcgtccgatcgttgggttcttgggggtattttgcttgcggctgctaccttgtcgatttcagtatggaatattgttcagatgggaaccgtcaaacaatatccacaagtgatgaaagtggcctcgtcttatagcttagttgggactatccagtgccttgttttttctttgatcatggaaggagatctagatgcatggaaactgaaacgcaagccggatctcctactcattattgtgacaggagtatttgggagtattatccgtagcaacgttcatttagcatgtacgagaatgaaaggccctttttatgtgcctatgttcaagccct

SEQ ID NO: 236111 - DNA, 502 bp, Gossypium hirsutum
tttaaccataacttttttggttttgttccagtgaactgttcgctgaactcactgatagaattgtgccggtcgcaatcaacacaaaacaaacagttttccacgggacaacagttcggggacacaaattgttggatccttattttgtattcatgaatccgatgcctacttacgagatcaccttcttgaaccagctgcctacagagcttacttgcaaaggtggaaaatcagccattgaagttgcaaactacatccaaagggtgctggctgggacattgggatttgagtgcaccaacttgacaaggaaggacaagtatgccatgcttgcaggaacggacggtcgggttccatccaagaaagaaaaggaaaaggctctagtactttaaaaaaaaaaaagaagagatgatttatattaatttggccattgtttttcattacgttaaaactttgtcttacaaataaaaaattgtttgtgatgctagttataaaaataacaaatatgtat

SEQ ID NO: 236112 - DNA, 447 bp, Gossypium hirsutum
ttcacgcgtccgcccacgcgtccgaaaaacttcttctttttttttgtgagctatggagatttagtgaaaattgttctttggatttggaggtaaaagtaaaacatgagagcaattcctggaagtccagggactttgactagcctatttttgaggattatgcagtgtgtttttgcagctggttcaattgcttccatgtctacaacttcaaacttcttcaatttcactgctttctgctaccttattgcttcaatgggattgcaagttgtgtggagctttgcacttgcaatattagacggaattgccttggtgaaaaagaaggtcctccataatccagttttagtcagctttacgttgtcggagattgggtcaaccacttttcaaaccttcaaaccctcttgatattttttactgccaatgaaaactcaacttttatcaaattttacacag

SEQ ID NO: 236113 - DNA, 367 bp, Gossypium hirsutum
ttaaaatataatagaaacagcgagatctgctgcgagctgattcgaaaatggagtatcgcaaaatcaaagatgagcttctgtaagtaatgttcctccaagggaacaggccaagtggaaacgcaagacagttgttacagttgcattgacttttcttacaagttcacaagcaatacttattgtctggtcgaagagagctgggaagtacgagtatagtgttaccacagccaactttttggtggagactttgaaatgtgctttgtcacttgcagccttggcaagaatatggaaaagtgaaggtgttacagaagataacaggttgagtacaacccttgatgaagttattgtttatcccattcctgctttactt

SEQ ID NO: 236114 - DNA, 395 bp, Gossypium hirsutum
tctcacgcgtccgcccacgcgtccggcaggaatcaccatcatgggttacgattggggccataaaaaaccaaagtccaaggctgtgatccctaaaaaggccaggtccgacaacccgtacctcaggttgttgatcaagctgtacaagtacttgcacacccgtgtcccctgcgggttcaacaaggttatcttgaagcgcctccaccacagccgttccaacaaaatccccatctccctccagaccctcatcaaaaagatggacaagaagaccgacaaggttgccgtgattgtgggatccatcaccgacgacatccgtgtacaagaggtgcccgcgctcaaggtctgcgccttgcacttcactgaggccgctcgtgcccgcatcatcaaggcgggtggac

SEQ ID NO: 236115 - DNA, 399 bp, Gossypium hirsutum
ttccactcgtgcggatcaattgaactccaaaaaacaggtacaggaagtttcatagatgaaaaggggttccgcagcgctgtatacatgatcgacattggacaaaatgatctgttaatggctttgtatgcatcaaacttgacatatgaaccagtatccaaacagatcccttcttttcttgcagaaatcaaattagctattcaaaacatatactcatatggtggcagaaaattttggatacacaacaccggtccgttaggatgtgcgccgaaggagcttgcattacatcctcataacaagatccgatcttgacagaatcggatgcttccgcgtccactacgatctggcgaaagcattcaatcgaggattacgtaatatctgtaaagaaatgagaactattct

SEQ ID NO: 236116 - DNA, 462 bp, Gossypium hirsutum
ttaagtttcgcagccgtaattggccattgattatagcattgacagctagtgctgaggatcatgtgcgggagagatgcctacaaataggaatgaatgcaatccttcagaaacctgttttattgcaaggaatggcagacgagcttcgaagagttttgcaacggacaggggaagggatttgaggagccgcttatactttaggccaatggggactgcatacttattcaaccccgggtaggcaggacaggtcttttgatacttggcctgccggtatgaggaggtagcctatttgatttccttacatgttcctaaacagcttgccgttcacctggttagagcagagagatcttcaacatagcatttgcattctgtcattccatggtataccaacatgtaggcattaaattttgctaaccattttgctcattgaacttattaccagaatttcatggaatgactgggggt

SEQ ID NO: 236117 - DNA, 402 bp, Gossypium hirsutum
ttccacgcgtccgcccacgcgtccgcccacgcgtccgatcaggacctactaggtctgctagattccactctgatggagcaaagtttggaggatttaattcgactgacaacatttttcgaagtcacaatgaagcaactgcacccaggaaacctcccccagttgagagtaaattgccttgcagccttgaggagctgtacactggatcaactaggaagatgaagatttctagaactgttgtcaatgctgcagggcgacaagtacaggaatcagagatattaaccgttgatgtgaagccggggtggaaaaaaggaacaaagataacattcccggataaaggaaatgagcagccaaatcagcttccagcagatcttgtattcgtaattgatgagaaaccccatgatt

SEQ ID NO: 236118 - DNA, 458 bp, Gossypium hirsutum
tctcacgcgtccgcccacgcgtccgcccacgcgtccggacctccctccggttacagtccctccaattaacctccctccagggacggttcctccagtaactaagccaccaagtgggaaaccctgcccaacaccaccaaccaaggacacttgccccattgacacactgaaattgggtgcttgtgtggatctgctgggagggttggtgcacattggactaggtgacccggttttgaatcaatgttgtccggttctttcaggacttgccgagctcgaagctgcggtctgcttgtgcaccaccctcaaacttaaggttctcaaccttaaaatttatgtgccactggctcttcaactccttgtcacatgtgggaaaacaccccctcctggttacacttgctctctctaaaaccaaggttgctaggttgatggaatggacatgagaagatgtcgagcttttctct

SEQ ID NO: 236119 - DNA, 379 bp, Gossypium hirsutum
ctcacgcgtccgcccacgcgtccggtggcaagtttacaacactcttggtggcagtcatggtatacctcgagttcactataagggtcgtcaaggtgactattacgttatggttatggatatgctgggtccaagtctgtgggatgtttggaataataactctcatacgatgtccatagaaatggttgcttgcattgctattgaagcgatatcaatattggagaaaatgcactctagaggctatgtgcatggagatgtaaagcctgagaattttcttctaggtcctacaggaacacctgatgaaaagaaattatttcttgctgatcttggattagcaaccaggtggcgagatagctcaactggtttgcatgttgaatatgat

SEQ ID NO: 236120 - DNA, 434 bp, Gossypium hirsutum
ttgcctggcatgcaaagctatagagggttctttcgatccaaatggaccgaaacatttcattttggttgctcaaactgtagtcttacgtgaagaaattttgtgagcattcatcagctcctctcagtttgagggttgaaccagagatatttcatgcagaagaaaaagaatggcatcacttacaccaggagtgttattaaagcttcttcagagtatgaactctaatgtgaaagttttaggggaataccgatccgtgctactgcaagtgatcagcattgtgcctgctttaacaggatcagagttgtggctcaccaaggtttcttcattaaagtatctgattcttcacattcaacatatgtttccttgtcacaggaggacaatgagttgatcttgaacaataagttgcagcttggtcagtttttttacgtggagagagt

SEQ ID NO: 236121 - DNA, 384 bp, Gossypium hirsutum
ttatgaacggaacttgggattcgttatatccggaatggatcgatgaggagcaagaagaaaaggtccctgtttgcccctctctaccgaagatcgaagtccccggaatacgtcttgatctggttgctgtcaagctgccttgtagaaatgagggtaattggccaagggatgttgctaggctgcatttgcagcttgcagctgctagtcttgcaacctcggccaagggcttttatccgatgcatgtgcttttcatttcaaagtgctttccgattccgaacatgttcacttgcaaagaactcgtagcacgcgaaaacaatgtctggttatacaaaccagacttgaatgtgttgagagaaaagctccagttccctccaggatcttgtgaac

SEQ ID NO: 236122 - DNA, 461 bp, Gossypium hirsutum
ttaaaaatccacagactggtttgtatgctcttttcagggtattatctcaaaggggaattgcaaaaaagatacaggtgattgcaaaagctagcgtgccaataattaagtttgtagaaaagaaaagcggtgccgcatttgatataagctttgatgtggataatggaccaaaagctgctgagtttatcaaggaagcagtactaaaatggcctcaattacgaccattgtgtttgatcttgaaagtatttttacaacagagagacctgaatgaggtatattcaagtggaataggttcatatgctctccttgcaatgatcgtagccatgttgcagaaagttacagcggtggttgatgcagctttggaggcccatctgcactgtccgcagctatatctttatagcatagatgaaagggtcgttccgtataacactgtcccccttctctgttgtcagaaccccacagat

SEQ ID NO: 236123 - DNA, 241 bp, Gossypium hirsutum
tgtaacccttgatttgtctagcaatgatctgcatggttcggtcccacatgagttatcaaatcgtgcttatctgaacaatctgatactgtcaaacaataggctttcaggctcaattccataccaattatcaggtttggataggctgaaaaggttttctgtagcaaataatgatctctcgggtgctattccttcatcttttgagaatcgtgataaggcagattcttctgggaacagtggtctt

SEQ ID NO: 236124 - DNA, 433 bp, Gossypium hirsutum
ttccgtagaactttttattcttgtttttgtttattgtaatgctggcttttttgataaggcgcgcgagactaaattgatccgattataacaaatctgtgattaccggtggcggctgcgccgtcttgattctttcgtccaagggagcgtagatgtcggggccactagatcgatttgctaggccttgctttgaggggatttcaggcagtgatgaaaagagagagaggaagtctgattttgagaactctgaagatgaaaggcgcacgaaaatgggatctctaaaaaagaaagctttaaatgcatctactagatttaaacattctctcaagaagaagagtagtaaaaggaaaagtgatggccgtgtcagctctgtatccattgaggatattcgcgatgtcgaggagctgcaggctgttgatcaatttcggcaagcatt

SEQ ID NO: 236125 - DNA, 382 bp, Gossypium hirsutum
tgtcttcgcatcatattcactcaggatttaaagatattattttgggagttctgcgcacgtagacatgaagaactttttccgcgtcgtttggttgcacctcaggtaaaccagttacttcaggtagcacagaaatgccagagcacaatatctgaaggtggatctgagggggtttctcagcaggacttgcaaacaaacagcaatatggtcctgacggctggacggcagcttgtgaagagtttggagtcacagtcattgaatgacttgggtttttcgaaaagatatgtcagatgtttgcagatcgctgaggttgtaagtagcatgaaagatctaatagatttttgtcgggaacacatggctggggcaattgatggcttgaaaaact

SEQ ID NO: 236126 - DNA, 417 bp, Gossypium hirsutum
ttcacgcgtccggtggttgctgacagctgcttgcatcaaaacgggaaggccacaaattgcaagacgcgcaatagaccttgctgagacacgcttgttgaaagatgggtggccagaatattatgacggcaaactcgggagatatgtcggtaaacaggccaggaagtatcagacatggtcaatagcaggatatttagtggcaaaaatgatgatggaggatccgtcgcacttggggatgatttctttggaggaggacaaacagatgaagccattgataaagagatcatcttcttggacttgctaaaaaaaggaaaaaaaagaagaaaaaaacagaattgggaaatggaaacagaccaactttcgaattttcattgtaccggtaccagtcttgcttcttttacgttatgtttccaagtcaag

SEQ ID NO: 236127 - DNA, 420 bp, Gossypium hirsutum
ttgttgatctcaacatgttgctcaaacgcgggaaaatagtcagcgccaaagccattgctaacctccccatgttccaccgccaccaggtctcttcatcggcggcggcgccagcccaggagtacgagttcagctgcagcaacacccctaactacatcttccctttcaacctccccaccaagaagaagaacagcattaacaactactaccaccacttgttcgcttgtacccacgcgcctcctactcacgacgacgacaccgccgccatgaacgccttcaaggttgtcttggagatgctcaacaacaacatgggagtggaaagcgatgctgctgttattgcggcttcccctatgttaccagggttcggacaaactccactggtgagacaacttagaataactgactcttcctttccttaagaga

SEQ ID NO: 236128 - DNA, 380 bp, Gossypium hirsutum
tttttagatgatcccaataatactggccgggctgcgcaacttgctgcacgcaaagagcaatctgcacttcgggctgtcatcaagtgcattgaagagtacaaactcgaggctgagtttccgcctgaaaacctcaagaaacgccttgagcagctagagaagaccaagactgaaaagagaaaaccagttgtagtccctgctaacaagcgaacgcgtgtaaataatggtggtccgatgcctcctgctaaagctggccgtttgacgaatgcatatgtctcatctttcccggcacctcctccatttgtaaggtctccctcccacacccagtaccctgctccagtcccaggatacccatccccacctcccatgtatggaagcaggag

SEQ ID NO: 236129 - DNA, 434 bp, Gossypium hirsutum
ctatgatcggcaaattagggtttggggtgctgatgctcaaagaagattgagcaaatctcatatactagtttatggaatgaaagggtctgttgctgagttttgcaagaacattgtactggcaggagttggtagtgtgacattagtggatgaccgtgaagtcaccgaggaagctttgtctgcaaatttcttgatacttcctgatgaaaatctgtaccatgggaaaactctcgctgaggtctgctgtgattctttgaaagaattcaaccctatggttcatgtttctgtagaaaaaggtgacatatcaacctttggtgttgaattctttggaaagttcgatgccatggttatcagctgctgctctcttgcgaaaaaaaaattgatcaatcagaagtgccggaagttatcaaagcgtgtagctttttatacagttgact

SEQ ID NO: 236130 - DNA, 474 bp, Gossypium hirsutum
  unsure (1)..(474): unsure at all n locations
ttgagcaagaccagaaaaccaggctgagagggatcgatgcccaaaaagccaacatttccgctggcaaagccgttgcccggatcctccgaacctctctcggacccaagggcatggataagattctccaaagccccgatggcgatgttaccatcacaaatgacggggcaacaatattggagcagatggatgttgaactgtctcggagtcaggattacgaaattggtgatggaacaactggtgtttgttgtcatggctggagcacttctagagcaggcagagcggttattggaacgtgggattcatcccatacgaattgcagaggggtacgaaatggcttcaagaattgccgttgagcatttggagcacatatctcagaagtttgattntggagcatcaaatatagagcctttggttcaaacatgcatgaccactttgtcctcaaaattgtgaaccgatgcaagcgccatttggctg

SEQ ID NO: 236131 - DNA, 372 bp, Gossypium hirsutum
tcttgaagtggtgtggagataattggaactggggaagatgggatggctgtgtttcccaaagctgataagaagaaagcttctggttttgagattgttggtttcgaggtggttccgtgcagtattaaatatgatccagaagccatgactaaacttcacatgtatgacaaagtttcctctgtgaactgccccttggggctcgacaagtcgcagataataagggaacgagaaaggatctcttttacttacgaggttgaatttgttaaaagtgatattagatggccatcacggtgggatgcttatttgaagatggaaggtgcacgcgtgcactggttctcaattctaaattctctaatggtgatcactttccttgct

SEQ ID NO: 236132 - DNA, 466 bp, Gossypium hirsutum
ttttccacgcgtccggtcttcagatgagattatcttacagtccagttgcacatttcttccttttccttgttcagtggactgattgtcatcttgctggtgccttggggtttctcaggattcttatatacaaggcttatgctgatggtaaaaccaccatgtctattcatgaaaggaaagctagcataagagaattctatggggtgatctttccctcgttattgcaactatctcgaggaattacggatgtggatgacaggaaacagaaggaaatttgtgcttcaaagttctcgaaaagagatgaactgaataaaggaaaggtctccgaaatcgacttagagagggaagaagaatgtgggatttgcatggaggtgcgcagcaagattgtgttgcccacatgcaaccattcaatgtgtatgaaatgctaccgaacctggcgaataggtcacagtcatgccccttctgtagg

SEQ ID NO: 236133 - DNA, 429 bp, Gossypium hirsutum
ttctccacgcgtacgcctcagtggaaccattgaaggtacaaaactggatgcttgctgaaatgcctgggctaataacagactttgtaatctgtcttgatgatcgggtcttgtatttcgacaactggcttcatggggatgtccgacaatataatatcgaggaccctaagaatgcggacttggctggtcaagtgcgggttggtggactggttcaaaagggaagccctatagtggctggtactgcagatggccaaacatggcaggccaatgatcctgagatccaggaacgtagtctgagagggggaccgcagatgatccaggtgagcttagatgggaaacgcctatacgtgacgaactcactgttcagcacatgggatcgacagctctatcctgaactcatggagaagggttcccacatgttgcacatcgatg

SEQ ID NO: 236134 - DNA, 474 bp, Gossypium hirsutum
ttcttcacgcgtccgcttttatcggatgggcaagatacttatactgtcactggtgccggtgcaaacaagtctcaaccaaattaccagttgcttgtccctctgtctatgcatgggagtgataacacaggattccagattccagtacatgcttttggttttggtgcagatcatgatgcttcatcaatgcattcaatttcagagatctcaggagggacattttcttttattgaaactgaagctgtactccaggatgcatttgcgcaatgcattggtggtcttttaagtgttgtagttcaagagctgcaagtgggtgtggagtgcatgaatccaagtctttgccttggcccgcttaaagcaggcagttatccaagccgagtagcagctgatggaaaaactggagttattgaggttggagatctctatgctgatgaagagagggattttttggtgtcggttaaagtaccagctgagtct

SEQ ID NO: 236135 - DNA, 510 bp, Gossypium hirsutum
tctattccatcttttcaaagctatatttatcttttgaagaaattttatcactattaaaccctcctaatggcttctagtgctacattatcttctcgacgtgctaatgttcgcagtcggctgtcagtaacggtttccgagcttgaaaaacccgagcttcctttgaagtcaattcccggtgattatggacttcctttcatcggtgcaatcaaagaccggcttgattatttctacaaccaaggtcgagacgaatttttcaaattcaaaatccaaaaataccaatcgactgtacttcgaacaaacatgccaccaggtccattcatttcttccaacccaaaagttgtcgctttacttgacggaaagagctttccaattcttttcgacatatcgaaagttgaaaagaaagaccttttcactggcacttacatgtcttcaacttacctcaccggcgggtatcgaattttatcatatcttgacccatcagaacccaaacatgccaaactcaaacaactt

SEQ ID NO: 236136 - DNA, 493 bp, Gossypium hirsutum
ttccacgcgtccgcgcacctgaaattgaattttattttctctcagggaagtaagttatccggtttgactgtttataagcattacaaaatgtttttcgatagatatggttaccatgggacgtcatttgagcagagttatcgatgttaccctgcatctttcattgaaaagccacaaattgaaagcggtgataaaattatcatgcctccatctgcacttgatcgcttggcatctctgcatattgattatccaatgttatttgaacttcggaatgatgctgctgagcgtgcctctcattgtggagtgctagagtttatcgcagaagaaggcatgatctatatgccatattggatgatggagaatttgctcctacaggagggagatattgtgagggtgaaaaatgtaactcttccaagggtacctatgtgaaattgcagccccacacgaaggactttttggatatttcaaacccaaaagctatcttagagacgacact

SEQ ID NO: 236137 - DNA, 500 bp, Gossypium hirsutum
tttccactcagctatgtcagcatcagctatgggagccgatgaaaaagcaattccacaagtttataagggacatagaaattgtgagacggtgaagggtgtgaccttctttgggcccaagtctgagtacgtggttagtggatccgactgtggccgaatatttatttggaagaagaaagatggacagcttgttcgtgttatggaagcagataagcatgtggtcaactgtattgagtctcatcctcataccatggttctggctagcagtggaattgagagggacatcaagatatggactccaaaggctattaataaagctactcttccaactaacattgaacaggtcccaaaacgcggcctctttcgtttgttgtcctttgctgccttcaatgaagatgatgatggttataatttttttcttggtggtggtgttgaggatactgatgatgaggaagatgactctgatgatgaatatcttgatgtttatgatgacattgatgatg

SEQ ID NO: 236138 - DNA, 509 bp, Gossypium hirsutum
tttacgcgtacgaaaatgggcagaatattttcgcttgcataaggatctctttgtattctggtctgctaaagctgctactgctgaattagaaggaaaactgcttactgaccattggaagatggaaaataatatgcgaaagagtgatgatcctgaaacaaaaatacatggtagagatgagctcttggctcgtttgcagtacgaggcagaggaaatagtcaaaatgaggaaatcaggctctgatacctccacgtcatccaatatttattctcctagaaacaatgctgaaggaacttcagcaccaaaaagtgtgatggtgggatttgtggggtatcctaatgttgggaaaagctcaactataaatgctttggttgggcagaaacgtacaggtgtcacctccactccggggaagacaaagcatttccagacgttaataatttctgatgagctgattctatgtgattgtcctggattggtgtttccatccttctctagctcaagatatgagatga

SEQ ID NO: 236139 - DNA, 376 bp, Gossypium hirsutum
ttcgtcctccctcaccaaatcaaaatgtctgtggtggcgaacgaagactttcagcacattttgcgtgtactgaacaccaacgttgatggaaagcagaagattatgtttgctttgacctccatcaagggtattggaaggcgtttcgctaacattgtttgcaagaaggctgatgtcgacatgaacaagagggctggtgaattgactgcacaggagctggacaatctcatgaccattgttgcaaaccccaggcagtttaagatacctgactggtttttgaataggcagaaggattacaaggatgggaagtattcccaagttgtgtctaatgctctcgacatgaagttgagagatgacttggagcgattgaagaagatca

SEQ ID NO: 236140 - DNA, 519 bp, Gossypium hirsutum
cttatatccaaaaattaagccaattttcagtatgggtttaactatggcttcaaatcccaaggttttcttcgacatgacgatcggaggtcaaccggccggccggatcgtgatggagcttttcgcagacgtcactcctcgtactgccgagaacttccgggcactctgtaccggtgagaaaggcgtcggtcgttccggtaaaccactccactacaaaggctctaagttccaccgcgtgatccctgatttcatgtgccaaggaggtgatttcacagccggaaacggaaccggaggtgaatcgatatacggatctaagttcgccgacgagaacttcatcaagaagcacaccggacccggcatactatccatggcgaacgccggtcccggaacgaatggatctcagttttatttgtaccgctaagaccgagtggcttgatgggatgcatgtggtgtttggtcaagttgttgaaggtatggatgtggttaaagccattgaaaaagttgggtctagcagtggaagaa

SEQ ID NO: 236141 - DNA, 482 bp, Gossypium hirsutum
tttttagcaatccatggagattggcaagatggggcaagaagggaggtgattggcatatttggtaaccgaaatccacaaccggaaggcattgcaaaactcaaaactatgaccatgatcattaatgaaactctaagattgtatggtccatcaaatggaatgttgagaagagttggaagagaagttcaaatggaaaaggtagtcctccctgctaatatagatattctaattgcaaatgttgcacttcaccatgaccctaaactgcggggagaagatgtgcatctttttaaaccagacagatttgcggaagggattgccaaagctaccaattacaatccggctgccttttttcccttcggattgcgacctcgaacttgtgttggtatgacctttgcaaccacagaaaccaagattgttctctccatgatcctacaacgctatgctattacactgtcccctgcctatgtccactcaccaatacctat

SEQ ID NO: 236142 - DNA, 433 bp, Gossypium hirsutum
cccacgcgtccggagattcttcacaagatggctgattcatattttggagagggtttaactcttctgggtgaaaggtctgttagaaggaatttagttggctgttccaagtaacttggttgacgaaaattggtttcatatatgacagaaaaaaattgcagaaattagagcaatttacacatgagatggaagatgggtggggactggcaactgatggcaaaatcttatatggaagtgatgggacttcaacactgtatcaaatcgatcctcaaacattaaaagtcacaacaaaaaatgtcatcaagtttaatggtcaaaatgtacgctacctgaatgaattggaatatataaatggtgaaatatgggctaatgtttggcagactgactgcattataagaatctcacctaataatggtacaatacttggatggattct

SEQ ID NO: 236143 - DNA, 430 bp, Gossypium hirsutum
ttcacgcgtccggtcttcccatcaccccaggtgtccacatctgttgttgagccctacaacagtgtcctctcaactcactcccttttggagcacactgatgtggctgttcttcttgacaatgaggctatctatgacatttgcaggcgctctcttgacattgagcgacccacttacaccaatcttaaccgtcttgtctcccaggtgatctcctctttgactgcttcacttaggttcgatggtgccttgaacgtggatgtaacagaattccagaccaacttggtcccttacccaagaatacacttcatgctttcttcatacgctccagtcatctccgctgagaaggcttaccatgagcagctatcagttgctgaaatcaccaatagtgcctttgagccctcatctatgatggccaagtgtgatcctcgccatg

SEQ ID NO: 236144 - DNA, 504 bp, Gossypium hirsutum
tccacgcgtccgcacaacaccatcttcagctcgacataaacgaggatgcaactgcaagaaatcaaattgcctgaagaaatattgtgaatgctttcaggttttccgcaaaaaaacctctctgcttatgttgttatgttgtcctacataaactgatttagaacacgttttttgtcgtcttcaagggcggtgttggatgttccatcaactgcagatgtgaagggtgtaagaatgcattcggtcggaaggatggatctgctatcgtggaaaccgacggggagccaggagaagaagaaatggatccttccgaaaagaatgcactggacaaaaacttcgaaaagcccgacatcttaaataatgaagagcaaaatccagcttctgctctcccaacaactccactacaactttgcaggttccttccttgaactttttcaagttgtttcaatgataaaatcgatatccattgttgctataaattcaataatatttctctgcgcagacctttgg

SEQ ID NO: 236145 - DNA, 264 bp, Gossypium hirsutum
tttggtttgcagacagcttcccctttatgggatgcattctacgacgggcgctgatccgttttattggatgcgtgttatccttgcatccaaccgtggaaccgttatggaactcgggattacccccattgttacttccggatcggcgatgcaactcttggctggttcaaagatcatcgaggttgacaacagtgttcgtgaggatcgcgcactcttgtgagtgttttaacattactattttctccattataacttgaagcactatat

SEQ ID NO: 236146 - DNA, 500 bp, Gossypium hirsutum
ttctcttgcaaaagttctggcattggctcaatgtctttatcttcgctctcatgtccattgcagcaacgattgcatctttgaggctcatagctgttgattccaaagaataccatgtgtttgctgatgtgtgatatctacaagggctgagaaaaatgcctaaaattagcagaaatccgattcgaatttagccttcgcttcggtttttgattagattaataatatcaatgtaatgtattcattcggttctcggttcataacttaaaaaaaaaaaaaaaaaccacaaatattattaaaacagaacagaaaagagccgaaccaggccagaacatcggcttgcagaatcaggttggttaccagatgagaataatggtcccaactactgatgttggaagctgaccaagattctagtatgatggagttggggaatcctagttctctatgaacaggggtatctttttagttacccttaaggtgctgaatgtcagtcttgtattttggaa

SEQ ID NO: 236147 - DNA, 511 bp, Gossypium hirsutum
tgttttttacagaagaacaatgatgggttcgggaatcaatatctcggctctgggtgttattatgcttctgctgttgattgccccagcttccaacgctgccatttcgtgcagtgttgtgataaaggacctgaggccttgcgtgaactatcttacgaaggggagcggaaaaccaccgtccgcttgttgtgcgggagcctccgctctggcatccgccgcctcgtcgtctgccgacaagaaggctgcttgtgaatgcatcaaatcagcgtctaagaatattaaacccaataaccaattagctcaggctcttccttctaattgtggaatcactttgcccgtcgccatttcaccaaatgtcgattgttccaaggttggttgagagcttggaagctgaaactgggagtgcttggatgggcatgaagtaattaaaaaactccatgatagaagctcaattgttttgcttatcaataaactggaatcctccggtcttggaatttggattccttgggtgaat

SEQ ID NO: 236148 - DNA, 458 bp, Gossypium hirsutum
gtatgaaccttgcaggtgctgccaagaaccgggttgaattcctcgctgctgtcgataggaaccgttggctctacgatggccctactctccatagagccatttacaggtacaatgcttactggcttcccttgctagccaaatgttatgaagaacccattttggaagggcctttggttgttcctcttgattgtgaatggatttggcattgccataggctaaacccagttcgatacaagtctgactgtgaagaactctatgggaagatccttgacaatactaatggtgtgtcttcccttcgaggcgcatgtaaacggcaaaccgaagaaatttggaacaggctttatccgaatgaagcttatgactttgatttcaccaaagccttgtctgaaaatgcctctgaaacactttctggacttgaaaaacacactgaatatgatctagtttcagctggtaaaagg

SEQ ID NO: 236149 - DNA, 377 bp, Gossypium hirsutum
  unsure (1)..(377): unsure at all n locations
tttacgcgtccgaccacgcgtccggttgctgacgtgatcaagggaaagaccccagaagagatcaggaagactttcaatatcaagaatgacttcaccccggaggaggacgaagaggttcgtcgggagaaccagtgggcattcgaatgaagggtcaatttcgagtgccggttcaattgtatcaaactcatctatatataaaaatgtagtttgttgctctgacttttcatttgtactcttggatattctgtgagctcttttgaaactcttcaaagtgtcttcttctatgttctttgcctgtcttcactaaaaaccagtctgttgtatccaagtaatgtcctttaatcgtggtctgtgatatgaatgangaatggttgtct

SEQ ID NO: 236150 - DNA, 442 bp, Gossypium hirsutum
tttgggtatgctcagaatgctaagcctagagaagcattggagtttttcgagaggatgctaaatgaaggggttgaaacagatgaggttactttggttggggttatttctgcttgtgcacaactaggtgctgcaaagtatgcgaactggattcgggatattgttgagaatttggggtttagtcctactcgttgtgttgtagtgggatcggctttgattgatatgtactcgaagtgtggtagtgttgaggacgcatataaggcttttaaggtaatggaagaaaagaatgtgttttcgtacagtttgatgattgcagggtttgctatgcacggttatgcttatgcggcattggaattgttccatgaaatggtgaaaattgggatcaaaccaaataaagttacgtttattggagtgcttacagcttgtagccattcaagaatggtag

SEQ ID NO: 236151 - DNA, 506 bp, Gossypium hirsutum
tccacgcgtccggtgaaactcaaatgacacccacccaagtctcagatgaggaagccaacttattcgctatgcaacttgccagtgcatcagttctccccatggtcctcaaatcagccattgaacttgacttgctggagatcatggccaaagctggtccaggtgctttcttgtccccaaaagaagtggcttccaagctccccaccaccaaccctgatgcacccgtcatgctggaccgtatcttgcgtctcctggctagctacaacgtcctcacttgctccttgcgtacccttcctgatggcaaagtggaaagactctatggccttggccctgtctgcaaattcttgaccaagaacgaagatggtgtcactctttccgcccttagtctcatgaatcaagacaaggtccttatggagagctggtactacttgaaagatgctgtgctggatggtggaattccattcaacaaggcctatggtatgactgcatttgagtaccatggcactgat

SEQ ID NO: 236152 - DNA, 472 bp, Gossypium hirsutum
gcaaattgaagaatactctgaaatcttcaatccaaaatgcctaagcagattcatgagatcaaggacttccttctgactgctagaaggaaagatgcacgctctgtaaagatcaagaagagcaaagatgttgtcaagttcaaggtccgctgctccaagtacttgtacacactttgcgtgtcggatgctgagaaggctgacaagttgaagcagtcccttcctccaggtttgagtgttcaagacctgtgaaaatatggcagcctcaggtttgtcacctgatttataggtgatgaaagctagattttagttttgggtttattgtatttctggtcattctgcaacagggaagctcaattttctgtaattggatctatgctgttttgctgattaacgatgttagagatatatgcacttttcaattacaatgaatgctatttgtaatgaaaaacacagaaaaatttgatgttgcttcgct

SEQ ID NO: 236153 - DNA, 242 bp, Gossypium hirsutum
tgtacttttacttcacgggtcccattgttaggcagttttcgagctcacaatgctgttagaaaatcaatggtagggtgagataaatattaattatggggagctaacctgtgctcataaaggcagcacccttgtttgagcctagtgagttgacctcatggtctttttaccgagctggaatcgctgcggtcggtgctactttacttatcttgtctatctcgggattgactgtgatgggagttctt

SEQ ID NO: 236154 - DNA, 457 bp, Gossypium hirsutum
  unsure (1)..(457): unsure at all n locations
tttttcaccattttcatcgtttcagctttagctggaaacggcagtagcttcgcgagatccatggacaagaaggtgttggggatgaagaaggaaaagctcagccactttaggctatactggcacgacattgttggcgggaaaaacgcgacggcggttccggtggttttcccatcaaggaattcaacgacggcgttcggtatgatcagtgtaatagacgatcctttaacgatgggacctgaattaagttcgaaaatggtgggaagagcacaagggttttactcggcggcgtcacaacaagaaataggattgttgatggcgatgaattttgcttttatggaagggaaatataatgggagtacgataacgatattggggaggaacacggtgttttcaaaggtgagggaaatgccggtgatcggcggtagtggactatntaggtttgctagagggtatgtcg

SEQ ID NO: 236155 - DNA, 496 bp, Gossypium hirsutum
gttgttggttacggtgggttaattaccttcaccctggtctcaaaagggaaaagatgtctccccaagaacagcgccttgtccttgaacttcatgccaaatggggaaacaggtggtcaagaattgctcggaaattaccagggcgtactgacaacgagatcaagaactactggaggactcatatgagaaaaaaagctcaagaaaagaaaaaggctatgccaaagtcattgtcaccatcatcatcatcatcatccatcactctttcttcatcatcatctactaccactaccaccactactactaccaccgtggattccttgcccttctcaggcactgggaaggtcagtttttacgacacaggaggaccaaaaatggctgctttgggagacaaaagcagtacagatttcaaagatgaaaaggggtactattccatggatgacatatggaaggatattgacatgtctgaagaaaacatgataaagcctttgtctcataacta

SEQ ID NO: 236156 - DNA, 413 bp, Gossypium hirsutum
tttttgagaagttcttggtatcgaaattgaacggggataattcacttatgagctgtgcctttgctcaccagcacaacgccaaactcgtcctcgatgcggctttgtgtttgataacagacaacatggataagctaactaaaagggaagaatatattgaacttgtggaaaaggatcctcggcttgtagtggaaatctatgaagcttacctctctaaacaggttaatacagctgctcataaagattgttcaatgaaatcgtagtcatttctgatcaaatgatattgttgttcattgatattggatgaaattttagtatatgtatgtagaagaagagtttgaatgtttgatggtattgggttggggaaatatgtgatacgaagttacaatgaattccataaccatttagtttttttt

SEQ ID NO: 236157 - DNA, 389 bp, Gossypium hirsutum
tttggccttgccatggcaagggcttttggagatttttgcctcaaggattttggtctcatctctgtgcctgaaatatcttattggcacgtgtcagagaaggatgaatttatcgtcttggccactgatgggatttgggatgtgctttcaaacaaagaagtagtagatattgtagcatcttgtcgagctcgcacatctgccgcacgagctttggttgagacagctgttagagcttggagatacaagtacccaacttcaaaagttgatgattgtgctgttgtttgcctattctttgattcaacctcaaacaacctatctactgtttccaatgctaatgccaaagtgcagccagtttcaatggaccaagttgagaatgggaatgagacagacac

SEQ ID NO: 236158 - DNA, 252 bp, Gossypium hirsutum
tttgtgttatgctcgtgtgcacccacgtgccgggaactgcaggaaaaagaagtgtggacacagcaatcagttgaggccaaagaagatgatcaagtagattacatatatcgacggaggaattctacttttattatcagatctctggttggaaactattgttctaataacagacatctttaattgcgtgtatcttgaaactctctagtagttgatgttctttcatttgtacttgaatgcaagttcttcgttttt

SEQ ID NO: 236159 - DNA, 405 bp, Gossypium hirsutum
ttttaacctaagaaccctaaatcttatttcctgggggtctaagaagacagacggtgacaattcttcggttttctttccccgagagaaaatatatcgaaaacgaaattcaaaatcaaattatctgatctccaaagcgctgcgtcatgtttcctaatccccaacgcttgacggatcgaagttaaccgatcaggccggtttacttatttgtttatcttacgactgttctgccagttgtgaagggaaggggggttgataaggtgatcggacggtggaagagaatagaggatgccatcacagggagacctagaacgtcagatcgagcagctgatggagtgtaagccgctgtctgaggcggaagtgaaggcgttgtgctagcaggcacgaacagtgctggtggaagaatgg

SEQ ID NO: 236160 - DNA, 346 bp, Gossypium hirsutum
tttgtagcttggtatgctggcaagcgtatggctgatatctacaaggccaaagtgaagaagaatggctcacactatcgctgcatttggggaaaagttactagacctcatggtaacagtggggttgttcgtgctaagttcaagtctaaccttcccccaaagtctatgggagatagagtcagagtcttcatgtaccccagcaatatatgagtagtgtagatcgacgactcgaatgacgctctaccatttcacttttgtttttatgaacttagtcaagattttgtgtgctttgaatcagtcattttgtttctttgggatggtgaaatataagacttatttatctttacat

SEQ ID NO: 236161 - DNA, 363 bp, Gossypium hirsutum
tctaattgtaaacaaggagtgggaatattcttataagaagggatggaaatgcacattcgaacgtggaattgtgcatgcatgttttaacttcaagcgatatcgctaccgtaggtaatatgtggttgagtgaacaacttcaactttgcaagcttgagctgcctgccatgaaactatactccgataaccgttaaggtaacttcagggctttcttgtattacttaaaaaaaaaaaagaagaagaaaactgtgaagtaggaacttttctcatattttaacctgtagtgttttcctcaatgctttcaatttatgaccaatatatttgccttggtctctggcactatacttttcacactaaaatgttgca

SEQ ID NO: 236162 - DNA, 447 bp, Gossypium hirsutum
tggacgcgtgggttccttgagcttcttagtgctgttcaacctagatccgtaaattggagtcttgttacggaaggagtaaccgatgagcagaaaaagatgaatgccacctacatcatcagtattgccaggaagcttgggtgctcaatatttctgcttcctgaagacataattgaggtaaatcaaaagatgatcctcacattgactgcaagtatcatgtattggttcttgaaacaacctgttgaagagaaaccagcagcaacttcagatagtgaaaatggaagccaactggagactctctctaattctactactgatgactcagcatctgaatcatctgttgagtagagaccgaagctggaatgtataatcaagtgccttaaacttgtttctcctccctctctgcatagacacccagttttggattaaatttcatttgcaaagattgtt

SEQ ID NO: 236163 - DNA, 187 bp, Gossypium hirsutum
tgcagtggcagcagcagcagcagctgggcaaagctatcaagcaaagaagaagaagaggaaaagatggtttcaggctcagggatatgcgcgaagagggtggtggtggatgctaggcatcacatgctaggaaggctggcatcgatattggccaaggagttgatgaatgggcagaaagtagtggtggtga

SEQ ID NO: 236164 - DNA, 428 bp, Gossypium hirsutum
tctcaaacaaactttttagttctcaactctctcaaattcaccatggctgacaagtgtggcaactgcgattgcgctgacaagagccagtgtgtgaagaaaggaaacagcttggtcattgagactgaggagagctacatcagcaccgtagtggtcgagcctctggcagagaacgatggcaagtgcaagtgcggaactagctgcagctgcacaaactgcacatgtggcagtcactaagcagacatatagaatgatgaagtttgggacctaaaaagaataaaagttgggttgaataatttgtgtcttttgttgtagtttgagtgtgttttcttgtctatctgtccgatgattgtctatgtctctcattttatacaatgatggaatgaccatgtcaatggcctttgtctgattaatgaactattattagtatt

SEQ ID NO: 236165 - DNA, 384 bp, Gossypium hirsutum
tcgcagtacatagattttggattcaataccggtaagtttaacggaagctctctaagcgtattttcaaggggagaagctgggcttgcggtggtcggaggaagaggccaattcgcgatggcaacagggactgcactatttaaccctctccttataaatgccaccaatgtcatcattgaatttaacgttactgtaattcattactaagatgttatttacagagtcaatcgtcttggattgtgtgaaaatcatatgattatgctccacttgttagaataaatgtatgagaaatatataggtttttagtattaaaaattaaaattctcatacttgcagtcattgtactttatcattatacgagaaataaatattaaattcttagctact

SEQ ID NO: 236166 - DNA, 430 bp, Gossypium hirsutum
ttcacgcgtccgcgtcaagtgccggctttcagattttttacacgatccacttcctcaacaactcaacaaattgtacccttttcctctcgatgatgctgcggagttgcccatggggatccaattcaatactttcctttgtggtggaatcgggattggtgtgtgtgtttcacataaaatcggcgatgctttatccttttttacgtttttgaatacgtgggcagccattgctcgtggggatacgaagagcgtggtctggcctgagttggtatcggccaagctttttcccccgcggaacgtatcagtgcctgaaccagtaatggaaaaaagtgaaaagaatatagcgacgaagaggttggtgtttagtgcttctaaaatagaggaaatcagagccaaatacgctgtcgatcatgaaatccgcccttcacgtatt

SEQ ID NO: 236167 - DNA, 417 bp, Gossypium hirsutum
ttaatcttccattctttgcatctaggatcaagctcggaaggaatggggttgaggcacttattccatctgacctcatagggttatccgagtacgaagataagacattggaagctcttaagccagaattaaaggccagcatcaagaagggaattgcattcgtgcagaagcaaccagttacagcttaaaaacccaagttttcgacataccaaaactaagcctcctctcgagagagagccaggcctgcatcagtagtttcagttttgcagaatcgaagttttttcggtttctttttccaattacatcacagaaatacaaaatttagaagggcgtatcgatgttgtaaacgacaaaaacataaacatttctgaatcagaacttttgaaatctaaaataaaggctacatttcaactttctttt

SEQ ID NO: 236168 - DNA, 407 bp, Gossypium hirsutum
aatatacctcgtccagttaatggaccctgatagtgggatggttgacaaggcagttgcccttctctcaaacctgtcgacagttgcggaagggcgtgtggcaattgtacgagaaggtggtgtcccattactagttgaaattcttgaatcaggatcacagaggggtaaggagaatgctgcatctgtattgctgcaactatgccttaatagtcccaagttctgtaccctggttttgcaagaaggggctgtgccaccccttgtcgcattgtcccagtctggcacgccaagagcaaaagaaaaggcacagcagcttctcagtcacttccggaatcagagagaaggtgccactgggaagagcaagtaaaagctgactaactttgttatatttttcttgtatgattttttgatat

SEQ ID NO: 236169 - DNA, 349 bp, Gossypium hirsutum
tccacgcgtccgaggaagtgcaccagcacgacttccattaccacttgatcttgcagaagatggccctgtttatgtcaatgcaaaacaatatcatgggattcttaggagaaggcgttatcgtgcaaagcttgaagcacaaaacaaacttgtcaaatctcgaacgccctaccttcatgaatctcgacatcttcatgcagtgaatagagctaggggatccggcggacgttttcttagcaaaaagaagctccaacagcctcatgattcaacttctaacccgagttcccattccatctctgatgccagctgcttagaccgaaagaacagatgatcagaacttgagagccatttg

SEQ ID NO: 236170 - DNA, 472 bp, Gossypium hirsutum
tttaatttggaagattttgggaatcggcgcttaattaagattcgggttgtttttaagcctacctgcttgcttccatgaatttgatgttgaaggcgaaccctaaccctaaccctaaccctaaagatgacgctaaaaagacccgaactgtcgatcttggaaacggaagcagtgtaatttacgttcccaggtttttagcatatgatgtcgcctgggaattcttcaattacctcgacaatcacatcccttggaccagacccacccttcgcgtctttggccgatcttgcactcagcctagagacacatgttatgttgcaagtgcagggttgccggacttgatttacagtggatatcagcctcatgcttattcttgggatgatttccccccacttaaggacattttggatgcggtccataaaatgcttcctggcagtacatttaacagcttgcttttaaatcggtataaagggggtaa

SEQ ID NO: 236171 - DNA, 495 bp, Gossypium hirsutum
tttcaactcactcctcttttacgccttggagctggagcatgtgctggaataattgccatgtctgcaacttaccctatggacatggtacgaggcaggatcactgtacagacagagagttctccttatcagtatagaggaatgttccatgctctatccactgtgttgcgggaagaaggtccacgagcattgtataagggttggcttccttcagtcattggagttataccatacgtgggtctgaacttttctgtgtatgaatctctaaaagattggttaatcaaaagtagaccatttggattggttgaagactctgagttgagtgtgacgaccaggcttgcttgtggtgctgctgctggaactgtaggccaaactgttgcttaccctcttgatgtgattcgcagaagaatgcaaatggtaggatggaaagatgcagcgtcagttgtatctggtgatgggaggaacaaggcctctcttgaatatactggcatgattgat

SEQ ID NO: 236172 - DNA, 217 bp, Gossypium hirsutum
ttaccatcgttacggacagtgtgacttcagacgggcttacttcattcattgaaaagaaacttgggggaaagcaccatagattcaaaagaggctataagaatgtcattgacgaggcgattcgattgaactctataggagaggaatcacatctagctatagaaaccagtggccatggagctctcaaagagaatcactggcttgatgatggggcatactt

SEQ ID NO: 236173 - DNA, 505 bp, Gossypium hirsutum
  unsure (1)..(505): unsure at all n locations
ttttgcgatctattaatatcccttctgggaaggactcgtctggtgggtcaggtttagccgccggtaagattttgagggcggtgccgaaggatgacacccagcaagatgtaaaaagcggtgtccagaaatttcgtgttaagttgttgtctgaaagtggagcacatggccccatggacgtactttgccagattggtttagatggtattcgtatgcttgagcctagcagcagtcgaatattgagaatatatcctcttgagaacatcacaagatgtgaagtgttggactcatctacctttgcattctggtccaaaagctctgttgacattgaaccaagacggatcaggttgcaatcaaacagttacactaccaatacccttctggatattgtaactgctgcaactgtacagatcaaggagatgggttggaaaagtcggcctcctgaatctgccaaggctgctgaacaacctgcagaaaagaagaganggattgctgattggatgaacat

SEQ ID NO: 236174 - DNA, 406 bp, Gossypium hirsutum
ttgacgcgtgggtccggcctaaccgtttttctttccccgtaacaatgtcgcgctcccttcaatttttcactccctcccgtgctccttatttcactctccataaacttccgtcgacatcctacacccggttcccggtaattaacttcccgagcaaaaagcactatatcactatcacgaaatcgttatcttcagatctcgatgcagcgtcatctcaagtactggattccggaaacggacagaccggagtttcgcgggttttatcagcggacaacgtggtggcggttcagtctcatgcgccgtcggaatcgggagcggcggccgggatcgaggttgacgctgtgacggaggcggagctcaaggagaatggattccggagcacgagaaggacgaagttaatatgcacgat

SEQ ID NO: 236175 - DNA, 512 bp, Gossypium hirsutum
  unsure (1)..(512): unsure at all n locations
ttccacccgcctctcgtaacagccccggtgtcctattcgtttgcactcatagaaccctaatggaccctgtgatcttatccaacgttctaatgcgcaaaatcccagcagtcacatattccatttcacggatttccgaaatcctatcgccaataccgacgattagattaactagaatccgagaagtggacgcagaaaaaataaaaaatgaattagctaaaggtgacttagtagtttgtcccgaaggaacaacttgtagggaaccttttttattaaggtttagtgccctatttgctgaattaactgatcgaatagtcccggttgccatgaactatagggtagggtttttccatgcaacaacagcaagtgggtggaaagctttggatccaatcttcttcttcatgaaccctagacccgtttacgaggtaacgttcttaaaccaacttncgatggaagcgacatgttcatcggggaagagtccagaagatgtggctaattatgtgcanagaatcttg

SEQ ID NO: 236176 - DNA, 432 bp, Gossypium hirsutum
ttgaattgcaattggaaatgcttggatagatgataacatttgtacaaagggactgtttgattatttatggacacacgctctcaactctgatgaaaccaatgaaggggttaacaagtactgcgactttgctagtcaagatttagttaccaacaaggcagttgcaaaaaacgctacagaccagtgtgatcagtatcaaagtcgggcactaacagagatgggagacattgacttgtacggcatttactcccctttatgcaattcatcggcaataaaacctggctcagatggtaatgtgttgaattttgatccctgctctgacgtccacgttaagtcctacctaaatcttgccaaggtacaagcagcccttcatgccaaagctacaaaatggtcagcttgcagtggtgttggatggacagacagcccaacgtctac

SEQ ID NO: 236177 - DNA, 346 bp, Gossypium hirsutum
ttctggatggcactgcagtttttgtttccgccacatcagtgagttcatatttaagatgaaagcttacagccataatgatagagtgaggttctctcattatttgaacccaaagagagttcagagagttatttgcaagggtgccgatctgtttgacatgctcccggaggagtacacattcaaggatataattgggaaaatgggacctattcctcattccttctcagctgttcatcttccatcatatcttctagagaatgcagataaatataaatttcttttacctggaaattgtttgcgagaaaatgagtgagtcttttgtaaaggcttgtcagaattgctactgatg

SEQ ID NO: 236178 - DNA, 466 bp, Gossypium hirsutum
ctacgcgtccgcggacgcgtgggtgcaggtagcaccacattctctcgtcatggcagtggatagtaagtttcaatctatggatattgatgtaaaaataaagaagttcacatggaggattcagaatttctccagtcttgaagttaaaaagctctactctgaagtttttactgttgatggctacaaatggcgaattcttatcttccccaaggggaaccatgtggatcatttgtcaatttatttagatgttgcagattcagctactttgccttacggatggagtaaatatgcccaagtcggattcggagtcatcgatcaatttgatcgtgaaacttccagtacaagagtcactcagcattgtttcaacgcgagggaggctgattggggcttcactacattcttatgtcttactgaattacacaaccctaaaagaggctatctccttaatgatgaatgcttggttgagtat

SEQ ID NO: 236179 - DNA, 406 bp, Gossypium hirsutum
gttgtggctagttgatattctaatcgataaaaggatggcaaatgacttcgtgaaattgtgggcagatcaaaaggaacttgcagaactccattccaggattcccaccatgtaccgacatgaaatcagcaggatcactgctcaactatgtatcgcaattggtagaggaaacatcttggtgcccaaagacagccgattctctctgctgtcaacatggttggacgctctttacgaagattttagatggatgagaagggcttctagatctgtagataaaaaactaattgaggaaggactcggtcagacaattcttacgctttcgttgcggcaacaacaggttattctgctcaactggttccatcggtttctgaataaaggggatgactatcccaatatccagagagcattt

SEQ ID NO: 236180 - DNA, 326 bp, Gossypium hirsutum
tctatatttggtggttcaattgcagggttgcactctccttctcagctgtttctcctggatccttcggaggagaaaccatcatggaggacactgaatgttcctgggcaaccaccaaaatttgcttggggacatagtacatgtgtggttggagggaccagggtgttggtgttgggcggacacacgggggaggagtggatactcaatgagttgcatgagttgtgtttagcaagcaggcaggactcggactcaagctgaggtaatttctcccatactattgaatcatatttttgacatgtttcgcctgatgcattgcgttttagttcata

SEQ ID NO: 236181 - DNA, 331 bp, Gossypium hirsutum
  unsure (1)..(331): unsure at all n locations
ngtcacgcgtccgcccacgcgtccgcccacgcgtccggtttattgaattctttccctcactttctcgaaaaaaaaaatgtcttcaggttgcaattgcggatctaactgcagctgcggtgacaactgctcatgcagcaggaaccttaaccttggatattcggagaagacaaccagcactcagaccatcatctccggagttgcgccagtgaagatgacctttgagggaccagagatgagcactactgaatcaggacatggatgcaagtgtggatcaaactgctcttgtgatccatgcaactgttgaaaagcttgatgaaagccatagattatg

SEQ ID NO: 236182 - DNA, 414 bp, Gossypium hirsutum
agaatgcattcggtcggaaggatggatctgctatcatggaaaccgacggggagccaggagaagaagaaacggatccttctgaaaagaatgcactggacaaaaacttcgaaaagcccgacatcttaaataatgaagagcaaaatccagcttctgctctcccaacaactccactacaactttgcagacctttggtccaactgccattttcatcaaagagcaaacctccacggtccttcattgccatcggatcatcttccgcactgtatactggtcaaagatacggcaagcctagcattattcgacctcaaaacattatcgaaaagcatttccaaactattgctgaagatgaaacacccgagattctacgaggcaattcatcttccggaactgggattaagacttcgtcccccaaca

SEQ ID NO: 236183 - DNA, 449 bp, Gossypium hirsutum
ttaacgcgagtggtagatctaaaaattagccaaaagctgcgtttaacattgagaaaactagataacgccgcggagcggaatatccacagatcggggaatggggtcaacatctttcggtattccagagcataggtttggttccaatggcgagaaaatgccagttttggggttcggaacggcggtcttcccacccgtaggagctgaagctacaaaaatggcaattctccaattaatcaaacttggttataggcattttgatactgctgccaagtacgggtcagagcagccattgggtgaagcaattcaagaagcactttcgattggattaatccaatcccgagacgagctcttcatcactactaagctatggtgcggcgatgctcatggagaccttgttgtccctgccctcaagagaagcttacaaaatctcaagttggagtacctggatc

SEQ ID NO: 236184 - DNA, 237 bp, Gossypium hirsutum
ttcacgcgtccgaaaaacttggtgtacctccaatctgtcattaaagaaacactacgcctctatcctgctgctccactcgctgtaatccatgaagccattgaagattgctcagttcatggatacgatatttcaactggcacttggcttattcttaatcttcaaaagatacaacgtgatttacaaatatgggaagctcctttaaaatttcaaccagaaagatttatgactacccataaa

SEQ ID NO: 236185 - DNA, 418 bp, Gossypium hirsutum
ctcacgcgtccgcccacgcgtccgcccacgcgtccgggcttacggtggatacctaggcacccagagacgaggaagggcgtagtaagcgacgaaatgcttcggggagttgaaaataagcgtagatccggagattcccgaataggtcaacctttcgaactgctgctgaatccagggctaaaaccattgatctctgcaacaatccaatgacaaaagaaccaaaacttcagggtgctagaagaatagtttctgagtggacagatcttgactttgaggctagaaaattcactgccaaaatattaggtgatgaactggttagtgtgtaatatacctatgggttttgtatgtcgtcaaatgttttacctttagcaggcatgttttcttgaagggaacttgtcattgtgttttcatactttggatc

SEQ ID NO: 236186 - DNA, 402 bp, Gossypium hirsutum
tcacgcgtccgctgttttcttcaatttgcttctccaaaaagctctttgtttttgtagtagtggtagtagttcagatcttcgtcatcataagtattatatttacgcttttgtttttgcagataaaaaacctacgctgatggctggtcgttacgataaaaatcctttcgacgaggaagaagaagaagttaatccttttgctgatacaacagcaagagggaaggcacctggccagtctaaatttggaggaggtctattttcaacgcgcactgcaagcgttccacctgcctcaaactcaagactttcaccactacctcctgaacctgctggttttagttatgagcgtgaggcaacagttgatatccctcttgatacagcttcaggaggatcacgtaatcaggattt

SEQ ID NO: 236187 - DNA, 229 bp, Gossypium hirsutum
tttgttttccccaatatgaggcatgtggcaaatagctgtggaaatggaataagtagccagactgcttgctgtgatgctatggatagctatgtctctcattgcaaaagcagaccctcatcaccaacttacaagctttggattgtgctaccgcactggggttgaagctacagacatataatatcaccaaaaatgtttatagcctatgtcatataagcctcaaggatttctc

SEQ ID NO: 236188 - DNA, 419 bp, Gossypium hirsutum
ttcatcaagtctgcaaaaatacaaggctggttattggtgcatgatatggctctactaggcggaacaaagcactgataaaagtcgtttttccactgccggtccgaccaacaatcccaatcttacttcctccttcaaatatgcagctgatgccatgaaggaccagcggagcattaggccaataacgaacctgcttgatgagtttgacgttttattatgcattccctgtaaagttcatgactcaacaaatggagaaaatagttagtaaaaccttttgattataccttcaaattacaaatctcgacttttccaagacaaggccagccgtgtgtaggccggttagtttcaattacttcgggagcttcactaggaatatgcatgtattgctctaccctttctactgaaacaactgaacttgatag

SEQ ID NO: 236189 - DNA, 414 bp, Gossypium hirsutum
tcacgcgtccgcccacgcgtccgcttctccagccgttcctccgaatggattggcgttccttcaatctccgatgccaaccccatcgcgaaacttcgctcaaatccaaccccaagaactcgaacacatcttcaagatgttcgacgctaatggcgacggcaagatctcatcgtctgaactcgcttccatcatgggttctctcggccaacaaccctccgatgaagaagtccaaaagatgatcaaagaattcgatgcagacggtgatgggttcataaatttcgaggaattcgtggagctcaacactaaaggagtcgattccaaggaggttctggagaatctgaaggacgcgttctcggtgtatgatctagatgggaacggttcgatttcagccgaagaactgcacaaggttcttaaaag

SEQ ID NO: 236190 - DNA, 418 bp, Gossypium hirsutum
tttttcttacggtgattttaacattagcaatagagttcatggtagacgctcagagtctggtggtgagcgcaaagagactggtgcacaaagtgcacctgattatataaaaaatgttagtgagcctctcactgcttcgttatatgtaccgagaaatgataagcttgtgaaaattgatggcaatctgataattcattcagttctagccagtgagaaagctttggcctcacataaggcttctgaaagaaagaataaggagacaggtttggccattcctaagaatttctctccagcactggccattcctaatgccagagagaatggaggaaagcattcacgtgaatatagaaatcctgcagaaagaccgatggctctttcttcaggctctgctgatgctttgaaggaccatatcaggtcaact

SEQ ID NO: 236191 - DNA, 367 bp, Gossypium hirsutum
atcgaagggtaggcgggctcgatcagacatgatggacaaacgtgaacgaggcgtccagcaggtcacactgcttaacaagaatcgtcatttctcgacgtggggatactccggaagctaaaccgaaaataagcaaattatggatggttgatcttggagggagtgaacggttactcaaaaccggagcaactggacaaacccttgatgaaggaagggctataaatctttccctttctgctttaggcgatgttattgctgctctaagaaggaaaaagggccatgtgccatacagaaatagcaagttaactcaaatcctcaaagattccttaggtgttcggttcgaaagttttgatgctcgttcacataagcc

SEQ ID NO: 236192 - DNA, 373 bp, Gossypium hirsutum
catctatccttggcaaaggatactcattcctaatagtcagtttattcaattaccgatagtcgatgcaaaaatgcatggacccatccttcttctttacgaacaacactggtgctccccatggagacacgctaggttgaatgaatcctcgatccaatagttcttgtatttgagcttttaattccaccagctccttcggtgccatcctataaggagcgatggacactggagctgttcctggcagtagctcaattccaaaatcaacttcgtggttcggaggcaacctagggagctcatcagaaaatacatcgaaaaaatccttaacagtttagatatctctaatagaaggaccctcggaatcagatgtaccactata

SEQ ID NO: 236193 - DNA, 468 bp, Gossypium hirsutum
gacgcgtgggttttcccctttgattctccttctcttccttattctttgtttcttttttttttgattttggggttcctctatttcctgtaaagcttgaatttttagaaccaaaaaaatattactatatttttttgcataaacaaataaataaaagagacagctttggagcagaagggtagagagaaagggagtttttctgcaaagcatcatgaaccagaaggctaatgtttctaaagaacttaactctaaacacacaaagatattggatggacttcttaagttgcctgagaatcgagaatgtgcagactgcaaaagcaaggcgccacggtgggctagtgttaatcttggaatattcatttgcatgcaatgttcagggattcatagaagtcttggagtacacatatctaaggtgagatcagccactttagatacatggcttccggaacagatttcatttattcaatccat

SEQ ID NO: 236194 - DNA, 346 bp, Gossypium hirsutum
aatggagggtcaggggagtgtgccactaccggttgcatgacggatttgaataaaaagtgcccgtcggagctgaaattcgatggtggcgacgcctgcaagagcgcgtgcgatgccttcggcaatccagagtactgctgtagcggtgcctacagcagtccaacagcttgtaaaccgtccatttattcagaagtgttcaaatcagcttgccccaaatcgtatagctatgcttttgatgatgccactagcactttcacatgcactggggctgattataccatcacattctgtcccaattccccaagtttgaaatcttcaaaggatcctgctgccgaatcaaccggtgaat

SEQ ID NO: 236195 - DNA, 319 bp, Gossypium hirsutum
  unsure (1)..(319): unsure at all n locations
cgcgtccgggtagcctagtgtttgcatactacaaggacggtgccaccgatccaaccttcctctactttgcctatggcttgaaggaaatcaagtgctaaatggagttttcacccgataccggaccggctttgttatacctaaagacttagttttaattctagatataaggagttcttaactatctattttagtcttttttatctcttttaggtcatatttataatgtttggtttttaagggttatgaactattggttaaaggatatgcttgaggaataaaatttactgttttcngagctaaaaaaaaaaaaaaaaataaa

SEQ ID NO: 236196 - DNA, 187 bp, Gossypium hirsutum
gtaagaaccacatacaatgaggtggcagatgaacttgtagctgaatttgctgatcctggcaatagagtagcatcaccagatcagcaacagttcgacgagagaaacatccgccgaagggtttatgatgctctgaatgttctaatggcaatggatattatatctaaggataaaaaagaaatacagggga

SEQ ID NO: 236197 - DNA, 385 bp, Gossypium hirsutum
gttagaggaaggcgaattgcattgtggagaaaaagaagggaaaaggatttcactgaaaacgatgcatactgagttctcagttgacgatttctccgactccttttgggcggctccgccggggatgagccgaagccaatcggagtgggcttttgacaattttattgaagagttttctggttcgggcggggcgatcccggtgtcgcgttcggacgagagtgtgatcggtccatccttggcggaacctcggccgtccgtttcgaaatctgaagaagccgatggtgaaggtgacgtgctggagatcaaaagacctggtaatcagaatcataacagtccgccgtccgatctggcaccgacgttctggattgactcggatgagtaccgcgcg

SEQ ID NO: 236198 - DNA, 488 bp, Gossypium hirsutum
ttcacgcgtccgcgctcaccccggtggtccagccatattggatcaggttgaggcgaagctagcccttaaacccgaaaaactccgagccacgaggcacgtgctttcagaatatgggaacatgtcaagtgcttgtgtgctgttcatattggatgagatgaggaagaaatcaaaggaagatggacttggaaccacgggtgaagggctcgagtggggtgtcctgtttggtttcggaccagggctcactgttgagaccgtggtgcttcatagtatctctgcttaaacaaggttctaatgttcatgttggctagcccaggctgcactaccatttgctttgcatttttatttattttattttcctttttattactgaaatttgtgatttgtatggttatttgaaagagagtaaagctctcacatatggtgtttaacgcctgtagaattatgtaccaccttatattttatggtaataataaattgccttttttttt

SEQ ID NO: 236199 - DNA, 288 bp, Gossypium hirsutum
atttggtgttttaccttgctgagcttggccttatgcaatattcgtcagcagtttcatactgtccgtccatgttagctgctgcagctgtgtatgctgcaagatgcacccttggggagagccctctgtggagtgaaactctgaagcaccacacgggatactcggtagagcagctaattgagtgtgcaaaactcttggttaaattccactcaacagctgcaggaagtaagctcaaagcattgtataggaaattctcaagtccagatcgcaatgccgtggcccttcttgcac

SEQ ID NO: 236200 - DNA, 263 bp, Gossypium hirsutum
tcacgcgtccgcggattagcaattgcaggtcgggttccactactatcacctattacaaaggacaacaagcggtacttggcgaccaaacgagctaaaatgggccatgtatacgacttcactagcagtatgaatagtgttatcattggcggcaatggtaacacaacttcggcagtggatgctgtgtctgaatcttaggatccagtcacttccgacttggctttcaatgctggtaacattccgacatgatcaccttattacatgat

SEQ ID NO: 236201 - DNA, 321 bp, Gossypium hirsutum
tgctggacttctgttttcatttccagggaacggcaagcagctggagtttgggagcatgaagactaatggcaaggccattgctatccacactcttcttttctttgccatctatgctgttttgatcatggctgttcacctccatatctacactggctaaccacttccctgccggtgagagtctttgttattggtctctctattggagatctgtcttgggttttacttggtttatcaatctttgtattagcttgtttcaattttggaccaacgaaatttgtggcacagacctttgtttcccaaagtttacttttttacaattag

SEQ ID NO: 236202 - DNA, 372 bp, Gossypium hirsutum
tgtgcttatctaccggaaggcgaagatcgagaccatccggcttgtaacccgttcgggccaagaggtcgaacccttgaaggtctcaagttcccgaaaagtctggtagtcgtggcgggtttggatctgattcaagactggcaattggcatacgttgaaggacttaaaaaatcgggtcaagaggtgaaactccttttcttagagaaagccactatcggcttctatttcttgcctaacaacgatcacttctactgcctcatggaggagatgaacaacttcgttcattccaactgttaataccactcaccctgcgtagttataacctctacttaaccatacgtaacaaaagttccttttccccctttaaatgttttt

SEQ ID NO: 236203 - DNA, 452 bp, Gossypium hirsutum
gtatccctgaccaaggaaagtgctactagcaaatcagtgtattttgcacattgtacatcagaaatgatatttattacccatttgttggctgaagaaccagagaagctggcaggccctttgctggctgacacttatgtgacattgttaaaaggtcgtaatgcatggtatggccaaatgttagccaaaggagaactaagtcgagatatgggtgatagcatcagcggaaaaggaatgattcagggagtgtctgcagtaggagcattttatgaacttctgagtcaatcgagcttaagtgtgttgcatccagatggaaacaagcctgttgcccctgttgagttgtgccctttattgaagacgctctacaaaattcttataacaagggagaagacggctgaagcgattctgcaggcactgagggatgaaaccctgaatgatcctcgagagcgcatcga

SEQ ID NO: 236204 - DNA, 262 bp, Gossypium hirsutum
atgaaacccatgagaggttgctggatcttgtttcactgttttgttatgtgccacgagcaaagtatctccctttggggccaataagtgcaaaactcatcgacatatatcgtacacggcataatattagtgcctcaactgggttgagtgatccagctgttgccactggaatttctgatcttgtttatgaatctaaaccggccaccactgaatctgatacactagatgatgatctagtaaatgctagtgcagtcaaccttggtga

SEQ ID NO: 236205 - DNA, 190 bp, Gossypium hirsutum
aggggcaaggaacttttggatacataacacaggacctcttggatgcttagctcaaaatgtcgccaaattcggaacggatgcatctagccttgaagagcaagggtgtgttagaaagcataaccaagctgccaaaatcttcaatctgcagcttcatgcccttactaaaaaattgcagggcctgtatacagat

SEQ ID NO: 236206 - DNA, 301 bp, Gossypium hirsutum
gcgattgctaacgcgattttgcacctcgctttgggatacgtgacaagtgtgacaatcgatatgggatttctggtggaagcgcagacggagaatgagttgccggaaaagttgatcggtgcggttagggtttgccagatggagatgtcctctgcgactgtggttgacgcacttactccacagattcaaccggcggcggcgcgtgtaatgggttgttcgaaggtaaatcaccataagtccggtgatgacgaggatgatgataaatgataactctttttttcccttaatttaaaattaatatttt

SEQ ID NO: 236207 - DNA, 168 bp, Gossypium hirsutum
agaaaaaggtttggaccattggaccggtttctttatgcaacaagatgaacttggacaaatttgaaagaggaaacaaagcatcgatcaaggaacaaaaatgcatgaaatggctcgactcgaaggaaccaaggtcagttatttacgcttgcctgggtagcctatgccgtc

SEQ ID NO: 236208 - DNA, 241 bp, Gossypium hirsutum
ttcacgcgtccgcgaaactcctcaatttaacggttctccgtcgcatcgaccctttcgtcgaagaaattcttatcaccgctgctcatgtcgccttctatgagttcaacatcgaccttagccaatggagtcgaaaagatgtcgaaggatctctttttgctgtcaagaggaatacgcagcctaggtttcagtttattgtgatgaatagacgcaatactgataatttggtggaaaacctcttggg

SEQ ID NO: 236209 - DNA, 181 bp, Gossypium hirsutum
ctttcctattcttgtacatctcggtgttgaccgtgattggagttgttaaggacaaaaccaagtgtacaactgttgggattcaagggattgcttgggcttttggtggtatgatctttgcccttgtttactgcactgctggtatctcaggtggtcatatcaatccggcggtgacatttgggct

SEQ ID NO: 236210 - DNA, 104 bp, Gossypium hirsutum
ttgggctaagtgtcattatcagtgcagtgctgaccagcagggctattttccaaagaatgaagaactacactatctatgcagtttcaatcaccattcgtattgtg

SEQ ID NO: 236211 - DNA, 412 bp, Gossypium hirsutum
gtttaagttacacatctctcaaacattccttgtacttaaaccaaaaaaataaaataaaattatagcacgaagaagaagacgaaacccaacttccctggaattcattatctttcttcagtcaaacaccacgctattgcttttgtttgcatatacaatcaggaaagggtatggcagctgaggacaatttggacttgtcgactctgcaatctcagcttagtgaaactcatgaactgtggaagcaggagattgaaaaacgtcgaggccaagttgacgtgttacaagccaaaattatggaggtaaaggcttctatacaagggtcggaagaggagtcgaagaaggagttagacgttctttggcgaagggtagaaactaccgctactttattgacttacttgaaatcaaaagcaagagt

SEQ ID NO: 236212 - DNA, 412 bp, Gossypium hirsutum
ctttcgcgtgggtggctacgcatccgacaaagctgctcagctattcggcatgagaggccggctatgggtcctatggatcctccaaacattcggaggtgccttttgtatctggctaggccgtgctaatacactccccattgctatcttggcaatgatcctcttctccatcggagcccaagccgcatgcggtgccacattcggcatcatccccttcgtctcacgacggtccctggggatcatctccggcctaaccggcgcaggtggcaacttcgggtccggtttgacgcagttgattttcttctcaacgtcgaggttctcgaccgccgcaggtctcacgtggatgggcgtcatgatcgtggcttgcaccttgcccgtcagcttggtccatttcccgcaatggggaagcatgttc

SEQ ID NO: 236213 - DNA, 468 bp, Gossypium hirsutum
tccacgcgtccgcttccctgcaaaccattacctgggtttcaatcctataaatcactggcaatgctgtccgggcatattggctcagtttcttgcttggccttatgtggggaattcatcttaagtgcatcacaaggcaaggatattattgtgtggcaacagcctgacttgaggcagttcacaaagtttggccaaggtgatggctcggtgaaggcgcttgtcaccgttagcaacaaggttttcactgcacatcaagatagtaggatcagagtttggaaggtgtcaagaagcacagagaatgtgtttaagcttgttgacacacttcctactacaaaggactatttggggaagttcatgaagcaaagcaattatatccaaactcggcggcatcataagcgtttatggattgaacatgcggatagcatttcttgtctggcagtctataatggcttgatttattctggttcatgg

SEQ ID NO: 236214 - DNA, 477 bp, Gossypium hirsutum
gtaacaaggaaatcagcagttactggcttgggttgaacgagtttgctgatttgacccacgaagagttcaagaacaagtatttaggactcaaaccagaggttttcaaaaagaaccgatcaccaccagaagagttcactttcagagacgacgttgatttgcccaagtctgtcgattggagacagaaaggagctgttacgccagtcaagaatcagcgttcttgcggtagctgttgggctttctcagcagtggcggctgtggagggcataaacaagattgtaacggggaacttaacttccttgtccgaacaagagctgattgattgcgatacaagtttcaacaatggttgcaatggaggtctaatggattatgcattcgagttcattgtcgccaatggtggacttcacaaagaggaagactacccgtaccttatggagcaaggtacctgtgaagaaaagaaggaggaaatggatgtggtga

SEQ ID NO: 236215 - DNA, 490 bp, Gossypium hirsutum
  unsure (1)..(490): unsure at all n locations
cccacgcgtccgacaaactccagtaaaaatcatccattttgagggagatttatcatggctaacaaccagcttggagttcttaatgctctggatgcagcaaagacacaatggtaccatttcactgccattgtaattgcgggaatgggtttttttcactgatgcttatgacttgtttggcatctctcttatcacaaaacttcttggtcgtatttactacacaaatgaaaaccatccaaagcctggaacattgcctcctaatgtagcagctgctgttaatgggacagcctttgttggcacgttagctggtcagcttttctttggctggcttggtgataaattaggccggaagcgggtttatggactaaccctcatgctcatggtggtctgttccattgcttctggactttcctttgngaagtctcctgctggtgttatgacaacactntgtttcttcaggttttggcttggtttcggaatcggtggtgactat

SEQ ID NO: 236216 - DNA, 406 bp, Gossypium hirsutum
gtgatcacagctctacacagcagctgagtattttgaactttcctacaccaatgatgaccaaaaacagatagtggtagaaacattgaaagattataccatcaaagcacttgtgaatactatagaccatttgggttctgtgacatacaaggttaacgatcttttagacgaaaaagtcgaagaggtttcaggaactgagctccgagtctcttgtattgaacagagactacgaacatgccacgagtatattgatcacgaagggatttcacaacagtcatcggtgattaatacgccaaagtacaataaacgatacatcttgccagtcggggagaccatgcatggtgcaaaccttacaatgtcgaaatacgtaggatgtagtctagatgacgaagatgactggcatcagttc

SEQ ID NO: 236217 - DNA, 426 bp, Gossypium hirsutum
ttcgcttacagaaaatataaactggacggccgaagagatatccgaaaataatagtgagtatatgaatgaggtggtcttttgccttgacactgttttctcaacagcactgcaaattctgccattggatgctttatacacggttggttgtggggctcttgagcatatttccaactctattgtggctgcatttctcagtgatagtgtgaagaggtttaatgccaatgcagtcatggttatcaaccaggatctacagaagttagagagttgtgctgatgagaggtttcacagcacacgcctaagtgaggtatacgaggaaggtagttttcgaagtagcttgatagaagcccggcagttgataaacctattgtccagcagccagccggagaatttcgcagatcttgtaattcgggagaagtcctacaatgc

SEQ ID NO: 236218 - DNA, 416 bp, Gossypium hirsutum
tgtacttcataaaaagctgtgccgtcaaagacagtttccaaatggtcgtgggttgcacgcgtgacgtcaacgtgatctccggtttaccggcagccacatgcaccgaacgtctcgatatcttaaacgataacgaaaaggtaaccgggtttagcatcatcggtggtgaacataggttgacaaattaccggtcggtgacgacggtacatgggtttgaacgtgatgggaagatctggaccgttgttctggaatcatatgtggttgatgtacctgaagggaatacggaagaagatacacggttgtttgctgatacggttgtgagacttaatttgcagaaattggctagcgtcgctgaaaggttggcgcgtgatggcgattgtaataaatcacaggtgatgtgaaaataaattatatatata

SEQ ID NO: 236219 - DNA, 462 bp, Gossypium hirsutum
ttgtgatggaaagtggtgatccggttcgaaccattgaaaggctgaaaacttccttaaaagctgaaagaaaggcattgagtgctttatatgcagagcttgaagaagagaggagtgcctctgcaattgctgcaaatcagacaatggccatgataacacggcttcaagaggagaaggcggcaatgcaaatggaagctttgcagtaccagaggatgatggaagaacagtctgaatatgaccaagaggcccttcaactactaaatgagcttatgatcaaacgagagaaggagaaggaagaactcgagaaagaattggaagtataccgaaagaaggttctctattatgaggccaaagaaaagacgaggataatgaggataagcaaagatggaagcttgtgaagcgggaaatcttcggctgcttgtagctatgcggaggatagcgacgagctatccatagacctgaatc

SEQ ID NO: 236220 - DNA, 295 bp, Gossypium hirsutum
cggctcctgtcacgggggctcgagacggggtccagactctaaaatctgagaatcgactcataaagtatgaaggattgcatcacggctctagctattcggagcaccttaacttcttgcctgcaattagagtaaaaggtgccaagactcccgctgttgattaaaatgatgggctgatctcacctgccatgtgagctgtggcacaactttccatccagacgggccggtttgttaacattgaagaagtcttggacgaacataattgctaagctttcattgtcaccatgatcagaaaggc

SEQ ID NO: 236221 - DNA, 383 bp, Gossypium hirsutum
ttttaaagtttttttgtctgctaacagaattgttccaacaacacaacggatttcatggtatcctaatgatgatgaaaagaaatattacaggcttacagtccataaacgccatagagaattgatcactcaatcttatattagccatgttatgatggaaggcaaggaaatcgcgacgaaaaaacggcaacggaaactttattcgaacaatccgagccagaactggtacggataccgaaggagcaagtggagcaacgtcctgttcgaacatcctgcgacgtttgatacattggcaatggatgcgaaactgaaagaggaaatcaagaacgatttgatcaagtttagcaaagggaaagattactatgccagaattggaaaagcttgga

SEQ ID NO: 236222 - DNA, 421 bp, Gossypium hirsutum
ttttggaactcccccctgaggttgagacaccaagggtttctaacaatgctcgttcatctgtttttgtggcaccaactcccggtatgcctgtgagtcaaatttggactcaaagatcatctcttgctgctgatcatgcagcagcaggcaattttgatacagcaatgcgtttgctgagcaggcaacttggaataagaaattttgctcctttgaaatccatgtttcttgatcttcattctggcagccatagctatcttcgtgcactttcatctgctcctgtggtgtcattggcaattgaaggtgctggagtgagtcttgttagtcctaatgtgaggtctccaccggcccttgtgttcaatttttctcagttggatgaaaagctgaaggctggttacaaggcaacaacggctggaaaattcaccga

SEQ ID NO: 236223 - DNA, 488 bp, Gossypium hirsutum
tagaacttgccactgctaaaagcaaaacttgcacaattcaatgactccagctatgctatgaagttccagcgtaaattccgcagtcttgccactgctaaattcccggcaaaggtcccgaaaagtgttgatagacggttcttcttcacagtggggctagggatactcccttgctcaaagaaccaaacatgccaaggacccaacaacaccaggccagcagcagcagttaacaatgtctcatttgtgcaaccaaatattgctcttctccaagctcacttctttaataaatcaaagggtgtttacaccacaaacttcccaactaacccacctttcaagttcaactacacaggcacaccacccaaaaacataatgttgagcagtggcaccaagttggtagcgctaccttttaacattagcgtggagttggtgatgcaggatactagcatccttggtgcagaaagccaccctttacatcttcatggcttcaactt

SEQ ID NO: 236224 - DNA, 354 bp, Gossypium hirsutum
gcggtaagtattctatttatctcacagtgttgaacttcggtatattctggggttccaatggtctggtgcagatatatgtgggttctatcctgccccaactgaagagttgcgtaaccgttggattgaagtcggtgctttttaccctttctctagggatcatgcaaattactattctccaaggcaggagctttatcaatggaagactgacaccaaatctgctcaaaatgcactaggtatgaggtataaactcgttgcttacctctacacactcaactatttggctcatactagcggagcacccatggccaggccacttttgttcttatttcctgcttacatggagcgctatgggct

SEQ ID NO: 236225 - DNA, 241 bp, Gossypium hirsutum
tttttacgcgtccgtccacgcgtccgatctattgaacaagccggggagggatggaaaactggttagggagtaaaatgccagctggtcacggtctccgatctcggaccagggatctgttttccagacccttcagaaagaaggggtacattccattgtccacttatctcaggacctacaagattggtgactatgtggacgtcaaggttatatggcgccgttcacaagggcatgccccacaaat

SEQ ID NO: 236226 - DNA, 326 bp, Gossypium hirsutum
caagctagaaggtaaagtacccatcattaccggtggagcgagcggtatcggcaaagccaccgcctgtctcttcgccaagcacggtgcccgtgtggtgatcgccgacatccaagatgaactaggccagcaggtagccgcatcaatcggttcccaaaagtgcagctacatccactgtgatgttaccgatgaagagcaagtgaaaggcatagtggaatggaccgtccaaaaccatggccaactcgacatcatgtttagcaatgctgggatagttcgttccaacaagggtaccacctccaacttcaaccagaacatgctcgacctagacc

SEQ ID NO: 236227 - DNA, 312 bp, Gossypium hirsutum
tttcttcccttgttaacgatgccgatgatgttgagaagcatttcccggggacactaacggcaatcagggattggtttcgagactacaagatccctgatggaaaaccagcaaacaagtttggtcttggcaacaaggcagcaaacaaggaatatgctctgaaggtcattacagagactaacgagtcttgggccaaactagtcaaaagatcaattcctgctggagagctttcacttgcatgaaggctaccaggagcagtaggagaactgcaatggtttcaatttgtagtttgcttgtttgtgttttttttttttt

SEQ ID NO: 236228 - DNA, 312 bp, Gossypium hirsutum
tatggaacgtcgagttcatgctgtaattgataagtttgcggagcgcggattgcggtcactggcagtagcatatcaggaagttcctgaaggacgaaaggagagctcaggaggtccatggcaatttattggcctgatgcctttgttcgatccacctagacatgacagtgcagatacaatacgaagggcgttgaatctcgcagtgaacgtgaaaatgatcacaggtgatcaactggcaatagcaaaggaaacaggacgccgtctcggaatgggaaccaatatgtatccctcatcagccttgtttggacaaaacaa

SEQ ID NO: 236229 - DNA, 242 bp, Gossypium hirsutum
caagaaagagagtcatccatgggcaaggcaaagtttaacaacggctatgtaaagaatctatcggagtcaacaactgatgaggatctaaagaatgcatttagagaacatggacctatgactagtgctgtgattatgagagatgcggatggaaagtcaaagggtggtggctctgtcaactttgagaatgctgaagatgcacattgatctgttgattctctcaatggaaagaagcttgatgacaa

SEQ ID NO: 236230 - DNA, 380 bp, Gossypium hirsutum
gagtcttaacgtttgtgataacctcgccgatcacatgattggaaacgtatatgctcagttcagggaggaagatcaagcggcagccgctctccaggcacttcaaggaaggttttactccggtcgacccatcattgccgatttttccccggttaccgatttccgtgaagccacgtgtcggcaatacgaggagaataactgtaaccgtggtggttattgcaatttcatgcacgtcaaagtaattgggagagaccttagaaggaaactgttcggaagttaccggaaatacagaggacatcggagtaggagcagaagcggaagtcctcgcccccgccgtgatagggatcgcgaccgtcaccgtgaccgtgatgataatcgcgata

SEQ ID NO: 236231 - DNA, 281 bp, Gossypium hirsutum
ttgttttgccgccctttttatcaacaacaacgagttcatgatccatctgcctgataatattgccaacacccatattttttatctcactttggccaacaacaaattcaatggtccacttccaagaaccattttcaaagctttctcttcgttagctgaggtccttcttttaaacgaccagcttacaggttgtataccctatgagattggtttgcttaaggaagctgtcgtttttgatgccgggaacaaccagttgactggtcatttacctttctcattagctt

SEQ ID NO: 236232 - DNA, 445 bp, Gossypium hirsutum
tctacttgtccgaacagctgtaaaatcatggcatgagacttcaaaagtggatcctagagtctacttccttcttgataaggagaagagccaagccgataaatatgctccagttgtcaatattgacaaggcttttgaatcacctcatacgcacagcagttgtttttcatttcttaggcaatatgctgaagattctttctctagagcagcttgtttagttgctcctaaaagtatcatagcttatccacaggtctggaaaggtcagggttcaaggaagtggaagcatgggcaacatgatggtttctttgttcaattcgagtcaccactcttgcgaaaactatggtttatttcgagttccaatgagatggggaagacactgtgcagggatccagaggttctagatataggtgcacatgaagtatttccacgccttttcaaagaaaagcta

SEQ ID NO: 236233 - DNA, 413 bp, Gossypium hirsutum
tgttttcgcgttcgatccataaggaggacacactgcatattgtgcttcgtcttcgcgggggcttctaattggtggcctattttagtcgatcacgtaattttattgtgtatgaactgtttgtgttttagagtgcgtttgcggctgtttaagggaactatgctttgacgtgctgaaatggtcagggaaccacatgtttaattaccatatgcataaggttatatgttcatcgggtgatccccaatttcatgtgtcaaggaggcgactttaccgccggaaacggtaccggaggtgaatccatctatggagccaagttcgcggacgagaacttcatcaagaagcacacgggacctggcatcctttccatggcgaacgctggacccggaacaaacggatctcaattcttcatctgcacg

SEQ ID NO: 236234 - DNA, 418 bp, Gossypium hirsutum
ttctacgcgtccgatcgctcgtatagagccccggaagtcatccttggcctcccgtatgaccagaagattgacctgtggtctctcggatgtatccttgctgagctatgttctggggacgtcttgttttcaaatgatgcggtcgtgatgatccttgcacggatggtcggaatgcttggtcccatcgatatggagatgttggagaatgggcaagagacatacaagtatttcacgaaagaatacgacttgtaccatataaacgaggaaacggaccaactggagtacctaatttccgaggagtcttcgttggagcatcatcttcaagtatccgacgtattgttcatcgatttcattagacatttgcttgagatgaatcctcgaaggcggccaaatgcgagggaggcattaaaacatccctggc

SEQ ID NO: 236235 - DNA, 330 bp, Gossypium hirsutum
cggacgcgtgggcagagcttgggtacccatacgaagccattcatgttaccactgccgatggatatatccttcttttagaaagaataccaagacgtgatgcacggaaggctgtctatctacagcatggtatctttgattcatccgtgggttgggtttctaatggcgttgatggttcttcagctttcgcagcatatgatcaaggctacgacgtcttccttgggaatttgcgtggtctagtctctagggggcatgtggataaaaatatctcctcacggaaatattggtggatcacagtaaatgagcttgggacaaaagatattccggccatgg

SEQ ID NO: 236236 - DNA, 442 bp, Gossypium hirsutum
cccttttacactcccccttcagatatcttcattttcatcttcttcctctttctttctgttctttgttttcttcaaaaactgccctttcattttgcttagttcttgttaaaaagaaaatgtgtgggattttagctgttttgggctgttctgatgattctcaggcaaaaagggttcgagtgctggaactttcccgtaggctgaagcaccgtggtcctgactggagataaagatggtggagaacactccagacgatccacggcaaagaaaacctgacatcacaaaagcgaaagaattgctaggttgggagccgaaagtgaagttgcgagatggtcttcctctaatggaggaggattttaggttgaggctcggagtctccaaagagaactgaattttttttaaaaaaagcactttaatgaaattatatagaaggtgaaattttgga

SEQ ID NO: 236237 - DNA, 471 bp, Gossypium hirsutum
cccacttgtccgcccacgcgtccgcccacgcgtccggagctctgttattctcaaacaacaattctcccccaaaaaaatgaaattgaaaaatttcctctcgattccaattttttcagtgtttttggtgatgggttttgtttattatatcacagtttttattttaattgaagattgggttggtttgcagacctcagctgggtctttaaattccatgatcttcaccaccttggcttgtctttgtgtcctgtctttcctcgttggtgtccttactgacccaggccgtgttccttcttcttatatccctgatgttgaagatgcttcttttgcctcagatcaagagccaaagaaaaatgttctacaatcaaaatattgcgacaaatgtgctgcatataaacccccgaggacacatcactgccgggtttgcaaaagatgcatactaaggatggatcatcattgcctgtggataaataa

SEQ ID NO: 236238 - DNA, 373 bp, Gossypium hirsutum
gaggtatttaagcttgaccaggaaatgaaggaactggcaaaattgttgattgctgagcagtcgcttcttgtatttggaagaggatataactttgcaacagctttagagggcgccttaaaagtaaaagaggtttctcttatgcacagtgagggaatgcttgcaggtgaaatgaaacatggccctttggcactaggtgatgagaatctccccattattgttattgctacccgtgatgcatgcttcagtaagcagcattcagttattcagcaacttcatgcccgtaaaggtcgtctaatagtggtgtgttcaaaaggagatgtagctgctgtatgtcctggtggatcttcatcttgtcgagtgattgaagttcctc

SEQ ID NO: 236239 - DNA, 341 bp, Gossypium hirsutum
ggtttgttccaggaagttggccacaagagccttttgcaaagtgatgctctttaccagtatatcctcgagaccagtgtgtatccgagggagcctgaacccatgaaggagctcagagagttgactgccaagcacccatggaaccttatgacaacatcagccgatgaaggccagttcttgaacatgcttcttaagttgatcaatgccaagaacaccaagacgacaaccaccatgatggaagttaaccaccaagttcatgtgccaccgatgactaaggtgacggtgaatctattgatgtcccatggtgtgtgtgatgttcccttcgtattcactcaaaaagacac

SEQ ID NO: 236240 - DNA, 212 bp, Gossypium hirsutum
ctcattcgtccgcccacgcgtccggagatgactatgtatcctttgagaaagaggttgaagctacctttttaagggctgttcatgaaaatgtcaaagtagaccttgcagtcttagaggtgaatgcacttcggttgtcttacaacatggcatctgttgactgtggtggagcaatattttactcaatgatgaagttggcagtagaatctccacat

SEQ ID NO: 236241 - DNA, 518 bp, Gossypium hirsutum
ggttttggtcctgtttataaggtaaaatttgctgtaatttagcacaatgatctttctttattatattgaaagctcgtagaagtgttgcaaaattttccaggggacactagcagatggacaagaaattgccgtgaagagactttcaaagagttccggacaaggactgaacgagtttaagaacgaagtagagttgattgccaaacttcagcatcggaatcttgtaaggcttctcggttgttgcatgcaaggagatgagagaatgctggtttatgaatccatgcctaacagaagccttgacttattcatttttgatcaaacgagacgcacagtcttaacttggtctaagcgttttcggattatctgtgggattgctaggggactactttaccttcatcaagactcgaggttgaggattatccacagagatcttaaaactagtaatgttctacttgatagtgagatgaacccaaaaatttcagattttggcatggcaagaactcttggaggagatcaatcag

SEQ ID NO: 236242 - DNA, 497 bp, Gossypium hirsutum
ccgttggatcaacgaaaggcgggagagggaagcccaagtcaaccaaggcggtgtcgagatcgcataaggctgggcttcagtttccagtggggaggatcgctaggttcttgaaagccggaaaatatgctgagcgtgttggtgctggagctcccgtctatctctccgccgtattagagtatcttgctgctgaggttttagagctcgctggaaacgcagcgagagacaataaaaataatcgaatagttccaaggcacatccaactagctgtaaggaacgatgaagagctaagtaagcttttgggttcagtcaccattgcaaatggaggtgttttgcctaatattcaccagactcttcttcccagtaaagggggaaaaagtaagggggatatcggatcagcttctcaggagttttaaactctctctcgcttttttgcttccttgagtttgttttaaacggttgtatgatatgcaacgtttagtactaaatttttttattta

SEQ ID NO: 236243 - DNA, 368 bp, Gossypium hirsutum
gcttgtcttagcggtggaagaaggtcgtggtctggttgtagttgtgaacaagatggatcttctaaaggggccaagaaattctgcattgtataaaagagtcaaagaagctgttccacaagaaattcagatggttataccccagataaccgggataccagttctgttcatctctgcaatagatggaagagggcgtgctgctgttatgtctcaagtcatcgctgcatacgagaaatggtgtttaaggttgtccactgcacgtcttaaccgttggttgcgtaaggttgcaagccggcattcatggaaagaccaaggttctcaaaccaagatcaagtacttcactcaggtgaaagctcggcctcccactttcg

SEQ ID NO: 236244 - DNA, 427 bp, Gossypium hirsutum
ctttgtatgtgtttctactttggagggtcatgaaaatgaagtgaaaagtgcgtcttggaatgcatcaggttctcttcttgcaacatgtgggcgagataaaactgtttggatttgggaagtgatgccagggaatgaatttgagtgtattcaagttttgcaaggtcatactcaagatgttaaaatggttgagtggcatccgactatggatattttgttttcctgtagttacgataacactgtgaaggtatggtggtcagatgatgctgatggcgattggagctgcgtacaaactttaggtgaatctagcaatggtcattcttccaccgtctggtcgcttgcttttaatgctaagggagacaaattggtgacttggagtgatgatcttaccatgaagatatgggaagcagacatcataaggatgcagtct

SEQ ID NO: 236245 - DNA, 385 bp, Gossypium hirsutum
aatttctcccgaagtagcatccagaacggttaaccgagctattattgcagaacttgtgagactgtacaaagaatccgatttgggtacgagattgccggcttatgacggcagaaagagtttgtacacggccggtgagcttccgtttgcgtggaaggagttcgtcggcaaaggcagcaagaccaaggacgatggcttaaccccagaacaacgtcgtgaaagagatgcaaaggccttgcaagaaaaggcggcaaagaaggctgcgcaggcggcagctggagggaacaatgctggaggcggtagtaaaaccaagaaataattatccgatgatgtcaaattgttaatgatttatttacgctggacggtaaagatagtgttgcttcgttga

SEQ ID NO: 236246 - DNA, 353 bp, Gossypium hirsutum
ttctgcttgtggagtagctcttgtacattatgaagacatggggatcccgaaagatgtagcaaaattgggcgttcgtcatgggatgtggggaactgtaaagaaattgcattcaggcatgagggcataccagaatgcgaggaaaaccgacagttccttgtcaagatgtgcacagatggcaagaattactacaaaaatttctcctgatgagagcacaggttctcttcgtcctgctaccgtggaagatgaaaaggatcgaactatggttatgaggagggagcatgataatgggcttgattggaagtggatagccataggtggaaccgtagcgctggcttttggactccattcgggta

SEQ ID NO: 236247 - DNA, 483 bp, Gossypium hirsutum
agcttcttcccagtcacaagagttctttagaacacttcaacgatattatagcaatgcatatatggatgcagagaaacaagatgcaattaatgtattccttgggcatttccagccccggcctggtaaacctgctctttgggaattgggttcagatcaacattataggggaagaaatggggaaaccactgtggatgaagatggaaggtcatttttcaaaagatcattttctgatggaaacattcttcgtcaaagtatatcacctatgccagccataaaagataagcaggagaaatttaccaattcaactttacccgaccggtcacaaggaagtaatggcctttcagagtcatcacctgagatatcaacttgtgaaagtgatatctcgtgttcaaggtatacaccctctatgcctcgaagacagctatttggagatgtgcaaagagatcgctatcttgaaactggccaaattttcttttctgaaca

SEQ ID NO: 236248 - DNA, 451 bp, Gossypium hirsutum
ttttcgcgtccggaaacactgccagatataacagttgccaggagaacaccggacacttaccattgcccaaacctaagtatcaacaaatggacacaactgtctttatatgatgcatattttggatggggtcgaccaatatacatgggtccaacaaacgttgtccatgaaggaaaaatatgtatactaccaagtccaaccgatgatgggagcttgtcattggtaacatgcctacagactgctcatatgaaactcttcgagaaacatctatacgaaggcttgaagtcatttgacaagatcaaagctcgatattagttgtttgttctctctatcaatatatgtataaacctataaatcttctacttctgtttctttaactaagactttttgtttggatcctgtttatttgaaatttaccatctaagttggcctggcaaacaggtgttttattggt

SEQ ID NO: 236249 - DNA, 418 bp, Gossypium hirsutum
tttattcgtccggatttttctagggcgagcaatacgtatgttggtaaactaaggtcaaattttttgggtaccaagttcactgtatatgacagtcaatcctcatgtgactcatggatccaatctactgctcgaccgagacgtagattccactctaagcaggtgtctccaagattacctgcatgcaactatatcattggtacagttacttatgagctcaatgttctgcggacacgaggaccaaggagaatgcattgcatcttgcactcaattcctgtatctgctattcaagaaggtggcactgctccaacaccatcagctctcccccaatccttagatgaacaactttctcccttgcatagatcaaaaggaaaggagccgattgtagacatcatctcgccaagcatccaagccacaccag

SEQ ID NO: 236250 - DNA, 402 bp, Gossypium hirsutum
  unsure (1)..(402): unsure at all n locations
gctgaggaagcactatcacaaggcttggaagctttgaatcagtctctgtctgatatcataatctctgattcacttagctgcccgcctaatatgagtaactacatgggccaaatggctatcgccatcaacaagctctccacccttgaaggtttcgttagacaggcagataatctgaggcgccaagccattcatcgactgcatcagatattgacgatccgccaagtagcaaagtgtttgttggcgatagctgagtacttccatcgcctaagagctcttagctctctgtggttggctcgacctcggcaggaacaatagaaaccctagctagctaggtcttnttttaagttgactttgattattaatgtcttctttgatattttcatcaagatttctacatatata

SEQ ID NO: 236251 - DNA, 235 bp, Gossypium hirsutum
ttctctcgtgcgaccacgcgtccgtatctctatacttgagatcagcgctccggttatgggtccgggtatcttaacggctccggccccgtggtcttttggcgtccacattaccgggttgctcgaaaaagccggctgcaagactatggctagtttgcttaccagccgtggcgtgcttaagactcacgatggggcgcttgataaagggttgaccgtttctgctccgtccgatgaagct

SEQ ID NO: 236252 - DNA, 469 bp, Gossypium hirsutum
ttctctctctctctctcgctcgcagaccggtcatcattgtcatcatgctgctttcgcctgacaccagaagctcgggccctattaaaaacttgatagaaagcctccctcaattatatctctggtggtctcctgtcactgatccaatcacgatgagtaccggtgaacttctcagcatcgagccttatgagctccaatttccctttgaattgcgaaagcagatctcatgttctctaaacttatccaacaagaccgacaattatgtggctcttaaggtgaaaacgacaaatgcgaagaagtactgtgtaaggcctaacactggaggtgtattacctaggtcaacgtgcaacgttattggtataatgcaagctcaaaaggaagcacctcctgatatgcaatgcaaggataaatttctacttcagagtgtggatgctagacctggagctacagcaaaggatataacttcagagat

SEQ ID NO: 236253 - DNA, 363 bp, Gossypium hirsutum
tttttgcgaggttcgggttgtgacgaaaacgctctgcttaaacatgtagcactcttcgacagacacaatgatggcattttttatccatgggagacttgtcaaggttctcgagcaataggggctggttatttatcgtcattcatcagtgccttcttaatcaaccttggtctcagtcgtaaaactcgccctgtttgtgtcgtggaagtacgaagaaatcttacacaaattcgctcgcactcattcggatgccttaccatcccatgaactgaaggcaatgcttaaggctaacagggaacccaaggattacaggtgatgggtcgctagctgcacagagtgagataactctatacaatttgtgcaaag

SEQ ID NO: 236254 - DNA, 427 bp, Gossypium hirsutum
atgttccaaaaatcaattgggatacccgataagaagaagggagaggagatgattgcggcttcagcagtgttgaaaggcactgtattggagcctgaagattttgcacatgcagcactgtatttggcaagtgatgaggctaaatttatcagtggtgtcaacttaccactggatggagggtatagtctcagcaatcaatcatggaagctgggattcgcagcactttttggataaaccaccaagtcctctgcttcactctttgaattatattctcttaaataaggaaaataaaactcatccaaaattacacacatgaaaaactgtattgtcgtatttgatcagtctcctgtaatgcttttgaagtatcctttctttatcaataacacttgttttgctgttcaaatgaaaaaattacttccattttccaatc

SEQ ID NO: 236255 - DNA, 403 bp, Gossypium hirsutum
cccacgcgtccgcccactcgtccgcccacgcgtccgcccacgcgtccgcaagtcccgtggatgccgatttacctctttcagctgatgttgcagttataatgtatactagtggaagtaccggattgcctaagggtgtgatgatgacgcatggcaatgtactagctacggtttctgcagttatgacaatcgttcctggacttgggagtaaggatgtttatcttgcttatctgccgcttgctcatattcttgaattagcggctgagaatttaattcctgctgttggaggtatcataggatatggaacccctttgactctcaccgatacatccaacaagataaaaaggggaacaaagggggatgccactgttttaagtcctactgtgatggcagctgtcccagcaat

SEQ ID NO: 236256 - DNA, 482 bp, Gossypium hirsutum
aatttttgcctgccggtgcgacggttgctcctgtaaaaacacttggggttcatatgagtgcaagtgtaaggggaatcttctgtatataaaagagcaagatgcttgcattgagagaaacggatcgcgctttgggtggttcctcaccctcttggtactggcagctgtggttgctgctggcttagctgggtatatattctacaaatataggctcaggtcttacatggactcggagatcatggctatcatgtcgcagtacatgccgctagacaatcagcataacaatgaagttgctagtgaggcgcagcctttgcgacaaagctcaacagcataaacgagggtaaggagaaagcatggattatggtattatgttggccctcccatgaaattcgagccgtccatatatacgtgtatatatttacagctcttatgaaattacaaaaagacacatgtttaactggtatacaggcacacccacgatgagt

SEQ ID NO: 236257 - DNA, 479 bp, Gossypium hirsutum
agaatctaccccattcaagctggtggaggaagtaaaagatttgaaggagttagcagctaaattacgcaatgtggatgagtttgcggttgatttagagcataaccaatatcgatcttttcaaggattgacttgcttgatgcaaatttccaccagaaccgaggattttattgtagatactttgaagcttcgaattcatattggcccatatcttagagaagtattcaaggatcccatgaagaaaaaggttatgcatggatcagacaaggatatcttgtggcttcaacgggactttggcatatacttgtgcaatctccttgacactggacaggcctcaagggtcttgaaattggaaagaaatagcttagaacatcttctgcaacactactgtggagttactgccaacaaagagtaccagaatgcagattggagagtgcgtcctcttcctgatgaaatgctcagatatgctagagaagacacac

SEQ ID NO: 236258 - DNA, 463 bp, Gossypium hirsutum
ataatgatggccaacgctgcatcgggaatggctgagcatgatgattgtaagttgaagttcttggagctcaagacaaaaagaacccaccgattcattgttttcaaaatcgaggagaagcaaaagcaagttattgtggagaagcttggtgaaccaaccgaaggctacgcggattttactaaatgtctccccgctgatgaatgtcgatatgctgtgtacgattttgattttctaacggccgagaacgtcccgaagagcagaatctttttcatcgcatggtctcccgacacgtcaaggatcaggagcaagatgatttacgccagctccaaagacagattcaagcgagaactggacggaattcaggtggaattgcaagcaacagatccaactgagatgggtctcgatgtgttcaaaagccgtgctaactgaatacggttcttttaggcatctgcaaccgggaagcttc

SEQ ID NO: 236259 - DNA, 480 bp, Gossypium hirsutum
ccttcttgtccgcccacgcgtacggtcccggagggctgtttacacttttccgagttaacccaagccgacgagaacgatctgcctgaagtcgatatcgtccccgacgacgtcgtagcgctttcttattcgtcgggaaccacggggctcctcaaaggggtgatgttaacgcacaaaggtttggtcacgagcgtggcgcaacaggttgacggagaaaacccaaatttgtatttccatagcgaagatgtgatcttatgtactttgcccatgttccatatttatgccctgaactcgatcatgctctgtgggatacgtgttggggctgcgattttgatcatgcagaagtttgacatcgggctactgttggagctaatacagaaatacaaagtaaccattgctccgattgtgccaccgatagttttggccatcgctaagtcattggaaactgaaaaatacgacttgtcatcggtgaggatgctgaag

SEQ ID NO: 236260 - DNA, 402 bp, Gossypium hirsutum
ctacgcgtccgcccacgcgtccgcggacgcggggggtcttttgcaaaaatctgtgatcccgccgcccactactactaccaccaccaccaccaccaccaccacctaccagtggtgctcttccaatcagcgatcagccaccaccacagtcaaccgcaacaacccctcaaatggcgaccactgcagcaacaacaacagttgcctccgacgcaacaaccaccactttctccgacggtccagtccttagtctcatcaacaaacgcatccgtgccttacgcaagaaatacaaccgcatcctccagatggaagaattcgggtcccagggcaaacccttaaacaaagaacaagaagaagtcctccgttcaaaacccttcgtctccgcccttatcgacgaactcgagaagc

SEQ ID NO: 236261 - DNA, 415 bp, Gossypium hirsutum
cctatgtgtccgcccacgcgtccgaaaaacgacatcgctgcggctattacgaggaccgacattttcgatttcttggtagatattgtgcctagggatgagatcaaggatgaaactggtttgactccgatggttggggctaccgccagtggggtaccttacttttatccccctatgggtcaacctgctgctggtggtcctggtgggatgatgattggccggcctgccgtcgatcccaccggaggtatttacggtcagccaccttctcaggcttggcagagtgtttggcagacggcggtaaatgatgatggctcggtggaagtggagttaccggtggtcaagagaatcttgacggtcaaggctaacctaaaatcatgggtccgatatcgtacggtggatggtgcggaaaacgcgtgga

SEQ ID NO: 236262 - DNA, 448 bp, Gossypium hirsutum
cagatgaggaaggaaaagtattttgagacacattagactcttcctgctggttacttggaaattggggagcctactgctgaaggggcaataagggaaacatgggaagaggcaggtgctgaagtggaagtcatttccccttttgcacaactagatattccccttattggacaaacttatgtaatcttcttggcaaagctgaagaagccccaattttcaccaggaccagaatcatccgagtgctatctctttgaattggacgacattctctttgattctttgacattttcttccatttttgttactttgaatttggttaagaagcgaatgaggaagcctatctatgtctactaccaactggacaatttctaccagaatcatcaaagatattgaaggtgcgacaaaggattcaatctcttcaagctggaaatgccaaggcttagcacttctt

SEQ ID NO: 236263 - DNA, 518 bp, Gossypium hirsutum
tgtcgcgtggggtgattgcccaaaccgacggggctcgcatgtcgatagcttctttttacaaccccggcagcgacgccgttatctacccggcgccagccctggtggagaaagaagaagaagaagagaagaaaggattgtacccaaaatttgtgttcgaagaatacatgaagctttacggtgtgcttaaattccaggccaaggagccgaggtttgaagccatgaaagccagggaagcaacagcttaaagagaattcaatacctgacgtagctttgagtttgatcaagaaatgggttctgttaatggtgtattaaagaaaaaagaagtcaatgtttagtatagtctattgaataatctattttattctaaacagtgaggatcctgtcaatttctactataaaagatttgatagaataaaattacttacaaagggaatggtgggttgccacaaaggaacatgaagatatgcaataatctattttaagtgtgtgagaaaaaaatattaaagaaaaaagaagtc

SEQ ID NO: 236264 - DNA, 206 bp, Gossypium hirsutum
cctactcgtccgcggtgatcgagggttatcagtatcttgttagactccatttctgcgatattgctagcatatcccttggattgttgtttttcaatgtctatgttaatggacatttggcatataaagatttggatccttcggccgttaccaattatttgttggctcctccgttttttgtggacttggtagttgatgctgatcattcc

SEQ ID NO: 236265 - DNA, 449 bp, Gossypium hirsutum
ctgtttcgtgtcacggaaaaagaagcaatcccaggagatttattgaaatggggttcgctcggtttttgcaggacttcgagatttgcatctgggttcaagcctttagaacccaagccattggattccatcatggatttgaacagatcaaagaaccgttcacctgaggaccttgcttctatttgggatgattatcacttgggaagaggtcatattgggttgaccatgaaggcaaaactttaccgtttattggaacaaagaggctcagattgccggtattttgtcgttcctttgtggagaggaagtggttatacaacagtgtttggtcaagtgcaattgccatacatgcttttcactggtctcgaagattataaagcaagaggaactcaagcatgtccttacttcactgcatccttttacacagaatttgcggaaagcaaggacttggtact

SEQ ID NO: 236266 - DNA, 341 bp, Gossypium hirsutum
tgtagtatttgaagccgagtaatatattacttgaccagaacatggaagcccacatttctgattttggacttggacggcttgccaatattgctggagggtctccaaccacacaatctaaccgaatactttcagataaaccgctagagagactacaaaagagtgcttcctccgaagctgctccactctactcgaacttgggatctttttaccaagctcctgaagccctgaaagtggtgaaaccatcacagaagtgggatgtctactcatatggtgtaatcttgctagagatgatcacgggaaggtcacccgtggttcatgtaggtacctcagaaatggatctt

SEQ ID NO: 236267 - DNA, 443 bp, Gossypium hirsutum
attgtgtgcccttggagcacttttggtctacgatgttactaatccgacgacatttgaaaatgtaagccgatggttgaaggaactcagggaccatgcagattcgaatatcgtgaatatgtgatcggtaacaaaactgatctgaagcatttacgagcggtttccacagaagatggtcaaagctatgcagagaaagaggggctttcgttcattgagacatctgcactggaagcaataaatgtcgagaaagctttccagaccattctctctgaaatatatcgcatcatgagtaagaagtcactttcttccgatgacctggcacctgcaagtattaaagaagggaagaccatcgctgttggagcaccagatgccaacactaaaaaggcttgctgctcatcatcttgaacatccatctttgatcattacaattataattcttctttttt

SEQ ID NO: 236268 - DNA, 240 bp, Gossypium hirsutum
gagaatgcttgcgaggaattgagaaccagtaggatgtttttgaagcttctagaggctgtgctcaagactgggaaccgcatgaatatcgggacaaaccgtggtgatgcccatgccttcaaacttgatacacttcttaagcttgctgatgtgaagggtgcggatgggaagaccacactcctgcattgtgttgtacaagaaatcatatgaactgagggtgctcgtctttccgatgctgaccaa

SEQ ID NO: 236269 - DNA, 283 bp, Gossypium hirsutum
atcctcacgcgtccgtatatcaccgttttgcagcaatgagaaagctgatgaggttgaagaatttttcgaaagccgtgtgacttcttcatttgcaatgaatttgaagcaaagcattgagcaggttcggatcaaagcaaggctggttgaaagcataaagcaggagcggcaacctcttcaagacctactcaagcaattagtttgtaagggatgataacttcagctgttatctcaatgtataatatatttatatgtactaaagcataaaggcttgacattttgtctg

SEQ ID NO: 236270 - DNA, 355 bp, Gossypium hirsutum
tcatcaggtagcttccatggcggctgttgcaacaccaccaacaacaacctttgagaacccaagggtgggctttctttcaccaaagcctgttcctatgaaacatgtctcttccaccccaccaaaagctgcgaagctttataggggtgtgagacagaggcattggggcaaatgggtggctgaaattagactccctaagaaccgaacacgactttggcttggcactttcgacacagctgaagaagcagccttggcttacgacaaggctgcttataagcttagaggagagttcgctaggctgaattttccccaccttaagcaccaaggagctcatgtttttggcgagtttggtgactac

SEQ ID NO: 236271 - DNA, 428 bp, Gossypium hirsutum; identical to SEQ ID NO: 200227

SEQ ID NO: 236272 - DNA, 305 bp, Gossypium hirsutum
gctctttcgtccggagatgaccgctgagatgctcgattacaagatccacgctgtctacaactctttgtacagcacacctacatgttatgggattcatatgtgcggactgctgtttgaagaccttttgctgcagggaggactggaagaggtcgacaagaagaaccacatgaaagccggtgtcttgtacaatgccatcggtgaatgcagaggattctacaggagccctgttgagaaatctgtgagggcaatgatgactgtgccattcacattgtagaagtctgagttggaggctgaggtcttaaagg

SEQ ID NO: 236273 - DNA, 386 bp, Gossypium hirsutum
catagcttcgtcttccactgtttatccccattaagcttctctgtttcttttaatcgtaatatttagggtaagtttcgatttttggcggggaaatatgtctggaaaaggcgccaaaggtttgataatgggcaaaaactcggcttctaacaaggacaaagacaagaaaaaacccatctctcgttcttctcgagctggtctccagtttcctgtgggtcgtatccaccgtcttctaaagttaaggaccactgcacacgggcgagtaggagccactgccgcggtttattccgctgctattctcgaatacttgactgcagaggtgttggagttggccggtaatgcaagcaaggatctcaaggtgaaacgtattactccccggcatttgcagc

SEQ ID NO: 236274 - DNA, 289 bp, Gossypium hirsutum
ctttctcgtccgtccacgcgtccggccggagataagaagaagattaaagcctagaagagtgtctagacctacaagatctacatcttcaaggtcctgaagcaagtccatccagatatcgctatcttaagcaaagctatgggaattatgaacaggttcatcaatgacatctacgagaaactcgcccaagagtcttcaagactggcaaggtacaacaagaagcccaccatcacttccagggaaatccagacctgtgttagacttgatcttcctggagaacttgcgaaacacg

SEQ ID NO: 236275 - DNA, 263 bp, Gossypium hirsutum
ttctttaaccctctgaaaaaacaatcctcctgccgacagatactaaagtcttgaatttgctcgcttggggcttgtaacgaaggacaagaaaaatatcgcctatgacagaacagctacctgcatagatatcctcacagacaccattttgcctactgtcggtgtcttcctcaactttgcatgccagctacaattctggatatcccatgctctcaccctgtgtgggtacattcctggctttatttatcctatctatgccatcacca

SEQ ID NO: 236276 - DNA, 351 bp, Gossypium hirsutum
catggatgcccctaagagttgtacgcctgaagaagttgccactgtgaatgtaatatctgcaaaagatttgcttggatcaaactactgctatctggatgtgaggacacccgaggagttcagtaaaagtcatattgaccatgctttcaatgttccttacatgttcatcacacaagaaggtaaagtgaaaaatccagagttcctgaaggaggtctccttaatcttgaaaaaggatgatcacataattgtgggttgcaacagtggaggacgaggtgtcctagcttgtgttgatcttatcgaggctggctatgagaatgtgagtaacatggaaggtggttattcagcttgggtcga

SEQ ID NO: 236277 - DNA, 347 bp, Gossypium hirsutum
tcgtctcgcgtccgatggaactgacacgagtggggcaaattatatgtggaccttacaaaagatgatgggaagcttagccatgggatgggctctgctcaatctgatggtttaaaacataatagtgcctcacatttgatgcaatatgctctgtaatgttgcattcatttgcttatttctgccttgtttttctcgtattctatgggctgatgtctcatatgggacttttctactagagagcctacgtttctttaccattatattggaatctttgagacattattatttttttaccttttgaggacactctttttttgtatttgaaggaatttattgtttattttggttgg

SEQ ID NO: 236278 - DNA, 470 bp, Gossypium hirsutum
ctttttcaaggtgctgaacctggacctccatatactacaggggaccatcttataaccaatgctggcaaaatggttctcttggacaagctactgccaaagctaaaggagcgtgattctagagttctgatattttctcagatgacaaggttgctggatattcttgaagattatttgatgttccgtgggtacctgtattgtcggattgatggtaatacgggtggagaagaccgtgatgcttctattgaagcctttaataagccaggaagtgagaaatttgttttcttgttatcaactagagctggaggtcttggtattaatcttgctacagcagatgttgtcatcctttatgatagtgactggaatcacaagttgatctgcaagccagaatcgtgctcatagaattggtcaaaagaggaagttcaagtgtttcgcttttgacggagtacactattgaggaaaaggtgatagag

SEQ ID NO: 236279 - DNA, 221 bp, Gossypium hirsutum
ctactttttttttgtatcaaggcttttggtgttactcatatattattgaaggagtgatgtcggctcaacaaaatgttcaatatcaaccttccgacatcgtcatatgcagtgcaccgaaaactggaacaacatggttaaagtccctgactttcgccattgtcacaagaaccacctttgatggtttcactaaccctttacttgccaatctatcacatgattgt

SEQ ID NO: 236280 - DNA, 419 bp, Gossypium hirsutum
tttccatccaaacatcaacagcaatggaagcatctgtcttgacattctcaaggagcagtggagccctgcccttaccatatccaaggtgctgctttcaatatgctcacttctcacagatccaaatcctgatgaccctctggtgcctgagattgctcacatgtataagactgatagagccaaatatgagagcactgctcgctcatggactcagaaatatgcaatgaattaagggtcggtcaggcttaggatgctatgtttgatacctattactaaataatattagtaataacttttttcgtttggatactttgataaagtggtggtgttggtgtaataagctctaaagtctttcagagggtaatttttttttcaatcaagttacttaaaaaatactattataaatatattcgatagttcgt

SEQ ID NO: 236281 - DNA, 176 bp, Gossypium hirsutum
tcgcttatttttccgcccacgcgtccgaatggatcagaatttgtgcccacttatgaagataaagatggtgattggatgttggtcggagatgtaccatgggagatgttcaccaattcttgcaaaaagctgaggatcatgaaaggatcagaagcaagaggcttgggttgagttgtttg

SEQ ID NO: 236282 - DNA, 314 bp, Gossypium hirsutum
ctcacgcgtccgcggacgcgtggggggtaagctgcctatgacatggtacccacaagagtatgtctcaaatttgccaatgacggacatggccatgcgttcaagcccaaacagaaactaccctggaagaacctacaagttctacaaaggtccagtagtgtatccgtacggtcacggattgagttacaccaactttgttcataccattgctagtgcacccaaagctgtcacggaccctcttgatggccaccgccattcagggaatgctaccatttcagggaaggcgatcaaagtaaatcatgtgagatgcaacaagc

SEQ ID NO: 236283 - DNA, 307 bp, Gossypium hirsutum
ttccgtttacgatggttacctcaacggacaacttaatgtggctcgtgcattaggggattggcacattgaaggaatgaaagatgcaaatggaggaccactaagtgcagagcctgagcttatgactgcagatctgacggaggaagatgaattcattatcataggatgtgatgggctttgggatgttttccgtagtcaaaatgcagttgattttgctaggcggagacttcaagagcataatgatcctgccatgtgcagtaaggatctggtggatgaagctttgaaaaggaaaagccaggataacttgact

SEQ ID NO: 236284 - DNA, 194 bp, Gossypium hirsutum
tcgttcacgcgttcgcccacgcgtacgtccacgcgtccgtccacgcgtccgctcgaggatgagagttctgacaccatcgataatgtaaagtttaaaattcaagacaaggaaggcattccaccagaccagcagcgtttcatcttcgtcggcaaacagcttgaggacggccgtaccttggccgattacaacattca

SEQ ID NO: 236285 - DNA, 378 bp, Gossypium hirsutum
gtttaatcgaaatgcaagacccgacgggttttcaacaaatgaaggcaccggtttttccagagcaggagcagctaaaatgcccgcgctgtgactcaaccaacactaaattctgttactacaacaactacaacttagctcagccccgccatttctgcaagagctgccggcgttattggaccaaaggcggagcccttcggaacatccccgtcggcgggggtacccgcaagaactccaaacgctcctcctcttcctcggacagtagcagccaacccaaacgccagtctaaccccgctccggactcgatccgaaaccaaaatcttcccgactcgtctccgccgccgacgattccgcagcaggttcttctgagctcggcggttc

SEQ ID NO: 236286 - DNA, 310 bp, Gossypium hirsutum
tcgtttacgcgtccggcttgatcaagcaacactggaagatctcctgatacctaatttctcctgttctatggaaacactatataatgttgactgtgtgcagcaaattcttgaacattttcttgcaatggaccagatcactggtggagcctctccatctttggttgatgatggtcagattaccgcctcgccttcattaacaccagttacactggtagccaagctaattgatgggtaccttgcagaggttgcctatgatgttaatttgaagcttcccaagtttcaggctcttgctgcttctgttcctgactac

SEQ ID NO: 236287 - DNA, 442 bp, Gossypium hirsutum
cccacgcgtccggagaaactaggtgtgaaacaatggcgtcctcggatcttattggcaagctcgagactgatgtcgagatcgatatttctcccgaaaagttccaccatatgtggtgccacaggccgcaccatgtccaccacactagctctgaaaaagtacaaggatgcgatttacatgaaggtgaatttggaactcccggcgtcgttatctgctggagatatgtgcatgatggaaaggctaaaactgcaaagcaggtagttgaagttatggaccatgagaaaaagtcaataactttcaaaatgcttgaaggagatctgatggaggaatacaaaagcttcgtgattacaatccaaacttcccccaagagcgacggtaaaggcagtatagtgcactggactctggattatgaaaagctgcacgagggtattggacatcccgagtc

SEQ ID NO: 236288 - DNA, 396 bp, Gossypium hirsutum
gagctttccaagatttttaatcgaatgcttcaccatggttttgctcctaatactataaccttcaatgtcatgcttgatgtttatggtaaagccaaacttttcaggaaggtcaagaaactattctggatggcaaaaactggaggtttggtagatgtaatctcttacaatactattatatctgcttatggtcaaaataaggacttcaagaatatgtcatcaaccattcgagaaatgcaattcaatggtttttcagtttcccttgaagcctataattgcatgttggatgcatatgggaaagaaggcgaaatggagaatttccgaagtgtattgcagaggatgaaggaatcaaattgtgcttccgaccactatacttacaacattatgatcaatatttat

SEQ ID NO: 236289 - DNA, 447 bp, Gossypium hirsutum
aatattcgtttccccactttcaatgccctcttttctctttcggattttcttgctatacaatctcctcctcgactatttggtccccagaaagctcaaatctttcctctctccttcttgtactatcaccactccctttgtttctgtcggaggtgaaaccgaaaagaacccatctccggcagttgcattggcatcggtctcccctcgttgtcctctaaaaagaatggacgctgctgagttgaagagagtgttccaattgttcgacaagaacggagatgggtccatctccaagaaagagttgaacgattcgttggagaatatgggtatctgcatccctgatcctgaattaacccaaatgatcgaaaagattgatgtcaacggcgataagtgcatcgatatcgacgagttcagtgagctgtaccgatccattatggataataaggatgaaga

SEQ ID NO: 236290 - DNA, 434 bp, Gossypium hirsutum
tccacgcgtccggtctaactcgaccaactatctcaattcaaagttatttggacaggatttataagtatgcaaattgtagcccttcctgttttatcgttgcatacatttaccttgatcggtttgctaaaaaaaaaacccactttgcccatcaattcattcaatgttcatcgcctgcttattacaagtgtcatggttgctgccaagttcatggatgatatatattataacaatgcttactatgcaaaagtgggaggaatcagcacaatagaaatgaattaccttgaaatggattttttatttgggttgggttttcatttaaatgtagcccccaatactttttacacttacttcacttacctacaaagagagatcatgttgcaaccaccaccaagtattgcagaatcatcattaagtcttgataggtcattaaaagt

SEQ ID NO: 236291 - DNA, 441 bp, Gossypium hirsutum
gaaaaagaagggaaaatggaagggaaagaagaagatgttagattgggagctaacaagttctcagaaaggcaacctattgggacagcagctcagtcccaagatgataaggattacactgagccacccccagcacccttgtttgagcctagtgagttgacttcatggtcgttttaccgagctggaatcgctgagttcgttgctactttcctattcttgtacatctcggtgttgactgtgatgggagtccttaaggacaaaaccaagtgtacaactgttgggattcaagggattgcttgggcttttggtggtatgatctttgctcttgtttactgcactgctggtatctcaggtggtcatataaatccggcggtgacatttgggctgttcttgggaaggaaattgtctttgacaagggcaatattctacatggtgatgcagtgc

SEQ ID NO: 236292 - DNA, 373 bp, Gossypium hirsutum
aggaatgggaatatgctgacagtactagtggcactggggagcttcgatcggataaattgaatggcgacattgcacctgatttatctgagacagcatgtgagcttggtactggtggagttggctatatttggacagcctttgaaggagcgtatgatgaagaatggaggcattcagttgcacctattcccacagataaactggttaagctaatgctagataaagatgaggatgaggaactgttaactcaagatgggaatgttatttcagcttcaagagagctgaaaactgattctgatggtaatggttctgaagatgacgataatgaagactctagagatgactatgtatcctttgagaaagaggttgaagctac

SEQ ID NO: 236293 - DNA, 240 bp, Gossypium hirsutum
tgggcttcggctcaaacattgaaaggcggagaccaactggttttcaagtactcatcagggatacacagtgtagttgagcttggaagcgagacagcttacaaaaactgcgacctgggaacatcattggattctaaaaatacaggcaacgatgtggtgaaactcaacaaagtgggcactcgttatttggcttgtggaacattaggccattgcgatcagggcatgaagatgaagatcactacg

SEQ ID NO: 236294 - DNA, 425 bp, Gossypium hirsutum
tttaacatccacgctcgtcggaaatgcccaagggctctacttagcattgagtcgagaccttaccaagttttctgcagtcttttacgctgattttacttttaccactggcaggttcaacggcagctccttcagtttattctcacgatttccccccacagatgttgttcctgcccctggcacaattcgtgaaatggcaatagtgggagggacaggtaaatttaggatggccacaggctttgccctcctgcgacccacttcttcaagcaacacggtcggggatgctaatgtcgaattcaatgttactttgtaccattattaaacccaattacaaaatattgaaatccaacgaataagatgaataaaatgttgtattcctaaagattatatttaatgtattgtcagtaatcaataaatcataattcatc

SEQ ID NO: 236295 - DNA, 455 bp, Gossypium hirsutum
  unsure (1)..(455): unsure at all n locations
ttccacgcgtccgggaaataatagattcaagaaccagcaacaccctacaatgcaaggccttggaccatgcagattcattaggtcttgtactaataagtagcagaacaaggagcttgattaactggctggtgaatgcattgatgagtctccaacatccacattcagaaactggaatccctgctgtcaaaatctatggtccaaaagtaatgtttgaccgaggtccagcagtggctttcaatgtatttgattggaaaggggaaaggattcatcctgcattagtgcaaaaactggctgatagaaacaatatttcattgagcattgggtgtttacaacacatctggttcagtgataaacatgaagaaatgaaggaaaaagataagtttcagcctgngatagatgttgttacagctgcaattgggtaccttactaattttgaagacatttataggctttgg

SEQ ID NO: 236296 - DNA, 445 bp, Gossypium hirsutum
cgacaaggagattacactaccaagattatagaatggatggagcttcaaaagagaatatggatctatgagttagggtccttgccaccgtttttgcttgtctttgcagggaatatagctcctgttgatcaccggtggaaccaacatggcctcggaggagataactatagaggattgtgtagaaatttgcatcctggtccagttagcttactgcattggagtgggaaagggaagccatgggtgagattagatgcaaacagaccttgtcctttggatgctttatgggctccgtatgatctgctgcaaacaccatttgccttggagtcctaaaattttggtattaattatttttatatatgattatgttttcatatctaggcctgagatttttagttggatgaggccatagaacatacacacaacatagatttgagtgtaaaattaagat

SEQ ID NO: 236297 - DNA, 265 bp, Gossypium hirsutum
tttttacgcgtccgcccacgcgtccgcccacgcgtccgagcatatccaaaaacttctactacttggtgctggtgaatctgggaagtcaacaatttttaagcagataaagcttctgtttcaaactggctttgacgaggacgagctaaagagctatatctctgtcatccatgcaaacatctatcagactataaaaaaactgcatgatggatcaaaggaattagctcaaaatgatgcagattcttccaaatatgttttatccagcgaa

SEQ ID NO: 236298 - DNA, 505 bp, Gossypium hirsutum
gtcttatgccaccagtttatatgccaccagtgtatgaaccaccagagaaggagaaacctgaacctaagccaccagtttatgcacctccaaagaaagaaaaaccagaacccaaaccaccagtttataagcctccaaagaagccaccagtgtatgagcctaagccaccaaagccaccggtttacacaccaccaaagaaagagaagccagaacctaaaccaccggtacatgagtctcccaagaaaccaccatatggtcactatccaggacaccctccactggggaagcctcaatagagagatcccatcggctagccatcccaagaactgagctactatggctatatggataaattagtatctatacaataaaagttgcttcctactcatgttctatgttcttgtatgttcttgtatgttatgtaggaatgttttcttttactagcgagaatgcttatggcagtactcaatggaatgactattctatgtcttcttatttttcaatgagc

SEQ ID NO: 236299 - DNA, 419 bp, Gossypium hirsutum
cccacgcgtccgatccgtcatcatgacaacatcaaggcgtcttgcagaaagaaaggtggagaagttccaaaagaacataacaaagagaggagctgtgcctgagacaaccacaaagaaggggaaggattatcctgttggtcctgtgcttcttgggttcttcatattcgtcgtcattggatcatgtaaggattctttctttgccatcatatttccttattcgatgtgtatggataatttgtctggtttcttcgttggaaagtgtaatatgtttagcttttcttggtgttcagttaatttcatcattgtaatcttcaaggatatttgcttaaattaaaatatctataattacaatttagagtcaagattttctgcatgtcctgtctgtcatgatttactgatcaacttcgtttacattcacc

SEQ ID NO: 236300 - DNA, 465 bp, Gossypium hirsutum
gtccatgggagacgcggttgatggaactgtcaacacgtaccgacccttcgaagacttgcttagagtccctctcgggaaagaatgaaagatgttcggaaccgtgctcaatgaaagcgaggaagaacaatgtcaccactagggtatccgcaaagccgccgcctcatactaggcaagttactcgatcatcttcaagtccaagttctgaatttcgattcgacgaaagctcgggttcatcgtcaatatgcacttctacaacaccagtttccggaaccaccgtcttgccatcggatgcgacgggggacagtggcaatagtaggccgaactacatgaacatgacggtgtctaccaaggcgaaacaaagaagtggcaatcacggattccaaaggcagtccatggatgagttcgagttcaagaggtcagcttgtttcgataacggagattcaaaaagctcaaagagaggaaatt

SEQ ID NO: 236301 - DNA, 278 bp, Gossypium hirsutum
ctggatctcattagatttctctgtctcttcccgccgatcatctgcaatctgattgaaagttttgtttaaagaagaaaaaaacgaacatgaagcttgacaccaccggtatggaatcggcggtgccggtttggggttctcataatgaatttgttgatgagcttgcggttgctgcgacattcgagctcccaaatactactgattttgatgggcttcaaaaagaagctattcatatggtgaaacctgttaaaggaaccaccacacttgcctttattttcaag

SEQ ID NO: 236302 - DNA, 217 bp, Gossypium hirsutum
attattgttaccgctgtggaaacatggcttctatattggaagttgacgattgcaagagtcacacattcatccagtttgagccagctccaaggagaggtgaacctgatgttacccgtagaacaccggattacttcctgtgaagcagctatatgccacaacttattcaagatactcaacttttgttcctctccgctctccccttacatagttaggtagt

SEQ ID NO: 236303 - DNA, 300 bp, Gossypium hirsutum
tcggactggtgctaccttctgattctccacttcgcactagtctattaacggagttccatttgtcccctgttggcggccactcaggcatcacccgtacgtttcatcgccttactacaaatgtttattgaaagaatatgcatcgagatgtccgctcttgccagatctgtcaacagatgaagtctgctacaatttctccagctggcctccttcaacctcttccaatttcgattttcatctttgaaaatatttccatcgactttatcaccgagtttccaccttcaaagggtaaaaccgtggtta

SEQ ID NO: 236304 - DNA, 408 bp, Gossypium hirsutum
tttttacgcgtgcgggccgacttctgcttgttatccactcgccaactgtaagactccaatacctactttcttcaccatccatgggttatggccaacatttgccaacgacaccgcagttcctgcttatgggcctaataatagatgccatgccaatcctgttggtcccgatgctgctgtggctagactaacacccattcaagacagactaaaccaaaggtggccaaaccttagggcaggggttgaaaactctgttttttggagacatgaatggcaaaaccatgggatgtgctctgattatcctcaagatcctttgagttattttaatgataccttaaatcttgcaacttccaccaaattcgaccctttcaaagctttgggagttcaaccatcaaacactccctatctttt

SEQ ID NO: 236305 - DNA, 333 bp, Gossypium hirsutum
ctttcgttttcgaagggatggagcaccggaggaaccagcatacgtctcggtgacgacaacttggaaggcttatgcagggctctgcaccccggtccggttagcttgttgcattggagcggtaaaggaaagccatggctgagaatcgactctaagagaccctgtccgttggattccttgtgggctccttacgatctgttccgccatccgtctttgttctccaatagctaaaatacggcggagagagttcatcggattacgcaggagaataaggacacgcgtaaaaaaaggaaagcaccttgcaacttgcttcgccagtgaaaatatggagttacc

SEQ ID NO: 236306 - DNA, 429 bp, Gossypium hirsutum
  unsure (1)..(429): unsure at all n locations
tcgttttaatcaaagctgcttctgtgaaagggatgagctacgtcgtcttcactgcctactgttatattttaggaacccttgttttcctcctcctagtctccctctttaaaagcaaatcagtgctccctcaattgaagtaccctcttttttccagaattttccttattggactttttgggttttcaggtcaattatgcatgtacaaaggcttacaacttagttccccaactctggcttcagccattagcaatctcacaccagcttttaccttcatacttgctgtcttcttcaggattgaaaaagtagcatttagaagttcaagcagtcgagctaaaatcatgggcacctttacatcaatatgtggtgcattagtgattattttttacaagggccccaaagntttttcattatcatcatctgctatacacc

SEQ ID NO: 236307 - DNA, 479 bp, Gossypium hirsutum
cccacgtgtccgtgggattgtgtaccagttgggtattgctaatcacagtaccagtattgctgtatacttgctttcttggatctacatttttgtggcatttggaatttatctggtaatctcatatgctcgggacaaatatgcagctaaggagcatatatatttccggatggttcagttcctggtcatcattcttggaatactagttattattgcactgcttgagtttacagcctttaattttgttgacattttcaccagtttattggcttttattcctactggctggggacttatatcaatcgctcaagtacttagaccattcctgcattctacctggctttgggaatctgtggtttctgtagctcggctgtatgatataatgtttggagttcttgttatggtccctctggcatttttgtcgtggatgcctggatttcagtcaatgcagacaaggatcttatttaatgaagcatttagca

SEQ ID NO: 236308 - DNA, 375 bp, Gossypium hirsutum
cttacgcgtccgcccacgcgtccgattcgattaggcgcggttgtcattaccgggatcatcttagccaccatgttttggaagctagacaattcaccgaaaggcatccaagaacgtttaggtttcttcgcttttgccatgtcaacaacgttctacacttgcgccgaagcaatcccggttttcctccaagaacgatatattttcatgagagaaacagcttacaatgcttatcgtcgatcatcgtatgtattagctcactcgctaatctctatcccatctctagttatcctctcgatggccttcgccgcaataaccttttgggcggtcggactcgctggtggcctttccgggtttttcttcttcttcctaaccatcttc

SEQ ID NO: 236309 - DNA, 493 bp, Gossypium hirsutum
ccttcgcgtccgcccacgcgtccgcttgtgcaagaagttttctttggcaatgtactcagcgcgaatttgggacaggctccagctagacaggctgcgctaggtgcaggaattcctaactcggtcatatgcaccactgttaacaaagtttgtgcatctgggatgaaagcaacaatgcttgccgcacagagcattcaactggttcaagtgcaaaacagccagcatcaacaacaatatgcgggttattctcagattcatcatgcatcacaatctgttgcacctacctccagcacggctgccccatatgcatatgaattcactgatccaactcatgctcaaatgtattacactcagcctatggcacccaacatgcctcctcagtaccaaaccatgactgcagtagtcttgccagatgcacccacgcaacttccgactgacaacatcaagccacagatcagaacttcacagccaatatagatcagtcaagaaggaagcg

SEQ ID NO: 236310 - DNA, 248 bp, Gossypium hirsutum
gttgcttctaccacaactacagagaagagagtcaaggggaaaaaaagcgtcgttgttcttgcttcttcttctacttcgctctctctctttctccgaagttcctccttcgatcttttatttattcagtattgtaaaagatggccgacggtgaggatattcagcccctcgtctgtgataatggaactcgaatggtgaaggccggttttgctggtgatgatgctccaagggcagcttttcccagtattgtt

SEQ ID NO: 236311 - DNA, 374 bp, Gossypium hirsutum
ccttcgcttccgcccacgcgtccgatcccttggtacaaaaaatcaccgacttatatgaccaaatctcaaccctcgacagtctcaaaccctccaaagatgtcaacatgctcttcacccaactcgtcctcacatgcatgccacccacccatatcgatgtcaccaagctttgcaaaaaggttcaacagatgaggtccaaattgattcggctatgtggtgaagccgagggactattagaaacccatttctccaccatcttagcatcctatgataacccacttcaccatctcaatattttcccttactacacaaactaccttaaactcagccaactcgaattcaatatcctcaccaaacactgctcaaatgtgcctaac

SEQ ID NO: 236312 - DNA, 275 bp, Gossypium hirsutum
tttaattgctcttccaaagatcatcaagactggtttctctgcaattaatctcatatatttcttcacagcaggaccagatgaggttaaatgctggcaaattagacggcaatccaaggctcctcaagctgcaggagccattcatactgattttgagagaggatttatatgtgctgagaattcatttgagtgcagttattctaccatttgagtttaaacataactgaaaggacactatttgtttttacgtcatgaaatttgaagatctgaaggagctt

SEQ ID NO: 236313 - DNA, 243 bp, Gossypium hirsutum
ttccttgcgtccgggaaaagatggctatggcaaactccttcaatgctgccagactactgacacttggctataactcttcaatttgcaaatcaaaatgggacaagtctccttctttccctgccggtgattatgagtatatagatgtggttatggaaggggagagaatgttgatcgacgttgatttcagatcggagtttgagatggcgcgatcaaccgggacttacaaagcgatcgtccaatcac

SEQ ID NO: 236314 - DNA, 345 bp, Gossypium hirsutum
ttttgatgcaggagggattggcatacttaccagccggaatctgcatgtcaacaatgggacgccatgtctcatatgaacaagcagttgcttggaaagtccttgaagctgatgaaagcactgtccattgcttggctttctcttttgtaaactggtcttttgtgtaaaaacatttgactgtaatttatatgttctacacctcaggctttccccagtagagaaggaaaaaaaagaagttttgtaatggcttaatacacgatttggcctgaagtatacctattttcttactttgtacctaattttttttttttggtctcaatctggtatctgaagtatcaatcacctctc

SEQ ID NO: 236315 - DNA, 503 bp, Gossypium hirsutum
tcgggaaaacatcgaggaatatgggagattgtgtcgagaaaggacaaataagtccatgatcaagaacaggcaaatacaggttatagataatgacagcggagttcacatgaggccaatgcctggaatggttggcttgatttcgtccaaccccaaggataagaagaaaacaatgccagttaaacaatcagatgtgaaaagaaccctaagggatcgtggggaactggaagatataatgttcaagctgtttgaaagacaaccaaattggactttgaagcaacttgtccaagagactgatcagcctgctcaattccttaaagagatactgaacgagctctgcgtgtacaataagagaggcgccaatcaaggaacctacgagcttaagccagagtataaaaaatctgcagaggacactgcagctgaataagtcagatatagctgtattttacgtttcctttttcttcagttaatcggaatatgtctgaaaacaaccctcatgaagacga

SEQ ID NO: 236316 - DNA, 438 bp, Gossypium hirsutum
tgcaaagtagatggttcccgtattttctttctccatcgatcaattgtgcatcttactcaaggtgatgctactgtttcctcttatttcacgcaattaaagttgctttggaatgaatacactgctcttgtctctttttccgattgtgcatgcgaggttgcccatcaaaattcgagtcacattcatcaacagtgattattccaatttttgatgggtctaaatgagacctatgctgcagttcgaagccagattctcttgatgcagcctttaccctcgataaatcaggcatactctatgattgttcaagaagaagcttagaggagtttttcttctgttttgtcgcatgtttccgatcctgtggctttatcttccactgcatttggcagccgtaagaaattcactgagtgtcactaccttcactcctcaatagtattcacagat

SEQ ID NO: 236317 - DNA, 286 bp, Gossypium hirsutum
ttttgaaacttcgcgaaagcctcacaagggtttatgtacaaagaacgggcaagcccctatgggttgtatccgaagacatggaaagagatgtttttatgtcagcaacagaagcccaagcttatggaattgtggatcttgtagcggttaaataagttaaataacaaatagcaatagcaacgatttaacaccaatccacaatttaattaagattgatttaatccctcttcttcctttccttcttaacttaagcctaaagcctaaggggttaatattttattaatctatt

SEQ ID NO: 236318 - DNA, 336 bp, Gossypium hirsutum
ttgcttccggaagaaaccgaagaatttcttgggaatcctacaagatccattcgttcttttttctctgatagatggtcagaacttcatctgggttcgaaccctactaagaggtccactagagatcaaaaattgttgaagaaagaacaagatgtttcttttgtcccttccaggcgattggaaaataaagaaatagttaatatattcaagaaaattacgtatttacaaaataccgcctcaattcatcctatttcatcagatccgggatgtgatatggttccgaaagatgaactgggcagttccaataagatttcattcttgaacaaaaattaatttttt

SEQ ID NO: 236319 - DNA, 406 bp, Gossypium hirsutum
ggttcacatccaatggtccggcatcgagtgaccgtccaagctcgactggctcggcctctactcgccccccgactccccccatcacaacttcatcggttacaagttcctttcatcttcttcctcaacttgggaatctggagcgggctccatttctctccccctcaccttcctccgctctaactacaccttccggatcttccgctggaccgaatccgaggtcaacccggaaatccacgaccaggatcataatcccctcccgggcacgaagcacttgttggcggaatccgagacggtgggtttcgaattgggtcgtgggccggagcagatccacttggcgttgaccggtcgggaaggggagatgcgggtgatgttcgttgcggaggacccagaggagaggcaggtgagg

SEQ ID NO: 236320 - DNA, 437 bp, Gossypium hirsutum
gttgatcgtctcacgaagtacgaccacttgtttgctttgctgagacactttgattgcaaatccattgccaaaataatggtgcaaggtatggtgaaacttcatgggataccccgttccatcgttaacgaccgagatccaatttttgtcagtgaattatggactgagctggctcaactccagggcactgatttgtgtatgagttctgcataccatctacagacggacggccaaacggaggccctaaattgatgtttggagatgtatcttagttgcatggcaggagatgatctggaaaagttaccttgtgtaagccatgtattggtataacactgcttatcaagattcagcaggcatgacaccgttcaaggcgttgtatggttgcgaacccccaacaatagtaagttatacggatggtggttcctcaaatacccagctcg

SEQ ID NO: 236321 - DNA, 335 bp, Gossypium hirsutum
ggccggttcttgaagacagctgcctatggacattttggaagggacgaccccgacttcacctgggaagttgtgaagcccctcaaatgggaaaagcctcaatcttgaagtccccccgtccgtactgccccgtgcttttctcatccgcggtgctgaataatcccgatgtttcgtagctcctaccggaaatatctaatctcatacttataatgccctttttcattttcattttctatttcttcttttatcgatgcttgttttgatttatgtgtctttttatcagcgtcggtgttgcaaaactgagtgagaattttgcttatattgatggcattggaatt

SEQ ID NO: 236322 - DNA, 425 bp, Gossypium hirsutum
gacccacgcgtccggggaagttcttggcatcacaagatttggaatccaaaaaatggacaaaagtatattgatgctggcttcatttgagaagacaggtgatcacctttttaatgcttctgttaatgggagggatgacaagattgagggggttaccgagtgcatcatcatgggcatcccgatgcaattaggcactggaatactcaaagttatgcagagagttgatccccttcctctgcttcaatacggagcggatcctgttttatcttgaagaggtcatcatcagcacacctcgttgtggtactttccgtatgctgttcaggattgatttttttattttcttttctccgagcttatgtatttagtaattcactggagttttatagatatttcctttacaaatttgaatttgcacaatgttaaatagg

SEQ ID NO: 236323 - DNA, 465 bp, Gossypium hirsutum
tcccacgcgtccggaatgagcctagcaaggatagtttggatacatttagggaaaagaatgccagtgaaacagtattggaagctactaggttgaaagagctggcaagtgagcagctaaaattggcgatggccgagaatacctatgccgaaaaggctagactagaagcgaagaagcagatagagatggctgagcttgagtttgcaagtgctaaaaggataaggcaacaggcccaaggtgaactggagaaggctcaagtgttgaaagatcaagcaactaagaagataagtgctactatcattcaaatcacttgtcaagcttgtaagcaccaattccatacatcaactgctgcggttccagctgatgagacctcacttgctatgagttacatgtcttcagccacaactgaaggagaaggagagtgacggtaagttgagattatacaacgataatgatccattcttagtc

SEQ ID NO: 236324 - DNA, 354 bp, Gossypium hirsutum
cccacgcgtccggtcgttattgactactttactaagtgggtagaggctacttcttacgccaacgttacaaagtcagcagtcagcagattcctaaaaaatgagatcatatgtcggtataggatggtagaaaggattatatccgataatgcattgaacctgaacaacaacatgatagtaacggtctataatcaattcaagatcaaacaccacaaatcatcaccatatcgcctaaaaatgaatggcgcggtagaagcggccaataaaaacatcaagaagatcgtagggaagatgactgaaacttataaggattggcatgagaagttaccatttgccctttctgcctatcgaacgtct

SEQ ID NO: 236325 - DNA, 493 bp, Gossypium hirsutum
tggaaaaaacagagacaaaaagggtcaaaggcatgccgacccttacaaagctttataccatgcaagaagcctctcagcacaataccaaagatgattgttggatcgttatagacggcaaggtatatgatgttacttcttatttggatgagcatccaggaggtgatgatgtagtcctcgagtcgacagggaaagatgcaaccgatgattttgaagatgctggacacagcaaaagtgcaaaggagctcctgcaaagcttttgcattggtgaacttgacacatcctcccctatcatcccagaacttgaaatttcctctaagagggaagccgttaagtactctgagaagctcatggacttgacaaagcaatattggaccatccccgtggcaattgttggcatctctgtgttggttggtttcttatacctgcataagaagtaaaccagtataatgttttcccctattggctgctgaatggaaattgttaccccaatttt

SEQ ID NO: 236326 - DNA, 423 bp, Gossypium hirsutum
ttccacgcgtccgcccacgcgtccggtgagcgtgatgatttgctgagcaagccctcacttaatggcatccctcttctggtactaggcaacaagattgacaagcctgaatctctttcaaaacaggcattgactgaagaaatggggctgaagtcgattactgacagagaagtttgctgctacatgatatcatgcaggaactcaaccaacattgattctgttattgattggcttgtaaagcattctaaatctaagagcggaaaaaaacaactctttcttttttattcaaataaaaaaaaaaatcatctttgctgaatctgtgttttataattcgagtttcccatctgtaatcttgtggatgtttgggtttttatcatttatgtcaacgctttctgttttgatgatttaatggtaagatgtatacag

SEQ ID NO: 236327 - DNA, 419 bp, Gossypium hirsutum
ttgccattcatagaagcggcgtaagctggggagtttaaccttcaccggcgaagacgagcaccgcataaaccccgcccgaatcgacgcaatccggtctgcactcaaccaaatccgctccgactctacctctctctatggctccgttctcatcaccaccgctcacggcaagttcttctccaacggctatgatctcgcctgggctggctcttcaccagacaagatacgtttaatgtcttccaagctccgggaacttgtcgccgaccttatctcctttcctttgcctaccgttgccgacatcaccggacacgcctgcgccgccggattgatctttgctttttgtcatgattatattgttatgaggaaagatcgagggttcttgtacatgagtgaaacggatatcggtctgaaaattccggctt

SEQ ID NO: 236328 - DNA, 169 bp, Gossypium hirsutum
gttacgtgttcgcccacgcgtccgaccactcgggcgtgcactcgtccgggagggcgcacgctgttcatcctcttactgcaggacaacttgagtggtcgctctggactcgtgatgatgaggaagaaataattcccctttgcagggaactaggaatcgggattgttccata

SEQ ID NO: 236329 - DNA, 277 bp, Gossypium hirsutum
ttggttctcatagctggcattgctgcttatgtaaagagggtttccccagaggtgaaggttattggagtggagccttctgatgcaaatgcaatggcattgacgatgcatcatggtgaaagagtgatgttggacaaggttggaggatttgctgatggagtagatgctaaggaagttggtgaagaaaccatctgtctatgtagagaattggtcgatggcgtaggtcttgtaagacgtgatgctatacgagcctgtataaaggacatgtttgaagagaaga

SEQ ID NO: 236330 - DNA, 476 bp, Gossypium hirsutum
attgggtcagaaaagattgggcgcttgcagttggaggtgcagaaaattcaatttctcttattgaagcttgacgatgaaaaagaaagtagaggtcgaaccaaaatcaccgaacacaaaacaactgttttattgcgagactatctttacggtggtgtaagaaacatcaagaagaggaagaactcactcttttgtgcatgcgtgcgaccccaaactaaatgagatcgaggcaattaatcatgggcacataatcagtgtagtttaccgataatgagactagttgcattgtcaataaagttcaccttcctagttttgcatttcacatatttaatgtcttagagaagctttcatcttctttagtttcgagatcctgctgtatatttcaggcacatcaaagtgaaaagaagctgcacttttatagcctaaaaacttccttttatttataaatttaccttggtataaattcttggattcattag

SEQ ID NO: 236331 - DNA, 312 bp, Gossypium hirsutum
ttatatttttctttttagattttgtggtgttaaaatcgtatttgttcatagttttttgcagcaggcaacatgtcgctcacaattcctagccttctcggtggcccaagaaccgacgtcttcgatccattttcagtatgggatctttcagatgaattcttcaactctgcattggcaaacactatgtcatcatcatcttcagtacgcgaagcttcggccattgccaacgcaagggtagattggaaggaaacaccggaagctcacgtgttcaaagcagaccttccagggctgaagaaagaggaggttaaagtggag

SEQ ID NO: 236332 - DNA, 391 bp, Gossypium hirsutum
  unsure (1)..(391): unsure at all n locations
tcgtccacgcgtccgcccacgcgtccgcccacgcgtccgctcaattccattaggggactcctcattccagaatcctctgtatggttgcatgcaagactcttcagagctgcagaacagagggcaagttgacccaccgaccccaactccaacatttgtcaaggtttataaatcagggtcagtgggacgctcgttagacatctccaggttcagcagttaccatgaactgcgagaggagctggctcagatgtttggaattgaggggaagtnggaagaccctttaagatcaggctggcagcttgtatttgtcgacagggagaatgatattcttctacttggagacgacccatgggaggcatttgtgaataatgtttggtacataaagatactttca

SEQ ID NO: 236333 - DNA, 279 bp, Gossypium hirsutum
attgattgtttggttagggaggagagactccatgaaggcaagctttgatggtgcaaaccagttcatccctgccccaaattcctttctggagactcttatttccaacttcaacgaacaaggtctcgatatagaagatttggttgctttgtcaggtggccatacacttgggatggcaagatgtgtgagcttcagacaaagggtttatgacatcgaagaaaagcgtgtcaagttcaaaagataccggacatttcgatgaatcctacggtccatatgcccgga

SEQ ID NO: 236334 - DNA, 432 bp, Gossypium hirsutum
ttttatttcaaatattggatcatccacaattgttccagcagatgtcaggctaaagaacaaggctgaatgtataccttgtgagcaagtggaaccatccattagtgatcaagaaaccaacaaaccctccgataagatacagagacgtttggctcaaaatcgtgaagctgctcgtaaaagccgaatgcggaaaaaggcctatgttcaacaactagaatcaagtcgtttgaaactagctcaattggagcaagagcttgaaagagctaggcagcatggtatacacatagccggtgcatcagaggctggttattttggactgtctggaactgtaaactcagggattacttcatttgagatggaatacagacactgggttgaagagcaaaatagactgatttgtgaacttagaactgcagtccaggcacacattactga

SEQ ID NO: 236335 - DNA, 471 bp, Gossypium hirsutum
tcgtttcacgcgtccgcccacgcgtccgcccacgcgtgcgagatattcctgagacaacggtccatcctgtgccgccagtgcctagcaagacggtaagattttcgactgtaaatatcgaagagatgggtgcaacgaatgagaaatatcagtcgcctaggattcctgaaatagagatctcaactccacctccaaataatggaatggacaaggaaccaatgcatagcaggaagaaatggaacaacgaggagagccctcctaaagcagccaaagggtttagaaagcttcttttctttggaagaaaaagcaaaaactatgctactgcttagtgtatgcttgtctttccatattgcttatgtttcgggttttcagttttttcgggtggaacgtaccaataaggcctttgatgttgctgccattcaaggattcatgaacttattaagaaaaatggggaaaataagagagagattcata

SEQ ID NO: 236336 - DNA, 388 bp, Gossypium hirsutum
tcggttacatgtcaagtgcttgtgttttattcattttggatgagatgaggaagaaatcaagggaagatggacttcagacaacaggagaaggactggagtggggagtgctctttgggttcggacctggcctcactgttgagactgatgtgctccatagtgttgctgcttaaagttaaacaaacatgccttttaagtaattggtcgtgctccacttggcttgcagttttatcttcttcttttttccttttttagattatttaaatcctatgaatttgtgtgtttattgttaaagactagaacactttgatggtgtgggcgggaagcttaacgcctattcaattcatgtaccaacttatattaaatttatggcaataataagttcctttgc

SEQ ID NO: 236337 - DNA, 458 bp, Gossypium hirsutum
attgcgtatgatcccacggcgaacgtcgtttacacgggttgtcacgatgggtggatcaagcgagtcaggttgagtgactcggtcgtggaaaattttgttaacacccatggtagacctctaggtctcgctcttggtcacaacaaggaaataatcgttgctgatgcatataagggactactgaatataagcaaggatggtgaagtggagctgctaacagatgaagctgatggccataaattcaagcttacagatggtgtagatattgcagataatggaatgatatatttcacagacgcttcttacaaatataacttaaatgaagatatatgggatatcttggaaggcaaacctcatggtcgatttatgagcttcgatccggttacgagaaaaaccgatgtgctagtcagtcatctatactttgctaatggagtcgcagtgtcacctaatcaagatcatgc

SEQ ID NO: 236338 - DNA, 225 bp, Gossypium hirsutum
ggcccctcacgaaaatacagggcaaggtgcctgggatcctgaagaagaggaaccctatttggatcccacgtgggcacatttacagatagtatacgagcttctcttgagatatgttgtgtcctcggatacagatactaaagttgcaaagaaatatattgatcattccttcattttgaagttgcttgatttgtttgattcggaggatcccagggaaagggagttttt

SEQ ID NO: 236339 - DNA, 471 bp, Gossypium hirsutum
  unsure (1)..(471): unsure at all n locations
cccactcgtccgcccacgcgtccgcaattgatagttatggcatttattttggattgttttctaacaccctcttggctttaacatataaacccatgcaactatgcataggtctttgctcgatggtatagagctcctgaattactttttggtagcaagcaatatggttctggtgtggatgtttgggcagctgcctgtatatttgcagaacttctcctacgacgaccatttctacaggtgaacctagctgtcttcagtgtttttgatacttgcattttttttggtgagttaattcttggtacagagcactgtatcaatatgtcatctgtttaaagtatccttcttagtatattttctcattttcattggttcaacatttaacattntgtagggcacaagtgacattgatcaattaggaaagatctttgcagcttttgggaccccaacatcttctcaatggccagatatgttata

SEQ ID NO: 236340 - DNA, 298 bp, Gossypium hirsutum
ttttcgcgtccgcccacgcgtccgttctgagcttgatatcacggaccaagatgtcactaaaatagcagatatgattgatggggaaatcgcatctttggtaccagagtggaagaggggcttgggcatagatgaaaactcgatatgcacgggttctagtttttgtcaaaattgtgctttgaatggccacctttcggatttcttatcatcgagtagtgcaggtgccaagaacctgcaagttctcgagtgttggaaacacggttgcaccactgtccatggccggtttgaagagatcacgtac

SEQ ID NO: 236341 - DNA, 476 bp, Gossypium hirsutum
ggatgtgtatcccacttctttcatcgagctatcaaagcttacaatactgggactcggaaacgtcgaaagatccatggtgatgattttggtgatgtccgctggcacaagactggtaggaccaaaccagtctttttggatggtgttcaggaaggatgcaagaagattatggttctctatatgaccactgtcaaaggtggaaaatctgagaaaacaaattgggtgatgcaccaatatcatctaggaactgaggaggatgaaaaagatggggagtatgttatttctaaaatatttcatcagcagcaacaacccaaacagggtgataaaactgagcaagatttacctgaaacaactgatacaatgattgttaaagtagatcctgtgactccaaagtctgtgacacctgacccaccacgaacagggaggcaatgcgatgaatatgaccaaggacaggagtataccattccttgcatcaatcc

SEQ ID NO: 236342 - DNA, 446 bp, Gossypium hirsutum
tttatcgcgtccgaagatgaacaagcaagaattgaagccgcaggtggcaaaatcatacaatggaatggccctcgagtttcgggtgttctcgcaatgtcaaggtcaatcggtgacaagtacttgaaaccatggattattccagacccggaagtgacattcgttagtcgagcaaacgacgacgaatgtcttgttttagcaagtgatggattgtgggacgtgcttagcaatgacgaagcctgtgaagttgcgcggaagcggatcggtttgtggcgtaaaaagtacagagataaatctaatggtgaagggattgatggtgcagctcaatctgcagcagagtacctatcaaggcttgctcttagtaaaggaagcaaagataatattagtgtcattgtggtggacctgaaagcccatacaaaatttaagaacaaaacctgacactgggatct

SEQ ID NO: 236343 - DNA, 518 bp, Gossypium hirsutum
cgtagacaagaagaagaagagagttaagaagagcgtcgagacctacaagatctacatcttcaaggtcctgaagcaagttcaccctgacatcgggatctctagcaaagctatggggatcatgaacagtttcatcaatgatatcttcgagaagcttgctcaagaagcctctaggctcgcgaggtacaacaagaaacccaccatcacttccagggaaattcagaccgctgttaggcttgtacttcctggtgagcttgccaagcacgccgtttctgaaggtaccaaggccgtgaccaagtttacttcatcttgaaaaggctatttgttgatctgtagttggggttagggttaggaggctgctttttaaattagatcggtgtggtttttatgtttatttttctgaaatttccgcatatttattttgatatatggtttgtattagcgagatggatctactcgatcctgatatggctattgtagaaattaatgctattaacgacaacttaatttcttggagcttg

SEQ ID NO: 236344 - DNA, 465 bp, Gossypium hirsutum
cccattcgtccgcccacgcgtccgaagatcgtaataatgaggacagtcgcaacagagatgagagcaaagagaagatccctgatcgggatagagacagggaacatggacaggataaggtgaaaacaacagataaccagaagcttttggatgccaaacaactaattgatatgattccaaagaccaaggaggaactattttcatacgagataaactggaatgtgtatgatcagcatgcattgcatgagagaatgagaccctggatctcaaagaaaattacggagtttttgggagaagaagagaaaactctggttgattacattgtgtcgggtactcaggaacatgttaaggcttcccaaatgctggagctgctgcagtctatattagatgaagaagcggagatgtttgtgcttaagatgtggaggatgctgatatttgagattaaaaaagtagaaactggcctggctt

SEQ ID NO: 236345 - DNA, 426 bp, Gossypium hirsutum
ctttcgcgtccgggagcacaagaagaaggttgaagccaagaacgcattggagaattatgcctacaacatgaggaacactgtcaaggatgagaagattggttcaaagcttgacccggccgacaagaagaagattgaagatgccattgatggagcaatccaatggttggatggcaaccagctagccgaggccgatgaattcgaggataagatgaaggagctcgagagcatctgcaatcctatcattgccaagatgtaccaaggtgcaggggctgacatgggtggtggcatggatgaggatgccccacctaccggtggcagcagtgccggacctaagatcgaggaagtcgactaaattaacagcttctgctggtgctatattttattttttctgcaacctatgttttgatgtctcgaaaaatctggttt

SEQ ID NO: 236346 - DNA, 345 bp, Gossypium hirsutum
ttttgaatctgtgctggaaccaggatggggatcgtgctggttgagtacatcttaggcactttgttacactctttcgactggatgcttcctcccggtactggggaattaaacatggatgaggcctttgggcttgctttgcaaaaggccgtgcctctttctgccatggttcgcccacgcctcgcaccaactgcttatgtttcctaagcacatcccttgccttatcactgctcatttttcctacttctgctgcttttgttatctgatattcaagcttgatgtgatgtgtatcaattgatgcatcttttagtttcaattctactctaaaaacaatcttgcatgcctttc

SEQ ID NO: 236347 - DNA, 416 bp, Gossypium hirsutum
tttgatttcaggcctggaatgatcaccatcgacctggacctcaagaggggtggcaatggccggttcttgaagacagctgcctatggacattttggaagggacgaccccgacttcacctgggaagttgtgaagcccctcaaatgggaaaagcctcaatcttgaagtccccccgtccgtactgccccgtgcttttctcatccgcggtgctgaataatcccgatgtttcgtagctcctaccggaaatatctaatctcatacttataatgccctttttcattttcattttctatttcttcttttatcgatgcttgttttgatttatgtgtctttttatcagcgtcggtgttgcaaaactgagtgagaattttgcttatattgatggcattggaattaacaagctgcaacattattaagtt

SEQ ID NO: 236348 - DNA, 320 bp, Gossypium hirsutum
atggttacagcaacagagctgcatgctacacaaaatggggtgcattgcccgaggtgctgaaagatgctgaaaagtgcattgagcttgacccaaccttttccaaaggttacacaagaaaaggtgctgatcagttcttcatgaaagagtatgacaaagctttataaacataccaggaagggttgaaacacgatgccaataaccaggagctgctcgatggtgttcgaaggtatacacagtattcttttttatttttggttttctcttcctaattcagcagtaccttattttaagtatttggttatctcaattattttgcagat

SEQ ID NO: 236349 - DNA, 470 bp, Gossypium hirsutum
  unsure (1)..(470): unsure at all n locations
ccctcgcgtccgcttatcttcttcttcttcagttccttacccctcagttgctgattggtgggacactgtgaggctctacactgaccaaacaggatcaaacattacagctaccatttccatttcgggtgagttttatgattctgggtactcccatggtgtttacttaagtcgtttatcgatgcaatcgatcatcaaagctgcggttacatctcatttgaggctattgcctctcaatcctcacaatggactttatttggtgctaacttcacaagatgttcaggttgaggatttctgtagagcagtgtgtgggtttcattacttcactttccctatccttgttggtgtaacggttccttatgcttgggttggttatagtggaactcaatgtccaggtatgtgtgcttatccatttgcttggcctaagtactcggngaagccacccccgaatggaggtaatgacataacacatg

SEQ ID NO: 236350 - DNA, 332 bp, Gossypium hirsutum
tgtatgatcacattcctcgagctgacaaaattgtctatttaccggcctgaacaagctccaacaccaccactaccagtgctaccacttccaacattttcacagctcaaatggcaacgaagagaactcatagtggtccttcatttcggtgacaacacattcacagactccgaacggggcaccggggaagaaaacccatcaatattcaaccccggcggtctcgataccaaacaatgggtcaccgtatctgccgaggcagggatttctctaatgatcctcaccgcaaaacaccacgatggcttctgcttatggccttctaaatacacccaccactc

SEQ ID NO: 236351 - DNA, 340 bp, Gossypium hirsutum
gggtaacatcggcatcatcgcacccattgccattggttttatcgtgggtgccaatatcttagccggtggtgccttcgacggtgcgtccatgaaccccgcggtctcattcggtccggccgtggttagttggacgtgggacaaccattgggtctattggcttggtccgttcattggctcagccattgcagccattgtatacgaggttttctttattgccccaagtacatatgaagagcttcctagtgcagatttttaaaatattttggggtcttttcttttaggtccttttgtggttttcaattaaaatgggttgaaatttgggtgggtcgatttggttttt

SEQ ID NO: 236352 - DNA, 382 bp, Gossypium hirsutum
  unsure (1)..(382): unsure at all n locations
tnctgggcgatggagttaatgatgctcctgctctgtagaaagctgacatcgggatagctgtggctgatgcaactgatgcagcacgtagtgcttctgacattgtccttactgaacctggacttagtgtcatcatcagtgctgtcttgaccagtcgtgccattttccaaaggatgaaaaattacactatttatgcagtttccatcacgatccgtattgtgttgggattcatgctgttggccctcatctggaaattcgactttccaccattcatggtgcttattattgctatcctcaatgatggtaccattatgacgatatccaaagatagggtcaaaccatcacctctaccagatagctggaagctggcggaaattttcactac

SEQ ID NO: 236353 - DNA, 316 bp, Gossypium hirsutum
tgggttgacattcgttgaagtggaaagatggggtttggggaagcagatgggttacttaccgccgtctcgaggataagaacgagcacgcctagaaagtatatcctggagctaactacgttatccatctaagccgtgattcagtcggggaggccaagaacaaagcagaatccgttccactctatgtgaatgttgatgggaagaaacttattctgggaaccctttcccaccagagttgccctcaattatctatcgattcagaattcgacgaagagtttgagctctcccacaactggaaaaacgggagcgtatatttcct

SEQ ID NO: 236354 - DNA, 469 bp, Gossypium hirsutum
ttccttcaaagacccaacttctcatttctccatcttttcggactctctctgtttctctgaaccaagagggaaagaaacccaaacccccgaaaagatgcatcgatcatctagcagttctcgagtgtccgatgagttcttcctcaacgcatccccaccccaatctgtgggttccaagcaaccatcctcggagacggttcccctgaatccgcaagaactgcctatgtacaaccccctctcagccgccgccaagaaagaaaggtctcgactcagatctgccgagaacgccatccacatcatccctctcgttctcgttctttgtgctatcattctttggttcttttccagcccagaatcaagggtttgaagattgattgcaaaagctaaggtctttaatggagctgaatgaggagttttaattccataaaacaaaacatgacagagtgtgcttaacctatgacattatcaaaga

SEQ ID NO: 236355 - DNA, 368 bp, Gossypium hirsutum
tacaatatcgaatttggagatggagttaggctctacttgggcagtgcaagaatcaataattaacggttctcccatttccgacgacctgaaaatccccgaaacaaatgggaaacggaaatacttaatggttgtaggcatcaataccgcttttagtagcagaaaacgaagagattcagtccgtgctacttggatgcctcaaggagaagaaagaaagaagcttgaagaggagaagggaatcgtaatgcgattcgtaatcggccatagtgctacctccgggggtatcctcgatagagctattgaagcagaagaccgaaagcatggggactttctgcggctggagcacgttgagggttatctcgaattatcag

SEQ ID NO: 236356 - DNA, 337 bp, Gossypium hirsutum
tgaaaatggccaagagccaagactatttcttcaaggagttctcaagggccattactctcctctctgagaacaatcctctcactggtagcaagggtgagatcaggaagcaatgcaatcttgcaaacaagcttcactaaaatgcctcgccaaagagaaagccgagagtggccgaataaaatggttgtttacttgtttcttttccaagagacaagtttgttaatgtgcagtgagtaatggtgcaatggtactagtttgatacgatcgacccattgcatttttttttagcataagccaggttgccttctcttgatgttggtcatgggcgtagtggatgtag

SEQ ID NO: 236357 - DNA, 409 bp, Gossypium hirsutum
tcttcgacgagcacggcgtcgatcccaccggaagttacactagagatgaatcgtcgtcctctgatctacagttggaacgtatcaatgtgtattacaatgaggcttctggtgggaggtacgttcctcgtgctgttctcatggatcttgaacctggtactatggatagtatcagatccggtccctatggacagatctttaggcccgataatttcgtgtttggacaatccggtgccggtaacaactgggctaaaggtcattataccgaaggagctgagttgattgattctgttcttgatgttgttcgtaaagaggctgagaattgtgattgcttgcaaggcttccaggtatgccattcacttggaggaggtacaggctcaggcatgggaactctcctatatcgaaaattcga

SEQ ID NO: 236358 - DNA, 187 bp, Gossypium hirsutum
  unsure (1)..(187): unsure at all n locations
ccccaacgcatttctacagcaagggagtttaatttcagtcgnggtgctcttttccagacactcagcatttgtgtttataggcacaacaccgacgttgtggatgctagtgatgtgataatactatctgggaaaccccaagtagttaaaactgtggacttgcagctgaagccgttactttcaaagaaaa

SEQ ID NO: 236359 - DNA, 245 bp, Gossypium hirsutum
cttatcgcgtccggccacgcgtgcgatttagggaaattttaaattaattttaatttttttttgcttgcagtccaaggtatttcactatggatcaatatgtttgatcgtggagccatgcagatcagctcatttaaaggcaatggaagtagccaaaggagctggtgcattgctctcatatgatccaaaccttcgcttggcactttggccttcagctgatgaggctaggaaacagattttgtccattt

SEQ ID NO: 236360 - DNA, 261 bp, Gossypium hirsutum
ttttgaggcaccgtggacgtggaacggacgaatttgggcaaggacaggttgcaacttcaactcgaattggcaaccggcttgtgaaaccggtgactgtgatggaaggctccaatgcaatggactaataggaatacctccagccacactagtccaagttgcacttcaaggtgataaaggcaagccaaatttctacgacgttagcctggttgacggctacaaccttcctgtctcggtcactacacgacctttttcacccaaatg

SEQ ID NO: 236361 - DNA, 471 bp, Gossypium hirsutum
tagaagacggagttgccgacattcaaagaagcctatggagaacatctagttctcgcgtagaagtgtgatatacttatagcacgaccttgaccatggcataatctggttctcgatggataggttgattgtgcataatgggaagcaaccggtttctagtctatgaatacatgcaaaaagggaacctacaagatcacttaaatggtacggttttctactcaaatctgtttccagtgcagctgatcacctattcaacatctatcaaagttaaactgctccaataggtattggggaaacaaaaatggattggccctcaaggctcaaattggcacttggtgctgccaggggacttgcttatctccactctagttctgctgttggaatccctatagttcacagagattttaagtccaccaatgttcttctaaatgccaactttgaagcaaagatatcggattttggactagccaaact

SEQ ID NO: 236362 - DNA, 488 bp, Gossypium hirsutum
cccacgcgtccggttccgaagttaactgagtatttgcaaaagcattggagggatttcaggaagcctgaaagtgcagtgatgcgtcctctgtatgacgaagtggtgtacttgaatgagcatcataagagaaaattaaggcaagaatttggagtggtgccatggtcatttgaacagaatttggggcaagctgtctttctccctgctggttgccctttccaagtgaggaatctccagtccaatgttcagttagggcttgacttcttatttccagaaagtgtgggggaggctgtaagattggctgaagatatccgctgtcttccaaatgaccatgacggaaaacttcaaattttggaggtggggaagatctcgttatatgcagctagttcggccattaaagaggtccagaaattggtgctggatccgaaattgggtgctgagcttggattcgaagatcctaatttaacctcagcagtatcggagaatctgga

SEQ ID NO: 236363 - DNA, 176 bp, Gossypium hirsutum
tcctacgcgtccgcccacgcgtccgcaaggctggcccttggatggaggatcagattgactcaacatttgctgaagaactacttaagaaataatgcattttaccaggtctttcacatgtcaagcaaaaatattgatgcggatcaaagaataactcatgatcttgaaaagttaactac

SEQ ID NO: 236364 - DNA, 429 bp, Gossypium hirsutum
gttttcgtttgcagtagtgactctccaaaccctaaccctataaacctactagttctgcccctcttttaattaatttctctgaaaaaatgggagaaacaagggacaacgacgcttatgaggaagagcttctcgactacgaagaagaagaagagaaagcccctgactctgtcactgctaaagtcaatggcgatgctggcaagaagggctatgttgggattcacagttccggattcagagatttccttttgaagccagagctgcttcgagccattgtggactctggatttgagcacccttccgaagttcaacatgagtgcattccccaagctatactgggatgggatgttatttgtcaagctaaatcagggatggggaagactgcggtttttgttctatcaacattacaacagattgaacccacaccaggac

SEQ ID NO: 236365 - DNA, 505 bp, Gossypium hirsutum
tgaacgtttctcgtgggccgatgtctccgtggcattctccctcttgcctgccttccaacatgctctcggcgagggtgagcgcacgaagttcacccatgtcacacgctggttcaacactgttgtgcaccaagagaacgtcaaggcagtcgtaggagaagtccaacttccggcaaaggcttcaactttcgacgccgcaaagttcaagcaactttccgctaaggctcaagcccagaagaagcatgatcaaccgaagaaagagcagaaacaaccggagccaaagaaggaaaagcctaagaaaaaggaagaggaagatgaggcggatgagcccgcggttcaagagccaaaattcgttgatccgtttgcgtcgatgccggctggaacgttgaacatggacaactggaagcgtgtttactcgaatgaggatactgcgaccaaggctattccgtggttctgggagaatttcgatcccgaaaactattcgatatggtacggggaatataagtac

SEQ ID NO: 236366 - DNA, 483 bp, Gossypium hirsutum
cttatgctattggtgtgcctgagcccttgtctgtctttgtagacagctatggaactggaaagattcctgacaaagaaatcctccaaattgtgaaggagaacttcgacttcaggcccggtatgatcaccatcaacctggatctcaagaggggtggcaatggccggtttttgaagacagctgcctacggacactttggaagggacgacccggacttcacctgggaaggtgtgaagcccctcaagtgggaaaagcctcagtcttaaaatccagctttggctgtcctcgaatgtctctaatctcatacatatgatgccccccattcattttcattttcattttcttatttgttctctttcacctttaattgtgtcctgtcaatgtcgtgttgcaaaaatgtatgagaattttgcttatattgatgccactggaagtaaacaatcttcctcttatgattgcttaatggaattcttggctaccttaatc

SEQ ID NO: 236367 - DNA, 434 bp, Gossypium hirsutum
atttacggatagtcaattgggactgaagtcttgcgaactgctatctatgatatagaggtagattatacggacatcaaagaaagaactttgttaaaggtacctagttatgaaaagccagtggagtttggagtgttgacctcctttgcttaccctttggagggagaattgggtgaaattgttgttgccactactagggttgaaacaatgcttggtgacacagctatagctattcatccggaagacaagaggtacagtcatctgcacgggaaatttgccattcaccctttcaatggacgaaaacttccaataatctgtgatgcaattctagttgatccaacttttggaactggtgcagtaaagataactccagctcatgatccaaatgattttgaggtgggcaagcgccataaccttgaatttattaacattttcac

SEQ ID NO: 236368 - DNA, 464 bp, Gossypium hirsutum
tttcgcaagcaactgccaacacccaatccccttgtttctctccgctaaatgctaatggcagcagcaaccttcaactctctcaccctccccttctcaaaaccagaattcccattctcctccattgcaagaacccatattcccaccgccactctcaacctttctcggttcaggcctactggcttccttctatgctccctttcaagtgatcaccccacaaccgccgcgggtggtcaacttcaccataagaccaacaccaatagcaccgacccccagcctcaaattcatacttgtacatggaactggaagggctattctattcgctatcagtgttctgggagtagcggtcctgccttggttttagtacatggttctggagcaaacagtaatcattggaggaaaaatattcctgttctagcaaaatcacatagggtatacgcaattgatcttattggctatggatattc

SEQ ID NO: 236369 - DNA, 511 bp, Gossypium hirsutum
tcccacgcgtccgaattttttgtctagttttgctcttcatttcggtagcaaaaggcctgaatcccaaatgtgacatccaagaccatggctcaaccctccaagtgttccacatttacagtcaatgctcacccctcaaaccctcaaagccactctcatgggaagaggatatgttgtcaatgctagccaaggaccaggccaggctgcaatatttgtccagcctggtggctgggaaatctgtggtgccagtagcttcaggcaggcagattgtgcaaagtccaacctatattgtgaggattaaaataggaaccccaccacaaaccatgctcatggccatggatactagcaatgatgctgcttggataccttgtaatggctgcattggctgctcttctaaggtttttaacactgctaaatccaccactttcaacacccttggctgccatgcagctcaatgcatgcaggtaccaaatcccacttgcggtcgcagcgcgtgcatattcaacatgacgta

SEQ ID NO: 236370 - DNA, 348 bp, Gossypium hirsutum
cggaattacccacgcgttcttctcgttttgaaaaagttgcaggttacggagggttgattacctgcaccctggtctcaaaacgggaaagatgactccccatgaacagcgcctcgtccttgaacttactgccaagcggggacacacgtactactgaattgctctttcatggcggacagcaactgacaacgagattaagaactattggagaacccatatgagatatacggctcctgaagagagacaggccatccccatctgaccatcttgatgatctagccattgtcattcatcatcatcaactgttactgcagtcgattccttgccctcctctggtactggaaatattgt

SEQ ID NO: 236371 - DNA, 228 bp, Gossypium hirsutum
gaaaaagttgcaggttacggtgggttaattacctgcaccctggcctcaaaacgggaaagatgactccccatgaagagcgcctcgtccttgaacttcatgccaaatggggaaacaggcggtcgagaattgctcgaaaattaccagggcgtactgacaacgagattaagaactattggagaacccatatgagaaaaacggctcaagaaaagaaacgggccatccccatct

SEQ ID NO: 236372 - DNA, 422 bp, Gossypium hirsutum
  unsure (1)..(422): unsure at all n locations
aaaaaaaaagttatcatacaaagatgtgtaacaacatgacttggagcccatctcatcccatcttagtttcttcaaagagaaggcatagatcaaaacaaagtaaagttcaaatctacaggctttccaggaaaaggtgtgaagaagaagatgtgaagaaagacatggaactaatgaacttgaagctgtatttggagaatcgaagcattatagaagagaatgagaagttaagggagagagctaatcttctacatcaagagaacttggctttaatgtctgagcttcaaaacaagtttcctcatttggatcgtttttccactacccttttggttcttctgcaaaaacactgatatgaggtttcaagaaacaacaatccgaaccctcttctctatctactatatatataccctnttagtctcttaaag

SEQ ID NO: 236373 - DNA, 287 bp, Gossypium hirsutum
gcgaaaaaaaaagttatcatacagagatgtgtaacaacatgacttggagcctatctcatacgatcttagtggtgatatcagagggtctctttcaagagggagtttgctacgccaaaaaagattacaacttggcaaaacacccagaaatcgatgttccaaatcttcaagtaataaagctgatgcaaagcttcaaatccaaggaatacgttcgtgaaacttttgcttggatgcattattactggtaccttaccaacgatggcattgaatttttaaggacataccttaat

SEQ ID NO: 236374 - DNA, 473 bp, Gossypium hirsutum
  unsure (1)..(473): unsure at all n locations
cccacgcgtccgcccacgcgtccggccttttcaaatttattacaagaaattatttcagctttcaaacatatttctcttttgccgcaaaaaccaacttcaacaaaatgcctctcagactcgaaattaagaggaaacttgctcaaaggtcagagagagtaaaatccgtagatctccatccaacggaaccatggattctagcaagtttgtattctggaactgtgtgcatctggaactatcagtcacagaccatggctaagtcatttgaagtcactgagttgccagttaggtcagccaagtttgttgcacgcaaacaatggngttgttgctggagctgatgacatgtttattcgagtatacaattacaacacaatggataaggtcaaagtatttgaggcacacaccgattacattagatgtgtcgctgtccatcctactcttcttatgtgtggcatcatctgatgatatgctcataa

SEQ ID NO: 236375 - DNA, 371 bp, Gossypium hirsutum
tcgggacatttatatgaacgcttccttaaaattatgattctaagtgtactaaagaatacccaccgtccagtgaaattctggtttataaagaactacttgtctcctcagttcaaggttgcatatatctttttggcattcgttccatcttagtatagcacttctgtttcacttgttagtgcataatgatttaaaaagcatgtctaatgcacatatgctttcgggttatgcaggatgtgattccgcatatggctcaggaatatggctttgattatgaactagttacctacaaatggcctacatggttgcataagcaaacagaaaagcagagaattatctgggcatataagattttgttcctcgatgttatattt

SEQ ID NO: 236376 - DNA, 302 bp, Gossypium hirsutum
attgaatcagttggagcaacttgggccaagtgaaggttatagaggctgttaagaatgtaaacactgcgtagagggttgtaccgtcggaatttggtcatgacatagatagggcgaaaccggtggagccggggctgaccatgtatgagcaaaagagcaagattagggggcagatagaggaatgcgggatcccgtacagatacatatgctggaactccattgctgcttggccctaccatgacaacactcatccagcagatggtctaccaccccttgataggttccaaatctatggtgatggcgct

SEQ ID NO: 236377 - DNA, 349 bp, Gossypium hirsutum
ctgactttctctatttgggtagctatgataacgcctctcgctctgagcttctcaagactcaaggaattactcgcgtccttaataccgtccctgcatgtcaaaacctatacaggaattcatttatctatcactgcctgcaagatgacaaaattttacaatttgatgatgcaatacaatttttagagcaatgtgagaaggataaggctcgagttcttgtgcattgcatgtcaggaaaaaataggtcaccagctatcgtaatagcttacttgatgaggtctaaaggatggaggcttccgcagagctatcaatgggtgaaagaacgtagatcatctgttgagttgagtcaagc

SEQ ID NO: 236378 - DNA, 294 bp, Gossypium hirsutum
ccgttatatcttggactaccatcatatcagcacttgcattccatggacttggcacacaagctctcgacgtgttctctcggatggaaatggctcaagttaaaccgaatgatatcactttcatcgcagtcctctctgcttgtgctcatgtaggattggtggacttgggtcgatattatttccatgctatgaaatacaggtacgggattcaacacgagattcagcactatggttgtatgatcgatttacttggtcgagccgggtatctagcagaagcactcaaactagttagtgaga

SEQ ID NO: 236379 - DNA, 344 bp, Gossypium hirsutum
gatccattggaacctggttcccaagcagcagcccatgttgctgagatccgtaagaggaagggattgaaggagcagatgaccccactttctgagtacgaggacaaactgtaaggttgagaataactcagcttctgccgctatattttctgctgcaattttttgttttcggtgtctgtctcttaatgttcttgttagtagttttgggtgccttcacccatactgtcttatcatgcaaggtcatttcagtccttttagacggtttttacaatgtacttcgctctccatctgtgttgttaatttttattgttttgatgaaatgtatttgagtcaacattgatcgtctt

SEQ ID NO: 236380 - DNA, 283 bp, Gossypium hirsutum
atcagcttttgccattctgatctttggccaggatttgccagatgggaattaccaaaggctgcaaaattcagggaataaacagaaagataaattctctcgcgtgttctaccatgggatcacaaattacagaggatggatcttggccttgacttatggatattgtttcggggtgggagttgacagtggacaacatcattgccgagtacttttacgaccggttcaatctgaaactccatacagcaggaattattgcggcaagctttgggttagcaaatctagtttc

SEQ ID NO: 236381 - DNA, 301 bp, Gossypium hirsutum
ttgaaggctttgcagctcatttacagtagcaaacaaagcaaaaccaaagggggtttgattgccggaacggcgactaccaatgtctttcgcaattcacagttcaagaacacaatgaaagcaatgcagtcacagtgttgcagccctgatgaagtgatatttggtcctgatttccaccaatccttgtactgccatctcttgtgtgggctgattttccgcaaagaaattcagttcatttcatccaccttttcccatagcattgttcatgcttttcgaaccttcgagcaagtttgggaagagcttt

SEQ ID NO: 236382 - DNA, 350 bp, Gossypium hirsutum
tttctctttttccgacgaccacactcaaagatttgtttcttttaatccattacccaacgaagcagctcatccgccgtctctcccgcgtcgccgatgcttcctcccagtatagccttctcagttccgacaccgactccacgcgccatcgcatcacgcgtcgggctgaatctttccgtatcgcggtcgcttccttgaaaaagccggtgcgccgttctgtccccgacggtcacgtgccggtctacgtgggggaagagaggacgcggttcctggtgaacgcagagttgctgaaccacccggtttttgttagcttgcttaataaatcggctcaggagcacgggtatgaccaaaaa

SEQ ID NO: 236383 - DNA, 399 bp, Gossypium hirsutum
tatatgggtgtgttgaaaaagaagggaaacccagttataacatgaatgagttcttgccttatggtaagattgggcttgaagcttttcaagttttcttgagctatttatatactgggaagcttaaagcttctcccatggaggtttccacttgtgttgatacacactgtgcacatgatgcttgtcgacccgccatcgattttgctgtggaattgatgtatgcttcttctatatttcaaatacctgagatggtttcactttttcagcgacggcttcttaatttcgtggataaggctctcgtagaagacattattccgaccttgtggttgctttccattgtcaatgcagtcagcttgtttctcaatgtgttgatagagtgacaaggtcggatcttgatagcat

SEQ ID NO: 236384 - DNA, 457 bp, Gossypium hirsutum
  unsure (1)..(457): unsure at all n locations
tttctcgcgtccgagaacaccagtagtcaaagttctacccaggtttctgggatgcatctcgttgctaacaatggtggagctaacataaataactctcttagtgctgcatctgcatcaacatctgctgttacagtggggcttctaccccagaattccatgaactccaggcagcagaattctatgaataatgcaagcagtccctatggtggaaactttgttcagattgcttcccctggatcatctagtacaattccacaatcacaagcgaatccttctccatttcagtcaccaacgccctcatctaataatcctactcaagttcctcatggtgctttagcagctactagtcacatgaactcagcaaattctcctgtgaatatgcccgtgcagcagacagctctttccagtgaggctgacccaagtgaatcgcaaagctctgttcagaanatcattcatg

SEQ ID NO: 236385 - DNA, 441 bp, Gossypium hirsutum
attatatattaaatccaaggacatgactcttaacaagcaccattgctgctccaccttcatctttctgctattaataactgctctcacagttttattctgtgaaaagtgaacttcaattgaactactacgcagaaagttgcccaagtgcggcagagattatcaaacaacaagttattaagctgtacaacaaacatggaaatacagcagtttcttgggttagaaatctcttccatgactgcatggtcaagtcatgtgatgcatcgctgctgttacggagggtgaagggaatggaatcggagcaagaatcggataggagttttgggatgagaaatttcaagtacattaacacaatcaaagaggctgtggagaaagaatgtccgatgacagtttcttgtgctgatatcgtctctctttctgctagagatggcattgtcatgcttg

SEQ ID NO: 236386 - DNA, 405 bp, Gossypium hirsutum
tctttcacgcgtccgcccacgcgtccgggcatttactgctactgtgttatcatgggctatcctcgagtatggagatcagatggcggcagtgaatcaactggaacctgctcaacaatctctcaagtggattactgatttccttataaatgctcatcctaaagacaacgttctctatattcaggtgggtgatcccgacttagatcataaatgttgggaaaggcctgaaaacatgaaagagaagaggcctctcacacaggtgaacataactgttccagggacagaggttgcagctgagactgctgctgctatggcttcagcatctctggtgtttaagacatctaactcggcatactcaagcacacttcttaagcatgccaagcaactttttaatttcgcggacaaata

SEQ ID NO: 236387 - DNA, 443 bp, Gossypium hirsutum
tctaatctcattaaacatgacaggccctccccacaaatgagaaaaaaaatggtctaagtggatctccctgacgaagtcaccttgatggttgaaagctttctcctatgcatctgtttacaactaagtaggagaccgttgtcaaacatttcatcaaaattccgatcactctcttatgaaaccccattcgtgccatcatttcttttataaaattcactcaacccccgtcgtatgctttactcatgtccaacttgactaccataagacctttatttcccacttctcttttgtttaagagtatgaagaatttcatatgcaagtagaatattttctgagatcaatctgcctcgtacaaacgcactttgagccccatcaatgtattgttgatagctcctctgagcttatttgcaattgtttttgctttaattttataaagcacattgcac

SEQ ID NO: 236388 - DNA, 313 bp, Gossypium hirsutum
tttttagcgcagaagtgaataacataaaatatgtgattttatttaaggttttgtttgggggaaattgagagaccattttgaaaaaaaaaaatccaagatgaagatcacatcgtttgtcttgctgaagtgcaccccggatggctccgatccgataatactagctaacgctaccgatttgagccattttggctacttccataggtcaagcgtcacggagttcatcgttttctttcttggaactgtcgctaaacgcactccttctggtgagctcctatccggtcatcacgaatagtataaggtacatgcttacaac

SEQ ID NO: 236389 - DNA, 374 bp, Gossypium hirsutum
tctctaagctggtttcaggcatcctttactttgggtacatggtaattgtttcatatgccttctttgtcctaacagggacaatcggattctatgcttgcttctggtttgttcgaaagatctactcttcagtgaaaattgactgagatcaagaatgtagaaaggggatcagacatcaaacctatgcgaattacgggatggacgagacaatgatacagtacagaaaattttatttctgatcgtctctacagtcttcttttattttgctgaatttgcgtgttgtaggcttggcctgttattttatgtacactgttatgtaccgtactgttttaagtagtttctccaatgagtaaaatttgtgatctagtcttgtagat

SEQ ID NO: 236390 - DNA, 321 bp, Gossypium hirsutum
ttctgttgatgaggaagatgatgaacagggtgccacttgtggctcatgtggggatagctacggcactgacagaattctggatacgctgagatatctgcgagagatggttccatgggacttgcgttcctgaggcacctgcacaggctgtgcatatcactcagtataagtgcccaagttgcagtagcaagcgggctagggtttgaaagtaggtccagaaattggactcacatcctgttgaaacgaagcaggcatggttcatagaatagctgttacggcttggaagtaaaacagagtagcccgttttagttgatgaatgaatgt

SEQ ID NO: 236391 - DNA, 199 bp, Gossypium hirsutum
tgagtatccagtttgcggaagtgcacattgtgccttggcacccttggagccaaaagctgggaaagttagattttgttgcgcatgcggcatcacctagaggaggaattgagaagatccatctagatgagcagaaccacagagtgcttctgtgaggaaatgctgttatggtgatggaaggctctgttttggtgcagatttg

SEQ ID NO: 236392 - DNA, 290 bp, Gossypium hirsutum
ttttgtcgatcctgccgagaggaacacaattggggtaccatctggtggatgggtgagctattagattccgtgcagataacccaggagtttggtttatgcactgccatttggaagtgcatacaacatgtggacttaagatggcatttttggtggacaatggaaaagggcctaatcagtcacttattactcctgcaagtgatcttccaaagtgttgaaccaggcaactatggacaccagcaccgagattttacgatgaaaggaaacgtgaaaagagaatgaaagaatttctt

SEQ ID NO: 236393 - DNA, 273 bp, Gossypium hirsutum
tgacttccgtggaagcagttattctggttgagttgttcaagcaccctcatcttttgctgctgcaagttaggaattccttctttaagcttcctggtggccgtttgaggcctggtgaatcagatattgatggactgaaccgtaagctttccaggaagctttctgctagtgaagatggcaatgaaactgaatggcaggtgggtgaatgtcttggcatgtggtggcggcatgatttcgaaaccttaatgtatccatacttgccatccaatgcgaaaa

SEQ ID NO: 236394 - DNA, 389 bp, Gossypium hirsutum
ggcttttgcgtacatgaaggaaacacatacgttgtctatgagtacgcagataaaggctcagtcagtgatttgcttcactccaacaagttccaaacttcatttactctttcttggaagcaaagagttcagattgcatacgatgtagctgatgcactcaactatttgcataactacataaatcctccttatattcataagaatttgaagagcagcaacattctcttggatgttaactttagagccaaagtcaccaacttcgggttggcaagaactattgaggacaacgatgaaggtggattgcagttgacaagacatgtggttgggattaaaggttatatggcttctgagtacattgaaaatggtgtgatcacgcctaagctcgatgtttt

SEQ ID NO: 236395 - DNA, 345 bp, Gossypium hirsutum
ttagtttcaccgccagcagtggggtaaaatgagcagcattgaggtggctaggtgcggggaatgggagccgtgcactcagctttgttggagggaatggtagtagtaaaagtgttagcagtgctggcaggattggatcattgggttcttcgagtccgagtaattcaatgactaatacaaattttgatgggaaaggaacttatttaatcttcaatgtcagtgattctatttttattagtgatttgaattcgcaggataaggatccaataaaatctatccatttcagtaattcaaaccctgtctgccatgcctttgatcaggatgccaagaatgggcatgatttgctta

SEQ ID NO: 236396 - DNA, 212 bp, Gossypium hirsutum
tccttttgtgaagtttggacaggctgctttggccaaaaaaggagaagattattttctgattaaacctgattgcgagagggttcctgagaatccggaaacatcttcttcggaatttgcgattcttgatgggcataatgatctatcagctgtcattgttgcagaggagaacttattgggcaatgtcttgagtgcaattacacagggcatcaata

SEQ ID NO: 236397 - DNA, 417 bp, Gossypium hirsutum
agtttccaataaaaaggactttgtatctatcattatgcaactccaaaaggatggcatgtacgagatggacctcactcatgacaacatcaaagctatcttactggacatgtttgtaggaggaactgatacctctacaacaacaaaagagtggatgatggcagagcttttaaagcatccaaatgcaatgaaaaaggtccaagaagaggtgagaaatgtggtgggaaacaagttaagggtggatgccgaagatgttagtaaaatggaatacttaaaatgtgtactcaaagaaactttaagactacatccggccggtcctcttatggtccctcgagaaacaactgcaagtgttaaattgggaggttatgacattccttccaataccacagtcctggtcaatgtatgggccattcagagaga

SEQ ID NO: 236398 - DNA, 363 bp, Gossypium hirsutum
tccacgcgttcgcccacgcgtccgtccacgcgtgcgcctacgcgtacgcccacgcgttcgggttccgtcatggttcccttgtgatgcggttgccagattcggaagtgggccagattcaaaccgttatttttggcaccgtcaatggtgcaattggcgtgattgcttcacttccacatgatcagtatgtgtttctggagaagctgcaatcgaacttaaggaaggtgataaagggcgtgggagggttgagccatgaacaatggaggtcattcaacaacgagaagagaactgcagaagccataaactttttggacggagacttgatcgaatcattccttgatctgagccgtgggaaaatggaggaag

SEQ ID NO: 236399 - DNA, 239 bp, Gossypium hirsutum
  unsure (1)..(239): unsure at all n locations
tccacgcgtccggacaccgatatggtcgacgatttacttgctttttacagtgaagaagctaaagtaaacgaatccgaggatctacanaactccatcaacctcaccaaagataacatcaaagctattatcatggatgtgatgttcggcgggacggagacggtggcatcggcgattgaatgggccttgacggaaatgatgaagagcccggaggatttgaagagggtacagcaggagttggc

SEQ ID NO: 236400 - DNA, 347 bp, Gossypium hirsutum
cttcactttaacggatttcgacctttcacgcagcttaaagaagaagcaattatcagaaactgtagctgacctcaaaatggatccgaatttatcgcctgccattccggttcgacgaaactttatccgatgggtccccgccgtagctgataacaaataccgcaaagcttataagaaaccaaaaccagcccgagtcagcccagtgagtcgaaggaaacctagtttctcaaacggggaacgttccaactccttcgtgggcaccgaggaatacgtgtcacctgaagtagtacgtggagatggacatgagttcgccgtcgattggtgggctctcggaattctaacctacgaga

SEQ ID NO: 236401 - DNA, 359 bp, Gossypium hirsutum
tatttggatgctagggacccacagggcaccagatgtttttattcagagaggcttttgaaacagcattgcattcataaacacatgattcttctgttaaacaagtgtgatcttgtttctgcttgggctacgaaggggtggcttagagttctatccaaagaatatccaactctagcgttccatgctagcgttaacaagtcttttggcaagggttctcttttatcggtactaagacaatttgcccgcttaaaaagcgacaagcaagcaatatttgatggatttattggttatcctaacgttggcaagtcttcagttatcaacacactccgcacaaaaaatgtctgtaaggttgctcccatccc

SEQ ID NO: 236402 - DNA, 373 bp, Gossypium hirsutum
ttcctttgttctttggggctactcttttccttttatgcagctttgctaatgctcagccacctgctcttactttaacaatcgttaacaactgtcctttcaccatttacccagctatccaaaccaacgcccggctacccggtcctcgaacgcggcggttttgccctttcaacactgacccaccgcttcttccccgcacccactgcccactggtccggccgcatctgggctcgaacaggctgtacctacgacaacggccttttctcttgtgccacgggagactgcggccaccgcatagagtgcaacgggctcggcggcgcctccccagtgacgctggcgcagttcagcttccaccacggaggcgaaaaggacctgt

SEQ ID NO: 236403 - DNA, 439 bp, Gossypium hirsutum
gtgatactgttactttcatgttcgaaagtcctacacaagacaagatatcggattttgagatgaagctgatggatatagatagtgagcatcttgggattccagaggcagagtatcaatctattgtgaggatgccttcagctgagtttgctaggatttgtaaagatcttgctagcattggtgatactgttgttatctctgtaaccaaggaaggtgtgaaattttccacaagaggtgatatcggaactgccaatattgttctcaggcaaaataccaccgtagataaacctgaagaagcgacgatcatagagatgaacgagccggtttcattgacatttgcattgaggtacatgaattcatttacaaaagcaactccattgtcaagtacagtgacgattagcttatcttcggaattgccggttgtggttgagtacaagatagc

SEQ ID NO: 236404 - DNA, 446 bp, Gossypium hirsutum
gcgtccgcaaaaccctaaatccctaaaaaaaacttcgatccccaaatttgaacccaattctccgatttctgatcctaaaactccatccaatttttcgagctattacggtaaatcatgggcataataagaagcagcttttcgttcatcgcaggcacagcttgcgggatttacgttgcccaaaactacaacgtacccaacataaaaaagctggttgactccgccttcttcgtagccaagcatgtcgaagagaagtaccgcaagcccaagaacaaggacgacgactagatcctaaataccctgctgttgccaagaatcaatagacttaacaggtccattgttgttttctcttctttaattatggaaaaaaaagggaagttgtctttttggaataaatacgatattgagattttctttttttgtgtacattttacaaattgggagagggg

SEQ ID NO: 236405 - DNA, 313 bp, Gossypium hirsutum
accttcaagtagtaatgggagaacagctgaagttgcgaggaactctttccggccacggcggatgggtcactgccatcgccaccactcctgaggaccccaacatgatcctcactgcgtccagagacaagtgcatcatcgtgtggaccctgaaccgcgaggaggacaactacggcactgcccgccgctctctgcgcggacacaaccacttcgtgtcggacattgccatcagctccgatggccagatcgctctctctggctcttgggacaccaccttgcgcctgtgggagatcaacactggcaagtgcacccgccg

SEQ ID NO: 236406 - DNA, 235 bp, Gossypium hirsutum
aggggcttggaatatcttcatgatggggcagtttctcctgtaatacaccgcgacatcaagtcatccaatatcctgttggaccagtccatgagagctagggtagccgattttgggctttcaagagaagagatggtagacaaacatgcagctaacatacgaggaactttcggatatcttgatccagagtatatatcaacaaggacctttacgaagaaaagtgatgtttatagctctg

SEQ ID NO: 236407 - DNA, 381 bp, Gossypium hirsutum
tcaatccatcgagattcgagaatccagcttcacttccaccttactgcttcattccattcggtgggggacctcggatatgtccaggatacgagtttgcaaggattgaaacccttgtttcaattcattatctgattactcggttcacttggaatttactatgttcagataactctttcagcagggatccgatgcctgtcccaactaaaggattaccagttcaaatcagtcctagaaaactgccctaatattggagtctcttggtagcttaacttacaagattcctgttgcagagcaaatgagctttattttgttcacatatttaggtaggccagtaaaacacagtaggaatctcggaattatatcattggtcggaatggcatt

SEQ ID NO: 236408 - DNA, 385 bp, Gossypium hirsutum
gtcaatgaacaaggactgaataaagggaatcctgctcacttcactatattccctggtgatggcaattgttcaggggatggacaaaaatctccggccgtcatatctctgcaatcagctccatcagaacagcattctcgctttgaactaggatttggtcagccgcccatggtctgtgcaaaatatccttacatggatcaatgctatggagttttctcaacttatggaccttcagtttcgggtcgtgttatgctgccattaaacatagcatcagaggatggaccgatatatgtaaatgccaagcagtacaatggaatccttaggcgtcggcaatctcgtgcaaaggctgttcttgagaataaactcactaaagctcgaaagccatata

SEQ ID NO: 236409 - DNA, 345 bp, Gossypium hirsutum
tccgctcccctaccccgattccctttatcctcaatttccccaaatcggcagcccttttatttttcccaaaccatttctcccctaccccgattccctttattttcccccccaatttccccaaaccggcagccctctgcatctcctcatcttcttcctcacatttcattcgtcccaaaaaacatttctattcctctttcatacaaacaaaaaacaatggctactgctgcttcatgttcttcctttaccatacttcatttagcttcatcaccaccactaatttctgccctcctaatttcgctcttcccagcgataatggtggttggtgtaacccgcgatggcctcatt

SEQ ID NO: 236410 - DNA, 438 bp, Gossypium hirsutum
aattcctttaatgtcagaaattttccaagctttggcctttttatgttcttttaatacttggattaattcctctttctccttgggttgcagattagaagtaataataactggtgatgtagaattatttccaaggaatatgtattctaagtggtttggtaattgtttaagttccagtttgggaggctcctcaatagagggtttttgcttaagttcatcgtttatcttaattccctcatattctacttgtcttgacgaatggttattaggttcttcacctatctccttgccttgagctagatacggtttcatcgtctcctcttgtacaatttcctgaaaagagtcttgagtaatatgatcaatagagtcaatgaaataacatgaatcatcctgttccctagagaatctcatagcatcgtaaattttaaacataatctcctt

SEQ ID NO: 236411 - DNA, 434 bp, Gossypium hirsutum
acaaaagcctcttccttagctaactgtctaagcggctactttataccgcatctcaaccatgatcatcccagaaaagaaccgccgcgagatctccaagtacctcttccaagagggcgtttgctatgcgaagaaagactataatttggcgaagcaccctgaaattgatgttccaaatcttcaagtaataaagctgatgcaaagcttcaagtcaaaggaatacgtgcgtgaaacttttgcttggatgcattactattggtaccttacaaatgatggcattgagttcttaaggacttacctgaaccttccttctgagattgttcctgctactttgaagaaacaagctaaacctgctggtcgtcccatgggccctcccggtgaccgtccacgcggcccaccacgctttggtgacggtgagaggagatttggtgacagag

SEQ ID NO: 236412 - DNA, 426 bp, Gossypium hirsutum
  unsure (1)..(426): unsure at all n locations
attcacaagagaagcagccgctcctccttccatctcctaaacaagaatggattcgcaaattaagtttgctgtggtggtgaaaataatgggaaggaccggttcaagaggtcaagtgacgcaggtgagagtgaagttcttggacgatcagaaccggttcattatgaggaacgtgaagggaccggttcgtgagggagatatcctcacattgctggagtctgagagagaagctaggaggcttcgttgaagggttatttttatactttttggggtttatgcttgttttgaatagtctaccgtattgcttttgaattacgtttagtaggtattcgtatatcgagacttgcgatttgggagaatggttgttgcttaaacctggattttatgatgattatgttgaaatgaactgaatttgttntgagttttggt

SEQ ID NO: 236413 - DNA, 314 bp, Gossypium hirsutum
ataacttcatctctcgagaccctggttctcagtttccacctgagtcaggaaggtatcatttgtatgtatcttatgcttgcccttgggcttccaggtgtcttgcatacttgaaggtcaaaggccttgacaaggccattggttttacgtcagtcaaacccatatgggaaaggacaaaggaaactgatgagcacatgggatgggtttttcccacttctgatacagaagagccaggtgctgcacccaacccctttaacggagcaaagagcataagggaactatacgagcttgcaagtacgaactatactgggaagtac

SEQ ID NO: 236414 - DNA, 319 bp, Gossypium hirsutum
gtagagaaatgacttgtgggatatgtttcgaaaactattcttatgataggctgcacgctgctgcatgtggtcatcctttttgtaaatcttgctgggcaggttatattagtacagccatcaatgatggtcctggatgtttgatgttgcggtgtcctgatccatcctgtgctgctgttgttggtcaagatatggtaaatgcattggcttttgtagaagacagacagaagtacttccgttatttcattagatcttatgttgaagacaatagaaagaccaaatggtgtcctgcaccagggtgtgattatgctgtggaatttat

SEQ ID NO: 236415 - DNA, 410 bp, Gossypium hirsutum
ttcacgcgtccgcaaagctcgattgagcatatatgacccgcaggtgaccgaagaccaggtccaacgggatctttccatgaacaagtttgactgggaccatcctcttcacttgcaacccatgagtcccacgactgtcaagcaagtcagctgtgtgtgggatgcttatgaggcaaccaaagatgcccatggaatttgcattctgaccgagtgggacgaattcaagaaacttgacttcaagaggatatacgacaacatgcaaaagccggcttttgttttcgatggaaggaacatcgtgaacgcggatgagctgagggagattggtttcatagtgtactcaattggtaagccactggatccatggctcaaggacatgcctgcagtagcataaatgtctatcgattacagatggg

SEQ ID NO: 236416 - DNA, 158 bp, Gossypium hirsutum
tgaattaagaagtctgactatagtttaatcaacaagctggttccagtttgtgaatttgcaataaagctttgtggcactgatggtacagtctcttgcatggcttcctattttgtctgcaataccatactcgctagcattatagcacgtgctggtggtat

SEQ ID NO: 236417 - DNA, 388 bp, Gossypium hirsutum
agtggaaatggagattcttccacagcgatcatcattatcctcaactttgaatcccaacgctccattgttcattccattagcatatcggatggtcaaggatttctctgatcaatggtgggctctcgtccaatcatccccttgcttccgcgactactggcttcaagaacgcttccatgatcccgaaaacgacgacgtttccgacgacgacgatgatcctctcttcccggatgacctcgatgacatatttgagcaatacgacgacgttttactcgacccaagacaggaaaaggaaaagaaattggtaccgtttgggacatcgaagtggcggaaggaccgagttgtgactgagtcacggaggtttatcgaaaaagcacccaagattgtgact

SEQ ID NO: 236418 - DNA, 408 bp, Gossypium hirsutum
taaatgggttttgaggtccttggagacaatgattcccctgtaatgcctataatgctttacaatccagcaaaaatccctgcattttctcgagagtgcctcaaacaaaatgttgctgttgttacagttgctttccctgccaccccactacttttagccagggcacgtatttgcatttctgcctcgcacaccaaggaagaccttcttaaagcgctagaggttattagtcaggttggtgatatggtgggcataaaatactttcctgcagagcctaataagcagcagcaggaccagcaacagcagcagccggggaaagacacaatcaagttggactgaagggtttttgaaacaggctgacgttgaattgcttgctttgcttctagcaggtaccgtaaaattgatgtttgaata

SEQ ID NO: 236419 - DNA, 405 bp, Gossypium hirsutum
tttggtagacaagaaaaaaagaagaaaagaatggcaaagtgtttcaacgtggttcagaagcagaagagagcccaaatagcggagagaaaaagattaattcatggtgaccctgcaacaaagaagctaaagaacaaatcccaatcactctccgtctctggaaaacgcaaacgcaagcttctcaaaaaatggcgcagggagcaaaaggaggttatagagaagggtttggtgactatggaagatgtggaaatggtggctgctgaaggtttggaattttcttttcctcctttttttaagtggttgatttcatgtctgttttgtacttcaaaaactgcaattactgctgaaggtttggaattttactaatttgggttagctgttaggtgctgaatgctgattgataaactc

SEQ ID NO: 236420 - DNA, 196 bp, Gossypium hirsutum
tgagttagttcagaaatacattggagagggctctcgaatggttagagaacttttcgttatggccagggagcacgccccatcaatcatatttatggatgagatagacagcattgggtccgctcgaatggaatctggaagtggcaatggcgacagtgaggtacagagaacaatgttggagcttcttaaccagcttgat

SEQ ID NO: 236421 - DNA, 458 bp, Gossypium hirsutum
ccaccaaagattgtcacaagcaaagcaatcacaactattacagggataataatttgtaaatctccattcgcctttaattttctccgaggaagtgaaggaagctttgagtagtctaggctttgagctttcccaattttactgaagctccaccccagaatatactggctgctaaccacttcaccagtcgatgaagagaaaccaacatacatagaatccaataaaccattagaaagatcaacggttgttaataaaagcagttggctcggtttgttgcttcccataggagctagtgttacattcagcaacttgtccacttgctcgaatcgatccacagctgcattggatttccatttaagagttccaagcttctattttgcccttcatcttcgacgaagtatgctgtcgaagctgtttccaaagatctcaagttgttcacgtcaatgccaacatgacccccg

SEQ ID NO: 236422 - DNA, 307 bp, Gossypium hirsutum
aaacattatcacgtagatgtcactacttttgtctgaaacaacacacaccaagagcgagagaaagccttcaaaacaaaagaaaaattagaacatcaaacatgattggtccaggcagacctctcttcgtcctctttggatcttccatcgttcagttgagttacagccacgaaggttggggtgcaattcttgcacatgcatatgctcgcaaggcagacataattctgcgaggatacagagggtggaactcgaggcgtgctttggaagttctagataaagtttttcccatggatgctgctgttcaaccttt

SEQ ID NO: 236423 - DNA, 545 bp, Gossypium hirsutum
ttcctactggctcttgttggaatcacagctaatcaaggtttctacttgttggggttagataacacatcaccaacctttgcatcagcaatccaaaactctgtcccagccatcacctttctcatggcagccatactaaggatagagaaagtgcggctagacaggaaagatgggatatccaaggttataggaacaatattatgtgtggctggagcatcagttataacactatacaaaggtccaaccatctacagcccagttccaccactgaatagacccacaccaacgtttgtttcgttgggggatgcaaatgggaagagctggacccttggttgtctctatctaatcggccattgcttatcctggtccggttggctggtgttgcaggcacccgtgttgaagaagtaccctgctagactctctgttacttcctatacatgtttctttggtcttattcagttcctcatcattgcgctagtttttgagagagactctcagcttggatgttccactcggcggtgaactattcactattctctaccgggagt

SEQ ID NO: 236424 - DNA, 486 bp, Gossypium hirsutum
tttggacagcgaggtttccaaggaggtgatggatttcgttttgttgttggaaaatgaagtggagaaattcaatacctttttcgttgagaaagaagaggattatgttatcaaatggagggaactgcaagatagagcagaaaaggccaaagcatcagatggagggttgatgaatgttgggagggagattgtggattttcacggagagatggttctgttggagaattacagtgcccttaactatacaggactagtgaagataataaagaaatacgacaagagaagcggtgctcttgttcgcttgcccttcattcaaaaggtcttgcaacaaccgttctaccggaccgatgttcttaatgagcttgtgaaggagtgtgagatggtacttgatcgtcttttctccacaaatgaaccatcggcgttacctgatgtaaccaacgagaaagaccacaaacctgatacttctagcagaagtaatgaaaacttgct

SEQ ID NO: 236425 - DNA, 438 bp, Gossypium hirsutum
tcgaattttcagggtattggagtttcaccatggatgcagtcgaggctagatgcctccatgcttggtttgcagactgacatgtaccaagctatggctgctgcagcattgcaagagatgagaactgtggatccttccagatctggaactgcttcccttcaattccagcaaccccaaaatggcccttgcaggcctgctgctctaatgcaaccccagatgttgcagcagactctgcctcaggccattcttcagggtgttgaagacaaccagcatcagtctcagccacatctacttcagcaacaattgcagcaccagaattcatttaataaccaacagcaacaccagcagcagcctttgtttaacaaccaacagcaacagcagccacagcattcaatgtcccagcagcaccagcaactgggttgatcatcagcagattcctag

SEQ ID NO: 236426 - DNA, 456 bp, Gossypium hirsutum
ttgggaaagggaaataaaacagcatctattcgaggatcagcagcagcaacttgaggcaaatgttgagaaactttctaagtttttggaagagccctttgatcaatatactgatgataaagttatggagatacgaatgcaagtaatcaatctttctgtgatcattgattccctttgtaagaaaatgtatgagtgcattgagaatgatttgctgggttctctccaacgaaatacccataatatcgctccatacaaatccaagggcattgagaaagcatcagagcttgctgtctgttggagtggtaaagccagtactactactggtaaatgccttccttccgattgtggcactagcggcaaacgtgaccgatctttcagctttgggacttcggacgacaaaggttgcccgtcaccaaagcaacctaagaggaaagttatggaggtggtttctttgatctc

SEQ ID NO: 236427 - DNA, 240 bp, Gossypium hirsutum
ttcacgcgtccgcaaaccctgatgacccacttgttccggagattgcacacatgtataagactgatcgggcaaagtacgaagcgacagcatgtggctggacccagaagtatgccatgggatgatggtggttagtgtgtaatacgtattggctttggtacgatgccatatatgtgttaaaaccttcatatattttgatttggatttgaattacgtggacatcttatatgaaaggcatttcct

SEQ ID NO: 236428 - DNA, 472 bp, Gossypium hirsutum
  unsure (1)..(472): unsure at all n locations
tcggttgacaatgtcctggtttgtaccaagcttaagagcatgcgaaggtgatgtgtgtgctgagccaaggaaggctcatgaagtggcctttttccttgccatatacttgatctccattggaacgggaggccataaaccttcattggagagctttggagctgaccagttcgacgatgatcacccacaggagagaaagaacaagatgtctttcttcaactggtggaactctggtctttgctctggactcttattgggcgtcactgtaattgtatacgttcaagaccatgtcaattggggcatttgcggatattattctcactgtagtaatggcttgtncgctgttaatcttcatcattggaaggccgtattatcgttacaggatgccatcgggaagccccttaactccaatgttacaggttttagtagctgccatttctaaaagaaaattgccccaccccttcaatcctgcaga

SEQ ID NO: 236429 - DNA, 330 bp, Gossypium hirsutum
ttgttcacgcgtccgaaaagctaaaggaatttcttgtgacagttggcttcgttggttcaaaattggatgcttcgttatttgtgtcatgtacaacctgattctacactctacgtacttgtgtatatagatgatattatcgtaactggggatgtgcctactatcattgatggaattgggaagttgttgattgtggaggtctcggtaaaagatatgggtgacctttattatttccttggggttgaatttactcagattcgtgctgcgtactgtatctatactatgtcaaagagaagctatgtctcgtgatcttcttgaacgaagttctatgac

SEQ ID NO: 236430 - DNA, 439 bp, Gossypium hirsutum
ttatttcatgaaaaatgtctgcactgatgcttacaacaagtggacaactgctggctatgacctaatacagtatctgcagcaaggcattgagaagtgaagtcacgggtaattatctttgaggtacattatcgtttgtaatttataaatattcttttacccccatagttacagttttctcgaggaaatcccacctaagcaaggctcggaagtataaaatatgtggcacaagcaattgatttgataagagagaaaatgagttgagttctttgtaacccagtggtggacatccttgttagttaggtttgtaaacgatacgccctaaaaaaattgtttgggaaagtaatagtttgaatgaacgtgggggatagtttctgtttgaaacaaaaattctattgaattcttaatgtttatgaaccgagcctgagttccaaggcttatt

SEQ ID NO: 236431 - DNA, 366 bp, Gossypium hirsutum
tatttccccgactttcctctctgcgtatcttcttcttttatgccttgtctgctgtttgaaggaggggtatggcttgggacggagagcaactgcagagagccaccaccttgagcacagccatacaatccaagtcacttctcttctgccctcctctatttgcagccccgcaaccaaagaattgaataaaaagtcatctttacgagttgtccacaagcatggtccatgctcccaactccatcgtcaagataaagcaaacatccccactgacgccgagatccttcgacaagatgaatcccgggtcaagtccattcacttgaaacttgccaggagctcaggctcgagcaatgtcgaccagattgatgcaac

SEQ ID NO: 236432 - DNA, 431 bp, Gossypium hirsutum
tttcccacgcgtccggacaaatctggtgaatttgtagctgttgatcccttgcctggcagcctccttgtcaatcttggggatatggccacggtatggagcaatggaaggttacacacggtgaagcatagagtgcaatgcaaggaggcgaaaactagagtgtcgatcgccacgttcctcttgggaccgaaagaggaagcggtggatccgccaccggagctggtggattcggaccatccgcggctttacaactcgttcacgtacgaggagtacaggaagctgcggctgtcgacggaattgcaagctggtgaggctcttgcacttgtacatacctgatcttaaagaaagattgtgtaaagcatattgcaatgtaatgaaagtcctccacttctgccctttgtttgatgaataaagcatgaatttaaatttcctag

SEQ ID NO: 236433 - DNA, 384 bp, Gossypium hirsutum
gttttaaagccatggatggagcttggctatgtgtcgcttcaagacataagggagcaggagagattcgatgggtactaccacaaccagttcttggtggtgaacgattgcttgcacaggtacaagtttatggcaaaatggatattcttcttcgatgtggatgagtacatctttgtgcctcccaagaccacccttggttctgtgctcgattccctctccgactattctcagatcactattgagcagatgcctatgagcaacaagctttgccactctgttgatgctgctaaacgtcacaggagatgggggttcgagaagctggtatatagagatgtgaaaagaggaataaggagggaccggaagtacgcaattcaaccacgcaacgtg

SEQ ID NO: 236434 - DNA, 404 bp, Gossypium hirsutum
tctgtaaattggtggcattcttcaggtaggtgctcatggaactggtgcaaaattgcctcccattgatgaacagattattagcatgaaacttgttactcctgccaagggaacaatagaactttcaaaagagaaagacccagagttattttatttagctcgctgtggtcttgggggccttggagtggttgctgaagtgaccattcagtgtgtggaaagacaggagcttgtagagcacacaactgtctcaaacttgaaagacctcaagaaaaaccacaagaagatgttgtccgagaataagcatgtcaagtacttgtacattccatatactgacaccgttgtagttgtgacatgcaaccctgtttcaaaatggagaggtccacccaaattcaaacccaaacatacta

SEQ ID NO: 236435 - DNA, 375 bp, Gossypium hirsutum
ttcttcttcttcttcacctcctccttcatccttctctaaagaagaggaaatagctaatgaaactccatgtaactacacctatggcagatgggtacatgacaagatggggcctttatacaatggcacaacctgtggtacaattaaggaaggtcaaaattgcatcacacacgggagacctgacttgggttacctttactggagatggcaaccaagccaatgcaatctcccaaggtttgatcccaacactttcttcaacctccttagtaacaagcatatagcttttgttggtgactcgatggctaggaaccaattggaatcacttctttgcatgctagccactgcctcctatcctaacctggtttacaaaactgggga

SEQ ID NO: 236436 - DNA, 389 bp, Gossypium hirsutum
attttattaagcaatcaagacttttggatttgagcaaaacatagatgaagcttgtgtttacaaacgtttaggggatggaaaggtggtctttctcattctatatgtcaatgacattctactcattcaaaattatgtagggaaattgtcattgattaaactatggttaacttaacagtttagcatgaaggatttaggagaagctaattttgttctgggtattcaaatcctaatggatcgaaagaaaaaagtgatagcactgtctcaggcttcatacatagacaagatattgaagtgttatacaacaatcaattcaaggaaaggaaatcaaccttctgtatcaggatttcatctctctttagaggactatccttagaaagctaaagaaagag

SEQ ID NO: 236437 - DNA, 224 bp, Gossypium hirsutum
gttttggatgacaaaactggttatagctactcatttgaagcattcgaagcattcaatgccctaaatgatccccgtgctgtatatagcctcaagtatatgctggtgggcaagataatggagagccaggccgatgatgatgctagtataatatcatccacggcagggctacagaatgtgaggaccgatcttgatgctatgaaagctgatgctgatgcccatgccaa

SEQ ID NO: 236438 - DNA, 219 bp, Gossypium hirsutum
atgttcacgcgtccgtgctgtaggcttgcatgactgggggttcccgaagattttcaaggtagcttgtcccaaagcatattcttatgcatacgatgatccaaccagcattgctacttgcacccgcggcaattatttggtcactttttgtccccatcgatgctagaattgttattttatatatatttagggttagtttggatgggcggtctaatttggatg

SEQ ID NO: 236439 - DNA, 218 bp, Gossypium hirsutum
tttctctctgtagccgccgcctgcgtctctctcttcatctctctgaaccaaaaagtctttagcttttcgcttcgagagagaccatgttggtttaccaggatctcatcttcggtgacgagcttctttctgactcattcccctacaaggaaatctagaatgggatgctgtgggaagttgagggaaagtgggttgtgcatggagctgtcgatgttgacatt

SEQ ID NO: 236440 - DNA, 131 bp, Gossypium hirsutum
tttttgacagcaggaacagactacccacaacattccgatatggtagcaatattcacacactaaatcacgatgaggaagacagccgtttctcggatagaaaatccttctggaatggaaattctacgcagtat

SEQ ID NO: 236441 - DNA, 359 bp, Gossypium hirsutum
cttcatactgccgtttctcttcatctttcgatcagccctacttctgggtatttctcgctttgaggttttaattggtagccatgaatgctcttgctggaactagccgcaatttccgcctggcctctcgcctacttggcttggattctaagcttgaaaagtctcttctgatcccatttagagagatcaaggtggagtgcacaattcccaaggacgatggaaccttggtgtcctacgttggattcagaatacagcatgataatgctcgtggtcccatgaaaggaggaatcagatatcatcctgaggttgaccctgatgaagtaaatgcacttgctcaactaatgacctggaagactgctgta

SEQ ID NO: 236442 - DNA, 313 bp, Gossypium hirsutum
tggccctggcaaggccgttactcaagtgctggctttgcctgccccggatggcacagtgcagccagaaggacagcaggatccatatgccgaatcgcttacagggccaccgccttcgaatgagcagatagcggacatggagcagaagcagcagctactggtgcaggagcaacagctatggaatcaatacggaagggatggaatgcaagggcaatcaagcttggccaagatcacaggaaggaccgtgtactatggtgctgctgcacaactggtaatgatgcacgatgggatgccacaagggaatggtatggggcag

SEQ ID NO: 236443 - DNA, 466 bp, Gossypium hirsutum
cgtccggccctgacaaaacccactactttatttacttgttctcgtaccccttcatgatagatcttgttgtggttgtaccaaatagcccaataggcaatagatctaattttgcgagcttctgtattctggctaacaaattctgtttctaaccattttttccaaattggttctctgttgcatgttgaaattgacacccccaatcccctcaacacctgtcgtgtgaaagagcaatccatgaagaggtgttccacagtttcctcctcagctcgacaaaccgggcacaatgtgttagcagccagatggcgtatttttaaattgtacatagtgggtaggaagccattggcaattctccacataaagattcgaagtttacttggtaatttaagctctcataggtttgtaaagaaattcgaagcaatttcactatgtattctattacccccctctgtagtaagtcattgatagc

SEQ ID NO: 236444 - DNA, 362 bp, Gossypium hirsutum
tgctgcgataccaggctgtgaatatcgtggcagctcggcttggtcgggctgaaccacctctcaggagagaagtaattgaatacatgtctgatgcaaatgctcatctttggagcatgaggcgcagcaaggcaaactttttgcgcctgacatcggttttctcaggattatttgaagttggaaaatggtttggtgaagtttgcaagtggaagaacccaatgacaacagtgctggtgcatttcctatttgtaatgctggtttgttttccagagctgattttatcaacagttttcctatacatgttcctgataggggtatggaagtatcgttatcggccaaggtaccctccccacatggacacaagc

SEQ ID NO: 236445 - DNA, 338 bp, Gossypium hirsutum
aggaattgagattgcggtgaagcgcattttatatgaaaatgatggaatgaaagagttcttggcagagatttcgagtctcggccggttaaaacaccggagcctcgtcgggttgaaaggttggtgcaagaaagaaaaagggtcattcatgttgatctatgattacatggaaaatggaagtttggataagagggtttattatgactgtgatgagaccaacatattgacttgtgaagaaagaattagaatcttgaaagatgttgcctcagcgttattgtatttacatgagggatgggaagctaaggtcttacatagggatattaaggccagcaacgtattgc

SEQ ID NO: 236446 - DNA, 337 bp, Gossypium hirsutum
cgaaaccaccagtttatacaccaccaaagattgagaagccagaacccaagccaccagtatatgaatcaccaaaaaaggaaaagcccgaaccaaagccaccagtttatacacctccaaagaaagagaagcttgaacacaaaccaccagtatatgaaccaccaaagaaggaaaagcctgagcctaagccaccagtttataccccaccaaagaaagagaagcctgaacccaagccaccagtgtatgaaccaccaaagaaggaaaagcctaagcctaagccaccggtttatacaccaccaaagaaagaaaaaccagaacccaaaccaccagtttatcagcc

SEQ ID NO: 236447 - DNA, 419 bp, Gossypium hirsutum
cccacgcgtccgggactcatcatccatttgttggaaggcagtgatctcgtttctcaacttagcgttcttgcttggtgggaaatacttcatggggaatctttcggctaactcttgccacgtagaaattaagtttggtggcaatgaattcaaccaggctcgagctctgtcccttagtgagtacgagaacagctttaatcgtaatgcctctttgggaaccccagctaatttgaaagcgtcgcttaccttcataaatagtcttaggtgaagataaggatctttagtaggcattccactgaattggcccaccgtctgaagcatctggaacatgactggcttcagctctaattgttgtaccttgattccgggtctcctaatgcccagattaagatcgataaatactgctacaacatattgtctta

SEQ ID NO: 236448 - DNA, 375 bp, Gossypium hirsutum
cgaaggcagcctcccattgataccacttggcagcagatttatttttgcttgaggactggttattatgatgaagcaagacaagttgccctgtcatcccgtgcttctcaccaatttgcaccactgcttgcagagtggattaatggtggaggcatggtgccagcacacgctgcagctgctgctgcagaagagtgcgaaaaaatgttcagaatgggtgatcgggttggtcgagcttcatatgacaagaaaaaactgttgctctatgctatcatatcggggtctcgtaggcaaattgaccgtcttctcagagatataccatcacttttcagtaccatagaggatttcctgtggttcatattgtctgcagcacaggatttt

SEQ ID NO: 236449 - DNA, 418 bp, Gossypium hirsutum
cgtccggtccttcatttcccttcacctcaaagcactaacacttcctcttctaaacctgttttatcctatgcaccgcagacatccttaacctgcgctcatggggaaagaaatgacactgtcaattctataacaagcggtgacccagaaggagaaggagaggaagaggaagaagagttgtctttgatggctttggttgtgacccttttcaggaaatcattggctgcttgtaagagtatggaaagaagagagctttgtgctatggagatcggttggccaaccaatgtcagacatgtagcacatgttacttttgataggttcaatggcttcttgggtttgcctgttgagtttgagcctgaagtccccagaagagctcctagtgcaagtacaactgtttttggagttttcacagaatccatgc

SEQ ID NO: 236450 - DNA, 446 bp, Gossypium hirsutum
tttgcaaaggatttgtgatggcatttggtttaatatgattgaggaattgattactgtatttgaagcagccgcatctgaccgtaatggaaatattactttccataagttggttggccggcttgacaacagtgccgtttctgctgttggtgcgaggttggcattcaagtccaatgaagaaatagcagttcaagtgagatccatccttctcgatgaagttatcccagagtcagagccagtgcttctgcttaaaattgatgtacagggatgggaataccatgtattgaagggagccaaaaagttgttatcgaggaaaaaaggtgaagccccttatctaatctacgaggaagatgaacgactgttgcaagcaagtaacactaccgccaaagagatacgggattttctaagtggtttgggttatactcattgcacccagcatggtacagatg

SEQ ID NO: 236451 - DNA, 358 bp, Gossypium hirsutum
tctacgcgtccgggaggctatgagtttatcaagaaagcaattgaaaagcttggggcgagacacactcaacacattactgcctatggagaaggcaatgagcgtcgcctcactggtcgacacgagactgccgacatcaacactttcatatggggtgttgcaaaccgtggcgcatcgattcgtgttggtcgagacacagagaaagctggaaaaggttatttcgaagaccggaggccagcttcaaacatggatccatacgttatcacttccatgattgcagaaaccaccatcctgtggaaaccctgaggcatatatattccttggcttctgtttctctgtggtacaaaggaaagagctatgt

SEQ ID NO: 236452 - DNA, 321 bp, Gossypium hirsutum
ggtccgagaaagtagttgtgcataaattgactcacaattttcgtgatgctacccacatagtacgtacaccattgaaactaccaattgaatcagggcacgtccttctgaaaatcatttatgctggggtaaacgcaagtgatgtgaactttagctcaggcaggtatttcctaggaaacaagaaagatctgagttcccttcttccatttgatgctggatttgaggctgtgggaataattgccgcagttggagattctgtaagtaatttggaagttggaactcctgctgcaatcatggtttatggaggttatgctgaattcattg

SEQ ID NO: 236453 - DNA, 272 bp, Gossypium hirsutum
cggaatttccctacccgagagatcatccgcccccaaaccccattccaacattctcgccaggatcactccttaccccattgttacccgtggtaagcaagcggtctctgatgctgctttcgtctccaagaaactcctccgaagcaccggcaaagtcgcttggatcgccggaactaccttcttgatcttatttgtccctttgatcattgagatggaccgcgagcagcatttcaatgaactcgagctccagcaagcgagtttcctcggtgccccac

SEQ ID NO: 236454 - DNA, 223 bp, Gossypium hirsutum
tccacgcgtccgcttaatttgaagacacagttctctcatactaaaaatgacatggaagtttaccttgtaattagagatttggtttcattgctttttgttgggttattaatgatatggggatgcagaactttaaactgggtatggctggccccaaaaaggctcgaaagctgcttgagacaacagggttttgcagggaattcttacaggttcctttctggtgaca

SEQ ID NO: 236455 - DNA, 245 bp, Gossypium hirsutum
ttgtttctttcttttttcccttctcaccaaactaaagcttggctgagaaaatgaagatcttcaactgggtgcaaaggaggttccatcataacgtcctcaaagatgggcttgcacgaaatgttaagaagactgattccattgcaattgactccaatacaaaagctttactggaacaagtggcactggttgacatgctggatggttggcgagatggcgctttaacaattggcaccttcggttttcga

SEQ ID NO: 236456 - DNA, 430 bp, Gossypium hirsutum
tctgatctatgtgacttctatcaccatatggaataaaggcatcattagccaaataattctttcgttccctatagcagtttttactgggagaaatatgtttgctgaaaggagtaaaaaaggcattagtgataataagatatatcattatcatttaaatcttggaggaagtgtttctaccagaaggctgactaggctaccttcaattcctaagaatgatgcaaagttcagggggtatgttggaattcacagttcgggattcagaaactttctgctaaaactggagctgctttgatctattgtggattctggttttgaacatccttccgaaggcaaagttttaaactcatgtctaatgttaacattcgtgaattccatgaattaagtcattttgtttttcttgcttttagtgacttataatggtgggcagtat

SEQ ID NO: 236457 - DNA, 380 bp, Gossypium hirsutum
gtacacttcctttgtttgtgagattattttctcacgaggggtaatgaaaagagttatagaatggattgctacctatgcctagatcgcagataaatggaaattttattgataagaccttttcaattgtagccaatatcttattacgaataattccgacaacttcaggagaaaaagaggcatttacttattacagagatgggatgtcggctcaatccgaaggaaattatgcggaggccttacagaattattatgaagctatgcgactagaaattgatccctatgatcgaagttatatactatataacataggccttatccacacaagtaatggagagcatacaaaagctttagaatattattttcgagcactagaacgaaac

SEQ ID NO: 236458 - DNA, 232 bp, Gossypium hirsutum
  unsure (1)..(232): unsure at all n locations
agcgacagtgcttngtgagcttaaaatccggcacgttgaactcactttccgacgaacaaaaagtagagttaatccaattccatataatcccaacttatctctcttcagctcagtttcaaaccattagtaaccctttaagaacccaagccggtgatagcggcgacgggaagttccctctcaacgttacctcgtcgggagacaccgtgaacattacgtcggggttgactaatac

SEQ ID NO: 236459 - DNA, 414 bp, Gossypium hirsutum
ttttctagctaaagccttgctagtcaaagaaaaaatgatcgaagatcaggagaagcagaaatctcaatcagaagcagaattcagtgcactaatggatagattagatctcactgagaaagagaatgcatttctcaaatacaagtttcatgttctcgagaaggagcttgagatcagaaacaaagagatggaatatacccgtcgatcagaagatttagcacataaacaacatttgcaggatgtaaagaacattgctaagttggaagccgaatgccaaaagttacgtttacttctacaaaagaggctgccaggtctggctgccgtgatgaaaatgaagaatgaagtcgaaatgctgggaaaggacaagtcagagacgagaagaagaaagctgaacccaactagagatttgatcgtcag

SEQ ID NO: 236460 - DNA, 196 bp, Gossypium hirsutum
atagtcttgggccgggacattgcggatgctcattacaaagctcgtctatatgctggaatcagtgtcagtgggatgaatggagaagtcatgccaggacagtgggaattgcaagttgggccaacagatgggatctatgacggagatgagttatggcttgcgcgttacattctggagaggatcactgagattgctggag

SEQ ID NO: 236461 - DNA, 398 bp, Gossypium hirsutum
tggacgcgtgggctacactgcatatgctaagttgattgatgagaataggtggtatcattttgatgatagtcatgtttctcccgtcaacgaatctgacatcaagacttcagccgcttatctgttgttctacaagagagtgaatgaatcaaagatggagataggggagtcatcatatagtcattccacctcttaatagtctagttgagagcattctgcaataccattgttttttggagctacttccatttgaggttatgccgtgctcacctgtgacagtacttggctgagcaaagctgacctgcggtcccacattttatggaagatagatgacactagcatgggaccaaattcactccggaacggtggcaagaattcaaggtaggggcaaattttagttc

SEQ ID NO: 236462 - DNA, 414 bp, Gossypium hirsutum
ttcagactctggttccggaaccactacgtgcgactgcatctgctgaagagtttatgaagcaattacctgagtttgacaaagacttggctaaggagagacaggatgctgaggaatcaggggaagtcctaagatatgtcggtgtagtggatgccattaaccaaaagggagttgtggagctacgaagatacagcaaaagtcacccatttgctcaactctcaggatccgacaacatcatagctttcacaactaagaggtacaaggagcagccactgatagtccgtggtccaggtgctggtgcccaagtaacagccggtggaatattcagtgacattttgcggcttgcttcatacctcggggctccatcttaggcaacattaaactctccggttttgggcactctttggtctttcagac

SEQ ID NO: 236463 - DNA, 442 bp, Gossypium hirsutum
atagaagccctaaattttctcagcctttcttgctctttccctcgctttctcgggaaaaaaaatggcaaacgcggcttcaggaatggctgtgcatgatgattgcatgctgaagtttttagaactgaaggctaaaaggacttaccgattcatagttttcaagatcgaagaaaaacacaagcaagctcgctgcggaaacggtcgctgaacccactgctaggcctccagcttagactgctactaatccaccaaccaagcctccaactcagtctccgacgaagccaccaacacacccaccatctcatcctccggccaagccacctaaatcgagccaggtggcagtgcagggcgttgtttattgcaagtcatgcaagttcgccggagtcgacacccttttgggagctaaaccaattcttagtgcccccgtaaggctgacatgcaaaga

SEQ ID NO: 236464 - DNA, 487 bp, Gossypium hirsutum
tactcaacccaccaccatcaccaccaccctgaccctcaccctcacccccatcctcatccacccactaagcccccaacccccactcctcctccagttcatccaccacccaaggcgccagtgcaaccaccaaccaagccaccagttcacccaccacccaagccaccagttcaacctccaactaagccaccaaccaaacctccaactcaacccccgactaagccaccaactcagcccccgactaagccaccaaccaagcctccaactcagcccccgacgaagccaccaacacacccaccatctcatcctccggccaagccacctaaatcgagccaggtggcagtgcagggcgttgtttattgcaagtcatgcaagtacgccggagtcgacacccttttgggagctaaaccaattcttagtgccaccgtaaggctgacatgcaaagacgctaaaaacgaattaacggtccagttcaagactgacaagaatg

SEQ ID NO: 236465 - DNA, 234 bp, Gossypium hirsutum
gcattgctctcaatcaaatggggctggcttgtgtgcaacgctatgctataaaggaggctgttgagttgtttgaagaagctaaaagcattttagagcaagagtgtggaccgtaccaccctgatacactcagcgtatacagtaatctcgcaggcacttacgacgcaattggcaggttggatgatgccattgaaatactggagtatgttgtttagaccagagaggaaaaactgggga

SEQ ID NO: 236466 - DNA, 293 bp, Gossypium hirsutum
tctttgtctctatttaaaaaaaaagagccaatttttttgaggtggtagtatacaaaaacaaaatgaagatctgttgcattggagctggctatgttggtgggcctacaatggctgtgatcgcgcttaaatgtccggatattgaagtggctgtcgctgatatctctgtacctaggatcgctgcctggaacagtgaccagctccctatctatgagcctggtcttgatggtgttgtgaaggagtgtcgtggcagaaaccttttcttcagcactgatgtatagaaacatgtgcgtgag

SEQ ID NO: 236467 - DNA, 442 bp, Gossypium hirsutum
cctactcgttcggcagtatctcactgcttctaatggcctcagatttgatggccaaaatctttatggcaatggctttcacggagctcagcctacccaaagctgtgcgttttaaagtgatctaacttaagacattaaatgtatgagtatgtgagacagacgtaatctatgggattgcatgcatcaacctcaattctaatgatgatgcgaagtgcttttttatagccatgggagcctatcaaccatatcatttatcattaacggaaccagcacgaggtcaggtccatggtttccgtttgtcactgtggtatgagcaccttggcatgcttgatgacacattcctcgcaccagaaagtgaagagtgtgtcaggaaggtgaatcacgttgctgacaaatcttgggatctctattcaagtgagtcacttgagcgagacttgcctggaca

SEQ ID NO: 236468 - DNA, 284 bp, Gossypium hirsutum
ctaagtgacaaaaacaagccaaacaggcaggagaacagtgacaacagcctacaatgccctgtacctaggagatgctgagaggctcctccaagtaatggaccaaagctttccgagttgggcttggcgcgaaaagactgtatcgaaacaagctggataaaatctgtgctctacatagctgggttcccaagtgaaacacctccagaagtactgctagaaggaaagtctttattcaagaattatttcaaagccaaatctgattttgtgcaacaacctattcttgaaac

SEQ ID NO: 236469 - DNA, 482 bp, Gossypium hirsutum
cttttagcttacagcttccattgtttttcagtagtgaagagctaaaaaagaagggaaaccaatggaggggaaagaagaagatgttagattgggagcgaacaagttctcatagaggcaacctattgggacagcagcccagtcccaagatgataaggattacactgagccacccccagcacccttgtttgagcccagtgagttgacttcatggtcgttttaccgagctggaatcgctgagttcgttgctactttcctattcttgtacatctcggtgttgactgtgatgggagtccttaaggacaaaaccaagtgtacaactgttgggattcaagggattgcttgggcttttggtggaatgatctttgctcttgtttactgcactgctgggatctcaggtggtcatatcaatccagcggtgacatttgggctgttcttgggaaggaaattgtcgttgacaagggcaatatactacatggtgatgc

SEQ ID NO: 236470 - DNA, 413 bp, Gossypium hirsutum
tgtggtttgagagaaaactgatgctgctggctctggaaaacctcaagtttatctatctgctgttctacaggtcacgatcattcagtgtcagatgaagatggcatagccatcattaagcatgcagtcgaaagaggagtcactcacatcgatacagccgacctctatggacccaaaactaacgaaattctggtcggaaaggcattgaagcatctgccacgagagaaggtacagttggctacaaaattcggtgttgaaagcatgggtccagatggtccggttatcaatggcactcctgaatttgttcgttcttcacttgaggctagccttcaacgcctcgatgtggattatattgatctttactatataatcagagttgaccgcaagactcctatagaagatattatggaagaact

SEQ ID NO: 236471 - DNA, 503 bp, Gossypium hirsutum
gttgtctatgaagccgatatagatcccgttaaaatgatcttgcctgatgaagaaggtgaaccggagaagctcactacggtaggtgacggtgcagcgagtcaacaagtggagcagcattacatccgttcaatcgaatcaacggttgtgattagacaactcccttccgaagggctttcattccagctttggccagctgctactaccctcgtcacgctcctcgataactacctccgtcaccctagcaaaagccctctaacagccaccctatcaactgaccggaaactaaaaatcttagagctcggctccggtaccggtctcgttggaatcgcagcggccgtcacgctgggagctaacgtgacggtaacagacttgccacacgtcatccccaatttgaaattcaacgcggatgcaaacgctgacgtggtgactaaaagaggtgggaccgttgacgtggcaccgttgagatggggagaagatgatgacttggaggtaatcgggcggga

SEQ ID NO: 236472 - DNA, 519 bp, Gossypium hirsutum
tcttacgcgtccgaaaaaaggcattcttccaaaatcaaacgatttcgatctctgatctgggatttgtgaccatgagcgatggagaagacgctgtacggcgccgaaatgccattgcggagtaccgaaagaaactccttcaacacaaggagtacgagtccagggttcgcgcaggtagggagaatctgagagctgctaagaaggagtttaacaaaactgaagacgatttgaagtctcttcagagtgttggacagatcattggagaagttctcaggcctcttgacaatgagcgcctgattgttaaagcaagcagtggccctcgctatgtggttggttgccgcagcaaagttgacaaggagaaactgacttctggaactagagtggtccttgacatgacaacgcttacaatcatgcgggctcttccacgtgaagttgatccagttgtttacaacatgctacatgaagatcctggtaacgttagctattctgctgttggtggtttatctgatcaaattcgagaac

SEQ ID NO: 236473 - DNA, 489 bp, Gossypium hirsutum
  unsure (1)..(489): unsure at all n locations
tcggtttgatcatgccttaacattacctctatttatttggggacagaccattgtgattagcaaaatgcgaataatgaccaaggaaggactaaagtggactgacaggagagtcagctttatgaacgaaattttagctgctatggacacagtgaagtatggttgaatttagaaagcatttcccttggattttcaatatatttttttccatttgatattgcttattggtcctatgcttggaaaattttcagattttatgcatgggagaagagctttcagacaagagttcacagtatacgaaatgatgagctgtcttggcttcggagagctcagctactatctgctgtatgatatttgaaattctagtccattttttctttgcatgtgtctttgccatatgaaatgccaaaatagagtatgaagttgccagttgccatgtaaaatcaacgagtgtacttccttttgcaccgganaatgtaacaccaaccataa

SEQ ID NO: 236474 - DNA, 410 bp, Gossypium hirsutum
gatccactcatcatacaatgcactaagatttgtttctggggttacaaccacatttacccccaaagcaggtcttaaaataatacagttgtacatggaaggctaccgacaagactggaagctttcttttgaggaagacactgttaagagaggtggctggcagcaaggtggaattttagtagcaggtcctggaaaaaccaacattttatacattcacaaggacaaagaagcaggggatgatccagatattgaagacattttgaaagcttgttgctcataagaaatggggcctataatctcagtgaaatttcgtgtttataatctatcatagtgtatatttgggaattttcagtaaactcttctgttcttttccgattatgtgtgatacaacagaaatagaaaggagttttatc

SEQ ID NO: 236475 - DNA, 412 bp, Gossypium hirsutum
ttattttctggaaggcccatcatgcctggtcgcaccgaggtggagcaattacacaagatattcaaactatgcggctctccttcagatgaatattggaaaaagtcaaagttgccacatgcaaccatatttaagcctcaacaatcatataaacgatgtatagctgaaacttttaaggactttccaccatcatcgttgcctctgattgatactcttcttgcaattgatcctgttgagcgcctgacagctacagccgcattaaatagtgaattcttcacgaccaagccttatgcttgtgatccttccagccttccaaaataccctccttgcaaggagatggatgctaagctacgagatgaagaagctagaagattgcgagctactggaagacctaatgctggagtgaagaaagctc

SEQ ID NO: 236476 - DNA, 351 bp, Gossypium hirsutum
ttatgttcttagaaatggagaagatctgctgcatcggtgctggttatgctggtgggccaacaatggctgtcatttcattgaagtgccctgaaattgaagtggctgtcgtgggattagattaatgtaagtcaagttgaattgataataggctacatcttactcaaaatgttgtagggttaaaggtcgagttgtgcaggttgctggaagagaaaagatcagctgatctaagctcatggacatgagcttcctcgctatggactcgaagttggccttacaaattatgcagcagctgattgtgttggactccttttggctcgccgaacactgaagcagctggagatggatgctgaa

SEQ ID NO: 236477 - DNA, 438 bp, Gossypium hirsutum
cttacgcttccgcccacgcgtccgcccacgcgtccgcattgattgattatggtcatatcgagcaatggattgatttcgcagccatggaaattgatgctaatattgcaaaatggttgtatccaagacttggttacggtgtttaccttcctccagctgaggaagctgctattgctgcattgaagagagcccttggcgctttgaacactcatcttgcttccaacacatttcttgttggacattttgtcacccttgctgacattatcatgacatgtaacctctacttgggtttctcccagatcatgactaagagttttacctcggagttccctcatgttgagaggtacttttggaccttggttaatcaaccaaaaatcaagaagattcttggtgaagtgaagcaggcagtctctctaccacctgttccttcaaagaagcctg

SEQ ID NO: 236478 - DNA, 386 bp, Gossypium hirsutum
ttcttcgcgtccggctgaaataactgacaagcttggcctccattcccttcgacagcgtcactggtatatccagagtacatgtgcaacatctggtgaggggctttatgagggcctagattggctttccaacaacatagctaacaaggcctgaagctattaagaagatttttgctatgtgggaagttctggaagcaggggggagcattatctcgtcttattattattatttttcaatcattctcctttccccctcatttttcatctgagacagtcggattgttgttatgcctttatttgcattttgtgatgatcattaatttagttgggaacttatggctaaattgtaactaaaaaactggctggttggatatataattcctttggat

SEQ ID NO: 236479 - DNA, 357 bp, Gossypium hirsutum
tttaatgtctgtgctcggttatcgtattgggaagtcaaaaatcaagcatggcatgaaatacatccaaatcccgggattaccacacgatgctgttcgagtattcattcgttttttatatacttcatgctatgaaggggcagagctggaaaagtatgcactccatctataggagttgtcgcattgatgctcagtcacgctactgaaacgagtttgcatttgttatctcgagcaagactttcttaccactgaaaatgtgattgatacccttttgttagctcggaaatgtgatgcaccaaggctcgtcctcatttgtgttcgtttggtcgtaaagaatttcaaatccgtatcttcaaccga

SEQ ID NO: 236480 - DNA, 454 bp, Gossypium hirsutum
tcttttctccaaacatgtattctctaaaatcatatgttttggttgtaagcttaatctttattccctttttggctaacaattttcttgtttttgttaactccataacttcttcgtcttcttattcttcttcgtcgggtaatcaatacaccacttttttcaacgctatatcttcttccaccaatcccaaggcttccttaaactccggtaagaaccaaacgacgtcgtctctgatatcatccagcttctgcgacgtatgggacgtgacctgctctgggaggtgttgggcctggcccgggagcccgacaacgtcgagtggattaaagggttgagaaggaagatacatgaaaaccctgagctagcttttgaagagtacgaaaccagtaaactcgttcgatccgagttggaccgtatggatattgaatataggtaccctttagccaaaacgggtattcgg

SEQ ID NO: 236481 - DNA, 339 bp, Gossypium hirsutum
atacgcgtccgcccacgcgtccgcccacgcgtgcggtttgtgggggttttgattaacaatgctgggatttcatatccttatgccaggtacttccacgaggttgatgaggagctgttggtgaatttgattaaggttaatgttgaaggtaccacaaaggtaactcaagctgttttgcctgggatggtgaagagaaagaaaggcgcaattgtgaacattgggtctggtgctgccattgtcatcccttctgatccactttatgctgtttatgctgctactaaggcgtatattgatcaattctctaggtgcctttatgttgaatacaagaacagtgggattgat

SEQ ID NO: 236482 - DNA, 196 bp, Gossypium hirsutum
ctcatcgcgtccgatcatggttgggagcatctgtcctaggccttggtgagtggtttatcaagcggatgccatttgttcgtcatatctacaatgcctccaagcagatcagttccgctatatcaccagatcagaacacacaggcattcaaggaagtagccatcataaggcatcctcgaattggttaatattctagctt

SEQ ID NO: 236483 - DNA, 385 bp, Gossypium hirsutum
gtcacttcagctgccacattggagtgggcattatcagagctcctaaggcatccaagggtaatgttaaaactccaacaagagttagaaagtattgtcgggaacaagagaatggtagaggaaaatgatttaccaaaattggagtacctagacatggttgtgaaagaaatttttaggcttcatcctgttgcacctttgctagttcctcgtgagtcagtggaagacataattattgatggctgttacataccaaaacaatcaagggtcttagtgaacatttgggcaatggggagagaccctaatacttggtccaataatgctgaagagttttttccagaaaggttcattgatagcaatatagaccttcatggacatgattttgaactca

SEQ ID NO: 236484 - DNA, 131 bp, Gossypium hirsutum
ataattttttttgagaaaaaatggtgagggcaatggcattgagtggaacgtaccagtgggaagtttatgaggaggtacaggttgcctgagaatgctatgatggatcagatcaaggattgcatggaaaatgg

SEQ ID NO: 236485 - DNA, 478 bp, Gossypium hirsutum
ttttgtcattttcgtcattgatcaatcaaatatagttcaaagaataccccatttttggatcgcaggaaagccaaaaaaaaatgctagcagtttttgacaaatcggttgccaagagcccagatggtcttactgttgctgatcagccacaagcactatcagctctcaaagatggtttcttagctaatcattttggctcagttcatcctggttcagtcaccatcaatcttggatcttcgggtgttatggcttattctcgtgaaaaacagaacccacttctccccagactgtttgcggtagtcggtgaaattttctgcatgtttcaaggacatatcgagaacgttgctgtccttaagcaacaatatggcttgaacaaaacagcagacgaggggattatcgctattgaagcttatagaaccctcagagacagaggcccttaccctccagaccaggttgtgagagatatccaggggaagtttgt

SEQ ID NO: 236486 - DNA, 339 bp, Gossypium hirsutum
tgaaacatttggtcgcaaatcaaaaaccagatggatcctttaacacaatctttgtctttggtccgaaaaatagaccaaacaaagtaccgaaattgaacccaaaaaaaaaaggcgtaaatatcactgggaaaaaagctttaacgaaaaatcatggcgtgatatgatcgagcaattactgttttctcccccgatggtcatttattccaaggggagtacgctcttgaagccgtccgtaaaggtaacgctgccgccggagttcgcggcactgatatcgtcgccctcggtgtcgagaagaaatccgccgtcaagctccaagattccagaagtgttagaaagatt

SEQ ID NO: 236487 - DNA, 207 bp, Gossypium hirsutum
accgaccaaacaatcatttggatgagcggaggcgttcgaggatggctctcgatactgctcggggaatgaattacttgcacaattgcactccaatgatagtacaccgggatttgaagcccccgaatcttttagtagacagaaattgggttgtaaaggtctgcgattctggttcatcacggatgaagcacagcacatatctatcatcaa

SEQ ID NO: 236488 - DNA, 385 bp, Gossypium hirsutum
gtgccttatcgcccgatcccttcaggagcaatatctgagaatgaggttattagccaaatctggttgctactcttagggggccttggcatatctggtttactagacgtgtgggcagggcatgacttccctattgtattctaccttgctttgggaggatccttgctatcatacatatactctgctcctcctttaaagttgaaacaaaatggctggataggaaattttgctcttggagcaagctatatcagtttgccctggtgggccggtcaagcattgtttgggacacttacaccagacatagttgttctcacactcttgtacagcatagctgggttgggtatcgccattgttaatgactctaaaagtatcgaaggagacaaagctc

SEQ ID NO: 236489 - DNA, 391 bp, Gossypium hirsutum
cttctctagaaactcaatgtgagatggagttgtttactgtgtttggtccttataggaatcgccattgaaggtgttcaatgcaaggtggttcagtttattttcggggattcattgtcggatgtgggcaacaacatgtacctttcaaagagcttggctcaggctaacttgcctttttatggaatcgattttggcaatggcttgcctaatggaaggttcactaatggccgaaccgtcgccgatatcataggtgacagcactggtctcccaaggccaccagcatttttggatccatcattgaccgaggatgtgatattagaaagtggagtaaattatgcctctggaggaggtgggattttgaatgaaacaggaggttactttattcagaggtttt

SEQ ID NO: 236490 - DNA, 496 bp, Gossypium hirsutum
gtctcagtaaaaacaaactgtataaaaccatgtctgatctcgaagtttcgagctgcggttatgacaaggtactcgtggatgcagaatgtacgcatgatggatcggttaaacatatccaaaagttcgaaaattggggatggacaactcttcaacgccgtgtattggatgccgtgagaacagatagtttaactctacttcagttaaaacttctaaggaacggttttagactgctgaaagtcggggggttgctggtttacagcacttgcagtttgacagttgctcaaaacgaagacatagtagagcagttcttgaaggaaaacgcttctgcagaactacaggaaataaacgaagcagaagagtggccccgtaaaagtgggaggataccaaagacattacgatttgatcccttgacatcacagactagtggacttttcgtagctaagttcacaaaactcgccacttaattaagatttacattctggggtgcagagaatcg

SEQ ID NO: 236491 - DNA, 374 bp, Gossypium hirsutum
  unsure (1)..(374): unsure at all n locations
tcggttcaggttgttgacttcggaagttatatcgagaacggctttcggtagtaattacttggaagggaagaagattttcgacatgttgacgaaattggcgatactagttagtcgaaattatttcaaaactccgattcctggcatcagcaagatatggaaaactgcggatgaaatagaatcggagaaacttgccaatggaattcatgattgtgtgatggaaatggctaagagaagggaaaagaaagtagagacaggagaatctgacggttttggcaatgattttctaggattacttataaatgcttatcgcgatttcgacgagaaaaatcgattttccatcgaggatctagtggatgagtgcanaacattctact

SEQ ID NO: 236492 - DNA, 421 bp, Gossypium hirsutum
cttacgcttccggttctagatcgcgagccgccgccatttacttgggctggattatcttcacgggctgttgcgagtaccatgaggatgatgagtctgacgaagaatttagccctaaaaaaataggtggaattgctatatcaatggtaatgaaatatgcagacaatattgtgaaggtctattctacttcagtggcaatgcttctcactgccgttgtttcagtgtttctgttcggcttcaatcttacccttgctttcttcctcggtgctactcaggtgaccgagattccgtttaacaattttctttattgctggaacaagtcttaaccaagatcaagatcaaagtacttcacaaagttatatatgcaggcattgcaatgagaggtgatgatgatttggcattatattctcaccaggatgaattt

SEQ ID NO: 236493 - DNA, 228 bp, Gossypium hirsutum
tcgttcacgcgtacgatggtgttgtatgaatgtctggcaaacggggatttacaccgttggttacatgagctcccaacgggggcgcccaacgtggaggattggagcaccgacacttgggatatgcacaacggaatcgggtcccatacatcttcgccggataaaacgaattggctgacccgccaccgcatcgcggttggagttgctcgtggggtggcatacctgcatcac

SEQ ID NO: 236494 - DNA, 441 bp, Gossypium hirsutum
ttatatgagggaaggatataatggatcagaatgtggacccacttatgaagataaagatggtgattggatgttggtcggagatgtaccatgggagatgttcaccaattcttgcaaaaagctgaagatcatgaaaggatcagaagcaagaggcttgggttgtgtttgaaaaaaaatagcccttcagcttagggtatacaaagaagaaattacgatcccatttttttttcttctttgttgattaagcaacaaagaagattaatcttaggatgttgtccaaggcataacccaaaaaatatatattttcatgtatagttttggcatgtttctaatttccttgtggaatttgtacaaaggaaaacatattaagttcataacatgggtttcctttttttctttgtcatgtatattataaatcaaatccttcttttgcctttggtcttt

SEQ ID NO: 236495 - DNA, 375 bp, Gossypium hirsutum
tctactctatcgggtttacagttttattgatcgtgtggcagatctaaaaaaagcacagatgttatccgaccactatcatcaaaaagattgttaatgttttgccttgagaaagtttacgaaaggtcttctagttgtgtagattggctcgtgagagaaatgcttgaaatgagactgagagacaaggtggaccatgatgaagacagagatagtgaaccagaagtagttgatggagtgggtgctgaaacagggcatgtgataagaaccaccattggtggtcgaaatggtcaatcaaaacagaatgttagttatattgctaagcatgcagttggaactggttcttttggtgttgttttccaagcaaaatgtcgtgaaact

SEQ ID NO: 236496 - DNA, 433 bp, Gossypium hirsutum
  unsure (1)..(433): unsure at all n locations
tgaaatcttagttgttgtccaaggcacactttacgtcggttttgttacgtcaaacccagataatcgtctcttcactaaagtgctataccctggagatgtctttgttttcccactaggtctgattcacttccagttcaacatagggcataccaatgcggttgcctttgctgctctcagtagccaaaacccgggggtcgtcaccattgcaaatgcagtgtttggctcagacgcggatatcaatcctgatgttcttgccaaggcctttcaactggacaagaatattgttaaccaacttcaatcccggttttggtcggataacgacaataggaattaatgttgacttctacagccccatcaaacttaactatgtacccaattctctgcaattgctaattntattttacattttaattcaaatttaattactcttttt

SEQ ID NO: 236497 - DNA, 420 bp, Gossypium hirsutum
tttacgcgtgggctcgccaagactgtgaaatagccggttatgacattcccaagggaactagagcctttgtaaacgtttggacaattgggagagaccctagcctttgggacaaccccaatgaattttggcccgacaggttcatgggaaagagtattgatgtgaaaggacatgattttgagttgttgccatttggagccggaagaagaatgtgtcccggatatcccctaggtattaaggtcattcaagcaagtttagctaatgttttacatggatttacttggaagttgcccaataataccactaagaagatctcaatatggaggaaatattcgggctttccacccctaaaaagtacccacttgaggcaattgcagagcctaggctcccacttcacatgtactcttagtgattttagtcact

SEQ ID NO: 236498 - DNA, 326 bp, Gossypium hirsutum
tattacgcgtgcgagttactggagaatacctcacatttcctggtggtggaacccagtttaagcacggtgcgcttcattatatcgacttcatagaagagtctgtgcctgatgtagcttggggaaaacggtctcgcgtagtattggatgttggatgtggggttgccagctttggaggttttctttttgacagaagtgttgttgccatgtcctttgcaccaaaagatgaacatgaagctcaagtacaatttgcacttgaaaggggaattcctgctgtgtctgctgtgatgggtactaagagacttcctaccctggcagagtatttgata

SEQ ID NO: 236499 - DNA, 447 bp, Gossypium hirsutum
ttcacgcgtccgcccacgcgtccgcccacgcggccgcccacgcgtccgggaggagttccgctatgattcttctgtttcagctgaggttgggggtaggcaaacacccagcctccaattccctcgaaccaaggaagttatggttaatggggttcatgtacgggtgaagtattgtgacacgtgcatgctttatcgtcctccccgttgctcccactgttccatttgcaacaattgtgtggagcgttttgatcaccattgtccttgggtgggccaatgtattggattgcgaaattaccggtatttctttatgttcgtttcttcggcaactcttctctgcatctatgtattctccatgtcagcattgtacatcaaggttctgatggatgatcaccaaggaacagtttggaaagcaatgaaggaatctcctccatctgtcatactaatggcata

SEQ ID NO: 236500 - DNA, 434 bp, Gossypium hirsutum
ttgctataataggtgacaaaacatcgttgaagagttccatcttcctcccctactctatttagaagctgtggtgaaagagacgttacgaattcacccaccggctcctttgctaatgccacacatgctgagcgagaccactgtcgtagccggttacactatctcaaaaattctaatattttcttcaacgtgtgggcaatacaaagagatgctgaatttttggaaaaccctcttcaattcgagccggaaaggttcttgaatgtcattgagaaaaggaattataagggaaatagtttcgattttttcccgtttggatcagggaggaggatttgtgttgggatttcaatggcagagaaaattattatgctgatgttggcgacgttgcattgttttgaatggaaattaccgaacaggcgagaacctgatgtgaaagagca

SEQ ID NO: 236501 - DNA, 472 bp, Gossypium hirsutum
ttattacgcgtccgcccacgcgtgcggttgagacgggctacataaatgggctctttgtgctagcacgatccattggtttgattgggcacactttcgatcagaagagactgaagcagccactataccgtcatccatgggaagatgttctttacactaagtgagagaacattacgagcagtaggtgcaaatctcctcgagcattgttgttactggagtccttttgtctgcatttttatggggtatggttgtttggttcttagattattgtttgtaaggcaaggctaaatggtggatcaccatcatttctaagttgtattcaaggtccacataggagaaaaaaaatctcaaaaatgctgcgtgattcgtttttagtttttttaccagtttcacggataaataagacatgtcttgcacattgtattggaatattttatgagaaatttcgaaattaggaatcatctattctcggatt

SEQ ID NO: 236502 - DNA, 394 bp, Gossypium hirsutum
tttcttttacggcgcagagccatgcccccactggaggtatcactataactgacggcggagatccctacaggttttacaggtggaatgtgtacgtacggtgacatttaccctctaggcggtcgacaaacgggtcttctcataaatgggcaattcccaggccctgatattcactctgttaccaacgataacctcatcatcaacgtctataacaactaaacgaatcttttctcctgtcctggaatggagtccaacaaaggaggaactcgtatgaagacggcgtgtttggcacaacctgccctatttcaccaggaaagaacttcacatacatgcttcaggtgaaggatcaaatagggagtttctattactacccatcacttggattccacaaggcagc

SEQ ID NO: 236503 - DNA, 392 bp, Gossypium hirsutum
tcgcttacgcgtccggaaaactatcagtcaggaagacaataattacaccattgtctgtcaggcatcctcacctagcccttctgattcttcaacaatgatacctcaactttctgcagcagcactttcaattgcacaattacaagcacggggatttgaagaacctgccaaacaaaatcaattatacaagaaacattatccgccaatgttgggagatgaagtttggcgtctagacagaattggtaaaaatggaattattcatgtaaggctggcctctgaaggcattaacacagtgcaagacttcttgagaatgtcggtcgtcagtcctggtgagcttagaaggattttaggccctagaatgtcagagagaatgtgggataatgcaatcaaacacg

SEQ ID NO: 236504 - DNA, 320 bp, Gossypium hirsutum
tcgcctacgcgtccgctggaattaaagagagacccgagtgccgactaactgttgtagtgagggaaatgacccctgaagaggaggctgagttagcccgactgagggtaagcaaatttcgcaagcttactaagcgcgaaaaacgacttgtacctcataaacttattgaaacctctcctatttggaaccgcaaaggcagcggcaacggcaggactcaggaaccaaatggtatggttgcatgagatttctcactttcgtaaaactagaaagtgttgaagtgctaaaaagtttgtagtctttaatcattttttcttggtacatta

SEQ ID NO: 236505 - DNA, 378 bp, Gossypium hirsutum
gtagatcttcgtcaagactttgaccggtaagacgattactttagaagtggagagctcggatacgattgataacgtgaaagcgaagattcaggacaaagaaggaattccaccagatcagcaaaggttgatttttgctgggaaacaactggaagacggaaggactttggctgattacaatattcaaaaggagtccactcttcaccttgttcttcgtcttcgtggtgggttctaagccttaaggtctcccttaatgtgggttttctggttttacgtgaaggactgtgccctgtaatggccttttaaataatttctagtctttgtttaccggttgcatctatgtatggtttctctttgaatggaatttgcatatttacctat

SEQ ID NO: 236506 - DNA, 360 bp, Gossypium hirsutum
ggctggaaattttttgggaatcttatggatgctggaaagttgtcaatttgtggggaagaaagttttggtacgggttcagatcacattcgtgagaaggatggcatatgggctgttttagcatggctctcgattattgcatatcgaaacaaagacaagaaaccaggggagaaattggtatctatctctgatgttgtcaaagaacactgggcaacttatggaagaaatttcttttctagatatgattacgaagaatgtgaatctgaaggtgccaataaaatgatcgaataccttagaggtctaatctaaagagtaggcagggaaaagttggaaattatgtccttaatttgctgatgacttttc

SEQ ID NO: 236507 - DNA, 353 bp, Gossypium hirsutum
  unsure (1)..(353): unsure at all n locations
tcggggaccgatgggtccgaaaacgctgtgtaatgcgtgtggtgtgaggtacaaatcgggtcggttggtacccgaataccgacccgcctcgagcccgacgtttgtgtcaacggagcattcgaattcgcataggaaggttttggagattaggaggcaaaaggatatgcaacgagggggacagggtacacggtttcttagtcaaacttcagttttccccatatccaacggtngtgatgttgctgatgattttttgatccatcatcatggtgggccacgattttagttgcatgatttagttagagtatcaaataaaattgggtaaaaaaaaaagaaaaaaagagaagagcttaaca

SEQ ID NO: 236508 - DNA, 386 bp, Gossypium hirsutum
gcgtccacgcgtccgcatttgctcaaaatgcaccgtgcttccctacttctaagcctcctcactcttcttacactgctaacagcagctccgcttccggccattgggtatcgtccattgcctcacttaagacccaacagctccgatttaagattcggtgactccaagaaatacgagggttcctcggagttcgtccacttaagataccacatgggtccagtactcaccggtagcattaccgttcacacaatctggtacggccagtggcagaaatcccaaaagaagataatccgtgagttcatcggttcgttctccgccgtcaatgctaagcatcctccggttgccggatggtgggataccgtacggctttacaccgaccaaacgggagc

SEQ ID NO: 236509 - DNA, 489 bp, Gossypium hirsutum
tcgttcgaaccttcaggccatccatatagagagaatcgaacatgttttgcgcaatttcgggaaaagtacctgaacatccagttgtttcagtcaaatctggaaatgtgtatgaaaagagactcattgaacaatggctcgaatctaatgataatgttgaaccaacaactaaacaacaaatctcaaaagatgatctcgtcgaagtaaaaggatcgaaaaccgtcattcctagaccaactaccgccactagcattccttcaatgcttcaactcttgcaaaatgaatgggatgccgtcatgctcgaatccttctcattaaaacaacaactcgaaaacgttcgtcaagaactcgctcacgctctctatcaacacgacgccgcttgccgagtcattgctcgtctcatcaaggaacgtgacgaagccagagcactctctgccaatatccgagctcaattgcccgccgaacaaacatcgagcgactcgatggaagttg

SEQ ID NO: 236510 - DNA, 265 bp, Gossypium hirsutum
ttttatgcgtacgtggagaatgcaagagagttagcagctaaacttctcaatcaatgcctgttggacaataatgacaatcaatatctttggatgcttgtggaacatgccttggagcttcctctacattggaggatcccaaggtttgaagctggatggttcatagatgtgtatgagaaaaacaaggaaaaaaattccattcttttagagcttgctatattggattacaacatattgcaatctatacaccaggatgatcttagatatg

SEQ ID NO: 236511 - DNA, 419 bp, Gossypium hirsutum
ttcacgcgtccggcggcgactacaacagtatcaaaaccctaagctttcaacaatggcggatgtggaggcagaggtggcggcggccggagtgcctaagaagagaacattcaagaaatttagcttcagaggcgttgatttggatgctcttcttgatatgtccaccgatgagcttgtcaagctcttccccgcgcgtgctcgtagaaggttccaaaggggtctcaagagaaagcccatggcattaattaagaaactccgcaaggcgaaaagggaggccccaccgggtgagaaaccagaaccagtcagaacccacctgcggaatatgatcattgtacccgaaatgattggaagcattatcggtgtgtacaatggcaaggcattcaaccaggttgaaatcaagcctgaaatgatcagccattacc

SEQ ID NO: 236512 - DNA, 490 bp, Gossypium hirsutum
tttttaacgaaggaatcactcctgggcacagcagggtgttcggttcttttgaaagttctgattacagctcagctcaatacaaggaagatatgaagaagttcaggaagatagcactggaaagccaagagcttcctagcagtgaatacagtgtagtcaccagtgattatggtgttaacccatctagctccagcactgaagggcaacaaagcacgcaaattgaaacatcaaaaggggagaaagaaaccaaagatgtaagtggaagctcgtaacaaaatctaccacgaaatttgcttggacaacagtaaaaattctttttccacccagttttatattcaccattgtattgcctcgtttgcaactagagggcatcacttctaaagcaaatttgagatttctgctatccgaaatatggcagcaaacaatggaattgggtggattttgtcaattccatcgatttcaaagtattatttgattggttgagttgtaaaaa

SEQ ID NO: 236513 - DNA, 405 bp, Gossypium hirsutum
tttgttactctactccattggtggatattttcatgcaagcatgcaatgacatggtggactttcacattgccggattttttcaagcccttcattctgaagatagttatctccgaattcaggatgatacactctctcagcaaatgtcaactttggatattgctaccaaggaaaaccttgagaatcttgtgaaagtcggacaagaattgctaaaaaaacctgtttccagagtgaatttggagaatggtcaattcgaaccagctggcacggtaacaaatgaggacgctctcatcagattagcagaagttctttccatggagaagcggcttctagacatgagatcacctcttggaaactttgcgatgaaggagaataaaggatgcgctcagattaataacacaatgacct

SEQ ID NO: 236514 - DNA, 438 bp, Gossypium hirsutum
ttcacgcgtccgaaaattttaaacaaactaaaacaaaatttgcagagaaacacagcagcagccatggcagctcgcaagagagcttcagcggcagatacaaagccaagccctcctcctcaaacccaggaaacaaccacccaaattgacccgcctatcgctccacctaagaaagccttaatcttcaaattctgtcttttcttttcaatcccatacttttaccttctttaccaacactacacgatcgagcaagaactcaggagatccatccttatcaatgcttccctttgtgttaccggcttcttccttactcagagaatgatccctgttgcttctagatatgttttgaaacgcggtttatttggatttgatattaacaagaagggtacccctcaaggcactgttaaagtgcccgaatcattgggaattgttgtaggcatt

SEQ ID NO: 236515 - DNA, 379 bp, Gossypium hirsutum
tttctttcgtccgaattcccatctcaagcactcttcctactttcaactcgccacggtgggatgcaacggaagaccctccaatcgcaccttggtttttagaggatttcaagagagcagcgacaagttccatatcaacaccgataacaggactcacaagggtctttaattcacttcccctctttccggattctttcaattctgaaatgggtacaatattatttgttaatttcgcagatagaagagctaaagcattgcccttttgctgagatatgttggtactttaccgattcatgggagcagtttcgaatcagtggaagagttgatgttattgatggatccaatcctgacaactttaaactccagcaaagggagaaatctt

SEQ ID NO: 236516 - DNA, 457 bp, Gossypium hirsutum
tcgtgtgccatgttattgtatattaatataatcttccaatggttaaccattggccaactactgccagaaaatagttaattgagaagcatttttgtagcctgttgcatcaatccttggaattcagcaagaaaacagtttttgggatttgatgctaatgagctcacttcgaggagtagaggaaaagctactgctgttcaacaaataagaaaggttaagggatacaaggcattagacatgattggtgatggtgctactgatcttgaggttagtaaattcatcttacctttctttagatatagttaatctttaaggttaccatataaagtaatttttccttcaatgcattggcaatcaatatattaacggttaatgaacccgcacaaaagagagaaaatggaggtcatcctgttgcagggttttcatcttctgcatctggtatgcgaggaaataacatgaa

SEQ ID NO: 236517 - DNA, 421 bp, Gossypium hirsutum
  unsure (1)..(421): unsure at all n locations
nttcgtcttttgatttaatatttaatggccaggggcactatttttatttttaaaaaacccattcaattttacatgtttttcatacacgatcttcatcttcttcaccagtatcgtccttaaaactgatccaatccaaatccaaaaacaaaaaaacccaaagtaaagatatggagctacgaacactccagcatcatcttcttcaagggtttatgttattatctttgataagcaattgttacgcgagattcgtggtggaaaagaacagcttgacggtaacatcgccggagaagattaaaggaacccatgatagtgcgattgggaactttgggatacctcaatatggtggaagcatggctggtgttgtggtttaccctaaagaaaaccagaaagcttgtaaaagctttgatgactttgggatttc

SEQ ID NO: 236518 - DNA, 196 bp, Gossypium hirsutum
ctcctcgcgtccgatcatggttgggagcatctgtcctaggccttggtgagtggtttatcaagcggatgccatttgttcgtcatatctacaatgcctccaagcagatcagttccgctatatcaccagatcagaacacacaggcattcaaggaagtagccatcataaggcatcctcgaattggttaatattctagctt

SEQ ID NO: 236519 - DNA, 452 bp, Gossypium hirsutum
gtttgttaggctcaacttcccccacctcaagcgcgagggagctcatatttctggagaatttggtgactacaagcccctccattctgcagttgatgcaaagctccaagccatctgccagagcctacagaaacatgaattcaggaaaggcctgttctgttcacgattcaaagcccaaggttgagtttgattaccctgtgaagcgtgaggagtttgatcagtctccaagatttgctagtcctaaagttgagatgaactccctgtcatcatcatcatcctcatccccatccccggatttatccgatgagtcattggcaggatcttcttcaccagaatctgatatcactttcttcgatttctctgattcaaagtgggatgacaacgaaattttcggtttggaaaagtacccttcagtggaaattgattgggaagccatcagggaactatctgagtct

SEQ ID NO: 236520 - DNA, 362 bp, Gossypium hirsutum
tcttcacgcgtccgcccacgcgtccggtgatgtgggagacaaagtgttacaacaaggcttgaacttggttcaagatatgtcaagcaagacatacaacacgttaagtggctttccggtggtagacagatggagaagctgggagaattttaaaacattaaatagcaaagatgcagtggaggaccctgaaaagattaaattactggtgacagttgaggatacaggtgtgggaattcatttgggtgatcaagatcggattttcactccttttgtgcaagctgacagttcaacttcacgacattatggtgggactggaataggattgagcatcagcatacatctggtggaactcatgcatggggaga

SEQ ID NO: 236521 - DNA, 384 bp, Gossypium hirsutum
gtcatatccaaacaaaaacagaaatgggtttccccgatgcatccgcaatcggcggaggcccggaacccgactctgaatccgccctcctcctccgcacatccctaaaaccagaagacaaattcaatttgggctacatcatctacttcactttgggcgttggctttctcctcccatggaatagcttcatcactgccgtcgattacttttcctacctctacccggaagcttccgtcgaccgtgttttcgccgtcgtttacatggtcgtcggcctcgcttgcctcttggtcattgtattttatgctcacaagagtgaagcttacatgcggatcaatgttggtttgggcattttcgtggtttccctggtcgtcgtgcctgttatggatg

SEQ ID NO: 236522 - DNA, 252 bp, Gossypium hirsutum
gctcactcggctggaaaaacactggctgaaaaccttcttctgtttccatcaatgtagatgacgatgattccacatcagggtcatccccaatagcctgaaactgatacaaagcatgattgccaaactctgaagctgcaaatagaaaaccagttttcaacacacacattgaagacgtaactggaattgtatcaaaatacttaatcttcaattccgaaactccttcattttcaggtaggtgccctagggatgccc

SEQ ID NO: 236523 - DNA, 348 bp, Gossypium hirsutum
cctcgcgtccgcccacgcgtccgcccacgcgtccggttctaaatgtctatttggtcatacaagcattgggtatttaggacatattgtttctcggcaaggagttcaggtggatcccgataaaattaaagccatccaatcgtggcctattccccgcaccgtcaaggctgtccgcggttttctcggcttggtcgggtattactaccgctttatccgtcacttcgcggccattgccggtcccttgactgacctgctgcgaacagatgccttccaatggacttccttagcccacacggtctttgagcatttgaaacagttacttagtgaatcccctattcttgcattacctga

SEQ ID NO: 236524 - DNA, 237 bp, Gossypium hirsutum
tgaaaaagggatttaaagtgctagtactcaatgaagttgacaagctttctagagaagctcagcattctctccgtagaacaatggagaagtacagtgcttcttgccggctaattttgtgctgtaatagttcttcaaaagtcactgaggcgattcgatctcgctgtctgaatatccgaataaatgcaccttcagcagaacagattgttaaggtgttggagttcattggaaagaaagaag

SEQ ID NO: 236525 - DNA, 397 bp, Gossypium hirsutum
ttactttcctggtgttaaggaatacttacaaaatggtgggttcaagaaaaatgtgccttttttgcaggaactagttgtcatggaaggagtagcccattttatcaaccaagaaaaacctcaggagattagcatgcacatttatgacttcattaagaaattctaggttcttgcccttctcttgttttcaactcttcccttgaagcttgtgacccaataataaggccagttttataccattgcaaggccatttgcttggctctatttaatgctttccctgttttatttgaactactggaattaatatttttgcagtgctttgtgtacggttatcagcttatggaactcaatgctgttctgatttatatataagaaatacagacatccaacaacgttcttc

SEQ ID NO: 236526 - DNA, 210 bp, Gossypium hirsutum
ttttatgcgtccggttgaatgtaggatatgccaagatgaggatgtagactcgaatatggagaccccttgtgcttgctgtggcagcttgaagtatgcgcattgcagatgtgtacagagatggtgcaatgagaagggcaacactacctgtgaaatatgccattagcaattcaggccaggttataccgcgccacctccctcgtttcatattgg

SEQ ID NO: 236527 - DNA, 297 bp, Gossypium hirsutum
tgcttccttagtgggtccctagataaatcggccaagctatgggacacaagaacattgactcttatcaagacatacggtactgaacgcccagtcaatgctgttgcaatgtctccccttcttgaccatgtggtgcttggaggtggccaggatgcatcagctgtcacaactaccgatcattgtgctggaaagtttgaagctaaattctatgacaagatacttcaagaggaaattggaggtgtgaaagggcattttgggcctataaaagctttggcttttaacccagatgggaagagtttt

SEQ ID NO: 236528 - DNA, 367 bp, Gossypium hirsutum
taaaaaggatcaagaaaaaccagaaactgtgcaacgtgagcatgatcaacctgttagatgtgttgcttaccaattacaagatgtacaaagtggagcaccagaaccagaacaaatttccgatgatgacaataacaaccagctagctgaggagaacattgaaggagacattacaaaacttaccggtagacagaaaaaattattcgagttgagactaaagatgaacgaagcaagaaaagctaatcaaacggctatggtggctgaaaagaaacgaatggaagctccacctgaatctaaaggaacttaaggaccgggaagaaaaacgcaagtcatttagtaggaggaggaaatttcacgaagagaaggatat

SEQ ID NO: 236529 - DNA, 509 bp, Gossypium hirsutum
  unsure (1)..(509): unsure at all n locations
tttttgacgcgtgggcggacgcgtgggtgcaatctcttctttttggagtttcatcacaccagatattacaatgggttcaatcggtgaaactcaaatgacacccacccaagtctcagatgatgaagccaacttattcgctatgcaacttgccagtgcatcagtcctccccatggtcctcaaatcagccattgaacttgacttgctcgagatcatggctaaagctggtccaggtgctttcttgtccccaaaagaagtggcttccaagctccccaccaccaaccctgatgcacccgtcatgctggaccgtatcttgcgtctcctggctagctacaacgtcctcacttgctccttgcgtaccttccctggtggcaaagtggaaagactctatggccttggccctgtctgcaaattcttgaccaagaacgaagatggtgtcactctttccgcccttagtctcatgaatcaagacanggtccttatggagagctggtactactttgaagatgctg

SEQ ID NO: 236530 - DNA, 342 bp, Gossypium hirsutum
ttgttcacgcgtccgccccatagccaagaccttgcttcttctttctaagcaagcacctttaagccttaaccttcatccccttttatttgttcctttcaagatttttcattaaaaaggctaaagagaaagcatgggaaattctttttttttaggaatattggtaacaatatccctgtgccttcagttgtttggtggaggtgcttatggtcttggtgtgaattggggtaccatggcatcacataaacttccccccaaaacagtggttcatatgttaaaagacaatggaataaagaaagtgaagctttttgatgcagattcaactactatgaatgctcttgcatg

SEQ ID NO: 236531 - DNA, 355 bp, Gossypium hirsutum
tcgtgaaagaccgcatccaaatgaatgctcgggtggtgatcttgatggggaccagtttttcataagctgggacaaagatctcatcccatgtcaaactgagccgccaatggactacactggacgaagacctcggataatggatcatgaggtgaccttggaggaaattcagaagtttttcgttgactacatgatcaacgatactttgggtgccatttctactgcacatctagtgcatgctgatcgggaaccatacaaagcgcgcagcgaaaactgaatagcattggctacctcttcactctatggctgcagattttgccaagacaggaacgccggctgagatgccttgtgctctgaa

SEQ ID NO: 236532 - DNA, 269 bp, Gossypium hirsutum
ttgcttaagctctacgttttttgcactctcgttgttcgccgagtgtactcgtcggagacatgtcgccggagagaattataatcgatgcaaaagatgaacctcggttacagttcatctttcctttcgttgacaacaagcacttccttccttcctcctatgttgcaccagaagctagagagaacaaaataatgaatgataagagtgacatatatggaatgggtctgattttaatagaattattaacgggaaaaactccggccgatgctgat

SEQ ID NO: 236533 - DNA, 375 bp, Gossypium hirsutum
ctcactcgtccgccaagctgtagccatggtggaaagggaccaagtaaggcctctagcgccggctgctgacgctccaaccagtgatgacggagaggctgctttgcaactcaaaaaagtcagacgcaagaaactcatccgatgttgcgcttgcatcgctgctttgttcatcatcttagccgtggtcattatagtgttaattttcacagtgtttcgagtcaaggatccgatcatcaaattgaatgccgtctcacttacaaatctggacctaatcaatgctttcatccctacaactggggccaacatatcattaatagccaacgtctgcgtgaaaaatcctaacatagcgtctttcaagtataggaacaccaccactac

SEQ ID NO: 236534 - DNA, 357 bp, Gossypium hirsutum
gtcgttctttaacctttcataccgcaaacaatggttctccaaaacgacatcgatttgttgaaccctccggccgagctcgagaagaagaagcacaagctcaagcgtcttgttcaatctcccaattccttcttcatggatgtcaaatgtcaaggctgcttcaacataacaaccgtatttagccactctcaaactgtggtggtgtgtggaaactgccagacggttctgtgccagccgaccggtggtagagctagactcaccgagggctgctctttcaggaaaaagggtgactaaatccgatccagcggcaacgattcgaggaagaggttttttttgtatgatcccactctggttatcttt

SEQ ID NO: 236535 - DNA, 347 bp, Gossypium hirsutum
ctttatatcgctcggactgaaagggatgctatgaacacacataggacagtgatgaacaccacaaactagaaacttcacctgtggtgattgaaaaggcggattattgataccgtgcatctttttcatcttgccaggcacgtttttaaaatatatattttaaagggcttttttgaggcaggatcttacgccaagacatttgcagttttgtccggcgttcacagtttggttgtttgctttttgaagaggcttcggggaaaagatgatgttattaatgccggtgtagccggatgctgcactggacttgctctaagtttcccaggtgcacctcaggcacttctacagagctg

SEQ ID NO: 236536 - DNA, 417 bp, Gossypium hirsutum
agtagtgcaactgcaacgcctaattctagcagtacaaccatgactccacctccatcgaccactccaagccggtatgagaaccagaagcgtagggattggaacactttttgccaatacctgcgaaaccataggcctccactctcactttcaatgtgtagtggtgtccatgtccttgagttccttaggtacctggatcaatttgggaagaccaaagttcacaaccagacttgccctttctatggtctccctaaccctcctgctccttgtccttgtcctcttagacaagcttggggtagcctggatgcactcattggccgactcagggctgcctatgaggagcatgggggtaggtctgaagggaaccctttttgagctagagctgtgaggatttacttgagggaagtcagggatttccag

SEQ ID NO: 236537 - DNA, 154 bp, Gossypium hirsutum
tccatgcgtccgatctgattttggattggcaaagcttgatgatgacaagaaaacgcacatcaccactcgcgctgctggaacaattggctacctggcaccagagtatgcgatgcgtgggcatcttacagagaaagtagatgtttttggctttggt

SEQ ID NO: 236538 - DNA, 119 bp, Gossypium hirsutum
gcgtattgatgttgatggagggccagcagcaaaggcattgaagccgaaattcaatgtcttctcaaagactgtgacatctcacacaggggtgcaagtgccggaattcgatattaagtatt

SEQ ID NO: 236539 - DNA, 268 bp, Gossypium hirsutum
tcgatcggaatattatactcaatgattggtaccataaaagcacttatgaacaagctgctggcttgtctgctattcccttccaatgggttggagagcctcagtcactcttgatccatggaagaggaaagttcaactgctctactttaactactccaagtttagacgctggtatttgcaatgctacaaatccagattgtgagcctttcagattaatcgcagtccctggaaaaacttatcgattgagaatctctagtttaactgctctatc

SEQ ID NO: 236540 - DNA, 342 bp, Gossypium hirsutum
gtttattaatgatttttactcaagccattatgcttcctgcttggaatatcttggaaacctcaaatcaaacctgatgcttgacattcatttatatgaccatgttgagaccctgtatgatcaaatccgcaacaaagccctcatccagtatacccttccatttgtgtcggttgatatgcgaatgatggctgatgcctttaaaacaagtgttgtggggctagagaaagaactagaagccttgattactgacaaccagatacaggctcggatcgactggcacaacaaaattctttatgcacggcatgcagatcaaagaaacgcaactttccaacgggttttgcagac

SEQ ID NO: 236541 - DNA, 355 bp, Gossypium hirsutum
ttgtttatctccagatagcaaactcaacctcgatgatattcttcaagttcgtgaagaatcagacatatatgtgttaggttttcaggaaatcgttccgttgaatgctggaaatgtgcttgtgatcgaagacaacgagcctgcggtgaaatggctcaccttaataaaccggtcactaaacaaggcgaattatgttcctttaagaggacccagatccgttggttcacccgagggttcactggttttccctaaaattaaacttagaaaggccagcaaagctttgaggacagagaataaatggaagctgaagagctgcaactgtcctataggtttggaaaggaagaatagcaaagaattc

SEQ ID NO: 236542 - DNA, 132 bp, Gossypium hirsutum
gttaattcttatgtcatgcacgaagtcactcgagtttttcttggggcttcctctatattttctaatgggactgtatattcgatggttggaactgcatctgttgctatggttgctcatgcattccgtgttcca

SEQ ID NO: 236543 - DNA, 340 bp, Gossypium hirsutum
tgtctcacgcgtacggatccctccaatatttggcatggatgaatttgggtggtgttatgagtggaattctgcaatgacaaagttaacctgttggaaccgagatgaagtggaggataaaatgctgttggagcgaggagcctgcggcgaaatgggtcaccttaataaaccggtcactaaacaaggcgaattatgttactttaagaggacccagatccgttggttcacccgagggttcactggttttccctaaaattaaacttagaaaggccagcaaagctttgaggacagagaataaatggaagctgaagagctgcaactgttctataggtttggaaaggaa

SEQ ID NO: 236544 - DNA, 312 bp, Gossypium hirsutum
ctgcatagatttgtttttgtagctcaactccccaccaagttcccaaatggcaccccaagctgaagtgcaacaacaagaaatcatttaccgatcaaagcttcccgatatctatatccctaagcaccttcctttacattcatattgtttccagaatctgtccaacgttgcctccaagccctgtttgatcaatggaaccacgggcaaagtctacacttacgaagaagttgaactcactgctcgccgagtcgcttcggggcttaacaagctcggcatccaacaacgccaagtgatcatgcttttgttacccaacac

SEQ ID NO: 236545 - DNA, 154 bp, Gossypium hirsutum
gttagttgaggaaaatcatgggtgccaaagttctcttcttctttgctttgctttccttttcagctgtgtcggcatttgcacaggatgaggaagaccaaggtcttgttatgaacttctacaaggattcttgtcctcaggctgaagacattctcaa

SEQ ID NO: 236546 - DNA, 208 bp, Gossypium hirsutum
aataataccttttttttcagtctgctctccctaaaaagcttccattttttttcctttttaaaattcctctatttctctgtttcttcacaacaacaacaaaaaagtttcaatccaatctcaagtattcatgtgggaggacaagggtcggccattgccgaaatttggtgaatgggatgtcaatgatcctgcatcggctgaagggtttacc

SEQ ID NO: 236547 - DNA, 328 bp, Gossypium hirsutum
tctgtttcgctggtaccgggagcatgtagtgtggactgataaggaattgaagttgaaacttttgaggaggggcatcttaactcggatttatgctcccatggttataattcaaggacttagggattcagggcttttcggttccgtaatacaatcggcacaaacgactctctcaaaggaaatcaagagtagcaacacttctagagtagataaacctggaatgatttcatccagaaagattggtgtcaaagaaacaacagcaactgcccgaaggatcttggaaatacccaacgaaacttcttacgagtcagccatcccaccactttctcct

SEQ ID NO: 236548 - DNA, 410 bp, Gossypium hirsutum
tggtatcgtaacattcttcagcatgatcttcgagtttcgagtgattacgttagcaagcttgttgggcataaatccgaggtttgtggattgaaatggtcacatgatgaccgtgaacttgcttctggtgggaatgataatcagcttttggtttggaaccagcattcacagcaaccaattcttaaattgactgaacatacagccgctgtgaaagccattgcttggtcaccccatcaaagcaaccttcttgcatcgggtggtggaactgcggaccgatgtattcggttttggaacactactaatggtcaccaattgaacaacatagacacagggagccaagtatgcaatctatcatggagtaagaatgtgaatgaaatagttagcactcatggatactctcaaaatcaaattat

SEQ ID NO: 236549 - DNA, 137 bp, Gossypium hirsutum
tgctacgcgtccggaacgataaccgagcttccattaatctgtttaccgataaatgtggttactccaggttccgtacgccggccattttggttaacccggtgttcgttcatcgactcactgtttcaaaccaagttacc

SEQ ID NO: 236550 - DNA, 181 bp, Gossypium hirsutum
tggtagctcacggggagttcatggtgggtctcaaggtccacacaataaggagcatatcactctcatagctgttgactcagctcaaggatttaaaagccgaactttctctccttcgtgttgccaaggtcactggtggtgcccccaatatgctctccaagaataaggtggtgaggctattcat

SEQ ID NO: 236551 - DNA, 378 bp, Gossypium hirsutum
cttactcgtccgcccacgcgtccgcccacgcgttcgcccacgcgtccgtgacccgtcttgcgagagagttttttgctttgcctgctgaagagaagcttcggttcgatatgtctggtggcaagaaaggtggtttcatcgtctccagccaccttcagggagaagcagtgcaagattggcgagagattgtgacatacttttcatacccattgaggagcatggactattcaaggtggcctgataagccagagggttgggttgaagttacaaaggagtacagcgagaagttgatgggcctagcttgcaagcttcttgaggtgttgtcagaggccatgggtttagagaaggaggccttgactaaggcatgtgtggacatggatc

SEQ ID NO: 236552 - DNA, 359 bp, Gossypium hirsutum
cttactttgactgcaaataatattgctcagatatgttacttggatgcacttcggttcggccttaagcggatattttttgccgggtttttcattcggggccatgcctatactatggacactctttccgtcgctgttaatttctggtccaaaggtgaggctgaagcaatgttgctacggcatgaaggttttcttggggcactaggtgcattcatgagctatgagaagcagggtcttgacggcttgactgtgaataaagtaccgcagaggatccccatcagtgtatgctctgccggcaataagatttattgctcaatgaacggtaaatcaaatggcaacgaaagtattgagtgtactgtata

SEQ ID NO: 236553 - DNA, 251 bp, Gossypium hirsutum
cctactcttacgggaaagaagaagatgttcgattgggagcgaacaagatctcagagaggcagcctattgggacagcagcccagtcccacgatgataaggattacactgagccacccccagcacccttgcttgagcccagtgagtagacttcatggacgatgtaccgagctggaatcgctgagttcgttgctactttcctattcttgtacatatcggtgttgactgggatgggagtccttaaggacaaaacc

SEQ ID NO: 236554 - DNA, 333 bp, Gossypium hirsutum
tttcctacgcgtccgtggtactctatatcgacaggttgtaggcagcttgcaatacttatgtttaactcgtcctgatttatcttttgcggttaataaagtgagtcaatatatgcatcaacctcatgatgttcattggacagctgtgaaatgtatcttgagatatgttaagggtacgattgatcataggttgttatttcaagcctctggtctgagcttaactggctttagtgatgctgattgggcaagctcacttgaagatcgtaagtctacttccggattttgtatatacttaggggataatcttgtaggatggatgtcaaagaaacagagtgt

SEQ ID NO: 236555 - DNA, 405 bp, Gossypium hirsutum
cctactcgtccgcccacgcgtccggtggacactccaagacttggccgcagggaagctgatatcaagaacaggtttactttgccaccatttctgactttgaaaaactttgagggtttaaaccttggcaaaatggataagaccgatgactctggactagcttcttatgttgctggccaaattgataggtcactgagctggaaagatgtaaagtggctccagacgataacatcgttgcctattctagttaagggtgttcttactgctgaggatgcaaggctagccatacaagctggagcagcaggaatcattgtatccaatcatggcgctcgccagcttgattatgtgcctgcaactattatggctttggaagaggttgttaaagctgcacaaggcagagttcctgtt

SEQ ID NO: 236556 - DNA, 322 bp, Gossypium hirsutum
gttcttacctttggagcagtagacgccgaggaatccactttggaccttgatattggtcttgccaagacgttgcaggcttgtttttaagtcactataccactcgggtggagccacagtaccccgtcaagccacgaggatatctggcctacctattctcgtggtttcagcatgaccactaacggcaacgtaccccatccagctcgaatccttgctccaagcacaatgtgacttctctaaccattccggaacatcgacatgggacatggcataaatgtacttgggaaccttgtaaccatgtttagtaagtcctaggtcttcaaac

SEQ ID NO: 236557 - DNA, 259 bp, Gossypium hirsutum
catggttatgggacaaacaccggaactttgagcacagctctgttcaccaatgggctcagctgtgggcctagctatgagattaagtgtgcgaatgatggcacgaggtgcctgcctggttccattgcgggcactgtcaccaatacttgccctacgaacaatgctcttacaaacaatgctggtggcaggtgcaacccttccctgcaccactttgaccttcatcaggctgtctttcaacacattgctcagcacaaagctggaa

SEQ ID NO: 236558 - DNA, 274 bp, Gossypium hirsutum
tgataaagctgggtttatatccggaggatcatgaatggcgaggaggctacagtctggaaagcgatgactaaaacccctgcctccattgtgctaataatctacaaaccagtctacatacgagaattttaggtaccggtatgatcgtcatgagaatccatacaacaaaggggtcatcaggaacttcttggaggtattctgcaccagtgttcctccatccaagataaacctcagggaaaaggttccaaaggaaccagtcattgcaccgagaacagtg

SEQ ID NO: 236559 - DNA, 365 bp, Gossypium hirsutum
ttctctacgcgtccgcccacgcgtccggttaggatctggttcttggctatcatcttcttcctagcaggggtaccaggagcctatgtattgtggtatcgtccactgtatcgtgcttttaggaatgagagtgctttgaggtttggatggttcttcctgttttatttgcttcacattgccttttgcatctttgctgcggtggcaccccctatagtttttagagggaaatcactcaccgggatcctacctgcagttgatcttgttggtggcaatgctttggttgggatcttctacttcattggtttcggactattctgtcttgaatcagttgtaagcatctgggttatccagcaagtatacatgtattt

SEQ ID NO: 236560 - DNA, 327 bp, Gossypium hirsutum
cctactcgtccggtgatcttcctggatggattttcaagtcgggtctgaatgaagtctctctttcagagaataagcttggtgtaaatttgagcaatcccatttcagcttcaccaagaaccccacttcaaaagattcaagtcttggatttatctcacaattcgttttctggggaattaacatacgatattggggttttaagcagcttgcagttcttgaacctgtctagaaactctctcattgggcctgttccaggaactgttggagaattgaaggctttggatgttcttgatttgagtcataatcagcttaatggaagcattcctatgg

SEQ ID NO: 236561 - DNA, 322 bp, Gossypium hirsutum
  unsure (1)..(322): unsure at all n locations
agctgncgagcctgggatgagaccaataacacccagcccgaaaagctcatttggaatcttatgggaatgatgaacaactgctggttccgtgtaaaaacaaacgtgtgcaggccacacaaaggtgaaatcgggattgttttcgagcacccgacactgccgggcaaccaatccggtggatggatggctaaggaacgacaccccgaaaacccaaccataaagaagagtgtctcttctcctttcatgaacactgcctccaaaacattttcaatgtccgaggtcaataaacacaactctgctgattcggcttggatcgttgtccatg

SEQ ID NO: 236562 - DNA, 170 bp, Gossypium hirsutum
ctcacgcgtccgaaagtcgtaaccgtcgttgaggaagaagctgacttttcaagcactcgatacgacttcgtcaaatgctttgaagaatgcctgagattttacacagtctactttgaaatgcttgaagaaagcttcaccccaaccagcaatgagaagcttatgctgtagag

SEQ ID NO: 236563 - DNA, 424 bp, Gossypium hirsutum
tgatatttctttattgggacggtgttcgacctgaacttgtgatttcagaacctgaactaattaaagaggttttgaaaaatagtgaaaagacttttcccaaaaggaagcctaccattttcattaacaagctactaggggacgggcttgtgaccgtggaaggtgaaaaatgggtgaagtagcggaagttggcgaataacgtttttcatggggaaagcttaaaggacatgagaccagcaataattgctagcgttgaaacaatgctaaagaaatggaaaggccaagtaggcaaagagatcgaagtgttccatgaattttaattattgacttccgaagtgatctcgaggacagcttttggtagcagttacttggaaggggagaagatttttgaaatgttgaacaagttgtcaatagttctgagccgaaa

SEQ ID NO: 236564 - DNA, 405 bp, Gossypium hirsutum
ttttaatgaagctattattgaagaacgagagcaggggatcaaagaagttcagcaacagatcagtgaggtgaatgagattttcaaagatctagcagatttggtacatgtgcaaggaggcatgattgatgacattggttcgaatattgaaaattcccattccggaactgtgcaagctatttcacatcttaaaagggcatccaagatccagagagcaaattcatcaacaaggtgtttgctggtgttaatctttgggatcattctccttattttcatcatagttgttgtggcttaagcctacagatttggcatctcgagcttaaaagttctccgaagcagtgagtcaggtggtatgccatccaaagcatacagtaatatgtataatctgtaatactaattttttatgct

SEQ ID NO: 236565 - DNA, 334 bp, Gossypium hirsutum
tgtccacgcgtacgcccacgcgtccgcaacgggggctccgtactcaacgatccggaggaacagcgccgccgcatggtcgagcagctcgagcaggcgcatgcccgcggcgagaaggaaaagcagctcgacgaggaattcctcgacgccatggaccagggcatgccgcccgcaggcggccttggcatcggcgtcgaccggctgatcatgctgctcaccaacgccccgtcgatccgcgacgtcatcctcttcccggcccggcgcaacaaggactgaggcccggagacggaaaaggcagccggaaggctgccgtgtctgtcgaaaacctcttacttgg

SEQ ID NO: 236566 - DNA, 231 bp, Gossypium hirsutum
tgagcctcttgatggcaactggcctacaattcttaagaacacatttgtagaccgtgcttgatgcaccactaccaattatatacttctcactcagattctcagtcaccctcataatgtcctcgtatacatgaagtgccatattcatgtgaaggatcaccaatttcggtcttgagtaagtaactgccgtcaagaagtccatgaatcaataacaagggccataaatttcaatag

SEQ ID NO: 236567 - DNA, 321 bp, Gossypium hirsutum
ttctattccattcccaaccgatttctactgagaaagaaaacggagacctgctttcaaaatcattccaagatataatatcgactctccccaaaggaaatccctggggctttcccgaccattttttacagtaccacgggttttggcacagctcggttttcctacaaggaatcttgtcagctcaacaacagatccaggctcaacctgctgatatcatcctttgtagcgcccccaaaaccggcacaacctggttgaagtccctcacttatgccaccatcacaagaacttcattcgatgattctaccagccctttgctttccaaga

SEQ ID NO: 236568 - DNA, 449 bp, Gossypium hirsutum
tctcacgcgtccgacaccaaagggttctttttccccgagagaaagacgaaagatgtcggattggggaccggttttcgtggcggtggtgctgttcatactgctaacaccggggcttcttattcaggtaccagggaagtcaagggcgattgagtttgggaattttcaaaccagtggagtatccatactggtgcattccattatttactttgcactcatttgtatcctcctcttagctattggtatccacatgtatgttggctcatagctcactatcctcatctgtcttcacgcctcgtataagatgagtttctaactatctgggttgttggtatgtaatctgacaatttaaatctgttttttttttaaccaaatggttgtttttgcttggaatatgattttgggcttcaattaatcttgcaaatttgacaaataaatgtttatttttttct

SEQ ID NO: 236569 - DNA, 354 bp, Gossypium hirsutum
tccaaagctcggtcgcagatattttggtccatatcaggtcctcaaacgtgttggtccagtcgcatatgagctcgatctgccttctacggctcgtatccatcccgtctttcatgtgtctatgctcaagaaatgcctcggacaccctgaccagcaagtcactcctttggatttggtcgattccaccagctctattgacttgtaccccattgcaatcttagatcgtaggcaagtacaacgagggtctgccaccgtaagacagtgcttaatccaatggaatggcctgaccattgacgatgctacttgggaagataacgagaaactgcaccagctttaccttgctttccaccttgagga

SEQ ID NO: 236570 - DNA, 446 bp, Gossypium hirsutum
tctgaaaaaaccagagtcctcattaacgcatgggccctcggaagagaccctaattactggaacgaacccgacaaatttaaccctgaaaggttcctcaatggttcagtcgattacacgggaacaaattacgaattcatcccatttggggctggaagaaggatgtgcccagggatcacctttgccacacccaacctcgagctgcctttggcccatctgttgttccattttgactggaagctacctaatggaatgaaaggggaagatcttgatatgagtgaggtgtttggcatgactgtcaagaggaaaactgaacttgttcttattccaactccatatcatggatctaaaattgttcattagaaccacaaagacatttggttggtttcctttcagtatcatatgtcctagttgccatgttgtaacttatacccctaaaacataatact

SEQ ID NO: 236571 - DNA, 383 bp, Gossypium hirsutum
cacctttatttaagtaaacccaaaatcttgattccgaatgagattaacgataaaagggagttgataaatcagcatcagaaacaagagtatatagatacagctatgcagcaagatagaggaggaagagggagtgagcaaggcatgaagcagaaccagcagcaagatcaaaggttgaagccgttgacgggcgagaatcagcagcagcatcctcctcaaaagtgtcctcgttgagagtatgttaatacaaagtttcgttactacaacaattacaggctctcgcaacctcgttatttctgcaagacttgtagaaggtattggactcaaggtggaaccctaaggaacgtgcccttgggcggtggttgcaggaaagggaagcgcacaaa

SEQ ID NO: 236572 - DNA, 383 bp, Gossypium hirsutum
cccactttttcgcccacgcgtccgattcaaagttagctttttgcaaccattgtctcaccttgtatcgaacaatgtccctccctgtaacacaagggaaaaccctccctgatgcctgggactacaggggcaagccgaccgagcggtccaagtccggtggctggaccagtgcagctatgattctaggtggcgaggcatgtgagaggctaacaacgttaggtatagctgttaatttggtgacgtatttaactgagactatgcatttagggaatgctaccgcagccaacacagtgaccaacttcctcggcacctctttcatgttgtgtctactcggtggcttcatcgcggatacttttcttggcagatatctcaccatcgcaatcttc

SEQ ID NO: 236573 - DNA, 453 bp, Gossypium hirsutum
  unsure (1)..(453): unsure at all n locations
gaaatcgggtcggatcccaaagatgggtgtaacaccaaaaatcgctccatccatgctttcatcggattttgctaacttagcatcagaggcaaagcgcatgcttgacttcggagctgattggcttcatatggatatcatggatgggcacttcgttccgaacctaaccattggtgctccagtcattgaaagtttaagaaagcacacaaaggcatatttggattgccaccttatggtcactaatccgattgattacgttgaacctttgggtaaagctggtgcatccggtttcacttttcatgttgaggtatcgaaagaaaactggcaagaacttatccaaaaaattaagttgaaaggcatgaggcctggtgtggcgttaaagcctggaacaccgattgggaggtttatcctctgatcaacagcgaanatcccgtggaaatggttcttgtgatgact

SEQ ID NO: 236574 - DNA, 279 bp, Gossypium hirsutum
tttattcccacgttactgctgagttctacaatgacgatggtgccatggttgcagttggtgcgcacactagcctcatctccacccaacatgatgagactgtttcctacgatgacatcgctgctgacctcacggagcatgtcatcaatcctgtcatccctgagaagtgcctcgacgagaagacaatctaacaccttaacccatctggtcgctttggaatcgggggacctcacggtgatgcaggtctgaccggacgtgagatcattattgacactcatggtg

SEQ ID NO: 236575 - DNA, 387 bp, Gossypium hirsutum
gtttattactttgtccaaaagtcatgtcggacgatttgctattagacccagacatccgagtctgggtatttttgcccattgttattattacattttttgtcggcatccttcgtcattatgtatccatcttgctttcttcgacaaaaaaagtggaacttcagcaagttattgacagtcaagcaatgattcgaagtcgactgcttagggagaatggcaaatacattcccaaacagtctttcctcatgcggcgccattactttaataatgaagaatctggttatttcaaaattagtcaaaaacgaaatacaaccgctccaaatccaatgactgatccctccatgatgactgacatgttaaaaggaaacctcacaaatgtattacctatga

SEQ ID NO: 236576 - DNA, 237 bp, Gossypium hirsutum
ttactcgtccggaacaaggagctctaattgatgacatcggaacacatatcgaaaattcacaggctgctactgtacaagcaaaatcccatcttgtaaaagctgcaaagatccagagatcaagttcttctctggcctgcttgctcctggtgatattcggaatcgtgcttctcatcgtgatcgtagtacttgcagcctgatcaagaagagtaagttcaaagatcttgtcatttctagtct

SEQ ID NO: 236577 - DNA, 487 bp, Gossypium hirsutum
tttttctaatttgcattaaaaaattttgaaaggtgttggcaccactccccattggattcgctgtgttcatggttcaccttgccacaattccagtcactggcactggtatcaaccctgctaggagttttggagctgctgtcatttacaacaaagagaaggcctgggatgaccaagtaaataataatttcccatcctatataaatatacaattttccatttgatgttataaattgttgctcataatgtatatatatttcatgtggtgttgttatacagtggatcttctgggtcggacccttcattggagctgccgcagctgcattctaccaccaatacattctcagagccgcagccatcaaggctcttggatctttcaggagcaatgcttaagtccagctttcattttcttacgaacttcaaccaaaaaagaaatggagaaccttgagttcagtgtggaccattgaaatgtaaataaatatttatgaac

SEQ ID NO: 236578 - DNA, 418 bp, Gossypium hirsutum
ttcagtcttacagaaagccaaagctgataaagatgcaatttttaaatgtgaactcgaaccaggcaccggggagaccaaaatctgtgccacctctttggaatccatgcttgaatgtgtgagaaatgctgtggggcccgatgttgattttgagttaataagcactagccaccctacgatgactacaccaatattgcagagttacacaattacagaaccttcttgagagatcaaatctacaaagaaagtggcatgtcattctctcccatacctttacacgatctacatgtgccattatgatacctatgagaccaatatttttaaagttgcactcgttggtgacaatggcgataaagtggatgctttcattgtttgccatatagatacctcagcttggagccctaaacatgttgcgtttagc

SEQ ID NO: 236579 - DNA, 256 bp, Gossypium hirsutum
gttgcggacagaataccacagaacatatgtgtggcccatagcacacagtactgacaaatcaagaaaagaaggaattgctggacaaatatagggtaataggaaacacagctacctcggattctggttagtgatccagttgcctaatattacggtgtgaagcggagacacgtggtgaagcttactcgacatagtgtgactgctgacacgtatgagacataccgatatgctggatgagctctttctttctttttagggg

SEQ ID NO: 236580 - DNA, 394 bp, Gossypium hirsutum
cggttttccaagcaaaaatcatgccttactctgatgatcgcagcttggttacctgtgctgctgatggccaggttcgacatgctcaaattttggaacgtggtgttgaaactaaactgctagccaaacatcagggacgagctcataaagtggtcattgaaccagggagcccttatatattttacacttgtggtgaagatggattagtgcagcatattgatcttagaactgcagcatctaccgaacttttcacttgccgcccagtcgatgatagcagggcttacatgccatttatccatctcaatgctatcgctattgatccaaggaacccaaatctctttgcagttgcaggatcggatgaatatactcgcctttatgatattcgcaagtataaatg

SEQ ID NO: 236581 - DNA, 403 bp, Gossypium hirsutum
gtttttgacagaatttatcttcttgaatgggcatggaacctgtatgaaaatgatcaaagcttgaacctggtcgatccgactttagccgaattcaacaaaaccgaagctttgcgagtgctcggggtggcactgttatgcactcaggcttcaccgtcaatgcggccactgatgtcccgagtcgtcgcaatgcttgccggtgacatcgaagtgagcaccgttacatcgaagccaagatatttgactgactatgatgttaaggatataacaggcactttcatgagtgaagaaacacaaacattcatggcatccagcagcaacgagaacacaatgaagagtaacaacaacgccgctacggtgacagatccgagtccctcccccgtaaatgtttctgggttcagtgaca

SEQ ID NO: 236582 - DNA, 414 bp, Gossypium hirsutum
ctttttcgtccggttctctcgatctaaagaagggattgctgtgtttgagatggagtacaaacattggatgcaagtacaaaacagacaattaggtgaactgagaactgctttgaatgcccagataagtgatattgagcttcggatagttgtagaaaatggcatgagccactattttgaacttttccgcatgaaatcaaccgttgccaaggctgatgttttctatgtgatgtctggtacgtggaaaacatcagcagagagatttttctcatggattggtggatttcggccttcagaacttcttaaggtgctcttggctcagctagaccccttgacagaccagcaaatttttgaagtttgtaacctgaaacaatcatgtcagcaagctgaagatgccctttcgcaaggcatggagaa

SEQ ID NO: 236583 - DNA, 409 bp, Gossypium hirsutum
gttctataaggaaaacatgccttgccatgggagctcagatataacgttgctgtcgggattgctgaaggcctagattacctacataatgagctttctcgacctgttattcatagggatatcaagtcttcaaatattcttctttcagatgggttcgaaccaaagttatctgactttgggttagcaatatggggaccaactgattcgtcatttctgattcaagctgatgttgttggaacatttgggtatttagctcctgaatattttatgtatggtaaacttagcgacaagattgacgtctacgctttcggtgttgttctactcgagttgctatcaggaaaaagaccgataagctttgagaatctaaaaggccagcaaagcttggtcatgtgggcaaagcctataatagaga

SEQ ID NO: 236584 - DNA, 309 bp, Gossypium hirsutum
taaaaatgtccggcgaggggagtataatttgtacgcatgggtccatggtttcattggagactacaaatcggatctcagcatcaccattcaacctggaaacatggccaactcgggtaccctcatatatgatccttcaagatacggccctacattgtgggctatcgggattcctgaccggacggttgctgagttcttcataccggagcccgacccaacatttgttaacccattgtgcctcgatgccgccgacagattcagacagtacggattgggggatcgctactcagatatttatggtcatggtgatgt

SEQ ID NO: 236585 - DNA, 451 bp, Gossypium hirsutum
gttatctttcagagtgatcgaaggagatctaatggaagagtataagagctttgtaatcacgattcaagtttcgcccaagagcgagggtagtggcagcgtagtgcactggactttggaatacgagaagctgcacggtgggattgagcatcctgagactctgctgcaattcgttcaagatgtctctaaagacattgacggccacctcacccaagcaagttaagcagtatcacatgatgctattgttgccgctacttgaagcactattcatctatttaatgaataaagtgacaacttcctttctcatgtattttgatctgaatatgtacgtttagatcaatatgcagtcacggggaggagctttgtattttcttgcatgtttgtctttttaattctgtatgaattcaatgtgtcctatgcttttatttgtgttctaataaatatttgtaagtat

SEQ ID NO: 236586 - DNA, 445 bp, Gossypium hirsutum
gtttttgcttgcatgtgcttctgtggacattttgtaaaaagagaatttgagaccttatatattcacagattctctgctgaaaccatgccaatcatgaacttatggaaaaactgcgcttattattggtcttttgcttttgttattgggtacattgtcaatcgtcctgattttgtgtttccaaggatgagctatgttatcaccggattaattgtgttccttatcagtgaactattgaatggcctcagtcacattcaactcagaaatctcagaagacccggaactagggacagaggcataccaacaggcctcctcttcgaatacgtttcctgcccaaactatacctgtgaaattactgcttgggttggattttccattttgacctgctcccttgccagtgctctgtttacattggttgggtttggacagatgcttgcttgggctcaga

SEQ ID NO: 236587 - DNA, 490 bp, Gossypium hirsutum
  unsure (1)..(490): unsure at all n locations
cccacgcgtccggccacatgaatatgcacctgtggtgaatgccctaagaaaaaggcctcaagcttggcttgatttcatgatgaagtttgagctggggctagagaagccagatccacgaagagcattacaaagcgcattcaacattgccgtttcttacatattgggtggattggtgccactccttccttacatgttcattccaagagcccaggatgcggtggctgcatcagtggtcatcaccattgctgcactcctcatcttcggctacgccaaaggttacttcaccggcaacaaaccggtaaaaagcgcattccaaactgctctcattggtgccattgcatctgctgctgcttttggcatagctaaggttatccatcctaggaagttttatgctttgtttttaagaactgaaaatatgggtttcctttaatattnttcatgttggtatttagattaaaatctcaaatcttcatgtaattctctcctttta

SEQ ID NO: 236588 - DNA, 485 bp, Gossypium hirsutum
ctttttcgttcgatcgaatgctggggcgaacaaggcagcatcgagtagcactactttgaatacaaggaaacttgatgaggaaactgaaaatcttgctcatgaaagagtgccaactgaactgaagaaagccatcatgcatgctcgaatggagaagaaactcacccagtctcaacttgctcagatgatcaatgaaaagccccagattatacaagagtacgaatccggaaaagctattcctaaccaacagattataggtaaactcgagagggcactcggtgcaaagctgcgagggaagaagtgaggagggtcttatcgttaatcaaacagaagttgaatatggggtccagttcttgagtcctaaaaaatggtgatgtaaataaatgcactctacagttactatggctcgcatgtaataacagcgtcttcgatgttatctgaagactatgactatgactgatgaaatgaagtgtgttcttgactgttgc

SEQ ID NO: 236589 - DNA, 453 bp, Gossypium hirsutum
tttatcgcgtccggatattcggagaagacaaccagcactcagaccatcatctccggagttgcgccagtgaagatgacctttgagggaccagagatgagcactactgaatcaggacatggatgcaagtgtggatcaaactgctcttgtgatccatgcaactgttgaaaagcttgatgaaagccatagattatgaaaaaaagaaagcagcaaaaataacaggcctctgtaatgatatattgtcaaggatggatgcctgcaaggtctataattatgtctctgtctgtgtcttgtgtaatagaagctttgtttgtggtgaaaataatgtataagccatttggttgggagcaaattgtccttttctccaaaggatttttgctgctcattcatggtgacttggtttatggttttatctgttggtgttaaaatcttataaaaatatatatcggttgctgc

SEQ ID NO: 236590 - DNA, 449 bp, Gossypium hirsutum
ctttattttaacaacgatgaggatgatgggttcgatcaagctatatgtccggttgattcccaagaagcagggatgatagtggataatgatcttaataccctcatcgttcggccactcacccctggcgttacgcttcatgccattgttgacgcttgccatagcggaaccattttagatcttcccaaagtttatatgagtgaagagaaaaactgggtaaacaacagtcctccgtcgggagcagagaaacgtacaagtggtggattagctatttctattagtgcttgtcttgatcaccaagccgccgccgattcctctgcctttacccccggcgagatgaacggtgcactgacctacatattggcggagattctgaagaaattaccaggcccgacgtatggagacttattcgatttaattaatgaaacccttaataacgttaaccaatctag

SEQ ID NO: 236591 - DNA, 467 bp, Gossypium hirsutum
tttacgcgtccggttggcaccatttatagcaaaaacgagctcaaaaaattattggatatccatgcgtttcaccaagagagtggcgtaagccgaagagacgccatcatccttgcaggtgtgttggactttgctcaaaagaagttagagcagattatgacccctctcgataaagtttttatgctggatatagagtgtagtttagacgtccatactcttacatcagttgcagaaaatgggcacagccgtgttcctgtctatgagggcgagagaaacaatattgttagttgtttgtacatgaaagatcttgctttggtcaatccagaagagggaatcccattgagaactttcctaagtttttatggaaggcagattcctaaaattagatctgataaaacgttagattatgtgctgacagaattcaagagtggcaagagtcatatggcgatagtgcaaaggtgcgatggggc

SEQ ID NO: 236592 - DNA, 438 bp, Gossypium hirsutum
tttacgcgttcgcccacgcgtccgcccacgcgtccggaaagttgaaaccgtagtgaaagaggcacttgagtggcttgatgacaaccagagtaccgagaaggaagactacgaggagaagctcaaggaggtagaggcagtatgcaacccaatcatcacagcagtgtaccaaagatctggtggagccccaggtggtggatcaactgaagaagatgatgattctcatgatgaactttaaaaaactggtaatgccattttgattgctgaaacaagcaaagaaaagcaaagggtgagaaggatgagagcataggtaggtgagatgaggatatactgtaattgttctccatggtagaagttaaaaaagggagaagtatatccccctttggtcggatgttatttttgggtgaatgaatacgttttaacggatattttttttgttat

SEQ ID NO: 236593 - DNA, 407 bp, Gossypium hirsutum
  unsure (1)..(407): unsure at all n locations
ctttttcgtccgaaattacactaattccaggagatatatctcatgaagatttgggcattaaagattgtaatttagtacaagagatgttgaatgaggttgatgttgtggttaaccttgctgctacaaccaactttgacgaaagatatgatgtggcacttggtctcaacacatttggagctaaatttgttgcaaatttcgccaagaaatgtgtgaaactaaaagttttggttcatgtatccacagcttatgtgtcaggagaaaagacagggcttatacttgaaaattcatacagcatgggagaaacacttaatggtgtttcaggcttagacattaattntgagaaaaatgttattgaacaaaaattgaatgaactaagattgctaggtgcttcagacaaggatattact

SEQ ID NO: 236594 - DNA, 385 bp, Gossypium hirsutum
gcgtccgaaatcagtcaagaaaggcgacgttttcgtgttcccaaggggattggttcatttccagaagaacaatggcgacaaatcggcatccgttatagcaggatttaacagccaattgcctggaactcaatctattgccgcaacattgtttacatcgacaccggctgtcccagacaatgtgttgacaaagacctttcaaattggcaccaaagaagttgacaaaatcaaaaacaagctagccccgaagaaaacttagaaaattggcttctgtaattgaaaatatcatacgtatttctgtcggggattgaataatgtaatttaagagcaaatattggttttgtatgtggtaacgtcgccaattcactatattttctttgaattatct

SEQ ID NO: 236595 - DNA, 285 bp, Gossypium hirsutum
gtattagattaagcagggatatttcctttcaagagcttgttcaaaaaatgttagcaatttatgaccaagcccatacaataaagtatcagttgcctggtgaggatcttgatgcattggtctctgtatcttgtgatgaggatctgcagaacatgatggaggaatgtaatgtgctagaagaaggaggaccccagaaacccaggatattccttttctctagtagtgatttggatgatgttcagtatggcttgagcagtgtagagcgattctgagatgcaatatgttgtt

SEQ ID NO: 236596 - DNA, 356 bp, Gossypium hirsutum
tcggacgcgtgggttcaggttggtgatcttgcagtccttgatatatcagcaacaactattgagcaagatgagtctaatgttcaaaaagttccagctgcagagagtaaaggttttcagtttgatacagaagatgatgataaagtacttcccggtttccttgattcaataatcggtattcgacaaggtgaaaccaagtcctttccgtatgtatttccagaaacatggcaacaagaaaatcttcggggtgttgaagctcaatttactgttgaatgcaaagaactattctacagggatttacccgagttaaatgactctattgccgataagctttttcctggttgcaccgacttaaacca

SEQ ID NO: 236597 - DNA, 356 bp, Gossypium hirsutum
  unsure (1)..(356): unsure at all n locations
aagagagcttgagaggatcttgtaacagttttattcgcagtacatcagatgtaagaagcatgagcaatgggccttctaggcgtcagtctctgggtggagctgataacttctcaaaacttacatccaatgggtttttgtcaaagaaatcgccaagctctcaattgagatcctctttgtcttctagtacagttttgaagcatgctaaaggaacatccaaatcatttgatggaggcacaaggtcattagagagggctaaattgcttttaaatggaacaggctcaaatacttcattcaaccagccttctgacagaaccaaggagagtgaggcacaaaatgatganaagcccactgatttt

SEQ ID NO: 236598 - DNA, 338 bp, Gossypium hirsutum
tcgtccacgcgtccgcccacgcgtccgaaaaatggagggtgcaaagcctggatcttgtgaagctcttgttcgcaggttgctcgagcgactggcaagctcaaaggaatcgtctatgaaagatatgcaggaactagcagtccgcttgttcaataagggcaagacaacttctgaagatacacaaactccaaacatggaaatcgacagtaaaagaaaacagcaacttaattcaaattccaacttgagccctctcgcgagatttctactttccaggtggcaaaaccaaacatcgcgcgatctcaacccatcatgaagggaaaaaccagagatggattatatct

SEQ ID NO: 236599 - DNA, 192 bp, Gossypium hirsutum
gtgggatcagcaacacatgctttctttggttggagggggacaggctggaatatggagaatcgcccccaataaagcagcaggggggcgggcggcaactgcgactgcgctgaccgcagccaatgcacgaagaagggaaacagcaacaccatgatcggcgagactgagaagagctacatcaacaatgttgagatg

SEQ ID NO: 236600 - DNA, 282 bp, Gossypium hirsutum
tcgtcacgcgtccgggcctgttcctcctccttcggtgaaagagtgcttcaaattctcactcaaaaaagcttcttaatggatctgggctgaatttgtgtagtcaaccatctaaccatagcaatggagatgggatggacttaacacttgttagcaacaaaaggaggaaagaactttttcggcatagaaacaatgatgattgctatttgcctgccattcctccatctgaccgaattccggatatggaaattcatcccagtgagccacactggttaaaagacttca

SEQ ID NO: 236601 - DNA, 337 bp, Gossypium hirsutum
ttgtcagtctcgagctcggattgaggagcttgagactgagcgaaggtcctcaaagaagaaactcgagcagttcttgaggaaagttagtgaggaaagggctgcatggcggagcagggagcatgagaaaatacgtgcagttgttgatgatgttaaagctgaattgaaccgggaaaagaaaaaccgacagaggcttgaaatagttaattcgaaattggtgaatgagctggctgcgaccaagttatcggcaaagcaatatattcaggattacgaaaaggaaagaaaggctcgagaactgatcgaagaagtatgtgatgaacttgctaaggaaattggagaa

SEQ ID NO: 236602 - DNA, 298 bp, Gossypium hirsutum
ttgttggctcttatttgggagttgcctacggtggggggacctaatggtatcgatcctctgtgtgtatactctgctggctacgaaattaatcaattacagtggtctgctgcgcaacctgattggattgccattgccttttccaacaaattgcaggttctcaaagtttgaggttttcacactgtattttcctgcttgaagtctggtcttctgtttcatagactgcttaagcttgtattcccctttgacttgaattgcggaatcagttttagataagcctgtcaattctgacttgatttgt

SEQ ID NO: 236603 - DNA, 329 bp, Gossypium hirsutum
ttgtccacgcgtccgcccacgcgtccgatcgggagtgctttcgatagttcagatagtcggcttagcacggaccaggtcaaggaggttaacaggagaagtgcctcgcccctaattagtttagagtattctagtggttgggatcctttagacaaaggtaggagtgggaatgggttttcccaggaagtttttgagagctttatgttcaatttagaggaagtaaagcgtgcgactcagtgtttctcggaaacaaatttgttggggaagagtaatttctcagccatctataagggctccttaagagatagttctgctgttgtagtaaaatgcat

SEQ ID NO: 236604 - DNA, 388 bp, Gossypium hirsutum
tttacgcttccgcccacgcgtccgcccacgcgtccggctaagctgattctgctttgtcttcttgctattttctgctttgcattaacaagtcatgcagcaacatatgttgttggagacacttctggttgggacataagcacagatattgattcatgggctactaacaagacattcaatgttggtgatgttctactgttccaatactcatcatctcacagtgtaagcgaagttaataaagaaagtttcgaaacttgcaatacaacaaatagtttgacaactttttctaatgggaacacaactgtaacactttcaaatgctggaaagaggtattttgtttgtggcaacaagttgcattgtcttggagggatgaagctttaagtaaatgtac

SEQ ID NO: 236605 - DNA, 276 bp, Gossypium hirsutum
cccacgcttccttacgtgcactctctggcatgtctccacgaacttctatctttttcttctcttttgccaccatcaaaacagtcgatgaccattgcggattgatgcttcctggaaacccctttcatattttctttagaaacaattctgcatatcatgatattcaccatcagctttatgggaccaaatacaatttctcgcaaccgttcttcgtcatgtgggatagaattctgggaacgtacatgccttattcactcgagaagagagcagaagggggct

SEQ ID NO: 236606 - DNA, 390 bp, Gossypium hirsutum
gattattccaaaggaacaagagagaaaatgagtcgaggaagtggtggcgggtacgatcgccatattaccatcttctcccccgaaggtcgtcttttccaagtcgagtatgcgtttaaggcagtgaaagccgctgggatcacatcaattggtgttcgagggaaagactccgtctgtgttgttactcagaagaaagttcccgacaaacttttggatcagactagcgtcactcatcttttccctattactaagttccttggattgttggctactggcatgacagctgatgcaaggaccttggtccagcaggcaaggaatgaagcagctgagtttcgtttcagatatggatatgagatgcctgcggatgtattgtccaaatggattgctgacaaa

SEQ ID NO: 236607 - DNA, 106 bp, Gossypium hirsutum
  unsure (1)..(106): unsure at all n locations
ctgtactttccaggaaattgcaggaagcaaggacgctgggggtcaatacgagagccacactgctttcactcttcctggactctaccgngttgcacatggcatcgat

SEQ ID NO: 236608 - DNA, 273 bp, Gossypium hirsutum
ttcacttgttcgcccacgcgtccgggcttttacctgcaaatataagtgggaggttctcaacgctgccgatcgacatcatgtgaccttgctcggtctcgactaccgatcttcaccacctgctccattgattgattcttaagagttaaccaaatggtcgttttacagggcagtgattgccgagttcattgctacacttctcttcctgtatgtcactgtgttgaccgtgattggttacaaggtccaaaccgaccctgcttagaacactgttgaccc

SEQ ID NO: 236609 - DNA, 363 bp, Gossypium hirsutum
tcttttttttaccttttacatctgttcatgtgcagtgtcaggttattgtccggccgattagagcctcagtgtcggggaaaccatccgtatcagagccgcccgtgacgacgctttccgaaaagcttccgctgaagaaaatcccagggaattatgggattccttttgttggtccaatcaaagaccgacttgactatttctacaaccaaggtcgagatgaatttttcaagtcaaaaatccagaaataccagtcaacggtgtttcggactaacatgccaccgggtcctttcatctctcccgacccaaaggtaatcgccttactcgacggtaagagtttccctgttcttttcgatgtgttcaagattg

SEQ ID NO: 236610 - DNA, 293 bp, Gossypium hirsutum
ctttgactgcttccctactcatcttgttatccggcatagttgccgatggatcatgttaatccgaagagcagaccgtacacgaacaaccgcaccttactcctgatcttcaaagactttctttttcctctcttcgcatctcaatcaaaccaagaacccacaaaaagcttcagatacaagcaattcaatggttcgatggaaaccagctggctgaggcggatgagtttgaggacaagatgaaggagctggaaggcatttgcaacccaattattgccaagatgcaccagggcgctggt

SEQ ID NO: 236611 - DNA, 201 bp, Gossypium hirsutum
acctgacgatccggccaaggaagctgccaacttcacctcttaggttatcatcatgaaccaccctggccaaattggaaatggttatgccccagtcctcgactgccacaccttttacattgctgtcaaattttccgaactgttgaccaagattgacagacgatctggcatggaactcgtgaaggaacccaagttcttgaagaa

SEQ ID NO: 236612 - DNA, 489 bp, Gossypium hirsutum
ttcactcgtccgggcaaaagagaaataaaaacagtttcatttccattctaagtttgtgttttttatttgccttttgtgggttttttttaaaaaaaattcagcaaaaatgtttattgagagttttaaggtagagagccccaatgtgaagtacacggagaatgaaattcagtctgtttacaactatgaaactacagagcttgttcatgagaacaaaaatggaacctatcaatgggttgttaaacccaaaactgtcaaatatgaattcaagactgatatccatgtccctaaattgggggtgatgcttgtgggatgggggaggaaacaatggttcaaccctcaccggaggtgttatagctaacaaagagggtatctcttgggctactaaggacaaggtacaacaggctaattactttggttcattgactcaagcatcaacgatccgagttgggtcctacaatggagaagagatttatgctccatttaagagtc

SEQ ID NO: 236613 - DNA, 475 bp, Gossypium hirsutum
tttccaccaacatagtccaacattttcataacaatggctgcagtcacaaacgccgctgctacatcctccttcatggggacacgcttccccgacgtctacacaagttcagggagattcgtcgccaggtttggttttggcggcaaaaaagcagctcccaagaaagcctcgaaacaaacctccgaccgccctctatggtacccaggagcggtggctcctgattggctcgatggaagcttggtgggtgattacgggttcgacccgttcgggttagggaaaccagcggagtacttgcaatatgatttggattctttggaccagaacctggctaagaatatggctggtgagatcattggaactaggaccgaagttgccgacgtgaaggcgacgccgtttcagccttacagcgaggtttttggtcacagaggttagggagtgtgaattgatccatgacggtgggccatgttggctacgcttg

SEQ ID NO: 236614 - DNA, 453 bp, Gossypium hirsutum
tttcggaaagacgacagtaatatcacattaagttatcacttaagtccttgttcaatatggaaatcacaatacaaatattaaaggaacatctggattctgtgtaaagagaagaaaaattgagtggttttgatggagcttgtaattcttgtcccatgttctttgttactcattgctttaatcaagttcctttatgattacttgtgggtgcctcttagtatacagcatatgctgaattctcagggaatcaaaggacctccttacagattcatccatggcaacaacaaggaaattatcaaaatgagaaaggaagctatgagcaaacccaaggccttgactcatgatatatttgccaaaacgcagccacatatgtactcctggatcaaaaaaatatgggaagaattttgtttattggaacggtattcgagctgaagtggtgatttcagaacctgaact

SEQ ID NO: 236615 - DNA, 441 bp, Gossypium hirsutum
tttgtgtcggttgatcggatgaagaccccttttgttgtagttcaagggcatagacctatgtacactacaagtttcgaaagtagggacgccgcattgagagagaaaatgcttgagcatttggaacctttatttgtgaataacaatgtgaaccttgcattatggggccatgttcatcggtacgagaggttttgatcattgaagaatttcacatgtggaagcatggggcagaaggggaaggattgggaggcattaccagttcatgttgtgattgggatggcaggacaagactggcaaccaacatgggaacctcgaccagaccatccacacgatcccgtctacccacaacccaagaggtctttgtaccgcacaggcgagtttgggtacactagattaattgctacaaaagagaaacttacactatcggtcgtaggaaaccatgac

SEQ ID NO: 236616 - DNA, 384 bp, Gossypium hirsutum
gttccttagagggttatgcagctggaaatgcaattccgagtccacttaagaatgtcgaaagaggattcttgaagaagtattgggcaaagtggaaggccagccataccgggcgctgtcgtgcaatgccgcatatcaagacatatacacgctacaagggacaaaatctggcttggttcttactaacttcagcaaaccttagcaaagctgcctggggcacccttcagaagaacaattctcagttgatgatccgttcttacgagctgggtgtgctatttttaccatctcgtatcaaagtagatggtcccagtcgtgaattttcctgcactgataaggcaggttcatcaaagggtaccggtaaatcaaagtcatccggaaatcccatac

SEQ ID NO: 236617 - DNA, 357 bp, Gossypium hirsutum
tcggtacattggagctacactgcctcctgggtttaggttttaccccagtgatgaggaattggtctgtcattatctctacaaaaagattgccaatgaggaggtcttgaagggtacgttggtggaaattgatttgcatacatgtgagccatggcagcttcctgaggtggcaaagctgaacgcaaacgagtggtatttcttcagcttccgtgacagaaagtacgcgacggggttccggacgaaccgagcgacaacatccgggtactggaaggcgacggggaaggatcgaatggtgatggactcaagaacacaagaggtggtagggatgagaaagacattggtattttacatgaaccgagc

SEQ ID NO: 236618 - DNA, 420 bp, Gossypium hirsutum
acttgattaagaaacgaagaaaagctagatcttttgagccaatgcctatatatggtacccttcctttcggaggagcaagcccctatatcggaataagctcgaaatcagtcaacccccgccctgttcccaacttaaaccttaagttaaagatgccttttgctgaaatattagaggcaaccaataacttcgaggctaagttgttgattggggaaggaggctttggtaaagtctacaaagggattctaagaaatggtctcaaagctgcagtcaaaagaagtgagtccaaacatggtcaggggctgtccgaattccaaactgaggtaatgattctatccaagattcgacaccgccatcttgtttcactgatcggatattgcgatgaagggtctgagatgatactggtttatgagttcatggaga

SEQ ID NO: 236619 - DNA, 408 bp, Gossypium hirsutum
cttaacttgctcatgccttttggtcctctagcaatcctggttcataaaatgactgatagtaatgggtgggtcttctttctaagcttactcggtataacacctttggctgagcgtttgggttatgctaccgagcagttggcttttttcactggacctacagttggtggtcttctaaatgctacatttgggaatgcaactgaactgattatttcaatttatgcactgaaaagtggaatgaaacgagttgttcagttgtcattgttgggctcgattttgtcaaacatgctgcttgttcttggatgtgcgttcttttgtggtgggcttgtatatcatggaaaggagcaggtctttagcaaggcgacagctgttgtcaattccggactccgctgatggcagtcatgggcctac

SEQ ID NO: 236620 - DNA, 485 bp, Gossypium hirsutum
cccacgcgtccgggagcctccttcaccatcgactgtgcgaagccggttgaggataagatcatggacatcgcttctttggagaagttccttcaggaaaggatcaaggctggtggcaaagctggtgctctaggtgactccgtcactgtcacccgcgacaagacccgtatcacggttacctctgactccaacttctctaagcggtaccttaaatacttgactaagaagtacttgaagaagcacaatgtccgggattggcttcgggtgattgcttccaacaaggaccgtaatgtttatgaactccgctacttcaatattgctgagaatgacagggaagaggaagaatgagcaatcagttcagttacttttctctgttacctatctggtttattagttctgaggaaacttgtttgtgtcaaatcgttggacttgtttgggtttgctttttgacccttggctttattttcaatgaagttttggttgctgat

SEQ ID NO: 236621 - DNA, 441 bp, Gossypium hirsutum
ggtctctacctttgttcatgcatgtgaaggtgatgcagtgacaaagcttaccaatgagaaaataccttactttaatgctaatatttatctgcagaacaagacccaaatagggaaagttgatgaaatctttggtcccatcaacgaatcctatttttcaatcaaaatgttagaaggttgagggagcaaactgagagttgagctgctgctgactacgttatgttcacaactttggtatgatgttcgtgtatgtgttggctacaaaccagttgagtcattttgttgacaattatggcgcttagttcttaattttatatcttaactctggtgttggagctttatttaagttcaaatatttgagtattcttgtttcatgaatgtcttgttactttgcatcaaattaagttggtctttgtcggcgttctataatgctgcatatttagc

SEQ ID NO: 236622 - DNA, 412 bp, Gossypium hirsutum
cttacgcgtccgctttccttctctctctttttccctttcaaatctctccccaaaagaaaaaaaaaacatcatggctatcgacaagaaaccaaacagattgcctcaaacagctgttatcaaacaaatcctcaagagatgttcaagtttgggtaagaaacaacaatgctacgatgatcaacaacaacaaggagggctgccattggatgtcccaaaaggtcatttcgttgtgtatgtcggtcaaaacaggagtagatacattgtccctatctctttcttgacccgacccgaattccagaagttgctccatcaagctgaagaagaattcgggtttgagcatgatatgggtctcactattccttgtgaagaagttgtgttccagtccctaacatccatgctcagatgatttttaaat

SEQ ID NO: 236623 - DNA, 505 bp, Gossypium hirsutum
aataatcttgttacccctgatcagcccaaagacaatgcagtagttaacagtggctttgaatttggcccttggatgttccaaaatgtatctcttggtgtcttgcttccgaccaaccttgacgaagagacatccccattaccaggatggatggtcgaatcaaccagggcggttcgatacattgattccaaccattatgctgtcccagaaggcaaacgtgccgtggagttggtttccggcaaggaaggcatcatttctcaaatggtggaaaccaaaccagataagctatatagcttgaccttctctttggggcacgctggggacaaatgcaaggaaccactggctgcaatggcgtttgcaggggaccaggcacaaaattttcactacacgcctgactctaactccaccttccaagttgctagtgtgaacttcacagccaaggcggagaggacacgtatcgcgttctacagtgtgtattacaatacaagaaccgatgacatgagctcac

SEQ ID NO: 236624 - DNA, 486 bp, Gossypium hirsutum
ggtccctggactcgggatgagattggactgcagtaacctaaaccttcattatgctgccagatattcgaaagagatcccggatgcgtacgagaggcttctgctggatgcaattgaaggtgagagaagattgtttatccgaagtgacgagctcgatgcagcctggtcactcttcactcccgttttggcagagctggaagagaaaaaaataatgcccgaatactacccttatggaagccgtggccctgtcggggctcattatcttgcggccagatacaatgttcggtgggggtgatcttggcttagaccaatcggcctaagactacactttgacattgctgtcatcgtcaatatagatttatcgacacggaaagctttgtacagatctttgtaagaagggctggaaatatttttaatctttacaaggtttgcttaagaaaatttaggttttgtttatcaacatggtggcctaatttggtaagagcatgc

SEQ ID NO: 236625 - DNA, 422 bp, Gossypium hirsutum
tttgtttaattattcaaaggctatgatatggaaatacacaatcagattctacacaacattgtgttcttgcgttctcagcttgacaggtcttatattccagggacatttactgctagctgtagattttgtttatcgccacaatgattgttttcttgatattgtattactctcaaccgtagcaacagccagtcaatttttcatttcttacacgattcgcacatttggtgctctcacatttgctgccataatgaccacaagacagctggtgagcatcatgctgtcatgcatttggttcggccatccccttagctgggaacagcggattggggcgatcatcgtgtttggctccttgtactccagaaccttctggaagaaagtgtcaccagctcccactcctccacaacaaacagaaaatggatctt

SEQ ID NO: 236626 - DNA, 333 bp, Gossypium hirsutum
tctgttaaaataatggcggatcgtttctttcccaacgtattgccggacttggtacccgaaacaacacaaaacgaacagcaagaaattggagatactctgatcaaacttctatccatgccttactcttctgtatctcaacatttcaaacgcaccgatttggacctcaaagaaaccgtaacgctggaaacgtgggggataactttgcaaaaagtctccgactttactctctattgtggcagtctcggtactgctttcttgctcttcaaatcctatcaacttaccaacaacaccaacgacctctccctatgcttagccattgatgatgcttgcaac

SEQ ID NO: 236627 - DNA, 424 bp, Gossypium hirsutum
aatatatttccgtttgtttcctgagcaaatctcgggaaggaataccctttttttccccctgttgttaactcgttgtgattgtgaagctttctttaagagaatcctagttaactcgacgcgtttacccggaaagaggtgaagatgtcaactactgcatggaagactgtgccccttgagaattgatacaaatagggtgagccttctgcaggaattagtggtgcacctcaagataacaacattatgctttggaatgctgctatatttggacctgatgacaccccatgggatggaggtacgtttaagctgactcttcagtttacggaggattatccaaataaaccaccaactgttcgttttgtatcccgaatgttccatccaaatatttatgctgatggtagcatctgtttggacattctacaaaatc

SEQ ID NO: 236628 - DNA, 355 bp, Gossypium hirsutum
tcttccacgcgtccgcccacgcgtccgctcgatttccattcctttgacttcctttcatcatgttagaacaaatccttctctattttactcttttcttataaaacttgtcaatttctgcacttcactgtgctttttctgttgaatttatctcttttttttttcttttcattttgtagttcaagaaatgggttcaggagaaaaggtatttgtttatgaagatctggtgaagcacaaagacagaaatgattgttggcttttgatctctggaaaggtgtataatgtaacccaattcttggaggaccatcctggtggagatgaagttttgctagctgctagtggaaaagatgcgaccgat

SEQ ID NO: 236629 - DNA, 439 bp, Gossypium hirsutum
tctttgatgagaaagattttaactatgtaaaatccacagttccggtgggagtttcttcagaaatagtgagcaaaagtttccagccattgaagagaatacagccgaggttggaatgggcaaaaccccaacaaagtgcagtgccagctgagaaaaggtggccaagttctggatcgaatccttcagtttcttattccctggcatcacctttgcaggcctcacctccgctagcaaagacagaaagccgtaatgtggctgttggaagtgattataagaaacttcagccctcaattagggaaccagttatgatgatgcagcggcctcaatctgtaaatacaaagcaggttccagctacttgtataagctcatctcctcctggaacgaccccctttttgtatccaagcagtagtgttgaaattacaaagtctaatggctttatgcc

SEQ ID NO: 236630 - DNA, 413 bp, Gossypium hirsutum
tctttctaacccttttctcctgcactctcactgttgaatttcccggtggtggcttgttgtaacttgacttgctttttgttgtttttatggagttttagcaactctctgtcaaataacattgttaatttatatattctttcaaagcaaagatgggagaaatgtcaagcttccaattgggagttataggggccctgtttctttctgttgcatcatctgtctctattgtcatatgcaacaaagctttgatgagcaatcttggcttcccctttgctaccacactcactagttggcatctcatggtaacattttgcaccctttatgctgcccaaagattcaatctgtttgagaataaatcaattgacatcaagactgtgatgctttttggcattctcaatggtgtttctattggattt

SEQ ID NO: 236631 - DNA, 493 bp, Gossypium hirsutum
tcttctttttcctccttccttcgtttcttttcatattcttgtgcttgttatttgtctccttttgtttcccttttatttatttatttatttatttttatcttttttataaactttaccttttatctccttaaaatcaatcgttatctttctcttctttgttcttctgcaactttcatggcggttttacccaccggctcttcacacttggagttgacgatatctgttcctggtttcgcttcttccccttctttcccttcttctggtgatcaagggggttgtacggtgagagatttggatataaaccaagtaccagcagaagatgtatggatcacagcaagcatggaagatgaagaagaaagctgcaataatggtgcccctcctcgaaaaaagcttcgtcttacaaaagaacagtctcgccttcttgaagaaagtttcagactaaaccataccctaaaccctaagcagaaaggggcattggctttgcagctgaagc

SEQ ID NO: 236632 - DNA, 100 bp, Gossypium hirsutum
ctggtctccgtcgagaatccaagagacgagctcttgcgccgtgtgaaaggattagcaccgcgcttggtgacattagtggaacaagaaatgaacacgaata

SEQ ID NO: 236633 - DNA, 384 bp, Gossypium hirsutum
tctctggtttttaggttgaggatcaatgcgccattaaatcgatacattaggaagacattttatacgcaagaccctgttgtggggtacacggactatcccttcctggtagtacaatcacgactttgatgtgcaatggctgtgctgttgaatatatgttaaaattatgtgtgaaataggagagtctaatttgatatcaaacctgtgtcttggtttttgtacacaattctgggactaccctaagctcacctgctcagatgtaacgaaacaaaattattataaaatccatggaatgtagtggaagaaaaaaaaaaaaaaaaataaaaataactaaataaaaaaaaaaaaaaaaaaaaaaaaaaaaaaaaaaaaaggggcggccgtttt

SEQ ID NO: 236634 - DNA, 473 bp, Gossypium hirsutum
tttgtttctttggggttctcactttttcactcgctcaagccattattctatttttctcccatctataccgcagaaatgagagacaaaatggaaaagcttgttattcttcccttctcggttggttgtgtctctgattcaagcgtggctgttgcagcacagcggcaccaccaccaccaccagcctaggagatcaaagcctcctcctgctgctgctgacaccaattcaaatgcaaaaaaaaaggaagacgaagacagtttatcgagtgaaaacatgaagtactcattgaagttactgcctcttccaaagcctgacatatcaactgggtttaataggctcgtcaccaagagtttcaagacattatctcagttatttgcctacaaagacgagatagtagagtcggaaaatgaaatggaaatcggattcccgacagatgtaaagcatgtgacacacataggattggatggatcggcatc

SEQ ID NO: 236635 - DNA, 451 bp, Gossypium hirsutum
tgctacagatgaagagctcgtcgggttttaccttcgacgaaaagtcgacaacaaacccctcacaatcgaactcatcaaagagatcgatatctacaaatacgatccttccgatctcccgaaaactggcatggtgggagagaatgaattgtatttcttttgtagacgaggaaggaagtaccggaacagcgtaagaccgaaccgggtgacagagtcggggttctggaaagcaacgggcatcgacaagcctgttttttcggttgaaggtggtgaagccatcgggcttaagaaaacgttagtgtactaccgtggaagtgggggcaaaggaactaaaaccgattggatgatgcatgaatttcgcctccccaatcccacaatgacggcacatgatgctgaagtatggacgatatgtcgatgtttcaagcggcatagaaaaatcaaacaagattggaga

SEQ ID NO: 236636 - DNA, 495 bp, Gossypium hirsutum
tttacgcgtccgatggcttccgcggatagcaatctccttatcctcaatttcctaaccttggcttcattgtccctattctatgccgacaaagctttttgtattcggattccagatcgggcctccaccacgcctcgggaactgtcagatcagtctctgaaaaccgcggtttttgccctcggtagtttctggagatcggaagctgtcttcgggtgcttaaacggtgtcgttcgaactacttctggttatgctggcggatccaaaatcaatcccgaatacagaagcttaggtgaccacgccgagtctgtaatggagattaatttcaggctacttctggaggttttttggtctagccatgacccaagacaggtttttggccaaggtcctgatgtaggtccccagtacaggtctattatttttacgaatgggactgaagaggctagattagctgccatgagcaaagaaagggagcaaaccaagtcgcggagcagcattttg

SEQ ID NO: 236637 - DNA, 483 bp, Gossypium hirsutum
ttttccacgcgtccggtttgtttgctcataatcacagggaccgaagcagcacggacaagagtggaaacattttgcctggcactgtcgttgattcgaaaatctgtcatccatcggaatttgacttctatctttgcagccatgccggtattcagggaacaagtcggcctgcacactaccatgttctttgggacgaaaacaattttactgcggatggaatacagtctctaacaaacaacctttgttacacgtatgcaaggtgcacgcgctcggtctctgttgttcctcctgcctattatgcacatttagctgcattccgagcacggttctacctagaaccagagatgcaagacaataatagctcaacgggtgctggttcaggtcaagcaaaaggtggtggtacaaaggcagcaggagaatccggggtgcggccgttgccggccttgaaagagaatgtgaagagagtgatgttctactgctagaacc

SEQ ID NO: 236638 - DNA, 257 bp, Gossypium hirsutum
gaatccctcgaactctgttatttttgaaattttcatggcacccatccctttcttatcacttcttttgctcttctcattaactttcccatcttcttgctcagccttcgaacaacaacaatcacccctccttaaataccatcatggtcctcttcttaaggggaatattactgttaatctcgtttggtatgggaagttctcatctacgcagcgatccataatcggcgactttttgaactctctcagcaaccccaagacga

SEQ ID NO: 236639 - DNA, 394 bp, Gossypium hirsutum
tcggtggctctaagaacgataaggaccttagagccggtgtggctttgtgcgcccgggctgcttttcttggccacatcgatgctttgcgtgagctcggtcactgcctgcaggacgggtacggcgtccgacaaaacatcaccgagggtcgtcggtttctcgtccaagccaacgcccgagagcttgcggcgggtttatcatcagcatctgtttcaaacatcgctacgtgctcttggctcacctggagcccccacccgatcccccacccgaccaaccgtcatccgaacgtgccgggatgcccgttgctgagtgattttggatgcaatgtaccggcgccggaggctcacccggcgaacaagttcttaacggattggttcggctctcgggacgggattcc

SEQ ID NO: 236640 - DNA, 357 bp, Gossypium hirsutum
  unsure (1)..(357): unsure at all n locations
tttacgcgtccggctgatttttgctgggaagcaacttgaagatgggaggacccttgcagattacaacatccagaaggaatccactttgcacctggtccttcgcctccgcggtggcttttaagtgtggtgccgaacacctgtccagttattgttgatgtgttaagtttgtatgtgtgtgggtcgtatgctaatgtgagctggccactaggctggggaagcttacgagtaaaaataattgcttttatcaacgcttttagttgttctttaggtttcaaggttctatggcattgaataaatatgtttttgcattttgcagtcnaaaaaaaaaaaaattatataataaaattaaataaaaag

SEQ ID NO: 236641 - DNA, 440 bp, Gossypium hirsutum
  unsure (1)..(440): unsure at all n locations
ctcacgcgtccgcccacgcgtccgntttttttttttttttttttttttttgaagaagacaggagaaggagaagataaagctataaaagatggttcaaagcaagnaaaaacccaatgaaaatttagggcatattgggtttattaaagtcaatatggatggcattcgaataggaaggaaagtggatttgaatgctcattcttcttatcatagtttggcttcagcactcgaaaatatgttcgtcagatccgccggtgcagagaagcaacaattaacaatgccatctaagcttttggatggatcctctgaatttgttttgacttatgaagacaaagagggagattggatgcttgtaggagatgttccatggatgatgtttctcacctcagttcgaaggctccgaatcatgaagacctccgaggttaatggacttgctccgagat

SEQ ID NO: 236642 - DNA, 339 bp, Gossypium hirsutum
ttccacgcgtccgcccacgcgtccgcccacgcgtccgcccacgcgtccgcctcctttcacttttacactcttctaattccactatattttcccctctcagtttctcagtaaccaaacagagcacaaaataccaggaaaccgcaataaaaatgactgacgcttccgaggaagctaagcaaatcgagaagctctacgaatttggcgaacgcctcaacgaggctaaggataagtctcagaatgtgaaagactacgaaggaatcatcgatgccacgaaaacaagcataaaggcgaagcaattggctgcgcagctaattcctcgcttcttcaagttcttcccta

SEQ ID NO: 236643 - DNA, 401 bp, Gossypium hirsutum
tccagctactatggaattaacacatttctggggtactgaaaacgaccctgagttcaaaggataccacgatgggaattcagaacctactggcttcgggcacattggcatcaccgtggatgacatgtataaggcatgtgagagatttgagagtcttggagtagagtttgtcaaaaaaccaggcgatggttatgcattcatcaaggatcccgatggttactggattgaaatctttgatttgaatggaattagagcaatagttaacaatttagcttaagctagtgcttcaccaagttcaggaaacaaggatatggcatatgtagtaggtttccgttcgttgtcatgattctagtgttataatgtctgctctcgtacattaattcctttgctttctagaacttatc

SEQ ID NO: 236644 - DNA, 234 bp, Gossypium hirsutum
tcccacgcgtccgtttttttttttgataaaaattaaatattttagaaggatagtagttttcgagttgagatgggcatcaatgaatatgaagaaaattgtggtttattaaacatagaattcatgaaagactgaaaagccatacgtctaaaatggagcagatgcatcttggcttgctcgcaaaattttaaccatatggaatttggagaatccaatggtcatacatggagaaccgtc

SEQ ID NO: 236645 - DNA, 483 bp, Gossypium hirsutum
ttcagttcttcaatataggtgccatcaactggcaaactgatatcgaaaagtgcttaacatgggaagtttatagtcagcttgcaagaggaatgactatacagttcctcgacactgctgccaaagaattaggatgtaatatttccatataacatcgattaactttcggattatcagtataaataccctttctttttcttcttttaaaactgagaatacaaagaagacttaagacttgcttcaatttgcttgaaccacatggttggggcagaaaatgcagctcatcgagtagtcctaggggatgaggatgaaggctttgaatgccatgaaactcttcaagcaaggttagtgtatgataaaaatgccacactgaggtttcatgtgtctaatcttactttgctttaagcttagctttgtacgatatttagactgagttttcgatttgtttgtcggattacgatatataatttcagtttaacttagttt

SEQ ID NO: 236646 - DNA, 387 bp, Gossypium hirsutum
ttttgcagcaacagggagtgcacgatgctgctctacgagtacatgccaaacgggaacttggacgacttgttgcatggtaagaataaaggggagaacttggtggcggattgggtgacaaggtacaaaatcgctcttggagtggctcaaggtatttgttatcttcaccatgactgtgatccggtgatcgtccaccgtgatctcaagcccagtaatattttattggacggtgagatggaggccagagtggcagatttcggggttgccaagttgatccaaagtgacgagtccatgtccgtcattgctgggtcctatggctacattgctccagaatatgcttatactctccaagttgatgaaaagagtgatatctacagctttggggtggtg

SEQ ID NO: 236647 - DNA, 422 bp, Gossypium hirsutum
tttttcttttctttgtttatcgttatggcgacaaacaagggtgaaggggctaaagctgtagataaaacagagacaaaccctatagaggaaaaggctttggggtgttccattgggaacctcagcgacaacaaggacgtgtttacaagagctgataagatagattttaagagctgggatttgcaactggataagcacttgagcaaggcttggtctagggacaaagatgtttcgcttgtgactaagaaggacgagtgggaaatcgatttggctaagcttgatataagacatgttatagctcatggaacttatggcatagtctaccgaggtgtttatgataaccaggatgttgcagtgaaagtattggattggggggaagatggggattgctacagctgctgaagctgcagctcttcgggcatctt

SEQ ID NO: 236648 - DNA, 516 bp, Gossypium hirsutum
  unsure (1)..(516): unsure at all n locations
ttctattaaaaatgatcctcaaaaggtacttgtcatggaaaaatatcctccccaattgcatcaaaccccaggtgccatcctcagggcaaaaagttcatccttccaaacgaagtcctagccaaaggctatctctctctgatattagccactttggctctccgttgtcactaaacgatctgtcgaattctcttataagccttcatgtgtttaccctcaaggagctggaactggtaactcacaagttctccaagagtaattttctgggtgagggtgggtttggacctgtttacaaggggttcattgatgacaatcttaggcctggcttgaaggctcaatctgttgctgtgaaggtccttgatttggatggcacacagggacacaaagaatggctggctgaagttattctcctggggcaattaaagcatccncacctggtgaacttaattggatattgctatgaagatgaccacaggcttctggtatatgaatacatggaacgtggcagcttggaaaacc

SEQ ID NO: 236649 - DNA, 339 bp, Gossypium hirsutum
tttatactctttccttttttcagacagtgattgctgtttaaaaagaatgggtgaaattcgtttgttctggttattgtttgtttgggtgttgggaattgagaggggtgtatctggtttggcctgcaactgggggttgcaatcgactcatccattgccgtctaacatagtggtgaagctacttaaagacaatggattcgataaagtgaagctgtttgaagctgatccaggtgcacttaaggcacttgggaaatcaggaattcaggttatggtggggataccgaatgatatgttggcatcgcttgctggaagtgctggaaatgctgaagcttgggttcaaca

SEQ ID NO: 236650 - DNA, 425 bp, Gossypium hirsutum
ttttacgcgttcgaagagaggggacaagagaggtagagaaatagtgtgatggcatccgggtggggaatcaacggtaacaaaggcaggtgctacgatttctgggtcgacttcagcgagtgcatgtcccgttgcagagaacccaaggactgtggtcttctccgtgaagattatctcgagtgcctccaccattctaaagagtttcaacgaaggaatcgaatttataaggaggagcaacgtaaattaagagctgccgcacgaaaagacaaggaaggcgaaaatggtgttcatcatcatgcatagtcataatttgtgatcctttaatttgccaataataataatgcgtggagattgttgtatttatgtggggattggtattttaactcttgctaaattaccttttggtttccctttcgttggaatggaca

SEQ ID NO: 236651 - DNA, 445 bp, Gossypium hirsutum
gttattataagggagcatattccgattagcaacctctttacttgtctttggttcaacgaagttgaccgttttacttcccgagaccaaattagtttttcaaccgtaagggataagattgcggcaaagacgaattggactgtcaatatgttcttggactgcgaaaggcgcaactttgtcattcagaaataccataaggatgttttagccctattggctcaaagggctcctccggtcatttattcttcacaaaggaaggtcccaccaagacgtagaagagataggaagtcaggcgctagacatcatcgtaaagttagtaaggaaatagtttaatgttataaccagttgtctaaaaatcaaaatttaccattctttttccttccccacttttttggaacattcatggcggggcttggaatatcattcaagagtgttgtaatttttgctc

SEQ ID NO: 236652 - DNA, 477 bp, Gossypium hirsutum
ttggaaagctctcaatctatggagaaacctttgctgatgaaaacttcaccttgaaacactccggcccgggcctcctctccatggcaaacagcggccccaacacgaacggctgtcagtttttcatcacttgcaatgcgtgtgagtggcttgactcaaaacacgttgtttttgggagggtgctggaggggctgaagattgttcgaatgatcgaaaacgtgcccgtcgtcaatggcaaaccaaaaatcgaagtgaaaatcaccgaatgcggcgaactgtaaatacactctccatcagcaccattaccaatatctgtcatcaccatcatcatccatcatccatcatcaccattattcattaataacaattcttcatttatttcaatgattccgttccattccatgtatcatctattctttacatatttgacacctctcttcctctatataataatcaagtgatgatatcccacagcccctt

SEQ ID NO: 236653 - DNA, 523 bp, Gossypium hirsutum
  unsure (1)..(523): unsure at all n locations
tttacgcgtccggttcggtgaaaagtgacctccagctccttgaagacattgctgatcgtgccttgaaacaagaatccatttttgtagtggtttcaaaaagatcaactctcgataaatgtccccttcctgtcgggattagactgtttgtttcagccgcccattcagagtccgacctgcttaaggcatgtgaatcactcaagcgagtcgcagctgcgatgcttaggtgagtgatacccatcatatatatatatttgtgtatgtatggattagtatctactgtcagtatagttttttttaactttgtaagcggagttgaaaattcaacatgttcttatattatatttgaaaaaaaactttactagcggtggatatgataaattatccattcaagattttgttttaaactgcattggaagatttttctcgtggaactgttcacttttcttaaattttctctagcangaaaacaaaatgtaactacaatttaaacgttttactttattttttataatttaaaataatg

SEQ ID NO: 236654 - DNA, 453 bp, Gossypium hirsutum
ttttacgcgtccggttcctgcagagtgaggaagctcccctgaaagcttcagttgaaaatgcctaagcaaattcatgagatcaaggacttccttctcactgctagaaggaaagatgctcgctctgtaaaaatcaagaaaagcagagatgttgtcaagttcaaggtccgctgctccaagtacttgtacaccctttgcgtgtctgatgctgagaaggctgacaagttgaagcagtctcttcctccaggtttgagcgtccaagacctgtgaaattaaaactgcccttagcttgtactaggcaatgaaaactagattttgacttttagtttattgcttgcatttcgaatcgttttgcaacgatcaaaagtttttataatggatttttatttggtgtttttttatggacgttagtaatgttattaaaaccctttatttattttagtattcgtgttctac

SEQ ID NO: 236655 - DNA, 469 bp, Gossypium hirsutum
ttccacgcgtccgcccacgcgtccgaaaatctggtagtggaaataaatatgcagctcttgcaagtgctctgggatctttaacatgggagaagcctttgtattctgaatttcaacaattggcaggggaaagtgaatatgctgcctggacccttgtcaatgggtatgcactcaatcatgtcactatttccacacatcggctgaaatctaatttgagaaatatcaaaagcctcaatgagttcatcaaaaagaatgggttcaagttgaattctgatggtggagttttaaaagtgagtccagatggccttctgctgcaaagttcaactgtggcggattcaatgcctttcagtttttctgacggtgttgttgagtctgttccctgttcgtacattgagtttgctgaacgccttgtgctgcctcaatacaaaaatctgtctgagagtgagatcaaagagttccacaggcgagatgg

SEQ ID NO: 236656 - DNA, 340 bp, Gossypium hirsutum
tgttaaggcaatgcaagaaagggtagcagttgcagtaaagcccttctctggcttaccaggtcaatggattttatggtagctttgtttcaaaaactggtgaaggatcctgggcagaacatggaacaagcagttgaagaatcctataatattactttgaagcctaggcatggatggatttcgacggctgcttttaaggtggcactaaaactggtaccagataacaaaacattcattagtcttctcatggcaaaagatcaaaattgcgacaaccttaaagaggaaatgcagacattgattacgttacttgtgccttttttagaacagatccatttcgtcatga

SEQ ID NO: 236657 - DNA, 453 bp, Gossypium hirsutum
tttacgcgtccgaacgcttctactcctattacaggcaaaatgagtccgcgcatttggttttactccattttgctcactcttcaatacggagcgcagcctcttatctccaagcgcttcaccagacgggaagtaattgtaacgtcgtcagtcttgatatgtgaaatagcaaaggttgcatgtgctataattctcatggcgaaagatggtagcataaagagactggcgaaggaatggactttgatgggttcacttactgcatcgggtcttcctgctgcaatttatgcacttcaaaatagcttgttgcaaatatcttacaggaacctggattcgcttactttctcaatgctgaaccagacaaaaatatttttcactgccttatttacatatatcatactgaggcaaaggcagtcaattcaacaaactggggctctgtttttgttgatcatggcagct

SEQ ID NO: 236658 - DNA, 490 bp, Gossypium hirsutum
tatttgttggccgtgagggaaagtatgttactagcaggaacctacgagatcgactctattgcgagcttgagcgaaatttagcaatgagagtagaagacggtgaaactgccgatacatttattgttagtgggcgtggtactttacatataaccatattgatagaaaacatgcgaagagaagggtatgaatttatggtgggacctcccaaagttattaacaaaaaggttgctgacaagttgcttgaaccatacgagattgccacggtggaagtgcccgaagaacacatgggggctgtggttgaacttcttgggagaaggcgtggacagatgatagatatgcaaggagttggggccgaaggtacaacacttctgaaatataagatcccaacacgtggccttcttggattgcggaatgcaatcttgacagcttctcgtggaacggctatcttgaacacaatatttgatagttatggaccttgggctggtgatat

SEQ ID NO: 236659 - DNA, 403 bp, Gossypium hirsutum
ttttacattcacttcaaccaaaaccacttctctctctctctctctcttcacatgactcgtccttttaggctccttggcgccgccaactcctcggccactactgagccgccacctgaacaatcggcaaccgtcgactccgacttcgtcgttatccttgcagccctcctatgtgcccttatttgcgtcctcggtctcattgctgtcgctcgttgcgcctggcttcgccgtctctccggtgcctttgctcccaatccctctgcttcatcccgtcccacccctcctgctaacaagggcctcaagaagaagatcctcaagtccctccctaaggctaccttctcacctgatttctccgccaaattctccgattgcgcgatttgcctcacggagttcgccgcaggggacg

SEQ ID NO: 236660 - DNA, 514 bp, Gossypium hirsutum
  unsure (1)..(514): unsure at all n locations
ttccacgcgtccgcccacgcgtccgtctaacttgggcattggatcccaaaaccggtgctagccttccaacatctactcggacagtgaaggctttaactgaggtcgaagcttttgccctcatagctgaggaattaaaatttgttgccggtcaattcaggcgtcttcacagtagacaggtacaacatacattccgttttcattcacagcagtggagaacctgggcagcttgctttatccaagctgcttggcggcgttattccaagaggaagatcatggaggagcttcgtcgtaaggaagaagaagaggaagcagcagcagcaggatcagatggaacccgcaataacagcggtggaggttcatacagcatcggtgctactttcttagcttccaagtttgctgcaaacgcacttcgtggcattcatcggaaccggaacgctaagagcgcaaaggagttggtgaaactacaaaagcctncggaacctgattttactgctgaagacggagattgatatgt

SEQ ID NO: 236661 - DNA, 510 bp, Gossypium hirsutum
ttttccacgcgtccgctagattcagctatgcttctctttggagggcattggtgttttctgatgctaatggaataaaggaacatagtgtgaaattgggtgctggggaggacctgtatgtgctatttgcagggattctaacgatgaggccctggaatcgggtcattgacccagctgtggatcatttggtcataaaaggcactgatagtgatcgttctgaactacagatgtatgcatctcaatatttccctcaaatatccgagcttctcagtcgactgccccgtgttattctattaatgttgaagacaaatgattgcttaagagcagtcaataactctctgttacagggttcttcactcgagacatttttgatcatcggaagagtttcttccgaagctgttgtcgaagcaaagatgatgcagatgaaatcattattttcccggattgatatctggttcgaggaattcctttttgaagctcgccttttagcactgcagatagctttttggcttt

SEQ ID NO: 236662 - DNA, 524 bp, Gossypium hirsutum
tttcacgcgtccgggaaatacaaaggacttcgctgctattctcaatttcaatttttatcctaaaacgcttagaaaaaaaaaaacaactaaaaagatggcgaggagaccggacgaggaatacgattacttgtttaaggtagtactaatcggcgattctggcgttggaaaatctaatttgctttctcgatttactcggaacgagttttgcttagaatctaaatctaccatcggcgtcgaattcgccacccgcactctccaagttgaagggaggactgtgaaagctcagatatgggacactgctggtcaggaacggtacagagcaataaccagtgcttactatagaggtgctcttggagctcttctggtgtacgatgttaccaagccaacgacttttgaaaatgtgagccgatggctgaaagaactcagggaccatgcggattctaacattgtaattatgatgattgggaacaagactgatctgaagcatcttcgagcagttgccacagaggatggtcaaagctatg

SEQ ID NO: 236663 - DNA, 358 bp, Gossypium hirsutum
tgttttcgcgtccgcagttccttgttaccttcaaaaaaaaaaaaaaaaatgaaagcgtctttgaaaggaaggtacgccaatgaaaagaacaccgcgggcgctacattggtcgtcaacgccggcgatgttaagctacgcgcttccatgagtgacgccactttcgtcgacggtcctagcctcaacggcttgactttagccgttgaaaaacccggttttttcatcgtcgactatgacgtccccaaaaaggattttcggtttcagtttatgaacacagttagggttgcggagatgccgttggagcttacttacagtcacagcagaggggataaccggacggcagtggagggggcgtttatgt

SEQ ID NO: 236664 - DNA, 495 bp, Gossypium hirsutum
  unsure (1)..(495): unsure at all n locations
gtgtttttaggggccaacatgttggtggaagaggacacaagatgcagaagtcagaacccaaatttattcaggtgttattgctcttggtccaacatggagcgaatggtctaaatctgttagaggcacagcatgttattcttgtcgaaccactactaaatcctgcagtagaagcacaagcaatcagcagggtacatcgaatcgggcaggataagaggacactttttcatcgttttatagttaaaaacaccgtcgaagagagcatatataaactcaacagaagcaggaactcaagtggctttgttgggaacaccaagaatcaagaccagcctgttttgacacttaaagatgttgaatccctcttcgccacagcaccatccagagcacagaaaaccgatgaagataaggccgaaagtgaaaatctgagatacctgcctccttccatggctgctgctatagctgctgagaggagactcanggaaaatctaactgcatgac

SEQ ID NO: 236665 - DNA, 255 bp, Gossypium hirsutum
tttccctgtgcaaacccatggaaaatgggcgacatgatgggaaaagcaggttcataagagttgaggttgtcacagcatctctcagcttcctaactaatttcgaggacgtctataaattgtgggctttcgtggcaaagttccttaacccgtcattcatcagagagggtacacttccaaccgtggccgaagaagaaccagagacataatgaatcaagcaattcaaaagccagtcgtgaaacaatccaggagtctgac

SEQ ID NO: 236666 - DNA, 541 bp, Gossypium hirsutum
ttcacgcgtccgggaaagcatttcttgtcaaatattcgaactttccgggatcaaatgttgcaagggcagggagctagacatgtatattcttctgatagattgtggcgaggtagcccgctgagagcctacagtgatagaaatgactttttatcaaaggaaatgcagcagaatattccaggcggctacaatatggattctttatggctaattgatgctaatcaaaagaatcacccatatcttctagattggtactatacctctcgagcgcaacagatgcctagttatagaagagacactgcagcaaggccatttgaaccagctgaggaacagcataagaattactggggtccgatcaacacaacgcatgatgaagcaagagataaagaataccggccacggcttaaaatgtcttaagcccttattgattgattgattgaacatttcaaactatcctattcctatgaactgtagaattcttggatgattgtgatttacttcctgtgttggtaactaaaaacggaagatgatttcttatgatatt

SEQ ID NO: 236667 - DNA, 536 bp, Gossypium hirsutum
gtagttgattgcatatgcacgttccaacaataaggttgttattggcccatctaccgtcggaggaattcaggctggagcttttaagattggtgacactgctggaacaattgacaacattgttcaatgcaagctgtacaggcctggatctgttggctttgtctccaaatctggtggtatgtcaaatgaaatgtacaacacaattgcccgtgttacagatggaatctatgaaggtattgcaattggaggagatgtcttccctggctccactttatctgaccatattttgcgatttaacaatattccacaggtaaagatgatggttgtgctcggagagcttggtggacgagatgagtattccttggttgaagccctgaaacagggaaaagtgaacaagccagtggttgcttgggtcagtggaacttgtgcacgactcttcaagtcagaagtacagtttggtcatgctggagctaagagtggtggtgagatggagtctgcccaggcaaagaatcaggcactaagggatgctggagctgtag

SEQ ID NO: 236668 - DNA, 510 bp, Gossypium hirsutum
ttcacgcgtccgcccacgcgtccgggatcttcagcttgactatgttgatttataccttatccattggcccgttcggatgaagaaaggatcagctggctttaagcctgaaaactttattcagccggacataccttgcacgtggcgagcaatggaagcactctatgactctggtaaagctcgggctcttggtgttagtaatttctcttcaaacaaattgggggatctgcttgctgtggcacgtgttcctcctgctgtcaaccaggttgagtgtcatccttcatggcagcaggctaagctacgtgaattttgcaaatccaagggagttcacttatcgggttattctcccctgggttctccgggcacaacatggctcaagagtgatgttcttaagcacccaattctaaatatggttgcacagaaattaggcaaaactcctgcacaagttgcactgcgctggggcctgcaaatgggtcatagtgtgcttccaaagagcacacatgatgagaggat

SEQ ID NO: 236669 - DNA, 510 bp, Gossypium hirsutum
tttgaatctctgcaaaattcatgggcacttggaacttggggatctttgtgctgagctggtgaatcagctagatgcctctcgtttgaatgaccaatctaaagcaggtctcatacctttgaaagattcagaccttaaaaagaatgagaagaagaaattggcaagtcaaagtcctcttgaagtcagtagcagggtcaacgagtatcgggcaggagatacatcacatcctgagaatgatagaatctatgctctgcttagacgtttgaaagaacacatgaaagaagctggttatgttcccgaaacaagattttgtttgcacgatatagatcaggaaagtaaggaagaagctcttcttgctcatagtgagagacttgctcttgctaatggtctcctcaccagtccagctcgtggacagattcgtattatcaagaaccttcgtgtttgtggtgattgtcatgctgcatttaagatcatgtcaaagattggtggcagagagatcataatgcgagatgc

SEQ ID NO: 236670 - DNA, 483 bp, Gossypium hirsutum
  unsure (1)..(483): unsure at all n locations
gtccgatgatgcaacaacttttatctaaggagattcttcatgaacctatgaaggaaattggagaaagatacccacaatggctagaagagcacaaagctaatttgagtaaagaagaatatgaacgttactcccgccaatatgagctgataaaggagcttaatggagtttatgaaaatgatcctaataactttaccaagattgttgacctgatgcaaaaaatgcaagagtgcggtcagccaccaaatgatattgtgcaagagcttgctcctgaatttgatttatccaatcttggccagctatccccagagattctcaattcacagcagaactgttgtataatgtgaggcaatatcctgttgcagactatgtttctttctatttaatagatattctttctaagtttttgggaaataaagtatctttccttcaactttntaagttaattgatccttcaagaaatgacatgctcaatatttttatcct

SEQ ID NO: 236671 - DNA, 399 bp, Gossypium hirsutum
cttttctcggatattaaaatctcttcccccattgccctttccgctctccaaaactcttacccgtcttctgccggatctttccgacccgaacttattgaacccgtttttaaacccatgttgaatttcctccgccaaaccgggtctttccttatggtcaatgcttatcctttctttgcttatgagtcaaacacggacgtcatctccttggactacgctttgtttagagagaatccgggtgtggtggatgcgggtaacgggttgaggtattttagtcttttcgacgctcaaatcgatgccgttttcgcggcaatgtctgctttgaaatatgatgatattcgattggttgtgacggaaacgggttggccctcaaagggggatgagaatgagatcggtgcttgt

SEQ ID NO: 236672 - DNA, 381 bp, Gossypium hirsutum
cctcacgcgtccgggcaactgtgactgcgctgaccgcagccaatgcacgaagggaaacagcaacaccatgatcattgagactgagaagagctacatcaacactgctgtgatggatgctccagctgagaacgatggcaagtgcaagtgcggtactggctgcagctgcacagactgcacctgtggccactaagccaacatacaatggtcatgcttcaggtcatggcatatatagggatctaaataatgaatttaaggttgaataatttgtctgttgtagtttgtgtggtgacttatatctgtcagttaacctttgtatcctttactatgatgtaatggctatgcttatggccttatctggttaatgaagtatccttactatat

SEQ ID NO: 236673 - DNA, 413 bp, Gossypium hirsutum
ttgttccatctcactgggataagatctcccaaggaggcttgaaacgtatcgaggagaagtatacatggaagatttactcggagagactattgaccctgaccggagtgtatggattctggaagcatgtttccaaccttgaacgccgtgagagtcgtcgttaccttgagatgttttatgctcttaagtaccgcaagctggctgaatcagttccattggcagaggagtaaatttaagctgttaaataacattgggccggtttttcttggagaataatattctgttttgtaatttcaattggagaagctcttttgtatttcatcttgtcttttccttttccttttttcgccggcattgtttgaacatggggttgtgcgcccgtcaattccagttaaatatggtgacttttgtttttc

SEQ ID NO: 236674 - DNA, 436 bp, Gossypium hirsutum
agcattatgaaatctcccgaactgatagagttgggtttgggcttggaggcctcgaacaagccattcatttggatcttaagaggaaataatgacgcatcgaaccaggtgacgaagtggattgaggaggatggatttgaggaaagaataaaaggaagaggatttgtcgttgtgggatgggctccccaagtgctcattttatcacatcctgcaataggagggttcctaactcactgtggatggaattcaacaatcgaaggcatttctgctggcgttccattattaacattgccactttttgcagaccagtttaccaatgagagacttgtagtacaaatactaaaaaccggagtgagcgttggggccgatgaacctacggcctggggagaggaaaagtctgggttcaagttgacgaaagaacatgttaaaaacgcaatag

SEQ ID NO: 236675 - DNA, 267 bp, Gossypium hirsutum
gttgattccaccagaccagcagaggttgatatttgctgggaagcagttggaggatggtcgaactctagctgactacaatatccagaaggagtccacactgcatcttgtccttcgcctccgtggtggtttctaatcgggtgtctattttggttgatttcgcaattttcttttctatgaactgtttgtgttttaaagtgaactatgctttgcggtgcagaaatggtcagtgaaactatatgaataaagttttatgtttatatttaacag

SEQ ID NO: 236676 - DNA, 444 bp, Gossypium hirsutum
cccacgcgtccgatttttcggatttttgcttaaggtggaagctccctctgcctatgtctgtgctgatagcaagatatacgatgctactgaatggtatatttgtcagggaatgagatgtccacctaacacacataagccaagttttcatgtgaacactagtgtgacatccaagcatgctactggcaagggatcaagttcaggacagagaggtggcacaatgccaactcctcctaatctggaagaaacgatgaccgaagaagaattcttagcgtggttacagaatgcagtacaaggaggcatgtttgacaactttaacggtagcagcacctctgctgaaaatccatctacgaaagcagaaagcagctcgaagagcagcagcagcggtagtggaagcaagagaaagaaaaagggtaagaaacaatggtaagctgcagtcatcatgat

SEQ ID NO: 236677 - DNA, 378 bp, Gossypium hirsutum
tcgattcttggcacccgaaatcattaaaggtgaaggccacggaagtgccgtagattggtggacatttgggatctttttgtacgaacttttgtttggtaaaaccccattcaagggggccgggaaccgtgcaactctatttaatgtcgttggccagccattaagatttcctgagtatcctagtgtgagctttgctgctaaggacttgatcagaggtttactcgtaaaggaaccgcagcatcggcttgcctataggcgtggcgcaactgaaattaaacagcatccattctttcaaagtgtgaattgggctctcattcgttgtgcaaatccacccgatgtgccgaagcaagttgtgatggactgttctgctggaacaaactc

SEQ ID NO: 236678 - DNA, 481 bp, Gossypium hirsutum
  unsure (1)..(481): unsure at all n locations
cttacttgtccggaagtgtgatgttgatatcaggaaggatctctatggtaacattgtgctcagtggtggttcaactatgttccctggtattgctgaccgaatgagcaaggagatcactgcccttgctcctagcagcatgaagattaaggtagttgcaccaccagagagaaagtacagtgtctggattggaggatctatcttggcatcactcagcaccttccagcagatgtggatttccaagggcgagtatgatgagtccggtccatccattgtccacaggaagtgcttctaagttttataagttctttgatggtgagttacatttgcatttacttggctttatcgtgacctgtgtcaaaattgaaatcaaggtccggattacatggagaaagtgttgaacgagggatcactgaaggaggatgtactttgatcttgatgtactattatggctntcatttgcttccacaaccattgagatgat

SEQ ID NO: 236679 - DNA, 473 bp, Gossypium hirsutum
gatgcatatcagataaccctactggtggagggatataccttgacacttcggttatgaattcggactataggtctttcattgagattgtgtttcagaatgatgaggatattgtccagagctggcatctcgacggctactctttcttcgttgttggtatggacggagggcaatggacggctgctagtcggaacggatacaacctccgtgatgccgtttcacggtgtaccactcaggtgtaccccaagtcatggactgccatttatgtggcgcttgacaatgttggaatgtggaacttaaggtccgagtattgggcgagacagtacctgggacaacagttttatttgcgtgtcttccaacgtcaacttcactaagggatgaatacccgatccccaagaacgcactactctgcggcagagcaagcggcagaagaacccgtcctctttaaagccacccatacaataaatgatccgtag

SEQ ID NO: 236680 - DNA, 455 bp, Gossypium hirsutum
  unsure (1)..(455): unsure at all n locations
attgatagtcccctgggtttggttaatgacccttcggtggtggagccacttggaaactgcggtcgtcaggttttgctctggtggcttcgagttgaagctcgtgctgatagcgaatttactgccagatggataattgacccacctctggagatcacggtcccatcaaaacgcactccatggccagatgctcccccggaactccctgctaatgaaaaaccagctgtgggcattcaagatccaatagtgaagcatagcacaaagaggacatccagatcaaaacatcgaagtaaaagaaagcatgaaccaaaaactgacacacaggtttcgacaaggcattctgaacaaaactaaaatctttaccccaccacctatggaactgctgcaccatgagattggaccaaatagggggcaaatgtagatggtgttaccagtnaatatggagaagcacctctcac

SEQ ID NO: 236681 - DNA, 305 bp, Gossypium hirsutum
gctccaacttatcgccagaaattgtcgtaatttggtatctgtgaaaattagtgattgtgaaattttagatctcgtcggtttctttcatgctgctgctgttttagaagaatccaacggcggacctttctacgaccaacctgatgggtatgctgctgtaacattcccctcgaggttatgccgtttgggtttaacctacatggggaagaatgaaatgccaattgtgtttccttttgcacccgttgtttaaagaattggatctcctttatgcattactcgacacagaagatcactgcttgataatacaa

SEQ ID NO: 236682 - DNA, 489 bp, Gossypium hirsutum
ttcgatttttggaaggagagatattggtccttataagcatttgtttccaattgatgctggctcaatcaatctgaatcgaacttcaaattctttatttcttctgcgaaggctcaaactactccttggaagacttgccaccaccaacttgcagaacctaaatcatcaggagaagcttgccttttggataaatatctacaattcctgcatgatgaatgcattcttagaacatggagtacctgagagtccggagatggttgtggaattgatgagaaaggcaactataaatgttgggcgacgcctgctaaatgcaataactattgaacatttcattctcagattgccttaccactccaaatttaccttttaaagggtgccaagaacgatgaaatgactgccaggagcatgttcggattggaactatctgaaccattggtgacatttgccctctcatgtggaagctggtcctctctgctgtgcgagtatatactg

SEQ ID NO: 236683 - DNA, 466 bp, Gossypium hirsutum
ggttattcagctgtcaaatggaattatcattgaagagttagaaatggggaaaccagatgggaaaatagcttctcttggtaaaaaggttcgtgtccattacactggaaaattgaaggagagtgggcaagtatttgattcaagtgttggcagagcacacttaaagtttcgtctaggtgggaaaaaagttcaagaactatggaatgtcggccttgatggcatgcgaattggtggcaaacgtagactcattgtccctccttcagtgagttatacaaatgaaggaacaagtgagaatattccaccaaactcctggctggtttttgatgttgaattgattaaagtcaagtaatttcatttttgatcgaaaagtcaggtacttggttggcatcatgcaccagttttgtttaggcatacttgccttaattcttcaaagaattacaagtgcaatagtaaatgaggttggactttg

SEQ ID NO: 236684 - DNA, 478 bp, Gossypium hirsutum
tttataaaacactctccctcctcaaatactgaattcaacttccaatggcgtctcagcccctaaccttcctattcttactcctcgtcaccacctccgttctcgaatcttcggcttcttttgaacccaatatccgcctcccgacaacggcaacgagcgttcctcgatccaacattgacgacgacctttactgtgccagctggcagttagccgtcgagaccaataacgcaggaagttgggccgcaatcccctcccgctgcgttcctttcgtcagagcttatatgaccggtcaacgctacgcttccgactgcgaggtcgtcgctaattactccctcgcttacgcttccaccgtccagatcgcatccgacggcaaagacgtctgggtctttgacgtcgacgagactttgttgaccaatttaccctactatcgggatcgcgggttcggatcagaaatttttaacgagagctgttgggatgaatg

SEQ ID NO: 236685 - DNA, 411 bp, Gossypium hirsutum
cccactcgtacgcccacgcgtccgcccacgcgtgcgcccacgcgtacgctcagggaaggggcagtgcaagtcaagcgaccatgtgcgcaattgcattgctattgtgcttaatggttagcctggaaaccattgatgcagctacttacactgtcggtggctctaatggttggacttttaacacggctacttggccaaaagggaagcggttcagggccggcgacgtgctagtgttcaactacaatgggactatccacaatgtggtagcagtgaacagaggagggtacactagttgtaccgcacctgcaggtgcaaaagtgtacaactcagggaaagataagataaaactggccaagggactcaacttctttatgtgcaacactgctggtcactgtgagtctggaatgaagattg

SEQ ID NO: 236686 - DNA, 427 bp, Gossypium hirsutum
ggcggacgcacgtggtggaaacgtgaaggtgcacgtgaggtggtattatcggccggaggagtcgatcggagggaggagacagttccatggttctaaggaggttttcttgtctgatcattacgatgtgcaaagcgctgatacgatcgaagcgaagtgtacggtccatagcttcaaaagctatacaaagcttgacgccgttggaaacgacgatttcttctgtcgtttcgaatacaattccgccaccggtgctttcaaccccgatcgcgtcgccgtttattgcaaatgtgagatgccttacaatcctgatgatcttatggttcagtgtgaaggttgcagtgactggtttcaccctgcttgtatagaaatgacagcagaagaggtgaaattactcgatcactatttttgtgaaacttgtttatccgaagat

SEQ ID NO: 236687 - DNA, 482 bp, Gossypium hirsutum
cccacgcgtccggggatctgtgtcgaggaagaagaggtggaagagtgtgggataggcggtggtgggggacaaatcttcggcggaggaagaggaggtggtggttcggacagtgaggataacgaatggggcttttgcgattcgaaaaacggaaatgatagtaccgatttgtattatcagaaaatgatcgaggctaatcctggaaatacacttctcctcggcaattacgctaaatttttaaaggaggtacgaggggacttcgtgaaagccgaggaatattgtgggagggcaatattgataaatccgaatgatgggaatattttgtctatgtacgccgagttaatatggcaaactcacaaagatgatcggagagctgaagcttacttcgatcaagctattaaatccgcccctgacgactgttttgtgctagcatcatatgcacgatttctttgggatgctgaagaagaagaagaagaagaagaagt

SEQ ID NO: 236688 - DNA, 480 bp, Gossypium hirsutum
cctacgcgtccgtaaaaagaagagagcaggcaattaaagcaggggaagagagcaatgaggacttgttggacatacttgtggaatccaatatcagagaaatggaagcaaagaaaaaggggatgagcattgaggatgtgattgaggaatgcaagctgttttactttgctggccaggagaccacttcggtcttactggtgtggactatggttttattagcaaggtatcccgattggcaaagtaaagcaagagaggaggttttgcatgttttgggtgacagtaaacctgatgccgatggccttaatcgcctcaaagttgtaacaatgatattgtacgaggttctaaggctgtacccatcagcgactgagctaggacgttccgttccaaaagaaataaaactgggaaatttgttgttaccagcaggaacagaaatttcggttccgatcctgctgatccaccatgacaaagatctttggggcgatg

SEQ ID NO: 236689 - DNA, 436 bp, Gossypium hirsutum
cttgaagctctcccttttcttttcacaaattttattttgctttcatcagaaatatctgcccatggagaacggagaaatcccagaaaacgccaatgaacattgtccgggtcctcaatcggagtcagctggtaaatccgatgcatgccaaggttgccctaatcaagaagtttgtgccaccgcccctaagggccctgacccggacttggttgcaattgcagagagaatggctactgttaagcataagatactggttttatcggggaagggaggggttggcaaaagcactttctctgcccaactctcatttgcactagcagctaaggatttccaggtgggtctactggacattgatatttgtggtccaagcattccgaaaatgcttggcctagaaggtcaagacattcaccaaagtaaccttggctggtctcctgtttat

SEQ ID NO: 236690 - DNA, 469 bp, Gossypium hirsutum
aaataatcgagtcactcgagtagatttaggtaattctaacctgtctggacatttggtacctgagcttgggaagcttgagcatttgcagtatctggagctttacaaaaataagatccagggaaccatcccaactgaacttgggaacttgaagagcctcattagtttggacctatataacaacaacatctcagggaccattcctccttcactagggaaattgaagtctcttgtatttttacggcttaatgacaacaaattaactggaccaatccctagggaacttgccggtatttcaagcctcaaagttgttgatgtctcaaacaatgacttgtgtggaacaattcctaccagtggaccatttgagcacattcctttgaacaactttgagaaaaaccctcgactggaaggtcctgagctgctggggcttgcaagctatgacacaaactgctcgtaaaggacatgttgacgc

SEQ ID NO: 236691 - DNA, 469 bp, Gossypium hirsutum
aagtgtatgagcttaaatgggatgtcattgtggttgatggcccaatcggggactcgcccgaagcaccgggcaggatgtcgactatctacaccgctagcatgttagcgagagccacagccaggaatatgactgatgtcatggtgcacgacgttcatcggacaatcgagaaatggttttcttgggagttcttgtgcgaagagaatttggtttctgccaaaggaaaattatggaactttaggatctcctccgatcaatccaattctacacagttttgctcttccgagactgttcatatacggtaatatccttattttgttttgcggcaaaagaacaaaaacatttcctgcatcgttaatgctggaaattagggcttcaacaaaggcatatgatatattaattttcagcgttagagagtgccatgtaactaaacttgtccatacaggtcgagtcggattgcaattttatttta

SEQ ID NO: 236692 - DNA, 467 bp, Gossypium hirsutum
tcgaacccaaccgccaaggcatttcgcgcatgccggatccttcgatcatcaaacaaataaaacgctgcgtattaatccccgttatggctcgttcccgggtcggccacttcgtcgaagcccagattctcgaacgagtaggagtcgattacatcgatgaaagcgaggttttagcaatagccgatgaagataatttcattaacaagcataatttcggatgccctttcgtttgcggctgcaagaacctaggggatgcgttaaggagagtgagggaaggagctgccatgattagaacgcagggggacttgttggggaccggtaacattgctgaaacggttaaaaacgtcaggtctgtgatgggtgaaatcaggattctaaataacatggatgaagatgaagttttcgcgttttcgaaggaaattgctgccccttatgatctggttgcccaaaccaagcaaatggggagacta

SEQ ID NO: 236693 - DNA, 428 bp, Gossypium hirsutum
cccacgcgtccgcccacgcgtccgcccacgcgtccgcccacgcgtccgcttttgcaccatccaagccagctgcaccatctattacatctgctccaacaccctatgaactatcaggactcggagttccagaagatgggcagaaaatgatcagtgagctcatgtcaatatatgataacaacattcaaggcaacaaaaacatgaatcccggtaacaatccaggtactgaaggtcaaaacctcctccagtcgaaaagccaacctcaacaagatgaattcttcaacggtcatcaaggagtcatgatggaggggaatttcttcgaggagtccagcatgcctcgtaatcatcagatgtttatgcaaggggaaggtcaatttgaccgttttaagggtttgaattctccgttcgaggctagccacaataacaacagc

SEQ ID NO: 236694 - DNA, 475 bp, Gossypium hirsutum
  unsure (1)..(475): unsure at all n locations
caaaaaacccttcttttttccctcatcaatccatcatgggaggaggaaatggccaaaaatccaagatggcccgtgagaagaacttggaaaagcaaaaagctgctgccaaaggaagccagcttgagtctaacaagaaggccatgtccatccagtgcaaggtgtgtatgcaaacattcatgtgcaccacaacggaagtgaaatgtcgggagcacgctgaggcgaagcatccaaagtccgacgtgtacacgtgttttcctcatcttaaaaaataaacatcaaaactctacagaaagaacgnggatgtcaagacagcttgtaatgcatatcatctatctatgttgtatcttggtactctacaatttatcttaaattctctttcacaagcctgtaaaaaactcactagcntgatttactcgtgcaaactaaatgtttgtgttcaatcatggatttgtatgataacagagctttgaaggag

SEQ ID NO: 236695 - DNA, 480 bp, Gossypium hirsutum
cccacgcgtccggcagttaatcgctacgtacaacccgcaatcgcgcggtagctacgttaatggctatcgcattggggtcaaccgggccgacttagcccgtgctttgaatttatctgtgaagaaggataaggataaggatagcatccttgatattgaagagtcaaaggaatcggtaggctttcttgaggaatttgtgtcaaattgggtgcttttgcacgaggatacgtggatgatgccagcggaggtgttgaactggactaaaatgattaaagaaggccatttcgagaagatagattgggctggtttgatttggtttatggtggagaaagagctcacgtctgcccctaaattagggaattgttactatgcctcgcacatgcagtgtttgataaaataccagaaagaagagctgctgctggagaaaccagaaaaggatgcttatgaggccaaggaggaagaggaagagcataacgttcctga

SEQ ID NO: 236696 - DNA, 423 bp, Gossypium hirsutum
gcttcatctacatatctcgtaagtgatagaccctttattgattggttatcagagtctgatcctactgtctcagcattcgttccttctcagccttcaaaacctaagctgcatgtaagctccgacaacaacaacaattctcctgctttaaagtcttcttcatccgctcggtctcgcgaccaggtggtggttttgagggtggcaatccattgcaaaggatgtgaaggaaaattaagaaaacatatctccaaaatggaaggagtgaaatcatttagtatagatttaccgacaaagaatgtgacagtcattggtgacgtgactccctcaagcgtgttagcaagcgtgtcgagggtgaagagtgctcaactatggccatctgcagcaccatctcaatcttctccaatggtcaaaatgaattactgatgg

SEQ ID NO: 236697 - DNA, 461 bp, Gossypium hirsutum
ctctaattgaaccagaggcgacggtggaggatgattatagtgatgaagaaattgatgtggatgaacttgagaggaggatatggagggacaaaatgcgtctcaaacggcttaaagagcagaataagtgcaaggaggggattgatattgctaaacagcgcctgtcacaagaacaggcgaggagaaagatgtgggggttctcacggcagaataagtgcaaggaggggattgatattgctaaacagcgccgatcacaagaacaggcgaggagaaagaagatgtgggggttcacacggctgtgatcaagcatatatgctcgttttctttagttttggaatgggtcagaagatttctttctgaccattttcaaattttttgatgttgtaaaactatataacatatggattatgatgtagaattttattttaaccttttcttaatataagttaattatgtttatgtag

SEQ ID NO: 236698 - DNA, 347 bp, Gossypium hirsutum
ttgtcactgtaacaggatggccttggcaaggtggacccaatgaacctgatgccactgttgaaaatgctgggaccttcattaattatttgattcggcgagtttccaatgattcaggccctcccagtcggccaaatattcccatcaacacatacatttacgaattgtttaatgaagacaagagacctgggcctgtctctgagaagaattggggggtgctttatacgaatggcactgctgtttttcctttgagtttgagtggttctagtcagattatgggaaatgctacgacagttttctgtgttgcaaaagacgatgccagtgaaggtaagttgcaagatgggcttaac

SEQ ID NO: 236699 - DNA, 380 bp, Gossypium hirsutum
cccacgcgtccgcccacgcgtccgtttaggttttgttcgaagttatttaaattttaggaggtaaagttcgagaacaaggatctgaagcacctaggcttcgtaagggtggttgcgatccacgccttggtttgcgtgtcgaatctttacgagtacgctaaacagaactccggtccgttgagatccaccgtcgaaggcgccgttacgaccgttgttggtcccgtctacgagaaattcaaggatgttcctgatcatcttcttcaatttcttgataagaaggtagatgaggctttacacaaaattgatgatcaccttccagccaaagcttagcatgcaattaaccaagcccaatacttggttcacaagacagcccaacatgcttg

SEQ ID NO: 236700 - DNA, 422 bp, Gossypium hirsutum
ttccactcacttgccaaagcgaacagataatgagataaaaaactactggaatactcatcttaagaaaaggttagccaaattggggattgatccgatcactcacaagccaaaatctgatgctttactctccattgattctcaatccaagagtgcagcaaaccttagccatatggctcagtgggaaagtgctaggcttgaagctgaagctagattggttcgagaatcaaagctacgttcacattcacattcatttcaacaccgcctgactcgtccaccaacagcagcttttgcttcttcagccggtgagcttgtgaataagacagcttggaacagtactgccgggtggagtaaatccagtgaagttaataatggtgttgtaaacaatggatttggtgacctcgaatctcccaaatcaacactta

SEQ ID NO: 236701 - DNA, 290 bp, Gossypium hirsutum
gcctaggattgtgtacatgctggctattcgtcaaacacggagccagggatgtgattgcggctatgcaagacaaacagtgccaatccctcaggcaagagctgggtgcggatagcaccagctatgtacactgtgatgtaccatgtgtatgcgatgtcggaaatgccgtatactgagccgtgtccatgtttggaaaactcgatatcatgttcaacaatgcaggcctcattggtgacggtgaagtcagagtgacagacgccagcactgacaacttcaagagagtgttcgatata

SEQ ID NO: 236702 - DNA, 408 bp, Gossypium hirsutum
  unsure (1)..(408): unsure at all n locations
attgcaatagaggcagctgatatagttctgctgaagagtaacttagaggatgtgatcacagccatacacctttccaggaaaacattttctcgtattcgccttaactatatttgggcattggggtataatatacttgggattccaatagctgcaggggctctatttccatcaactggatttcgcttacctccatggattgctggagctgccatggctgcttcctctgttagtgttgtttgctgctcactcttgttaaagaattacgagagacccaagaagctggaaaaccttgagattggtggaatacagattgagtaatagatgatgggagttctatatatccacatatatatctaagcaggnttgntatatatgtatatgtataggctagggatgtgaaatttggca

SEQ ID NO: 236703 - DNA, 336 bp, Gossypium hirsutum
acctcctctttctgagaaataccaatacgacagcaattaccaacctccgcctgagaaaatcgccgaggcacacaaggctgctcggtttgcggttggggccttagcatttgatgaagtgtcgacggcagtcgagcacttaaagaaatcacttgaattgctgactaatccatcggccagtcattaagtgttacccatttctggtgttttgaattatatgggttgatttgtgaagggtttttatttatttaaatagagtttggagattatgaacaactgttacttgtcttgtaattttcattcgagaatcagatcatgtttcatcatgtttttttattt

SEQ ID NO: 236704 - DNA, 375 bp, Gossypium hirsutum
tttctcgcgtccggttcgagtgtgtcccaaaggcagacgctgctttctttttgtgggtgttgcatgactgggatgatgaggaatgcatacaaatcctaaagaaatgtagagaagccatcccacaagacaaagggaaggtcataatcgttgaagctgtgcttgaagaagataaaaatgacaagctagaatttgtggggttgatgttagacatggtgatgatggcacatactaaaaaaggcaaagaaaggactttaaaggaatggaagtatgttcttggagaggctggattcaccagaatcaatgtaaaacccattcatgctgttcaatttatcattgaagcttatatttagaaattccaccttgcctgctttcttt

SEQ ID NO: 236705 - DNA, 420 bp, Gossypium hirsutum
ttaactaagacgtttcactgggatcatggtttatcgggttggatgtcgatcatatagatgaccgcagactctgctgtggtaccacagattgcgaatggaaggctcaagcgggcaacatctgtgttgcttcatttgactggacctgcagcggtatttgcaggtcagttgacaggatgaaggatgttcaccggcggtgcggagaagggaataatgctttacggactgcaactttctaatgaagcccagttcctccaacctcaggagggaagcaagtgaaacaaaacgagcttggtttttgggcattgagagttgagaaaaaaaaaagggactgtaataactgtagaaacatgaatgggttgaggggaaaagaagaggttgaagctgctgaatgtctgctccattttatatagggagaaagag

SEQ ID NO: 236706 - DNA, 430 bp, Gossypium hirsutum
tcccacgcgtccggaacaaggtccatacccttttgaacaagcattcgagtccttcatcaatggcgtttcacacttcggtccatttttcgaccacgttttacagtactgggaccaaagcttgaaatcccccaacaagatactgttcttaaagtacgaagacctcaaaaaggaccccaaaggtgaggttaagaaactggcttcgttccttggaaaaccattcaataatgagaaagaggttgaagacgtaatatggaggtgcagcttggagaggctgaagaacttggaggtgaacaagaatgggatcgacccttgggttgggatgcaaaacagtgcattcttcaggtctggaattgttggagattggaaaaacattatgagtaaagagttgagtgagcgtttggatcaaatcacgaggcagaaatttaaggat

SEQ ID NO: 236707 - DNA, 447 bp, Gossypium hirsutum
ttgttggacagggcgtgccggtaaaacaggattggcaacagctttctttaacgaaggcaatttgtcaatggcaaggccgctagctgagctaatgcaagaagcaaatcaagaggtacctgcatggctcacccgatatgcatcccgggctccttatggtggtaataaaaaccgacgatatggaggaggaggagggcgttttggtgggcgtgatttcagaagggagggttcagtcggtaggaacctagatcactacggcggaggtaatagtggcactgcatacggagttcccgggaattatggtggaggatatgctccggggatgacaagtgcttgggattagatcccactttatactggattatatattttgtatttcgctgagtatatatatttgtcgtcagattttcaaggatcattctctgtttttcagtatttagcatttgcatc

SEQ ID NO: 236708 - DNA, 446 bp, Gossypium hirsutum
tggcatttttaaggttgctgacccctgccactgccatagccgctgcctctgcctctgctctgcctgccgcctttgttttctcttcttcttcttcttcttcctcctcctcttctcgcaattcttctcatttccccaacgcaaaaagcctccctttcctctcttcaccacccaatcgcttaggccttataaggaacttcgcgacctctcccattgctcttaacatggattcaccctcatctaatcacaacccatctcaggaaaatgggtccttgcctgaccttcttactgagtatatggtggatatgaagtgtgaaggttgtgttactgcggtcaagaataagctacaaacagttgatggagtcaagagtgtggaagttgacttgagcaatcaagtggtgagagtacttggtaattcgcctgtgaaaactatgaatgaagcattggag

SEQ ID NO: 236709 - DNA, 312 bp, Gossypium hirsutum
tttcacgcgtccgcccacgcgttcgggccgaagagactaagaaccctgctcacgatatccctattggtcttgatggatccatggtaataaccacagctgcatattgttcgcttgctgtagcattgtgcttaatgcaaccgttccgtgagattaatgcggatgccccattttcagtagcatttgaagctgctgggatgtcatgggctaaatacattgttgctgccggtgcattgaaaggcatgacaactgttttactcgatggtgccgttggtcaagcacgatatctcacacatattggacgaacccacatga

SEQ ID NO: 236710 - DNA, 398 bp, Gossypium hirsutum
ttatctttcttggttctaaacggaaccaacaaggatttaatgcaaaaagcactccaaaaatcctttcttttcatgatcttcttgatatagcgggtaacgtaacagagtttccctcggtttccgtcaagcagaccgatacagcagtgctgctttactcttcggggacgacgggtgtcagtaaaggtgttgttctgacacatgggaatttcattgcatcatctttgatggtgacaaaggatcaagaacttgcaggggatatccaccgggtttacttgtgcatcttgcctatgtttcatgtgtttggattggctgtcatggtgtacgcgcaggtacagatgggaaatgctttggtgtcaatggcgaagttcgattttgagatgtttttgaggaatgtggag

SEQ ID NO: 236711 - DNA, 352 bp, Gossypium hirsutum
ttagaacatttgaaagctgttcaactgatacatttcaaataaagggtccttgcacataccagatttgctatctttacctctacaggagtggatatgatggttggaagccagagagcgtgactgtgtacggatattataccaaagctgccacatttaattacaatgtctttattcctaatggggtttggtatggctttgatttctgttatggaaggggttccgcatctgcatgaacaatgtagcaaattgttgggggggggttcagtttgtgaatctttattcagggatttggagaaataagcttcttgttttaacattttgggtaataatgagtaatgacttgttttgtctg

SEQ ID NO: 236712 - DNA, 375 bp, Gossypium hirsutum
ttaacgtcgtaaggggattgcttggacagaggatgagcacaggttatttcttcttggtttggaaaaatatgggaaaggtgactggcgaagcatatcccggaactttgtggtcacaagaacgccaacacaagttgcaagtcacgcgcaaaaatatttcattcgcttaaactccattaacaaagataggaggcgatctagcatccatgatattactagcgtgggcaatggagagattctagcaacccaaggaccaatcaccggtgaaccgaatggtgcggcaactggaggttcctccgcaaaatcagccaaacaaccctctcagcttcctgctgcaccaccaggtgttagcatgtattcttctccaactatagggca

SEQ ID NO: 236713 - DNA, 510 bp, Gossypium hirsutum
agaacgaggcgcttaggttgtatgcggcccatgtaactcaacttcgcaataaaggattgcctacgattccgactacgttaaagacagagaaggcatgcaatcccttccttcggacgtcaagtacagaaatccggcaggcattagatattccagccaccatgaatgaagcagaagccttgggtgtcatccgtcgagcaaaggacaatttctaggattacttttggggttaatacaaaaattggtccccgaatgcaatccggtaaatccgatccctcaacatatattattttagctacgaatgagttagttctgttacataaaatactgatgtgacataattgatcaaatattaaattgtgattttagtattagttgatcatgtcacgttagtattttatgttttgtttttaagtgtatagtttagggatcaatttacggaataccccttagttatactcggttcctctttgtgtataggttatgtaataatgtttagcatgtcaatacact

SEQ ID NO: 236714 - DNA, 378 bp, Gossypium hirsutum
ttctttggcttcattaattggctgcaaagctctcatctctctttgaccatgtcgtcgattaaaaccattaaggtcagcaatgtttctttacaagctactgagcgagacatcaatgagttcttttccttttctggtgatatagaatatgtagaaatgcagagtgacaatgagcggtctctaattgcctatgttaccttcaaggattcacaaggagcagagactgctattcttctttcggtaattcaactgcatactattaataaatgctataatacgtgacatttttcgtggaaatggctgcttctggtttctttgttcataaccatagtaaaagaaatttgcagcgcgatttttgtcttgccagaccgtgcaaatatt

SEQ ID NO: 236715 - DNA, 441 bp, Gossypium hirsutum
tcgtggacgcgtgggcaagtcatatatttcttgtagctaataagatcccagaaaaaaaaaatggttctcggagatctagcgagttctatcggtaatgtcgtcagcgacattaccggcatcaataaaaccaccaagaccgtcacaggcagtgttgttttagttaagaagaattttttggacttcacttccttgacctcaaccgaagttgatggccttttcgagttgcttggcaatggtgtcactctccagctcgtcagtgctgaaaatactgatcctgcaaatgaaaatggaggaaagctggggaaattagaggcattggagtattggaacctgacatatactcctacattggctggtagtgattcgttgtataaggtttcatttgaatgggacgaagagcttggaattcctggagctatcatcctacgaaataatcatgcg

SEQ ID NO: 236716 - DNA, 289 bp, Gossypium hirsutum
acaggcaaagctttcttggtattacgcaattagcaacaaatgtaaatcctgaaacttggccttccaagaaagtcctgcaactttataacaatgctgaggaaaacataaaaaagggcatgctgatgtgggaggaattacaagtgcaacgcctacgtgagctttccaaaccgaatgaggaacaaaatcaaataatgggattggatggtttattcaaagatatatcagcagacgaggttgcagagcaggctctcacaatgagtgctcagataaaccttttatggggtaccat

SEQ ID NO: 236717 - DNA, 290 bp, Gossypium hirsutum
ttttgtgaagaagttattggtgaaggatccccatgccagactgacagctgctcaggccctatcacacccgtgggttagagaaggaggaaatgcgtctgatatccctgtggatatttctgtccttaacaacctgcgacaatttgtgaagtatagtcgattgaagcaatttgctctgagggcattagctagcacacttaatgaagaagagatagctgatcttcgggatcagtttgatgcaattgatgtggataagaatggttctattagtcttgaagagatgagacaggccc

SEQ ID NO: 236718 - DNA, 186 bp, Gossypium hirsutum
atgctcttcggcttgagagacgaactttaagcaagctaatgcgtaaaaggttttcagaagaagagagacaaaaattgtatcagaaatggggtatttcgttaaactcgaagcagagaaggttacaactggtgaaccagttgtggagcaataacaaggatattgatcacgtcacagagagcgccacca

SEQ ID NO: 236719 - DNA, 406 bp, Gossypium hirsutum
tctttcacgcgtccggttttcaactgccaaggtgctggttggtgcaaggtcaccaagaaaacccgaattcatgatgcatcacctggtacacttacaggttctgtttgtgccaacgatgttgatttgatcgctcaggttgccggtgcggactggaatggggagagtgtggtttatgctcatagatcaggtacattttgtctgcttagatgtcaggtgaagagtgccaattggatttattttgatgtaaaatgttaaaaaaatgcctttttgagtttcaggagagctggtacggttacctaaaggtgcttcagtgtcggtaacacttaaggttctcgagtatgaactattccacttctgtccctgtaaggatagtttcttttccttccttttaggctacttttttgta

SEQ ID NO: 236720 - DNA, 489 bp, Gossypium hirsutum
tccacgcgtccgcccacgcgtccgcggcctcctacccatccagaagctcatattcacagacccagttcaagccctaacccagctcaaggaaaaactctcatcgtccttcgctctccgagtcggctcggcggccctcgctgacgcgcttcagatctcatcggaccatgcgcgtctcatcctcgacactctctcctcggttctccactccgaatccgacccactcgttaccgcccggcccgaggatgtcgactccattggagctgatttgcgtgatctggtcctgtttttgtacattcaatcgtataagagacttttgccgcgctcgcacaaggactccgctgcagttgccgatgtttggccttccacgtcagctttcgacggttacttgtcggctctttcgcctttgcagcttgtccgcagcaacactcgtcggtttatgccatcacaggctgatgaagaggcccatcaattgtcctatctacaaaagca

SEQ ID NO: 236721 - DNA, 445 bp, Gossypium hirsutum
tctttgggagatgcccttgtccatcgcctaacgtatcctccaggtcaaagtcaagcaagtagcactgactatctcagggagaccaccgatcaaaatggcaaacaaaatccgcaaaaatttgttgtgttacaccttcgatttgataaggatatggctgcccattcggcctgtgatttcggtgggggtaaggctgaaaaattggctctggccaagtaccggcaaacaatttggcaaggaagagttctcaattcacagtttacagacaaagagttgagaagtcaggggcgttgcccgttgactcctgaagaaatcggattgctgctggcagctttgggtttcgacaataatacccgtctttatcttgcctcccacaaggtatatggaggggaagctaggatttccacactacgaaacctcttccccttgatggaagacaaaaagagcc

SEQ ID NO: 236722 - DNA, 287 bp, Gossypium hirsutum
gcgttctttttacgtatagctctggttccacgcttggagtgagccgacaattctggttcccaagtgggtaacgcagattggcgaataccaatcgagtctcttctttgcggatcgttcaggacagcattatcagcgatgtctatcactgggtgtcgataatcttgctgttcttgatggatagactcctattcaagtataccagggcttctgctagagctttaagaccacattctcacctttcatgggttctaccatcaccggcatttcaatgggtctcggaccagatg

SEQ ID NO: 236723 - DNA, 433 bp, Gossypium hirsutum
tcgttgacgcgtgggcggacgcgtgggaccgccaacagtcccgccccttgccgcccgccttctgcctctccgtacgggtccagcagccttagcccacagcaagctttggccatgaattgggtcaaaaacaactatttggtgtatgactattgccatgatcctaagagggatcacactcagatacccgagtgctaattaaatgtgagtcatttaaaactttacaaaaaggaaaatgtaacaattgttgatcaaaagggggtttcttgagatgggcccttgaagagtggttaagcgtccaaaaccctctaagatttgcatcttttatttctattgttttgttgcttttaagtgctctgctttgttgttttctttggaataatttattacaagagttattttttaataaaaaagggttaattgtatcaaatatctc

SEQ ID NO: 236724 - DNA, 524 bp, Gossypium hirsutum
ttcctcgcgtccggtttgttttgtggaaaatgatttccatgatttccataggaaaacattttacaaacacgggtaaaatccaaagcaaaattttggaaattgtcttaccgatttctaatccgtaagacattttccctttctcctttctcttctaagcaaattttcttccacatcctctgcctcctcatctccgttcaccacctcacctcacctcaccatctccgtctgtcatctccgtcgaccgtcagccttacttgtattttgaagaaaccctaaaaaaattagcagccacagtcaagaaaagaagacccagaagcagtggttctctctctgtcatcaacaggatgggaatgaagttttctttaggatcaaaagaagcactcaactgaagaagctcatgaatgcatattgtgattgacaatctgtggatttcaactcgattgccttcttgttcgatgtccgccgcctgcgaggcgaacaactcctaatgagctggaaatagaggatggtgatgagatcgatgc

SEQ ID NO: 236725 - DNA, 443 bp, Gossypium hirsutum
ttcctcgcgtccggaagagggctttttggatctgatgccgcacttctcaacaatgcggagaccaaagcttacgtcttgcaagcttctcgtcatggatcgacttttgctaaagattttgcagtgtcgatggagaagatgggtaaagttgaagtactcactgggaatcaaggtgagattaggaaacattgtgccatggtgaactaattggagagcttttgaatttgattgtttggacttagtttaaaatgtgaattgtttggggataaaaagaaaaaagagatcattggaataaatttccaacaaaatttgtattgctttgtataatttgtgtatgaccgtttggtgctatacatacattacccagaagtggagatcaatgcttttgtcttttatttcacaccattccaactcaaatattcaataaatgcaactcataccggtct

SEQ ID NO: 236726 - DNA, 505 bp, Gossypium hirsutum
ttgaagatcaagcacaagaagaagaaggtcaagctcgctgtgctacagttctacaaggtggatgaatcgggtaaggttcagaggctgaggaaagagtgccctaatgctgagtgtggtgctggaactttcatggctaaccatttcgataggcactattgcggtaagtgtggactcacttatgtttaccagaaggctggtggagattaagtagggctcgtgcaaaagatggatcttttagggtttttccaatatgggttttaggttttaaattttcagtaatcgtcggattttgtttaatcgaatgatttttgttgtgtttgaatatgttataatacttgggctatatgatttggagttttgattatcaattcagctgtttgaatcaacttaagttaattcttctttatgttgtttgattgatgattatatttatatgccttgtattttttgctattttggtctctgggtattgggtatgcttaatgtttgtaaaatgattttacta

SEQ ID NO: 236727 - DNA, 336 bp, Gossypium hirsutum
tgtgctactggaaaatatgagaagaaggtttacgtattgccaaagcacctcgacgagaaagttgctgcacttcacctcggcaagctcggagctaagctcactaagctcactaaagatcaagctgattacattagtgtgcctgttgaaggtccttacaagcctcctcattacaggtactgagagaagagttgatgagtttttatcaagaaagaaaaaacatccggatggttcgattgcttcttgttttactgaaatttcatgatggttaggtttttgttttatttttagagttttttttgtgtttgggtgatgggaaagtgcctgggggtgggaaaa

SEQ ID NO: 236728 - DNA, 319 bp, Gossypium hirsutum
ttgcttggcagatacactggcacattctccacttttgctctttgtggatttgtccgtgcccagggtgatgctgacagtgctcttgacaggctttggcagaagaagaaagctgaagtccgacagcagtagttggatacctttttaccctagtctatctccgagcttgggaaagaaaaatctcatggcagcgactattatgttctaggttttttcaggttaaactatgtcaaatttatatttttgttgaatggatgacatttcagacttggttttcttatatttgaacctaatatatatgccttcggtcatgttaatcgaa

SEQ ID NO: 236729 - DNA, 443 bp, Gossypium hirsutum
ttccacgcgtccggaaaaatcccccaagcccgtcgcctcttgcgccatgcctgcccttcctggaatgaagattaagacagatacgccgttggcaaagaaggcacgagaaggagtgatggagtttttgctgatgaaccatccactggattgtccaatttgtgatcagggtggagaatgtgatctccaggatcagtctatggcatttggatctgatcgtggccgttttactgaaatgaagagatctgttgttgacaagaatcttggtcctttggtgaagactgtcatgactcggtgcattcagtgtactaggtgtgtcaggtttgcaacagaagttgctggagttcaggatcttggcatgttaggtcgtggtagtggagaagaaattgggacttacgttgaaaagcttatgacaagtgagctttctggaaatataattgatatct

SEQ ID NO: 236730 - DNA, 368 bp, Gossypium hirsutum
tgattttccattttggaacttgtcagttccgttgatgatgaacaaatttgctatgatcatctggctttcaggacctttggggtaaatggttatgggattaactccttggcaagtctttttctggattatgggtatacccaaaaggaggaactaaggtttcctgctaaaaagttgaaggcattgtggttttctcctcccaatagttcttctcaagatggtggcagtggtgttaatgggcccttgccaagagtatttatttcagagcttcttgtggatcaacttaaccccagagcacaggaaattattagaaaatacaccaaaaaatctggtagtggaaataaatatgcagctcttgcaagtgctctggg

SEQ ID NO: 236731 - DNA, 413 bp, Gossypium hirsutum
tcgttcagtcatatggttcaaatgtgcctccacagcagcagtatgcatatgcatcaagtgggccaacgcaacaaagctatcctccatatggctctgcaccacctagtgatgggtacagtcagccttcaactgagggtggccaggcttatccgcagcatggtagccagcctgttcctggttacagtcaaccaactgcatatgcacaagcaagtagcgctgctgggtatggtcaatacccaccatcgtaacaaggctactctgaacagacacaggctcctaacaatgcaggttatgggtatcaaggtgcgcatgattctggttatggtggtgcgcctgcagcaacatatggtgcgcccccagccagtggccaagcaacttatgctcaaacaacagctgatcaacctacctatgat

SEQ ID NO: 236732 - DNA, 402 bp, Gossypium hirsutum
cccacgcgtccggttacacgggagcaaggctcgtttgagtggttcaggggggtaatgaatgaggtagctgagtatgatagagataggatgattgaacttcacaattactgcaccagtgtatatgaagaaggggatgctaggtcagctttgatcaccatgcttcagtccctccaacatgccaaaagtggtgtggatattgtttcgggaacacaagtgaaaacacattttgccaggccaaattggcacaaggtcttcaagcacgtggctgttaaccatacggacaagagagttggagtattttactgtggagcaccaggattaacaggggagctaagaaggttagctcaagagttttcaaggaagaccagcaccaaatttgatttccacaaggaaaacttttaa

SEQ ID NO: 236733 - DNA, 407 bp, Gossypium hirsutum
ttttatcatcttcatcgtcgtcgtttgttcctcaggtggaattttctcgggaaacaagcagaaaattgctgtaaagaaaaggaaaagaacagaatacaagaacaaaaaaagaaaacatgatgatgatgtcatcagcttcatcatcagcagcgacagtagctgtagataaggcaacgagcgatcttctaatgggtcctgattggactatgaatatcgatatttgcgattctgttaattctaatcattggccagcaaaggatgttgtaaaagctgtgaagagaaggttgcagcacaagagttctaaagttcaattactagctttgacgcttttggaaacaatggtgaagaattgtggtgattatgttcattttcagattgctgagaggaatatattgtgggagatggtt

SEQ ID NO: 236734 - DNA, 418 bp, Gossypium hirsutum
tggtagagacatcggtgttgatattaacgccttacggaggaagaatgaagcaaataaagagttcggcaactccatttccttatagaagtgagtatttatatgggatacaatatatgattagttgggatgtagcagaggaaacagggaaacgcatagggtggatgagaaggttgtacaagtacatggaaccttatgtctcaacagcaccgagggctgcatatttcaattacagggatcttgatttggggaggaacagttacccaaatacaagctatgtggaatcaagcgaatggggtttgaaatacttcaaccataatttcaatagactggttcgggtgaagactttagctgatcctcacaatttcttttggaatgagcaaagtattccagtattaaggttagaataaagcattgattt

SEQ ID NO: 236735 - DNA, 388 bp, Gossypium hirsutum
tttcttcaacgcacctcacgacgttccctcccctccctacatctgcaccttcaccgttgttgtagagtcagagaaatgacgtcagatggtgctacttctactccggcaccggtgccgaggaggaaaccgtcttggagggagagagagaacaacaggaggagggagaggaggagaagagctatcgctgctaagatatatactgggctgagagctcaaggaaattataatctgcccaagcactgtgataacaacgaggtcctcaaagctctttgtgccgaggctggttgggttgttgaagatgatggcaccacttatcgaaagggatgtaagccacctccgattgatatagcaggcagttcagctaaaattaccccatattctttccaaa

SEQ ID NO: 236736 - DNA, 348 bp, Gossypium hirsutum
cccacgcgtccgggatcgttaaaggatttactgccgaaagaggaggcagagaattcagttgggatagctaagcttctcgaaatcgcgatcggggtcgctcaagggatagaatacttgcacaatggttgcgaatcaaggattttgcatctcgacataaagcctcaaaatgttttgcttgaccagagtttgaaccccaaaatttctgatttcggattagccaaagtatactctcgagaccatagctatgtgacgatgacgagtgcaagagggactattggctttatcgctcctgagatattcatgagaaatctgggaaacccttcgcataaatccgatgtgtatagctat

SEQ ID NO: 236737 - DNA, 317 bp, Gossypium hirsutum
ttgttttatctaaaaggttcaaaaggaggggtatttacattgaaagactgaatgatctaatggagaccaagggtgggaaaaagactaagtccaatagtagtagtaaatcctttttctatgaagctcctttaggttacagcattgaagacgttcgacctcacggtggaatcaagaagttccgatctgctgcttattccaactgcgtccgaaagccatcatgagatttgcgagattcatagatagtcccaaagcctcaacctcactgcaattatatctagtttgtttggttacttgcttgcttccttattctctagttc

SEQ ID NO: 236738 - DNA, 355 bp, Gossypium hirsutum
tattttggtgggacgacgacagctgcaattggagggctaagcagccgtgaattgtctgttcccctcgaccagaaccaccgtcagatgaaggctgagatagccacacatccgctctacgaccagcttttaactgctcacgtctcttgtctccgtgttgctaccacaatcgaacagttgcctttgatcgatgcacagttagcacagtgtcataatgttcttaggtcctatgcttcacagcatccccaacatggccactccctttcaccccatcacagacaagaccttgacaacttcttggcacaatatttgataatgctgcgtaggttcaaagaagagcttcaacaacatgtgagag

SEQ ID NO: 236739 - DNA, 429 bp, Gossypium hirsutum
tctcatttgttccactcatagatccactcaattggcaacagccaccaactcatcaacaagatcaagttttcactaaagacaatcatcatcatatccataatcctcagcttccaccgccaccaccagctggtagtagtgttggtattaataggcctggttcaatggcggaacgagctaggctagccaacatgcaaaagcctgagaaagctcttaaatgccctcgatgtgaatcaacagacactaaattttgttacttcaacaattacagcctttcacagcctcgctacttttgcaaaacctgtaaacgatactggactagaggcggtgctttaaggaacgtgccgatcggtggtggttgtcgaaccaacaagagaagcaaaggaagtaaaccaacaaagtctccatcaataggccaaatgaacccaacac

SEQ ID NO: 236740 - DNA, 430 bp, Gossypium hirsutum
tcccacgcgtccgggattgggccaaaccttacctagccaacaaaagaaaaatgttccgtgtgttagattcccgtctcgaaggccagtactcgatggaaggagccttcaaggttgctacccttgctttacgatgcatttctattgaacccaaattccgaccgagaatgaacgaagtcgtaatagtattggaacaactccaaaattccaatgaatctggaagtaatctgagcaacaacactagcagtacaccccggatacgtaggcgaagtgcagaatatcctagtggtggaaggagtaccactactacggcgtaccctcggccatcggcttcgcctctttatgactgaaaatgaaaactgaagttcatctctggcggctccgggatgatctctgcaacccgaggcattcaccattttataacctgttagtg

SEQ ID NO: 236741 - DNA, 403 bp, Gossypium hirsutum
tttattagctcaaactcttctttatcctacttctctgattctggttgttcatggaaaggggtgcactgtgataccaagaaggagagtgttcttggtttaaaggcttcaggtttaggcctttctggtttaattcctgataccaccatcggtaagctgatccagcttcagtctttggatcttagcaataacaaaatcactgctttgccttcagacttatggagtttaggctcacttaagagtcttaatctctcctctaatcagatttctgggtttctgcctaacaatattggcaactttggtcagcttgaagtcattgatctttctggcaataacttcactggggaaattcccactgctataagctccctagctagtttacgagtgcttaagcttgctggaaatg

SEQ ID NO: 236742 - DNA, 297 bp, Gossypium hirsutum
ttctttcgtccgcccacgcgtccgcccacgcgtccgcccacgcgtccggggttctcctgatgagggagacgttcaacctggtgctcttatcacacttccgcctccgagggaagttgctaggcctgagatacaaagaaattctgcacctgcaggcaatctggatgaggaagaatgggttacagtttatggattttctcctgctgatacaaattgagctttgcgagagtttgaaaagtgtggtgtgatattgaagcatgttcctggaccaagggatgctaactggatgcacattctcta

SEQ ID NO: 236743 - DNA, 403 bp, Gossypium hirsutum
ttagtacgtagcggaactgtctcgcaccctctcgttttcacattttcctattttatgctctcatcctccgccgtgccttccgccgtcggcttccttcaccaccgccatcaatggagacccaccggcgatcttcgactaattccgttcggtctcacaagccggcaaggccaattgctttggaagatgattccaccaaagcttctgacgcattgccacttcctttgtatttaacgaatgctgtgttcttcactctctttttctcggcggtttatttccttctttgccgttggcgggaaaagatccgatcctctacgcctctgcatgtcgtcaccttttccgagatcgttgcgattcttgcttccgttgcgtcgaatatttaccttttggggttctctggtatcga

SEQ ID NO: 236744 - DNA, 367 bp, Gossypium hirsutum
tctgttcatcagcaaaaccccaacagattgctgtggtttttttccaagtcaatggattctgcctccggagggagtgacaatagcatcaaagaggctataccagcaacagcttcagccctgctgtccgcggcttcacaacaaggaggaggaggtggtagtgagtcgtctccttccccagctccaccgagtaggtacgagtcacaaaatcttctagactggaacactttcttgcagtacttgaccaaccataaacccccattaacactagctcgttgcagtggcgcacacgtaattgagctcttgaaataccttgaccagctcggcaagactaaggttcacataacggattgtccctatttcggacatg

SEQ ID NO: 236745 - DNA, 476 bp, Gossypium hirsutum
ttcctataaataacacaagaaatcatggcaaaaacagaatatcaaagacaaaaaaaaaaaccattgcagagtactgagaaaggtatgatattaaaagggatattgtgataataaaagaatatacaacctggagttgtcgaagaactgagttttgaaactcaggcacgctggtgagaggaccccttgatgtatcgttcgctgaaggagaccggaatattgcaagtattctctgggttggataccctggggaagctggtggaaaggcacttgcggaggtcatctttggtgattttaatccaggtggaagacttccaatgacttggtatcctgaatcatttacaaagattgcaatgaatgatatgaacatgcgtgccaacccttttcgtggttatcctgggagaacttaccgtttttacaccggaaatagagtgtatggctttggccaaggcttaagctataccaaattcacctacaaa

SEQ ID NO: 236746 - DNA, 406 bp, Gossypium hirsutum
tttgtgtaattggtcatattttattgatgaaaggggttgggttggtattagtctggatacaacaaaataatttaattaggtctaatgtacttattcgatctaataagtatcttgtttcagaatttagaaattctatggctcgaatctttagtattctgttatttattacctgtgtttactatttaggcagaataccggcacccattctaactaagaaactgaaaggaatttccgaaccggaagaagtgggggaaagtgaggaagaaagaaacatagaaatagaaactatttccgaggggggaggggctaaccagaaacaggggaccgaagaaaatacttctttttcccttttttcggaggaagaggtggatccgagcaaagaaacagaaaagctacgagcgactgg

SEQ ID NO: 236747 - DNA, 328 bp, Gossypium hirsutum
ttaaagccccttattttcccccagaatcaagaactgtttttcatcttggtcagcccagaattcgaggcccccaccaagaaaatgcgtgcggctttgcccgccgaaattgggatgccgcaccacgtctggaattgcagccaagcgggtgcactggtagcatcagtgttggagggcgacgtcgtggggttagggaaagcattgtcgtcggacaagatcgtggagcctaaacgagcaccccttattccggggatggaagctgtgaagaaggcggctatcaaggccggagctttcgggtgtactattagtggtgctgggccgacggcggtgg

SEQ ID NO: 236748 - DNA, 459 bp, Gossypium hirsutum
ttgttttctaaaggaaaacggcatagtttacctaattcacggataatgatacatcagcctcttggtggagctcaaggaggtcaaactgatatcgatattcaggcaaatgaaatgctgcatcataaggcaaatttaaacgggtatcttgcttaccacaccggtcaaagcttggatcagattaaccaggatactgaccgagattttttcatgagcgcgaaagaagcaaaggaatacggacttattgacagtgtcattatgaatcctcttaaagctcttcagccactagctcctacagctgatagtaacgaatagccggatcttccttcaggtatttttactatcatttgacatggctaagagataattcgaaatgattgttcggttttctgattgcctcttcgaatactagataatctcgagtcgaattttgatgttaattaaatataccggtatcgaacc

SEQ ID NO: 236749 - DNA, 484 bp, Gossypium hirsutum
tcggtttcatctctatccaaatatgaatgcaataccaccctctgcacttcttcttttctcactcactgccccttcttcatcatgacttcacccccaatttcaatgacagggatgtgggaaatgttggcccaatctttgcccttctccttttcacaacgctcctccagcaaaggacaattactaatgcacaaacgagaaagagagggagggagcatgtttgggggcatggattggagcttgggacagctgtcgataagcaatctggaaagagaggcgaggtgttgaaaccccttgtactccaaactctttagatttggaagttgagagagccagagagtttcaagagaagagggaagcagatgttcatctggaaaacactccatctctacttctgaacccccgatcaacagatatgtaagagaagggagtgtatacaaactccattcccttttcctaatcaagctcccaattagtttatcactgc

SEQ ID NO: 236750 - DNA, 361 bp, Gossypium hirsutum
aaaaaattagagagtcttccttcgatggttgccggagtttggtccagtaacggctcagcgcagctagaagcgactactcagttccggaaattgctttcaattgagcgaagccccccgatcgacgaagtgatacaatctggcgtcgttcctcgctttgttgagtttcttatgagggaagattacccacagcttcagtttgaggctgcttgggcgcttacaaatattgcttctggaacctctgagcatactaaggtagttattgatcatggggccgttcctatatttgtaaagcttcttggttccccaagtgatgatgttcgcgagcaggctgtgtgggcactggggaatgttgctggcgatt

SEQ ID NO: 236751 - DNA, 165 bp, Gossypium hirsutum
tttgtcttcgctcgaagtcatgctgccagagatgggttgtcaagcatgaagcttctggttgatgatacaactgagacaaaattccaaagacaattgcaacttgtcatggataaagcgactcttgattccattgtcttgcatcctgatggacctatcaaaaggatg

SEQ ID NO: 236752 - DNA, 371 bp, Gossypium hirsutum
ttgataagctggtggaatcatcttcaaagatgaatatgccttcagatttgccacaaaacacagctccatatcctctcacaatgcaccctctagaccagaatgggagaataccttctgaaggaatatttggtacaactatgcatcttctgaagcaaaattctcaagtacttagtcaaatcacatccaacctttctgcatacaagttacaggataacgttgatctcttttgtcatgcaaagaacaatattactgccatgctaaaagacatgagagatatgccgggtttaatgagccatatgctgccattgcctgtgtctgttagtgaggatttagcaaatagcatgttttgtagtgcaactcaggcaacgatt

SEQ ID NO: 236753 - DNA, 376 bp, Gossypium hirsutum
tttatcaagagtgctagggagagcaagaggtggtggcttccattgccacaagtaccaaaaactgggctctcagataccgaaaggcagaagttgcaatgtaaaggcaaggtggtatatcaagtattcaaggctgcagcatcgattaatgaaaatgttttgcttgaaatacctcttccatccattattagggatgctcttcccaagtctgggaaggcaagccttggtgacgacctgtacaaggttttgactctggagtccagctcggttgatgaaatgttcatttcgctaaatttaaagtctgaaaacaatgctctcgaggtcattaataggttggaagctgctgtatttgcatggaaagggagacttacagaacaag

SEQ ID NO: 236754 - DNA, 310 bp, Gossypium hirsutum
ttagaggttactattaaggaattagctgaattggttaaggaagttgttgggtttgaaggggaacttgtttgggattcttcgaagcctgatgggactcctaggaaactcatggacagctcgaagcttgcttcattggggtggaatgccaagatttctttgaaagatgggcttattgatacttataaatggtacttggagaaagtcaagcaatgatggcagagcaggcgatattgttggtttcttccctgatgaattttttgatcggggtatttgttgttttgtgattgttgtcattattatcatcgcctat

SEQ ID NO: 236755 - DNA, 402 bp, Gossypium hirsutum
tttctctcgtccgagacgctatggtttgctaggattaaatggttgtgggaaatccacgctgcttactgcaatagggttgcgtgaacttccaattccagagcacatggatatctatcacctgacgagggagattgaagcttcagatatgtctgcattgcaggctgtcataagttgtgatgaagagaggttgaagttggagaaagaagcagaaatcttggcagcacaggatgatggtggtggagagacacttgaacgtatctatgagcgattggatgccttggatgcatcaactgctgagaaacgtgctgctgaaattttatttggcctcggtttcaacaagatgatgcaggcaaagaaaacccgagatttctctggtggttggagaatgaggattgcattggc

SEQ ID NO: 236756 - DNA, 300 bp, Gossypium hirsutum
ttggagcttggtactttgaaatcaatgtggtgaagttgggggagacggggcatacacggcttgggtggtctactgataaaggtgacttgcaagcgcctgtagggtatgatggtaatagctttggatatagagatattgatgggagtaaggtgcacaaagctttgagagagaagtatggggaagaagggtataaagaaggagatgttattgggttttatataaatttaccagaaggtggatcatatgctcccaagcctcctcatcttgtctggtataaaggccagagatacgtgcgtgccc

SEQ ID NO: 236757 - DNA, 270 bp, Gossypium hirsutum
ttcctttcgtccgggttcctagcagacaatccaggggtttggttcatgcattgccatttggaagtacatacaagctggggattgaagatggcatgggtggttaatgatggaaaaggccctaaacagaaactaatgcctccacctgctgatcttcctaaatgctgaaccattctttttctttagcttgaaattgttttaaatctctacttttgactacagaatgtaagagacaaaaattcatcctttacaaatataatttcattttttctt

SEQ ID NO: 236758 - DNA, 182 bp, Gossypium hirsutum
tttccctctgattcaatcagatcttgagaaaatccctgaaattcacccatctcgtctgtatcatattaatcaatcaatagaaaaaccgaaagaacaaagaaatggcgggggcggcatcggcactattccttctagatataaagggccgcgttctggtgtggcgtgactaccgtggcgatgtc

SEQ ID NO: 236759 - DNA, 312 bp, Gossypium hirsutum
tctttttgactggtgatttcctcactagaaccgcaaatgttttcatggatctaggatattctctcaatccatcaattgatgttggccaggttgaaggagcatttatgcacggtctgggttgggttgccttggaagaacttaagtggggtgatgcagctcataaatggattccacctggctgcttgtatacatgtgggcctggaagttacaaaatcccttcttttaacgatgttccgttcaagtctaatgtttctctattgaagggtaatccaaatgtaaaagccattcactcatcttaagctgttggagagc

SEQ ID NO: 236760 - DNA, 359 bp, Gossypium hirsutum
gtcttgagcatctcaacagccatttctgccggaacagcactggctgtcacctctgctgtgattgatgctggaggtcagacaacaagaatagacacaggcaaagagtattacccatacaccaccaagaaaagacctgccgattcataactcttgcatatcattatcgaggatgcacttccaacttaattcgggataattaatcctttttaggatgcctttgctttctaagatttaatcacacactcagttcccagtttgttgtttgcatttaaagggagaatgttgatttgcatgatttgtcgtgtatcaaaataatggtgtagatgacagtctctgaacctattgaatttggggtactt

SEQ ID NO: 236761 - DNA, 455 bp, Gossypium hirsutum
ttcacgcgtacgcccacgcgtccgcccacgcgtccgggggattgctcctatgacggaaagaggcgataagatatcgataacggactttggtggtgtcggcaacggacagacgctgaataccatagccttccggaaagctatatatcggattcagcatctgagaaggagaggcggcacgctactttttgtgccttctggagtctacttaaccgacagtttcaatcttactagtcatatgacactttatttggctcgaggtgctgttatcaaagccactcaggacacctcaaattggcctttaattgctcctttgccatcttatggaaggggaagggagcgccctggaggaagatatatgagctttattcatggagatggactggaagatgtggtgataactggtgagaatggcacaattgatggtcaaggagatatttggtggaacatgtggaggc

SEQ ID NO: 236762 - DNA, 476 bp, Gossypium hirsutum
tgaaaaaccaatgaatgaaattcagtggttaatggctgagaaagaaactgatgagtggcttatgtaatttgttggttagatattttcacaaaaaaagtggtacagagatagcccttcaaaaaattttaaaaactcaaaatccaatgccatgattccatcaaatatccaaaactataaaaggtcacacttcaagagaaagtagattaagctttagtttctttttgcagttaataagccaagtaaaacaatgactcttcaagcaagtttctttaactttggaagcatttcttctcttccttgccctcccagaacttcccgtcaacgctttgtaatcagagctaaagtggaaccatcagagaaatctgtggaaataatgaggaaattctccgaacaatatgcacgtcgttcaagcacatatttctgtgtggacaagggagtgacttctgttgtaatcaagggactagctgagcataaag

SEQ ID NO: 236763 - DNA, 219 bp, Gossypium hirsutum
cgtactcgtagctgctaacgggctctgctaccttcatgatgattgttccgctttgattgtccatcgagaagggtaatcgaacaacgtcctcctggactcggattttgtagcacatgttgctgattatggccttggcaaatctctgcaagattccggtacttgtgaatgcatgtgtgctatagctggatcatatggatacatcgctccataatatgccta

SEQ ID NO: 236764 - DNA, 331 bp, Gossypium hirsutum
tctcgcgtccggctatccaagctgttctttccttgtatgccagtggccgtacaaccggtattgttctggactctggggatggtgtgagccacacagtccctatctatgaaggctatgctcttacacatgccatcttgcgtctcgacctagctggtcgtgatctcactgatgctctcatgaaaatattaacggagcgtggttattctttcacaactactgctgagcgggaaattgtgatggcccaaaaaggaggagcaatattgaagagaaacaggagatggttactgcaacaaacaaggctggactttatgcgtacgagtgtaaaacctgt

SEQ ID NO: 236765 - DNA, 348 bp, Gossypium hirsutum
atgattgatgtctcaagagataaggccttacatggagggaacttccaaggtactccaattggtgtatcaatggacaacactcgtttagctattgctgcaattggcaaactcatgtttgctcaattctctgagcttgttaatgattactacaacaatgggttaccttcgaacttgtcagcaagccggaacccgagcctggattatggtttcaagggggcggaaattgcgatggcttcgtactgctctgagcttcaataccttggcaaccctgtcaccaaccatgtgcaaagtgctgagcaacataaccaagatgtgaattctttaggcttaatctcagcaagaaaaaca

SEQ ID NO: 236766 - DNA, 370 bp, Gossypium hirsutum
atttaagcacgggagatcaatctcattcgatgagtggaaatggtgcgtaagctttattttcatcatcggaatttgaaaactggtattatgatttagtgctaggggctcggagttcaagtaattatggatgcctttgtttgacctggcccgaacatttatggactgctatacaggtgccttggcatttgacgttgagtattcacggtggctagaggagcacaataagcatataaacgagttgagggctgcagtcaattcacatgctggtgacgccgaacttcgcactattgtcgacagcgtcacagctcattttgatgacattttccgtttgaaaggtattgctgcaaaagctgatgttttccatatctta

SEQ ID NO: 236767 - DNA, 430 bp, Gossypium hirsutum
tcttcgcgtccgggagtttgcactgcagttgttcgatgcacttgctcgaaaacgaaacattcatggtgattccatcgataaggctcatctgaaagagttttgggatcagatctcgaatcaaagcttcgatgctcgccttcaaactttcttcgacatggtggataaagatgcagatggaagaataacagaacaagaagtcaaagaaattattagtctcagtgcatctgcaaacagactctcaaacatccagaaacaagctgaggaatatgcagctttgattatggaagaattagacccagaccgcctggggtacatcatgataaacaacttagaaatgcttctgctacaagcaccaaaccagtcagtacgaggcgaaagccggaaattgagccaaatgctaagccagaagcttaagcctacatatgacggt

SEQ ID NO: 236768 - DNA, 317 bp, Gossypium hirsutum
ttttctacgcgtccgtccacgcgtccgattatcgtaagtggctcgatacacagtcccataggttccatgagccacaacgtgtcttaaatctagcttagccaaatcaatctcccactcctctgcaggcctttggttatcaacgtttctagaccaaacccggctcaggtgcttctccagctgtatgtctaagctttttaaatcaattttatcagctctaaaaatcatatctttgctactaaaacttccagtacccttcagcttacgatgcctgcttcctccctgatcatctgatttctttggtgtcttgacaccaccac

SEQ ID NO: 236769 - DNA, 340 bp, Gossypium hirsutum
tccttcgcgtccgctcgcgaagaatgccgaagcaattgtatcactcaaccatgttcctgatatgctgcggcacaagcttagtcgatcggtgtccaattctaggaaaatggatgcccattttttacaacttcttgctagcggatcaccaacagagattcgagtcaatgactgctcccgagtcactgaagacgaattcaccaagatatttggctgctgtgatactagaaacttgattggaattgactgatgtatctctcaaatttgtggggaaaaattgttccaaattatgcgccattgacctatcttacttgcggaagttgacggatttatcaatgagata

SEQ ID NO: 236770 - DNA, 324 bp, Gossypium hirsutum
gatatccttaccaacttggtcccttacccaagaatacacttcatgctttcttcatacgctccagtcatctctgctgagaaggcttaccatgagcagctatcagttgctgaaatcaccaatagtgcctttgagccctcatctatgatggccaagtgtgatcctcgccatggcaagtatatggcttgctgtttgatgtaccgtgtgatgttgcgcccaaggatgtcaatgctgctgttgccaccatcaagaccaagagaactattcagttcgttgactggtgcccaactggattcaagtgtggtatcaactaccagccacccactc

SEQ ID NO: 236771 - DNA, 365 bp, Gossypium hirsutum
tctgtctggttcgtgttacgaggaagactttgcaagctgtgctggaacagtgccaaagagctatcgaatcgattagtaacagcgaaggtggaattgacgatgacgacgaggatgataaagatgacatggatcctcaaggggaagccagtggcgccggtcttcaaagagatcaagaagtcgacgagttgtgcgatcttctgaaatctagagttcaatgttctgattttctagaaaagctagtgtgtgctcgggtgccaatttcagaaaacgtttcagaagaaggttgtttttggaactgagaattttacaattgtctatttttaaatcaatttaaaatcgtaaacatgtttaaaaaaaaaaatatt

SEQ ID NO: 236772 - DNA, 306 bp, Gossypium hirsutum
aatgccttttcctctcctcctcctcctcccctccttcctttgctgttcctaaagtttcgttctcttttagctgcctgaacgtcctattttttccctctctcgtgactcgttcatcaggaaaaacttgttcgagtgagcatcaatggatccacaacctgaacctgttacctatatctgtggagactgtgggcaagagaacacattgaagcatggagatgtgatacaatgccgggaatgtggttatcgcattctttacaagaagcgaacccgaagaattgttcagtatgaagctcgctgaaagtggtg

SEQ ID NO: 236773 - DNA, 352 bp, Gossypium hirsutum
tcgccttaagtcaaaactggaggtcttaatggccgccctgagaaactccctgatgtttgctactcatggggggttctatctagcttgatcatgattgacagagttcactggatagacaaggaaaagcttgttaagttcatcttggactgtcaggatgtggaaaatggtggaatttcagatagacccgatgatgctgttgatgtctaccacacatatttcggagttgctggactctcacttctcaattatccaggactgaaagccattgatccagcttatgcattacctgtcgatgtcgtaaatagaattttctttagtggataattggtatttcctttcgtccctctcagca

SEQ ID NO: 236774 - DNA, 410 bp, Gossypium hirsutum
ttgggtttcatgttgtaggtttttttcttttttagaattcgagtcgtcgttaagaagggagatgataggtgtcatgatgctaggtggagccatggggctaccggggtaattgctgctactagtaatctggttcccggtttgatgcacgaactcatgttcaatgggaaaaacgcttcacttaatgcgaagctcttacctttgattcaatggctctttgaggaacctaaccccattggtcttaacacagcccttgcacaactcggggttgtgaggccggtttttaggctaccttatgcacctcttccgctggaaaagagggtcatatttgttgaactggtcaatgaaatcgggcgagagaactttgttggagaaaaagatgttcaggttcttgatgacaacgatttcatctt

SEQ ID NO: 236775 - DNA, 360 bp, Gossypium hirsutum
tgtattcttcatgctggacgtttggttgctatccttgaagcttatgcactttacgaccctgtaattggctactgccagggcatgagtgatctcctttctgcaatagtttcagtcatgcctgaggattatgaggctttctggtgttttgtaggcttcatgaagaaagctcgacataattttaggcttgatgaggtgggaatcagaaggcaacttaatattggttgcaagataataaaatgtaaggactctcacctctataggcatttggagaagctgcatgcagaggattgcttttttgtttataggatgtgggaggttctctctaggagggaattgacatttgaacagacaatgtgccta

SEQ ID NO: 236776 - DNA, 480 bp, Gossypium hirsutum
  unsure (1)..(480): unsure at all n locations
acttctctccacgcgtacggaaaatgcatcattcaggcatgtttttgatatagctgccattatcactggaactgctaggcctaaattcaacatccctttaggcttgattgaagcttatggatggatttctgttctttttgcccgaattacaggaaagcttgctctcattagtcccccgactgtgcacgtcttaagacatcaatgggcatatacttgtgacaaggccaaactggagttggattatagacctagaagcttgaaagacgggcttgaagaaatgctcccctggttgaagagcttgggcgtgataaaatactaattactaatatgaattatgaagatgtacgaacttgatctcattctttaggccattgagaagtattccattaaatgctgagaggaatctatgttgctccttctgtttcatgcttgatgtagctntagccggtaatggcagtaataagaaactggctggctcgt

SEQ ID NO: 236777 - DNA, 221 bp, Gossypium hirsutum
tgtaagctcgtgccttcacgtcacaaccggcgcttacatctactcattgatctttgcagctgctccatctttggcttctgtctacaatgagtatgctcttaagagtcagtatgagacaagcatttatctccagaacttatttttatatggttatggtgctatacttaactttctggcattactggggacaactgttgtcaaaggtcctagtagctttgata

SEQ ID NO: 236778 - DNA, 296 bp, Gossypium hirsutum
ttcttttttttttctcgactcatccaacctgcaagacactagttagacaacaacaacttgacgacaaccacaatagccacacagcctcaacccggcaatgagaacctgtgaatgcataggtatcaaacgcataccaattccttcttccatgccctcaccaacataccaatgcacgaaagctctcttcgagtacatgagatcgaatttgtgttcaatgctgtcggtggcggaactggctctggtctgggatctttgctgttagaacgctcgccggaggattatgggaaaaagtcaaa

SEQ ID NO: 236779 - DNA, 316 bp, Gossypium hirsutum
tctccttattggtagtattatcggcgttcacactggaaagaccttcaatcaagtggaaatcaagccagaaatgattagccactatttggctgaattctcaatctcctacaagccggtaaagcatggaagaccgggtattggtgccacccattcatccaggtttattccactcaaatgaaaaagattatgcatgtgtctttattcttggtcttgttggaatgttttgctattgaattttgatcaatgcgtctagtgttgatgcttctcttttgagtattcaatttagaaaaggactctgtcaagctttgcatttaac

SEQ ID NO: 236780 - DNA, 435 bp, Gossypium hirsutum
tttgaaatcagacatggaaaaggtgaaggaactcctgcatctagacaaagaagcagaggagacagtgtcacgactcactattcacccccaccgagtcggttacgagcgtagcttctacaacgatttcggcttacgcggcatccgtgtcgacaaggtcgagcctggcttcgtttcctgcactttcaaagttcctcctcgcctcaccgataaaaatggaaatttagcaacgggagcaattgcgaatattgtggatgaagtcggcgggtcagcggtctttgtcattggtgttcctatgaaagtttcagtggatatgtccatttcgtttctgggagctgctaagctcggtgatgagctagagattacctcaaaggcattaggagaaagaggaggatatgcaggaacacttgttcatatcagaaacaaagcaacagggga

SEQ ID NO: 236781 - DNA, 426 bp, Gossypium hirsutum
tcctttcttccgaaaaaagttgtagcaggcaggcaggtaggctcactcagatgtctaagtcaaggttggaaggtaaggtagctcttatcactggtgccgccagcgggattggtgaggagacggcgaggttatttgtggaacatggggcttttgttatcattgctgatgtccaagatgatctcgggaacaaagtcgcggcatccatcggcctagacaaggttagttactgtcactgtgacgtaagagacgagaagcaggtagaggcaacagtgagttacgcggtggagaaatatggaaggctggacattttgttcagcaatgctggtgtctatggaccgttacctgggatcttggaacttgacgttaatggcttcgacaacaccatggccacaaatgttcgaggtgttgcagccacgatcaagcatg

SEQ ID NO: 236782 - DNA, 314 bp, Gossypium hirsutum
  unsure (1)..(314): unsure at all n locations
tggngcggatggcaagctgaagaaagcagcagtggtgatagataagaaatcggggagggtgatggagttgtttacgaatcaagcaggagtgcagttttacacggctaatttcttgaaagatgtgagagggaaaggtggatatgtttatgaatcacatggagctttgtgtttggagactcaagcattttcagactcggtcaatcatacaaatttcccatctgatattgtttatcctggaaaagagtacaagcatgttatggcgttcaagtttacgttttcctcctagacaaaaaaaaacccttgtcttctttatt

SEQ ID NO: 236783 - DNA, 248 bp, Gossypium hirsutum
tgagggaatacagttttatattccaagtatgcagggaatgacttcaaagggaatgatggaactagttatattgctcttagagcatctgatgtaatggctgtgctttcttagttgtctgataaaacatatgctgctaggttcacaactgaaatttatggatgagttttcgatgaggcacaaggattttgtatttttcttttaatcttcgatataaatggtgctagctttgttgtttgccctggtaaaaa

SEQ ID NO: 236784 - DNA, 329 bp, Gossypium hirsutum
ttctataaagaaactaaacagagactcgatgcagcaaaattcacgtttcgtgctcctctcgctatccctccttttccttccattcattttctccaacgccgaaaagggccatcttttcggaggatggacaccgatcaaggacatcaaggaccctcacgtgatggagattgcagaatttgccgtcgatgagtataacaagcagtcaaactcgagtttaattttgcagaaggtggtgaaaggtgaaacccaggtggtggccgggattaactatcggctggttttgaaggcaaagaatggaagcatggctaagaaataccaggctgtggtgt

SEQ ID NO: 236785 - DNA, 306 bp, Gossypium hirsutum
tgttccttgaaggaattagacctggatgtgcaccacgctagtgtatcagtagtgaaagacttgatgatccaacaagccaatgtgaagatggggagccggtttttcacgcaggagcaattaaaatcagccctaacaaccaaacttggagatgcaagatagagagtattgagcagagcttgattgaaagatcattgtttaaaatggctgcagggttctgggatattttaaggctcctggtagcacgagctctgtaaaataatgttctattttggtcttattactgtttagtgtagttaataatagttt

SEQ ID NO: 236786 - DNA, 360 bp, Gossypium hirsutum
ttcctttcttcactccagtttctcctttccctcttcgaagaaaaaatgcgtgagatccttcatattcaaggtggccaatgcggcaaccaaatcggagccaagttctgggaagttgtttgtgctgagcataggatgatgctgactttctcggtcttcccatctcctaaggtctctgatacggtcgtggagccttacaatgccactttgtctgttcaccaattggttgaaaatgctgatgagtgtatggttcttgacaatgaggccttgtatgacatctgtttccgcacacttaagctaaccactcccagcttcggtgatttgaaccatttgatatctgcaacaatgtctggagttacatgc

SEQ ID NO: 236787 - DNA, 339 bp, Gossypium hirsutum
ttccttgcgtccggttccaaaaaccctcttccccttccactctctctctctctgtcattttctcaaacaactgatcggttctttccgaaaatcgtacgccgtatttcaccagccaattaatcagtgattcggtcggattgactgaaaaaaataaacaagcgaagatgtctcttagaccgagcgcgaggaccgaggttcgacggaaccgatacaaggtggcggttgatgcggaggaaggtcggcggaggagagaagacaacatggtggagatccggaagaacaagagagaagagaaccttctaaaaaagcgtcgcgaaggacttcttgctcaacaaccgc

SEQ ID NO: 236788 - DNA, 478 bp, Gossypium hirsutum
ttttaatcaccttatgttgcctgcaaagctagattcagccgggatcatgcaacaatccatctgctacgacaaaacgagaagttggaccatatcggtttcgtggggtttcaccattcaagtttttagaggaatcttttctccaagggagatagaaatgccttcgagaacgttcttgaattggtataaaagagcagattacacagcgtattcattcaacacccgccctgttagccgaaacccttgccaaaagcctttcgtgttttacatgtcgagcgtcggaatgcattccaaactgaacacaaccgtgagcaaatatgatcgacaccgtgttcctcatcctccttgccgatggaaaatggctgatcctaacaatctttaaatggtgatcgtctacaagaaacctgacccgaatctatggaatagatcaccgagaagaaactgttgtagggtgatgaaaacaaaggagccaggaacaatg

SEQ ID NO: 236789 - DNA, 380 bp, Gossypium hirsutum
actataaaaggagagacaatttgcatgttgaaggaaaactaaggatttagtttgtttaagagttgtatcctcaagctcgagtttgctatatttgttgggtaatcgcactaatattggattaaagagaacgggagagcttgatccaaaggcttttaatgacacttgtaagttacgatttcctactgacgaagcggaaattcaggccactactctatgctcatcatggcaggagaatctgaagaatccagattgacatccaattttcaggagaaactaacaaatctaaagctggaatggggtgaagagatttataatgcagtggtaacagctttgaaagaacacttttgtagtaacttattgtagtatgcttgtagttgaag

SEQ ID NO: 236790 - DNA, 404 bp, Gossypium hirsutum
ttttaattgcattgactggtattgtttatattgaagatcactttggatatagagtaggctttggagttccagcaatcttaatgttgctctccgctcttgtgtttttccttgcttctcccttctatcttaagcagcaggcaagcaagagcttgcttactggctttgttcaagtaatcatcgttgcttataaaaaccgaaatctgacatttccacttccaaactcaactgcaagttaccatcataaaagggattctaacgttgttgcaccaacggacaaattaagatttttaaacaaagcttgcatcatcaaaaaccccgaacaagacattgctctggatggctcagccgcaaatccatggagtctttgcacggtagagcaagtggaagagctaaaagcgctgatt

SEQ ID NO: 236791 - DNA, 361 bp, Gossypium hirsutum
aatctttccagtttcaattttctcacaacaaaactgaaaatgtcttgctgttcaggaaaatgtggctgcggcgctgattgcaagtgtggcagtggctgtaacggatgcagtatgttccctgacataatagagaagactacaactgagactattgttcttggtgtggcaactcagaaaatgcactttgagggatctgagatgggagctggggttgcggccatggccttccgccttagcaacaatcttgttggaatcctcaacttcataaccttcctcctctcgatccccatcctcggagccggcatctggcttagtctagaaggcgtgacggaatgcgaacggtttttggacaagcccgtta

SEQ ID NO: 236792 - DNA, 471 bp, Gossypium hirsutum
cttacgcgtccggaactaacctaaacctaaagagggacagaagagagatatggagtggagatcatgctatttggacatggttttagtgccgctaagcttagcaatgagtttagcttatcattggtggctatggcgtaaggttcggtctcaaccgctcacaaccatcatcggaaccaatgcccgtggtcgacgcttctgggcctttgctatcatgaaggacaacgagaaaaagaatatcctagcagtccaaacgctacgaaacaccataatgggatcaaccctaatggccacaacctccatccttctttgcgccggtctagctgccgtcatcagcagcacatacagcatcaaacgaccgctcaacgattccatcttcggagctcatggcgagttcatggtgtctctcaaatacgtcaccatcttatccttctttctcttctctttcttttggtactctttttcgatccgatt

SEQ ID NO: 236793 - DNA, 444 bp, Gossypium hirsutum
cctacgcgtccggttgaaaggggatgatgttgatggtggtcttaacctggaagaagaatctgaaaagacggttctgaagaaagaatatcctgttgatatatcgttgcctgatatcaacaacgggatatatggaaccgatgactttaggatgtatacctctaaggtgaagccttgctcgagggcatactctcatgattggaccgagtgtcctttcgttcatcctggtgagaacgcgaggaggagggacccgaggaagtatccatacagctgtgtgccttgtccagagtttcgtaaaggagcatgccctaagggtgatgcttgtgaatatgcgcatggtgtgttcgagtcatggcttcatcctgctcaatatcggactagactttgcaaagatgagactggttgcacacgtaaagtctgtttctttgctcataaacctgatgagtt

SEQ ID NO: 236794 - DNA, 324 bp, Gossypium hirsutum
tttatctcccgttctacagggattcctacggtgcgggctcggtggacttcatatttggcaatgcagcagtggtgttccagaactgcaaactcgtggcccggaaacccatgaactcacaatcaaatatggttactgcccaaggaagattagatccaaaccataacactgggacttcgatccaaaactgtaatatactagcaagtgctgatcttgagcccgttaaaggctccatcaagtcatatttaggccggccctggaaggagtattcacgaactgttgtgatgcaatcctacattggtgaccatattgacccttcaggttggt

SEQ ID NO: 236795 - DNA, 456 bp, Gossypium hirsutum
tttcttacgcgtgggcggacgcgtgggcggaggcgtggggatggtattcaagatttaaacaaagctgctggtaccttaagaggtgcaaaagaggaggatatatgatataaccaatgtccttgaaggaattggtcttatagaaaagaaactcaagaacagaattcagtggaagggggtttatgtctcgaggccaggggaggttgatgagaatgttgctgctttgcaggcagaggttgaaaaccttcataatcaggaacgagattagatggacaaataagagagatgcaagaaagattgagggacctaagtgaagacaaaaattaataacaagtggctttttgttaccgaggaagatatcaagagcttaccctgtttccagaacgaaatgttgattgccattaaagctccgcacggaaccactttggaagtccctgatcctgacgaggatgatgattc

SEQ ID NO: 236796 - DNA, 397 bp, Gossypium hirsutum
tgtttaattctctgatttttaattagcatatgacggtttggaccgtcttattggatctcagtttgctgctgcatagaccataaggtaccaatcatgttagtctccttcactttgtgcaagcaaacattgtctttaccacacaaacctcctggggagctcaaatccaatttctttaggccaaggctagaaaaagagaaggttgtgatcataatgggagcgactggaaccggcaagtcacggctttccatcgaccttgctacccggttcccggccgaaataataaattcggatgggactcgacataacgaccaagaagatcccgaggaagaacggtgtggggttccacaccatctgttaggtgaaataagtccctacacagatttcacggcaacggatt

SEQ ID NO: 236797 - DNA, 416 bp, Gossypium hirsutum
atcgcgtgggcggacgcgtgggcaaaatcgtaaaaggaaattacattcggatccagtatggacaagaacatgttagcaggtctcgagggtctccctgaagaagataaggcccgaatgtccgccatgatcgaccatcttcagcttcgtgatagtctaagaatgtataattctcttgtggatagatgcttcaatgactgcgtggacaacttcactcgcaagactctgcagaagcaagaggagacctgcgtcatgcgatgcgcggagaagttcttgaagcactcaatgcgtgtaggactgaggtttgcagagcttaactcgcaggccgcaacacaggattaaagctaataaacgaccatgagttggagctcaaaatgtttttgcatatcatgtagaattttcttcttttgggataaatt

SEQ ID NO: 236798 - DNA, 320 bp, Gossypium hirsutum
tgttacgcgtacgaacctacaaaatcatggctggtgctccacagaattaacagtgacaccccagcacataactccaccacctgtacacctgataattccttcatgctttgccaaaagcgctaccctttaacatgcaatatgcccgtccctgacaccgttgctcgccaccacacccacccagttggtcccaaccagtgctgctctgccgttgtccaacagatcgccgtccccgtctccaccgtctggtctgttgtacagcgattcgataatgcccaggcttacaagcacttcgtcaagagctgtcacgtcatccgtgggga

SEQ ID NO: 236799 - DNA, 472 bp, Gossypium hirsutum
ttctctcgcgtccgcaaacatccatggcctggtggggtctatattctattctctccgtcgttttcctctatttcgttttcattacctcgaggaagcgccgccgtctgcctctccctcctggtcctaaaccatggcccatcattggcaacttgccacatatgagccctgtgcctcaccaaggtttagccgccatggccaaagtctacggccctctcatgcacctcaggttggggttcgtggatgttgtggtggcagcgcccgcctccatggcggctcaattcttgaaagttcatgactctaacttctccagccgcccaccgaatgccggcgccaagtatgtggcttacaactatcaggaccttgtgtctgcgccgtacggaccgaggtggcggctgctacgtaaaatgagctcccttcatctcttctccggcaaggctttggacgactttagacagattctcgaggaggagat

SEQ ID NO: 236800 - DNA, 347 bp, Gossypium hirsutum
ttttatcgcgtccggtgactatgaagaatttagaatgataccgatgttgaggtgcttgttactgagagtgggtggccttccaagggggactcaaaggagccttatgctactaaagacaatgctgatacctataattcgaatcttattaaacatgtattagaccgtagtggaacccctctgcatccggaaatcacttccagtgtgtatatttatgagttgttcaatgaggattcgaggtcacctacagagtctagggcaaattggggatcgctttattcgaattcaaccccggagtatttgcttcatgtatcaggaagtgggacctttttggcaaatgatacaactaa

SEQ ID NO: 236801 - DNA, 505 bp, Gossypium hirsutum
ctttcgtttgggcgacactccatcctctcctggtagaactgtgggggaagaatcctcaccatcaattactcctataccttctgctgaagctgatcaacagtccacattggcatctggctccagtgttcttttggtcgataatcaggggaattccttgaacaataggtctcccaatcaatctcctaatagtcaagatagagcaggaccttcagaattccagtcgttttcagaatcattaaaatcaaggtttaatgctgcttcaatgagatacaaggagtcgatttcaaagagtacaagggggtggaaagagaggtttttctctcgcaacacttccatgtcagatcttggttctcaagttaggagagaggttaatgctggcattgcaacagtctcgcgtatgatagagcgtttagaaaccagagatgatagaacaaacacggctactgtatcaaacagttcggaagacagctctaatctagaatcaaataatcaccagacttctgat

SEQ ID NO: 236802 - DNA, 449 bp, Gossypium hirsutum
tttttaaaagacataaggccttatggcatcaaagagaattctcaaggtgctgagggaactgcaaagagaccctccaacttcatgcagtgcaggtccggtggcagaagacatgttccagtggcaagcgacaatactcggccctggcgacagcccctattgcggtggggtttttattgttaacatccacttccctacggactaccctttcaagcctccaaaggtcgtgtttagaaccaaagtgttccacccaaacataaacagcaatgggaatatttgtttagatattcttaaagagcagtggagtcctgcactcaccatttcgaaggttttgctatcgatatgttcgctgctgacggacccaaatgcagatgatccacttgttcctgagattgctcatatatacaagactgacaaagtcaagtacgaaacgattgctcgtagctggactt

SEQ ID NO: 236803 - DNA, 374 bp, Gossypium hirsutum
tgtaaatttgaggaagccttggagtttgctgaggaagtgcttgcaccgaggggagaagagaaccaaacctttctagaagaattagagaggaccgtttcgctcctggcgtttgaagatgtttcaaactgcccgcttggagagcttttggacatatcacaacgcattaagacagcaagcgaagtgaatgcagccattcttactagccagtctcatgaaaaagacccgaagcttccaagcttactaaagatgctgatatgggctcagaatcaactcgatgagaaagctgcttatcctcgcataaacaatttgtcaaatgccacgctcgaagatcccacggtttgaaacaaaggttcgaaaaacactatggatgaatc

SEQ ID NO: 236804 - DNA, 413 bp, Gossypium hirsutum
ttaaataattgatctgatatgcacccttgtgttctccatcattgtgctgggaacaaccatcaggatgctacgaaacattttggaagttcttatggagagcacaccccgagaaattgatgccacaaggctagagaagggtttatgcgagatggatgaggttgtcgccatacatgaactgcacatttgggctataactgttggtaaggtgttattagcttgccatgtattaattaagcctgaagctgatgctgacatggtattgaacaaggttatagattacatcaagagagattacaatatcagtcatgtgactattcagatagaacgccagtgtgaatccatggcgcagtaagttttgtagttttaccgtttttggcttttggtatattttcaagatttcttcatattcctct

SEQ ID NO: 236805 - DNA, 487 bp, Gossypium hirsutum
tcccactcgtccgcgaagacggccgcaccttagctgactacaacatccaaaaggaatccactctccaccttgttctccgtctcaggggtggcgccaagaagaggaagaagaagacctacaccaagcctaagaagatcaagcacaagaagaagaaggtcaagctcgccgtgctccagttctacaaggtcgatgaatccggcaaggttcagaggctgaggaaagagtgccccaatgctgagtgtggggctggcactttcatggctaaccattttgataggcactattgcggtaagtgtggactcacttatgtttaccaaaaagctggtggcgattgagtttccacctttagcttgtcgatcttttgttagtatgagagacgggattttaatttccaattatcgttcgactctttaattttttaatgttacgatacttgggatatgatcatcaattttagcttttctgaatctaaagtagggcattttac

SEQ ID NO: 236806 - DNA, 436 bp, Gossypium hirsutum
tcataatcatcagcaacaaggaactggcgggagtgaaaaccctcagcttccaccaccacctactcatgttggagctggtggtggaaccatagccattagacccagctcgatggcggatcgagccaggctagccaaggttccacaaccagaagcagtcctcaagtgtccaaggtgtgactccaccaacaccaaggtctgctacttgaacaactacagcctctcacagccacgccacttttgcaaggcgtgccggcggtattggaccagaggaggtgctcttaggaacgttcccgacggtggaggttgccggagaaacaagaaaaacaaaagcagcaccagctcaaaatcaccagcttgcacccagaaacaagctgaagtgatcactggtcataatttgccacagcaaacacctcatttacccttcatggcttctctg

SEQ ID NO: 236807 - DNA, 421 bp, Gossypium hirsutum
ttccacgcgtccgcccacgcgtccgcccaggcgtgcaaagcctttcactattcaacaagctgaaacggagcaatgtgatgacaagtgcgagcaacgtgtgactgctctgacaagagccagtgcgacatgaacggaaacagcatggacattgggactgaaaagagctacgttagtactgtagcggttgcgggtggggctaagaacgaaggcaagggctagagtggcgacagctgcagttgtgcaaactgcacaggaggagctcattaagaagacatagcaccatgagggaggagctcatagaactattgggagctagaactaatgaaattgagtggaataaatgggtgctatgctgttgttggtggtgacattgagtgtgttttcatgtctgtctgtcttatgtctgagtctcattgtacac

SEQ ID NO: 236808 - DNA, 286 bp, Gossypium hirsutum
ggggcggcgttgctatgcccttgtcttttgatcacaagcccgacaggcctgatgagttggagagagttgaagctgctggtggaagggtcataaactggaatggatatcgagtgcttggagtactggccacttcaagatccataggtgatcagtacctcaaaccctttgtgatatgcaaaccggaagtgaccgtacgagaggtaacgaatggtgacgagttcctgatactggctagtgacggactttgggatgtggtatcgaatgaggtggcgtgtcgagtggtaag

SEQ ID NO: 236809 - DNA, 248 bp, Gossypium hirsutum
tagggattgaagcagaagaaggcacacctgatggagatccaagtcaatggtggaacaattgctgacaaggttgattttgcttacaagttctttgagaagcaagtccccattgatgctgttttccagaaggatgaaatgatcgatattattggtgtcacaaagggtaaaggttatgaaggtgttggacgtgatgccattgctaaggcaaatcccgttgttaaagctgataagggcaagaggttctgaaa

SEQ ID NO: 236810 - DNA, 421 bp, Gossypium hirsutum
tgtagggtgtaccattagcccatcaaactggatagcttatgaaggtaaactctactgcaaacatcaccatatccaactcttcaaggagaaaggaaactacagccaactcgagaccgaacgagagaaacaagccgccaccgccgccaataaggttcctgcccctgctgcaacatcaaccacaaccacaaccacggagattgcagctgagtcgtaatgatctcagtgtgcatcactgctgcttcaatgaaaaaaactttgtaaaacgatccaatgtcattgctgtgttgattttctgcaatggggttctttttattttttttctttgatccagatattattcttggttcataatatgttacataaatttcccactttcaaagatgggattgaggtgatatgttccaagtggattcagcttttg

SEQ ID NO: 236811 - DNA, 482 bp, Gossypium hirsutum
tggaggattgagaacttctccagtattaaagactacatgctctgctctgaaagtttcactgtcgatgacagtaaatggcaacttattatctacccacgggggaacaatgtgggttttttgtcaatttttttacgtgttgcagattctgcagctttggcttccggatggactagatatgcccatttcggatttgcagtcatcgaccaattcgatcgtgaaaattccaaaacaatagccactaagaaagagttcaacgcgaactaccctattcggggcttcggttcattcttacctcttactgaattacgcaaccctaaaagaggctatctcctcaatgatgcatgcttggttgaagcctacgttttcactggtcggactgtagatatgatttcacatgaatttatagtcaaaactgatttggataaacgtaagaccaaggaaggtgattgttttaaggcagccataggcaaccagaaaactac

SEQ ID NO: 236812 - DNA, 461 bp, Gossypium hirsutum
cttgctttgttcatcgaccaagatggcgtatgatcattttcaccctgtttgggctacttaccagagagttgtgtggcatcaattattcagcatttggatcctccggagatatgtaaacttgcaaagttgaaccgagcatttagtgctgcttcttgggctgattttgtttgggaatccaaattgccacctaattatcatattcttgttcataaaattctgggttttgtgcctcaaaacttgggtaaacgagacatttatacaaggctatgtcgacctaatacttttgatggtggcaccaagaaagtatggctgcataagagcacaggtggtgtttgtatgtcaatttcttcaaagggattacaaataacggggattgatgatcgaagatactggaatcatattcctactaatgaatccaggttccactcaattgcgtatcttcggcaaatctggtggttcga

SEQ ID NO: 236813 - DNA, 390 bp, Gossypium hirsutum
  unsure (1)..(390): unsure at all n locations
tgntatctcctctctcttttctggtcccggcatgatccctccactctcaatcgtcagggtggagatgtgggagcacaatatagatcagggatatactactataacgaaaaccaagctcgtcttgcaagagagtcaatggaagctaagcaattagagttgaaagataagaaaattgtaactgagattctgccggcgaaacgtttttataaggcggaagagtaccatcagcaatatttagaaaaaggtggaggtttaggggctaaacagtcttctgaaaaaggttgcactgaccccattagatgctatggctgaagaaagcccttttgaatatgtttttttttaatatcatgatggcacttaagcttcttgtctggtaataaacaagttatc

SEQ ID NO: 236814 - DNA, 489 bp, Gossypium hirsutum
ctgccagatgccgccaacttagctgtgcccgccatgagaaatgtcgtttcagcgttgaaaaaggttggcctgcaggataggatcaaggtttcaactccactctcctttgtggttttatccaaatcctacccaccttccgatggggcgtttgacggtagccatgataatgtcttgggacctttgttggacttcctggaagagaaccaatcaccttttatggtcaatttatatcctttttacgctattggagattcttctttggatgctgttctgtttaagtcaccctcttccattttcgtagacccgaataccggttttagttacaagaacatttttgatgctcaactagatgctggtcatttcgctttggccaaacggaaatccagaagcataccgattattgttacggaaaccggctggcctacgagaggttcaggaagacataggttagcgatggctagtcttgacaatgatgacgactcctatgct

SEQ ID NO: 236815 - DNA, 253 bp, Gossypium hirsutum
ttcacgcgtccggaaataaatggtatttggttgtatgtttcacatgaactcgcgtaggttgcgaatctttttagcaggattcttactgcatactcaaaggttccccagaagtcaaaggcaacatcaacaaaaggtgagtttgaagaactggaagctgtctcaacaatggccatcatggatggtcccttggagccatcatcatcaactgcacccagtgtcgcagatgtccctgatgaccctgcctttgtgaatt

SEQ ID NO: 236816 - DNA, 372 bp, Gossypium hirsutum
tccacgcgtccgcccacgcgtccgcccacgcgtccggaaaaagatatgttgacacccttaacccttttagtaccgccggcatctcctccttcactgttttccttcaatcgcttctctcatttcccattctctacctccatctccgccaccaccacctccgcctctgacagatttattgagagtagtatctagaagacttgttttggcaaccaagacgcagtcaataacgaccatggcaagtctagaggaagaatgtaaggggaatctgaaggcacagttagcaaaactatttgaagtttcacttaaagtaacagttccgaatgaggcagatgttgacccattgatagctgcctgcactggcaaatttggtga

SEQ ID NO: 236817 - DNA, 211 bp, Gossypium hirsutum
gtacatcccttgtcagccaccatcatgtgcgaatattcaaacaagaaaactcgtggagcatttatcgctgctgtgtttgcaatgcaaggatttgggattttaacaggtgggatcgttgcacttatcgtgtcggcttcgttcgatcatgcatataaggcccctccatattcggttaacccaaaagattcgactgcgcctgaagccgactata

SEQ ID NO: 236818 - DNA, 371 bp, Gossypium hirsutum
tgaagcagcacacaggtccatctccgtctcctctctttcccgcttccttcgacttgctttctcgccttttgcttcaaaccctacttctcttcttcattctcaaaatgaagctcgtcaggtttttgatgaagttgaacaatgaaacggtgtcgattgagctcaagaacggaaccgtcgttcacggaaccatcacaggcgtggatatcagcatgaacacccatctgaaaacagtgaaacttacattgaaggggaaaaatccagtgagtttggatcacctcagtgtgaggggtaacaatattcgctattatatcctgcctgacagcttaaatcttgagacattgctggttgaagagacaccaagagtgaagccc

SEQ ID NO: 236819 - DNA, 384 bp, Gossypium hirsutum
  unsure (1)..(384): unsure at all n locations
ctctttcgtccgatttatgacatccttgaaccggggtaccatgatcctacttcacaactaagctcaaaaggaaacaaaagcttgccagttagcttccaacaattaggggctacatcgaagcctcttccggtgaggactcggattttcggtcgtgcttggccgtttcgagcaccggttaaggatggtatcgtccctttatggcctgaactagcgcaaacgaacagccgcgatgtcccctgtttcaatgatgaagttgcgacgctatggttgaatgatgcaaaagttaggcaagctattcatgcccaaccggaaaatgtatccgggacttgggagttatgtaccgatagaataagctattaccatgatngctggagtatgattctg

SEQ ID NO: 236820 - DNA, 452 bp, Gossypium hirsutum
atcaactgccatcatggatcttatagaatcacgctgggaagagttggtcggagaaatgccgttaaaggtttgttatccagccatggaaactcatgaatggcggattataacaggatgtgaccccaaaaacacccggtggagttaccacaatggaggatcatggccagtgttactatggcttctcacagccgcttgtgtgaagactggacgtccccaaattgcaagacgtgccatcgaaatagccgaagccaggttgctgaaagaccattggccagaatattacgacggaaagctgggccgatacatcggtaagcaatcacgtaaagctcaaacgtggtcgattgctggttacttagtggcgaagatgatgttggaagacccatctcacttaggtatgatagcgattgaagaagataaacaaatgaagcccattttgagaagatcatattcat

SEQ ID NO: 236821 - DNA, 312 bp, Gossypium hirsutum
ctcacgcgtccgaaaatccaggaaaacccgagttcagaaacgaaaacaagattgctattttctttcattttgggaattaatcaagaaaatggagacggtgatggaagatgaagagtacaattacagagaagtaaatttgccttcgctgatcccagtagtcccagagccagcactagagagggaaacaggggagagaaggagaggccgagatatactcattgctattgatcacggtcccaagagcaaacacgcctttgattgggctcttattcacttcctcaggcttgctgataccatccatcttgtccatgc

SEQ ID NO: 236822 - DNA, 434 bp, Gossypium hirsutum
  unsure (1)..(434): unsure at all n locations
ctctcgcgtccgtggggctgagcatgcaggatgttcttttcctggcaaatgacatgaatgttgcagaatactttgatgcaactctttcaagtggtgctgacgtaaagctagctgccaactggatcatgggtgatattgctgcctatatgaagaacgaaaagctgtccattaatgatatcaaacttacaccacaagagctagccgagctgatagcttccattaaaagtgggacaatcagtggaaagattggaaaagagatactatctgagctgctagccaaaggtggaactgtgaagggactcatagaagagaaggatcttattcagatagctgatcctgttgagatcgngaaaatgatagataaagtgatttctgagaatccaaaacagctagaacaatatcgcggcgggaaaactaagctgcagggctttttt

SEQ ID NO: 236823 - DNA, 408 bp, Gossypium hirsutum
gtcttctccttcgccttgagcgaatatgaataccaagttgctttcagcatgttcatgcaccaatatcaaaagtcctatgatcacctcgaatttgccaagagatacaacatcttcaagagcaatttggactttatcaacgcccacaacaaggcaaacaagaccttcactgttggaatgaacaaatttggagatctctccattaaggaattcagcaaaatctacttgggaactagaatcactaaacaagtcccagctcacgtaagaaagacttccaccagaggacttcctgcatctgttgactggagacaaaagggagctgttactcacgtgaagaaccaaggacaatgtggatcttgctggtctttctctaccactggatctgttgaaggatgccactttctctcaact

SEQ ID NO: 236824 - DNA, 378 bp, Gossypium hirsutum
gccactggaatcgtgctcggaggcgtgcttggcattgatgactgtcatattcttctgggccatgcatgataccgacttcttctcggacaaatttggtgttcgatctctacgggaacgagagcatgagatgatgggcgctttatacttacaagtgagcattgtgagccaggctctgatcttcgggactagatcgcgtagctggtcgtacgctgagcgtcccggactactattggtcactgccttcatcattgcacagcttgttgcaactttgattgctgtatatgcaaactggggatttgcaaggatcaaaggaattggttggggatgggcttggtgtcatatggctctacagtatagttttctacgtaccattggata

SEQ ID NO: 236825 - DNA, 410 bp, Gossypium hirsutum
gtaactcctgttgatgaccagtctgcaccagtctgcaccattctacattaccattggagatggaggaaatcatgatggacccgctataggcatggtggaaccacagcccagcttctcagcctatagggaggctagttttggtcatggtatattcgatatcaagaacaggacacatgcctatttcagttggcaccgaaatcaagatggatatgctgtcgaagctgattctttctggtttcacaacagttactggaatcccttagggaaatcctttgtagctcaatactaataaatcattcatccaaactagttcttacaatatagtagtagttaaactgtaacgtgcctctgtccgtcatgaaagaaaaatatatcttggattttaagatcagtgtgaacataaattgtca

SEQ ID NO: 236826 - DNA, 443 bp, Gossypium hirsutum
ttcacgcgtccgaaaaaataaagaaaaaaaaagtgaaatttagctaacaccaaacattacaagttaaagaaaattagtgactaatagattccataatgatggttatagggagtatttgggagtattatccgtagcaacgttcatttagcatgtacgagaatgaaaggccctttttatgtgcctatgttcaagccctttggggtagtctttgcaacagttttcggaacctctttctttacaaacagtcttcattatggaaggtaattaaaatctttctcccttttctcttacctttcaaatctttatatcgttgttgacacaaaaaggttgtacagtgtgataggtacaataatagtaggaacgggatattatgctgtgatgtttggacaaatcagggaagaggaacttcgtaaagagcgtgaagttggaacagtgagtgatat

SEQ ID NO: 236827 - DNA, 431 bp, Gossypium hirsutum
  unsure (1)..(431): unsure at all n locations
ttttagcagtaccggtttcaccagctatgggtatggacttggtcgccggcggcaagagcaagaagacgaagagaactgctcccaagtctgatgatatatatctcaagctccttgtcaagctttaccgttttctggtaagaaggactggcagcaaattcaatgcggtgatcttgaagcggctatttatgagcaaaaccaacaagcctactttatctctttctaggttgattcaattcatgaagggcaaggaggataagattgctgtggtagtcgnggctgtcaccgatgacattcgtgtgtatgaagttcctgcgctgaaggttactgcgttaaggttcactgaaacggccagggcaaggattgagaaagctggtggngaatgtttaacatttgaccaacttgctcttcgagcacctcttggacagaacacg

SEQ ID NO: 236828 - DNA, 431 bp, Gossypium hirsutum
cccacgcgtccgctacctgcgaattctgcgttcactgctgtgaccgctctgacattttcatgcactcacactctccgaccggagacaggaaaaaaaacatggagcaaccgctgacgtctcgaaggacccgtaaatctcaagcgaaatccgagctatactctacctttgtcattcattccggttctgaatccgattccgattctggcaaatctaaaccgaaaccgcaaccatctcgtgacccggacctttacgccacaatggtttacaaagacgttgacgaagaaggtgaagatggatcttccatccctcctcccttcaaatgtgcgccgaaactctttggcggcggagggggcactccttccgacgccgaagatggcagtggcgatgcaggagatttgggaaccatgatcgggaaaagggatcatgttcgt

SEQ ID NO: 236829 - DNA, 425 bp, Gossypium hirsutum
ccctcgcttccgatagctaagaaagtcctcactacgtggtgccaatggtgagcttcacccttcaagattctgtgagaaggatctactaaaagctgtggacagggaatatgttttcgcttacatcgacgatccctgcagtgctacctacccgttgatgcaaaagctgaggcaagtacttgttgagaacgcattgacaaatggtgaaaatgagaagaatgcaagcacttcaatcttccaaaagattgcagcttttgaagaagaattaaaggctgttttgccaaaggaggtggagagtgcaagggcatcagttgagaatggaaatgctgcaatccctaacaagatcaaggaatgtagatccttcccgctgtacaaatttgtgagggaagagcttggaactgggctgctaactggagaaaacgttatgt

SEQ ID NO: 236830 - DNA, 274 bp, Gossypium hirsutum
ccctcgctttcgcggacgcgtgggcgacccacgcgtgcgagtggctttaattcttgagcacaagtatgagcagcttcagcaaatgtctgacgatcccatgaattaaagtgttccaggtatttcgagaagtcactgctgtatgtaaaacgcttcagccgttataaaaatccagattctgttaggcaagttcgagaaattttgagtagatatcagttagctgaattcgagctttgtgttcttggcaacctgtgttctgaaactgtggaggaagcaa

SEQ ID NO: 236831 - DNA, 346 bp, Gossypium hirsutum
ccttcaacctaaattcttaaactaaaagctaagtgctaagtttgaagccccttcttcctttttgtacatccaagccaagtctccagcaataacccaagccaaaccaaagagagcttatctctgcggaactctcctgtaattttcaccttcttatttatacagaggtgattgctcattgattagatatatcaatcagaaaacaaatgaacggtggtgatgcttacggtatgatggaggcgcaatacatttggagacaccacaggcacgacatcagagacgaccagtgctcctctgctcttgtcaaacatgtcaaagctcctgttaacctcgtatggtcattggtaag

SEQ ID NO: 236832 - DNA, 374 bp, Gossypium hirsutum
cccacgcgtccgcccacgcgtccgcccacgcgtccgcgttaccattgttgacacttcctcaagcatggagagcagaataaagcttattgatgagttgaagcgagctgatgccgtggttttaacatatgcttgtgatcagcctatgacactcagtcgtctgagtagcttctggcttcccgagcttcgtaaattagagatcaaggcgccagtgattgttgttgggtgtaaacttgatttacgagatgaacgtcagcccatgaacttggaacaggtcatggcacccatcatgcagcagttcagggagatcgagacctgtatagaatgttcctctgctactctaattcaggtccctgatgtattctattatgctcaaa

SEQ ID NO: 236833 - DNA, 404 bp, Gossypium hirsutum
  unsure (1)..(404): unsure at all n locations
aagtaacagggagagagctcatgaagtatatgtgcgtgtgaagacagaggttgagaaatgcatagcctacttgaaggaaaaaagagaagaagatccctacaggaatttaatgactcggttggtgtaccaggccatgcatggcttcaaagctccagtcccgacatttgagctttgatgcacagtatatataaaggttcatattgggttttctccttacaaggtttggcaataaaagctgcattgttacatgtcaagaaaacacagtatatataagctatagacaatatcaaagaaaggaatggtctacttttccttgcttttgtggggatgggtgactttttgttatacctattcactattggctntgattaactcaattgattatataataattgatatattat

SEQ ID NO: 236834 - DNA, 332 bp, Gossypium hirsutum
cggtcgcttgggcggacgcgtgggcggacgcgtgggcggacgcgtggggcacacgacattttcgtgggcaactggaaaccaaccaagaacgacacagaggaaaaacggggtcctacttttggctccaccatgaacgttctctacggagattacacttgcgggcaaggcgatattgatcccatgaacatcatcatctcccattaccttcattaccttgacttactaggtgtcgggcgagaggaagcagggccacacgaggagctaagctgtgccgagcagaaagcattcaacccaaccccagctccacctgctgccagtgctttctaatcttt

SEQ ID NO: 236835 - DNA, 402 bp, Gossypium hirsutum
cagttctttccgtatcttatggtcttgaggaatacgctgcgactgttgtgaatgcgattcgggttgtttgtgatcgtaaatcggtcaaacatccgattatttgtagcgaaagtgggagagctattgtttcccatcattcgattttgatattcgaggccatgtctacaactgatacggcaccatcgatgaaccaaattaaccttccttttatcgagctgtccgaggatgctcgtagtgactattggaacatgagtgatgcagtaatgagacatgacaatgagacatgtttgttttatgctgatcaattgaaacaaagatgtgtagaacaatttaaagaagggagtttggggatcgaacagttagctgctgtcgacgggttattcgatttggttacgaaaatta

SEQ ID NO: 236836 - DNA, 429 bp, Gossypium hirsutum
gattataaattactgttatttcgtcccttggtaatggatccgattctttcaactgcggttctttcacttgttattggagctgtgatcgctttcgttttcttcagaagctaccttctcaaacaaagatccgaagtgcagaccattgcgaaaccggatcttcattcagatccgaaaaagcattcaaagcctcctcagcatgtctctagaaagtctcactctaaatctcacgctcatgcccgtgacaaggattcaaataagcgtcatcatccattggacttgaatactcttaaaggtcatgcggattcggtcacaggactctgtttctcccctgatgctcgtaacttggcaacagcttgctctgatggcgtggtgaggatatttaagctggaggatgcttcaagtaaaagtttcaagtttttaagaattaat

SEQ ID NO: 236837 - DNA, 356 bp, Gossypium hirsutum
ttcctcgcgtccgatttgaggaagatgttactgagagaggacgtctctaaggttcttggaattttgaaggtttcagcggcaattggctttgatgctggggttctttcttgcttggagtacttggaagccgcgccgtggacggaggacgaagaagaaaaagtggcttctttattggcggagctccgccttgaaaacgtgggagctggggaagttttaaagagggtgtctattgaagctagcaacggaattgatggtggcgataatgaagaagtgcttctcaagcttttgcatgtggttcttcaaggcaaagacgaaaaagcaaggcgtgaaatgaaagaattggtgttgaagatgct

SEQ ID NO: 236838 - DNA, 353 bp, Gossypium hirsutum
ttgaatcaccgccgacggatatgtggcctttgctgataatgctgaattgctgaaaggtgcctgtggcaaatctcttgcttcttttcctcaaggctgtttctactccacagcagtaggaggattaagaagctatgagaatcctaagaacaagatcactgcagtgcctgctgaagaagaggagatatggggtgctaaattcaaggtggaagggccaacagttgttgctgccacagagtagtcctttgctttctccttctaaatctatggatccatgggaatataggagctgcaaatgcatagcatatggatcagtctccatgtgaataactgagtcccagtacttgtagaatggg

SEQ ID NO: 236839 - DNA, 351 bp, Gossypium hirsutum
ctttggagctccaaagcttagtattgtgagaatctgtccactaaattccggtcatggattcttctgatttcaccgaatcaatgctagatcagctccccatggaaagattttgggacattcctttgtaccaatgggatggattttggtacagatcttatcatctccaagcaacaatggctcttcgttcccagtacatcgcacgcgacgacgacatcatcctcgcatcccccatgaaaaccggcaccacttggctcaaagccctttgtttttccatccttcaaaaggacggaaacgccgctcgccttaatggagaaacggtaggcaagaccgaggaagacgatccccgtcaca

SEQ ID NO: 236840 - DNA, 376 bp, Gossypium hirsutum
tccgttcgtcgccatggtgaagtttctaaagccgaacaaagctgtcattgtcctgcaaggccgatacgccggacgcaaagctgtgatcgtaaaatccttcgacgacggcacacgtgaccgtccctatggccactgtttggtcgcggggataaaaaagtacccgagcaaggtcatcctcaaggactccgccaagaaaaccgccaagaaatcgcgcgtcaagtgcttcgtcaagctcgtgaactaccagcacctgatgcccacacgatacaccctcgacgtcgacttgaaagacaccgtcacagtcgacgcgcttcagaccaaggacaagaaagtagccacttgtaagactatcaaacaaaggctggaagagaggttc

SEQ ID NO: 236841 - DNA, 468 bp, Gossypium hirsutum
tttacgtgtgggcggacgcgtgggcgagaatactccaaccacaaaagagggatactattacagaactatctttgagaagttttttccaaagaatgctgcaaggtcaacagttccaggaggtccaagtgtggcgtgcagtacagcaaaagcagtggaatgggatgcagcatggtcagaaaatcccgacccctccggtcgggctgcactaggtgttcatgcctctgcttatgaggcacaaaaaggaggaattgcgggaaagattgcaatagcataaatactgcatctttatttgatagctgactggcggatttatagacctagttcattgctgaaatgagaaggcatttgtttctttcaaatgctcaaaagtcatatgaatccaaatgtaatgttgtaaggtgcctctcatgtagttaagttcctatctctttcccattcctcccctttttctcccttttggtatttgac

SEQ ID NO: 236842 - DNA, 228 bp, Gossypium hirsutum
gttagtgttgatcaaagaaattaaaaaatgcgatacaggggggcgttgaaagtggctccgcttctgcttcttctgctaatcctttctacatttgcgaatgtcaagaagacaccccatgtgacctagttacagatcggagtcaagcataaccccaaattatgcaagttccaagctcacaaaggtggtcgactcaaagtgcactatcggcggcaactcactgatggaact

SEQ ID NO: 236843 - DNA, 386 bp, Gossypium hirsutum
attagactgactcaaggaatgggttgacaggaatttgcaacaagaggtctggaatccacaagctaatcaagaaggatatgcactctctgctgtcgaaactttgagaatcattgatgagactttagatgcatttttccagcttgcaataccagcacaaactgcattgctacctgatgtgatagttggcctagacaagtgtcttcagtattatgtgatcaaggcaaaatctggatgtgcttcacgcaatacatatatcccaacaatgcctgctttgaccagatgtgagattggatcaaagttccaaggtgtctggaagaagaaagaaaagtcacaaaatactcaaaaaagaaattcccaggttgcaactatgaatggagataagccat

SEQ ID NO: 236844 - DNA, 456 bp, Gossypium hirsutum
tttcacgtttccgttcagctttttcacaatattcagctcccaccattggagtggattttaagatcaagttcttaacagttggtggaaagagattgaagcttaccatttgggatactgccggccaagaaaggttccgaacattaacaagctcttactatagaggtgcccatgggatcatatttgcttatgatgtaacacggagagaaacgttcacaaatttgtctgatgtttgggccaaagaagtggagctctattctaccaatcaagactgtgtcaagatccttgtcggaaataaaattgatcgtgaatctgaaagggctgtaagtaaagaagaagggattgaacttgcaaaagagcttggatgtacgttcattgaatgcagtgctaaaacaggacaaaacgtccaacaatgctttgaggacctttcactcaagataatggaagttcgtagtcttt

SEQ ID NO: 236845 - DNA, 473 bp, Gossypium hirsutum
atctaagtgggtatctaggcaatgatatagctaatcatcacttgagtgaatcactgcacctgataagcataggaaccaatgacttcctagagaactactatccttttccaacccgatcttcggtgtaccctgtcgataaatacgagatttttctaataggaattgccaacaatttcatcagggagctttacaatctgggagctcggaagatagcaataagcggccttcctccgatgggatgtttaccgttggaaagaacgacgaatatcatgcacggaagtgcatgtatcgaagagtataacgacgtggctaaagatttcaatcaaaagttgcaggattctgtcacggagctgaaccgggagctcggtggaatccaactcgtgatgtcgaacccctactataagctcttagaaatgatccaaaatccaattctgttcggttagtccttagcaatagttcatagtacttgcata

SEQ ID NO: 236846 - DNA, 401 bp, Gossypium hirsutum
acgttcacgtcttccgcccacgcgtccgcatcgttctaacagcgaaggttgtagaagcagctgcgtgagcttcctaagctacctagggtttccttcattcgaaaatgatttacgacgtcaattctcctctcttccgctctttcctcagccagaagggaggctcctccgacaagagaaaaatggaggagcagaagcctaaggaacagagacccaaagcaaatgagaataagcctgtcatgacagagtaacagctgcttttgtttagtatgaatggcaagttggtggatggttgttcttagaactctgatatgttcgagattggaaatgcttgttgatgtattcaaatactatcacaacgatttttcttctttgagatggaatgatattcaactttgtggatg

SEQ ID NO: 236847 - DNA, 393 bp, Gossypium hirsutum
ttatcggttcaggaaaatgtggctgcggcgctgattgcaagtgtggcagtggctgtaacggatgcagtatgttccctgacataatagagaagactacaactgagactattgttcttggtgtggcaactcagaaaatgcactttgagggatctgagatgggagttggggttgagggtggatgcccgtgtggagacaactgcaaatgcaacccttgcacttgcgggaagtgaacaacaaagagaagcagagtggcctttgtcattttaactaaataaattctattactttagtatgtatcagcaaatcttcatgaggatatggttcttaattatgtgtaatgtggcttttctgctatgtcagaatgtattatgatatttaagaaagtttgttttc

SEQ ID NO: 236848 - DNA, 422 bp, Gossypium hirsutum
  unsure (1)..(422): unsure at all n locations
gtttgattttgcctgaggccacatcaaaagagtgtctgccagacgtaaaacttgaactcaactccgggaaaaaggattcttttgagggtgttcgagacattaatgctacagtcatacttccaagtggtgtacatagcctgccaaataaaggcgaaccttcatcactgatccaacgatggaaatctggtggagcatgtgattgcggtggctgggatttgggttgcaaacttaggattctgtctaataagagccaatgcaaccagcgccctagttctttgagaggttcttcaatttctaatcaatttgaacttttcttccagggaggtgcacaagacaacatgccttttttcagcttggcctctntcaatgacggtatctattcagttgagttcaattcatcactttctcttatgcaagcattt

SEQ ID NO: 236849 - DNA, 414 bp, Gossypium hirsutum
acggttatgtttcatgggatgttgataatgctcgactggagcaagtgttcagtgaacatggtacggtagtccaggctcgtgtagtctatgatagggagacaggccgatcccgtggtttcggtttcgtgactatgtcttcggaaactgaattgaatgatgccattgctgctcttgacggacagagtttggatggaagagcaataagagtaaacgttgcagaggaaagaccaaggcgaggcttcttttgatgttgaaaggatttacatacatgatctactgctgtttgctttttccttttcatttttcccaaataacttgacctatttttcccccttttttaagggtgaatttacaggttttagtatatttgtaaggaatatatattttatccattgttatgaaaccatcatttag

SEQ ID NO: 236850 - DNA, 392 bp, Gossypium hirsutum
tttaattctttgagaaagaagcagactgagaaaatgttctccgatgatattatcaggttttatgcagcggaattggctctggctttggagtatcttcataatttaggcattgtttatcgagatttgaagcctgaaaatattatgatccaggaaaatggccatctcatgcttgtagatttcgatctttccacgaagctttctcctatgtcgcctgaaaaatcgattcctcccaactcggtcagacaaacgccgccggactcagtcaagaaaaagcgagtcttcccttttgttaggtgctgtaactccggaatctctccggacgacacggcatctcaagaaagtgtcaactcggaacgtactactgagtcagaatcattagagaaatcaaactc

SEQ ID NO: 236851 - DNA, 411 bp, Gossypium hirsutum
gttatctttcatgggatgttgataatgctcgactggagcaagtgttcagtgaacatggtaaggtagtcgaggctcgtgtagtctatgatagggagacaggccgatcccgtggtttcggtttcgtgactatgtcttcggaaactgaattgaatgatgccattgctgctcttgacggacagagtttggatggaagagcaataagagtaaacgttgcagaggaaagaccaaggcgaggcttcttttgatgttgaaaggatttagatacatgatctactgctgtttgctttttccttttcatttttcccaaataacttgtcctatttttcccccttttttaaggttaaatttacagtttttagtatatttgtaaggaatatatattttatccattgttatgaaaccatcatttag

SEQ ID NO: 236852 - DNA, 335 bp, Gossypium hirsutum
acgtttacgcgtccgattgccagtaggctatcccaggagaaactggagaagctgaaaaagacgacatttggactgagatatggccacgtttctcttggaacagcaatgacacgagtcaaacttgctgcttcacttggggcttcattggtttggctatccggtggattaagcttagtccaatcattgattaaagaaacattaccttcttggttcatatgatcccatacacctgagctggaccgaggggaacctggaggcgtagtatccatgctaaggggttatgcacttgcatactttgctgtactttgcggtacattcgcatggggtgtggactc

SEQ ID NO: 236853 - DNA, 382 bp, Gossypium hirsutum
ccctctcgtccgcccacgcgtccggcgaagaacagtgtgagttgcggtagcggctgctttatcccaattgaatgtggagaaggctgtgaatgctctgctcaaatggagagattctcagtcccaagcccaaaaaccccaacttcttgaacaggatgaattcctatatctcatcgtcagcctgaagaaaatccctcaaaaggctcgcgttaaccccatcaaagtccctctccctcaccccatcatcgatgatcccgccgagctttgcttgttcatcgatgaccgctcgaagtctggtatcaccaaagacgctgcgtctaagaaaatcaagtcggaaaacatacccatcaacaaggtcattaagctgtccaagctcaagactgat

SEQ ID NO: 236854 - DNA, 211 bp, Gossypium hirsutum
ccctcgcgtccggtatctggacgactcaacatggttttttggtgtctatgatggtcatggaggtaaagcagtggctaagttttgtgccaagcatcttcatcagcaggtgctcaagcatgaggcgtattcagctggagatattgggacttcagtacagaaagcttttctcagaatggatgagatgatgtgtggacaaagaggatggagagaa

SEQ ID NO: 236855 - DNA, 347 bp, Gossypium hirsutum
ccttcgcgtccgggaccttcaatttttcgtaggagagagcatgcatgatgatggatgcttggtgtttgcttactacaaggatggtgctgttgacccaacatttttgtactttgcatatgcattgaaggaggtcaagtgctgaggtttgaagcaaagaaaaaaaaagtggttgctgaagaatttagtcctttttattattgcttttgtctcttgttttcagtactctgctaaagacataaattatttgtggtttttgatgtttttgttttaattgtttgttgttttatcatggaatggtttctatttttatgggttggctaaacaataatttaactctttgttctatt

SEQ ID NO: 236856 - DNA, 282 bp, Gossypium hirsutum
tcgctctctcgtccgtccacgcgtccgcaaaattggacaatctctataccgcgaaggacctggtaaagatccattcctacctgatcaaaagacacccataaagaacttctttcttgctggatcatacacaaagcaggattatttagatagcatggaaggagcaactttgtctggcaggcaagcatcagcctacatatgtgatgccggggaagagttagctgcactgctaaagaagctcgtgatggttggttcttaagaacagatggaaacttcaagtgttac

SEQ ID NO: 236857 - DNA, 363 bp, Gossypium hirsutum
gtgtttttatccgagctatgattatgctcattgcatcgtggactctcttgaaaatatcacacattcactgtgtacacttgaatttgagaccaggcgtgcttcttactattggctgctacatgtattggacctttaccagccatatgtgtgggaatactcacgactgaatgttacaaacactgtgatgtctaaacggaagttaaactacattgtgacaaacaaatatgttgatggttgggatgatccccgtctcatgacattagctggtttacgacgtaggggtgtgacttcaactgcaataaattcttttgttcgaggaattggaatcactagaagtgattgtagcatgattcgtttggatcg

SEQ ID NO: 236858 - DNA, 418 bp, Gossypium hirsutum
atttttttcttttaacctttgatatttgcttcaatcatgcaaagatttctttcaatatcatccaaatcaacctctctcaaaaatcagaagcagcttcacctccccctcgtttcttcagtttcttctgccactccaaaagggcaatcctgttctcattatttcaatcaaaagtcaccttctttaggctccaggttaggttttgatcgggttttctcgtctgggtattttccaaatcgtgttaatttgagggaacacgaaagaaatggaaatgggtttttgaggtcgaagggattggttggggaaattaggaattatagcagtgaaactgacagggagtctatagattatgatgttgtcattgttggggctggcccggctggcttatctgcagctataaggttcaagcaattgtgtcagg

SEQ ID NO: 236859 - DNA, 311 bp, Gossypium hirsutum
gtcatatttatggggaaagtgaggggagatagagtgaaatttgacccagaccgtattgttatgagtggtggagcaactggtgctcatgaaatggtggctttttgcttggctgatcctggtgaagcattattagttcctactccatattatccaggatttgatcgtgacttaaggtggagaacaggagttgaacttgcaccagtgatttgtgaaagttcacataatttccaaattactaggaccgccatggaagctgtatatgtaaaagctcaagaagctaaccttaaagtcaagggtttagtcataacaaa

SEQ ID NO: 236860 - DNA, 267 bp, Gossypium hirsutum
tcttgcgtccggttattacaatgatttgacaaaggtggtttatggtaaagtaacacctgctacaaggcagattgatcatgacctttcaccgaacctttcctggccattcaaggttggatactccaaagggccatgctgcttttcggcgtgtgctagtggggtattcttttcgggattctgatgtaggttactgtcagggcttaaactatgatgctgcattgctatagcttggtatgaaaacggaggaagatgcattttggatgcttg

SEQ ID NO: 236861 - DNA, 472 bp, Gossypium hirsutum
agtttggttacagattacaagagctaatatcagagagcttaggcctggaaaaagattacataaagaaggttctaggggagcaagggcagcatatggccgtgaactattacccgccatgcccggaaccagagctgacatacggattgcctggacatacagaccccaatgctcttacgattttacttcaagacctccaagtggcgggtcttcaagttctcaaagatggcaagtggcttgctgttaatccccaaccaaatgcttttgtcataaacattggtgatcaattacaggcattaagtaatgggacgtacaagagcgtgtggcatcgggcaatcgtaaatgccgataagccaaggatgtctgttgcttccttcctctgcccttacgaccatgccctgatcagccctgcaaaacctttcacccaatatggatgtggagccgtatacagggattttacttatgctgagtatta

SEQ ID NO: 236862 - DNA, 439 bp, Gossypium hirsutum
cctacgcgtccgggcatcatggccaccgctcccgcctccgccgcaacttctgtcgcgaagaagaaaactgctcgtgctaagaagccgagatctgcttctttacatcctccttttcttgagatgatatctgatgcgatcatttcgttgaaagagagaacaggatcgagccaatatgccatcgcacaattcattaaagaaaagcattagcagctgccctcgaattttcagaagattttactcattcaggtgaagaaatttgttgcttcagggaagcttgttaaagtcaaaacttcctacaagctccctctggcctccgtcgttgctaaaaagcctgccaccgcgaagccaaaagctacctctgctgctattaaaccaaagcctatggtagtcaaagccccggcaaaaccgaaagcaaattcaaaagtcgcaacgtctgtga

SEQ ID NO: 236863 - DNA, 449 bp, Gossypium hirsutum
gttcagttcatcgtttccttttctcccccaaacccttttgtcacttttcctttttcctcacctgtcatgcatagaacatcaatagctttaaacccatccttgaaatgattgtacttgatataaccattagttatatttttggctcactcttttcttagtgggacattgatgtttcatacaattttgccatggtttgttgttgttgttgcaaagggttgcaagagccccttttatttatgatccatattcctctaagaaaatgtgcaggcaagaagtaattttgttggataatgaaattggcttcaacgaagctatgattgatgaaagagaacagggtatcagagaagtagaggagcaaataggacaagtaaatgaaatatttaaggaccttgctgttcttgtccacgagcagggtgtggtcattgatgacatttcatcaaacatagatg

SEQ ID NO: 236864 - DNA, 478 bp, Gossypium hirsutum
ctttttcatagattacactcagccacttccccagatgttgaaggtttggcaggctgctgaaagccaaggcgtgagctatacaagtctggctgatagcaaaggaagcattccagcaaagcctgccggatttgcagactccttcacatcggttgatggtcgatgatggaaggtaaaacctacattctacacaaggaataagttccccatcttgttaccatgatatacatgtttcagtgcttgagggctactttctatgtaatttgagttattttacttgtggtttttcaagtcgcggaacatgtctttcatggtagtgtagatagagagatacaggtttcgatatttcttaataatttctgtgttccattttacatatactattttcattgcagtgtaaaggaaatgatgtagtttgaagaaaaggcaagttcatgtcacaaatacagtccttaaaaatctattcggatggagaacatat

SEQ ID NO: 236865 - DNA, 441 bp, Gossypium hirsutum
cctacgcgtccgcccacgcgtccgaacgaccaaacacagaaacactttcatggctcgcaaattctttgttggaggcaactggaaatgcaatggaacagctgaggaagtaaaaaagattgctaccacattgaatgaagctgaagttccttccgaggatgttgtggaggttgttgtaagccctccatttgtgtttctcacacttgtgaaaagcctattgcggtctgatttccatgttgctgctcaaaactgctgggttcgcaaaggtggtgcttttactggggaaattagtgctgaaatgcttgttaatttgggcattccatgggttattattggtcactctgagagaagggctctcttgaatgaatccaatgagtttgtcggagacaaagtagcttatgcagtttctcaaggcgtgaaagtgattgcttgcatcggtgagac

SEQ ID NO: 236866 - DNA, 459 bp, Gossypium hirsutum
tctttcgcgtccggccaaaacaagctttcaaaactcttagctggaaacaaacagacaacaaaaaagaaaggaaaatgcctgagaaagagggttcatgtgttggtttgaatgagccaagattggtggtgaggaagtttttggctaggccccaacctgaaggagttggtgcagtagtgagaagaagcataggccggtttgagttgagatactttgatcctttccttgttttggatgaattctcagtaacagcacctgctggatttcctgatcatccacacagaggatttgagacagtgacctacatgttacagggggcagttaagcatgaagactttgatgggcatagagggaccattggagctggtgatctacaatggatgactgctgggagaggcattgtgcactcagagatgcctgcagcacaaggaacccaaaagggtctacagttatggatcaatc

SEQ ID NO: 236867 - DNA, 495 bp, Gossypium hirsutum
cataaatcagatcaaacatttgattctggttgcaactttatctcctttcttttttttcctattgaaattttaagtccataacttggtaagaatttatgaaacaggttttatttatagcggcaactgagacaactacaagtacaatagaaggggcaatggcagaattactccataacccccaagctttactggaagcccggagagaacttaaacaaataattggcaaagggaacctggtggaggaatccaatgttacttgtttaccttatttgcaagcaattgtcaaggaaacattgaggttacatcctccagctccttttttaatccctcgaaaagctgaagcagatattgaggttcataacttcgcggttccaaagggcgcacaagtgtttatcaacgcatgggttataggtcgagatcccaatttttgggaggagcccgacttgtttcgaccagaaaggttcataagatcagaaatggatgttaaaggaaatg

SEQ ID NO: 236868 - DNA, 397 bp, Gossypium hirsutum
gtttatttcactgctggcgatgattggcctgctcagagctgggaacattaccgccaaacagattcctctcacaggcccaaactcgattctgctggaggcatgctgctgatgaccatgcagatcccgatgaccttggcaagggcggccatgagctcagcaaaagcacaggaaatgctggcgggagagaagcttgcggcattattggtctgcaaggctaaaatctgagccaagatgcggttgaaggatgcaatgggctttgagaactctttatgtgaagtagaaagaacttggttataataataaaaaggttaaaagaatcctttgtttgtgtacttctgttgtgtgtcggctgtcgcttgtaactctaaggaagagtgtcctctgaatcttaaaatac

SEQ ID NO: 236869 - DNA, 475 bp, Gossypium hirsutum
gcaagcttcatgttgggggatctcccgtgtacaaagtagagagaaagttaggtaaaggtggatttggtcaggtgtttgttggacgacgtgttagtggtggaaatgaacgtggaaccggttctgctgccatggaggttgctctgaaatttgagcatagaaacagcaaaggatgtaattatggtcctccatatgaatggcaagtttacaatgctcttggtggcagtcatggagttcccaaagtacactacaaagggaagcaaggagactattatgtgatggttatggacatgctagggcccagcttatgggatgtttggaactcttcagggcaagcgatgtctgcagaaatggtagcatgtatagcagttgagtccctatcaatattagagaagatgcactccaaaggttatgtgcatggggatgttaagcctgagaactttctacttggtcaaccatctacaccacaagagaagaa

SEQ ID NO: 236870 - DNA, 358 bp, Gossypium hirsutum
ttcttattcaaagaatgccaaggtgtagacttggatatttccatgtggtgaacaacgattacactcattgggaaatgtacgccattggtggcagtgcaaaccctactatcaacagccaaggaaacaggtttctagcacccaatgatagatcaaagaaggaggtgaccaagcatgagaatgcaccagagagtgaatggaaacgctggaactggagatccgaaggagacttgatgttgaatggagcctttttcaggcaaaccggtgcttctggtgcatcttcaacctttgctagggcttcgagccttagtgctagaccatcttctcttgtgggtacaatgacaatgactgctggtgcact

SEQ ID NO: 236871 - DNA, 524 bp, Gossypium hirsutum
  unsure (1)..(524): unsure at all n locations
cccacgcgtccgcccacgcgtccgcacaggctctgggaggccaccaaaatgcacataaacgtgaaagaacactagccaaacgagggcagcggctcggcggtggggcagcggcggcctctttttcagccttcggttaccctaatacacaccctagtcgatattctagcttggcttcacttcctttgtatggctctttcaataaggcgcttggaattcaagagcactccatgatccacaagccatttttagttccatcggcgcatgtttatgggcacaatggatggtctagacgacctgttgatcaaacaagggcagtcgggcatgtttccaatctgcaggggataaatggtactgctagattccaaggtagtgtagggaagtttggtccagccacggagggaatgaatggacattggtgggatacagttaaccaattcaacaacaaaaaagatgagttgaagcttgacctgtctttgaagctctaagtagctactctactntcattcttcttcttcttcttcttc

SEQ ID NO: 236872 - DNA, 428 bp, Gossypium hirsutum
gttatgaattgccattcaccttcaacaagatgaatggattctccaccgtggatggtttcttggagataaccgaatccgtagctgagatgataaagttcgtggcgaatgaaccctcagtaggacttttctacattcaacagcacaccgagaatgccattcctaacgtagttaatctccgtaatcacgttgtagaaaaatctcatgaagcaactttacacacacaagacttggaagattctatcaccacggtgagatcgatgaaggaatgcggtttcccaattgcagacgagatgattaaggacattaagagttccttaatgttaatgtcctcaaaacaaccgaagagaggattgatccacagtcctgcttcaagctttcagatgggaagaactagctcttcgggaccaatgtcttggaatcctgctggg

SEQ ID NO: 236873 - DNA, 485 bp, Gossypium hirsutum
attttaacaaaacatgaagaaaattctaaaacccctgaaggaattctgagggagatcttctgtcttggagtagctctggcttttgggatggatcgtctggcttccttaaagtaattcttggcaaagtgttcttttccttctgggtcatcctccatctttatccattcctcaaaggtcttatgggacggcaaaacaggacaccaaccattgttgtcctttggtcagtgttgttggcttctgtcttttctcttgtttgggttcggatcaacccgtttgtcagcaccgccgatagcaccaccgtgtcacagagctgcatttccattgattgttgatatattttgtgtttcttagaattgaaatcattgcaagttgactgaaacatgtctattgactaagttttgaacggtttgtacccattttattcttagcagtgtgtaattctcctaaacaatgctatgaactatacatatttcattgaaatttac

SEQ ID NO: 236874 - DNA, 358 bp, Gossypium hirsutum
aaatggctatttacgcaaaggaactactgaagaggttccatgttagcattgagcaaacaaaggaaatctctgattataccagtggaattctggataagctttcggaagatactatgagggttgataatcatgctgtggaagctgatgaaattcaaatgaagagtattgctggcttccagaatgcttatcaggagcaatcgaagtttgatgcaaagaagcttattgccgatatgacaaatctcgtttatagccatgttcgtcggcaaaaagagctggtggatgcaaggctcgcagatctcaaagaaagtgctgtcgcaaacaaaacatttttagatggacatgtttcctccattgaggg

SEQ ID NO: 236875 - DNA, 439 bp, Gossypium hirsutum
tctttcgatttaatccttttggaaatattggagcggaccatttctgctcccctgagcaccagattctagcacttgaagctgctcgtaatggcattgtccttttaaagaacgatgctaaacttcttccacttccaaaatctaccatgtcgcttgctgtaataggtccaaatgccaattcgccacaaacacttatcggaaactatgcaggccctccatgcaagtctgttactcctttgcaagctttggagagctacgttaagaacaccgtgtaccaccccggttgtgatacagtttcttgttctactggtgcaattgacaaagcagttgacattgcaaaacgggcagattatgcagtgttgataatgggattagatcaaactgaagaaagagaggcgctcgatcgggttgatttgtttcttcctgggaggcagcaagaact

SEQ ID NO: 236876 - DNA, 443 bp, Gossypium hirsutum
gtttttcgttggagttgatgaattacctggccctgctactactcagcatggctctcagagagatcattctttcccattcctggagtcattgaatgaggtcttagaaacaaacagagttgaagagtcacagagccacgtccacagaatgtatttcatgggtcctaatactttcagcgaaccttggcatctgccccacactcctccagaagaaataaaagagattgtatatgagggtgcatacaatacattcgtggatgagatcaatgcaattgctgcttaccagtggtgggaaggagcaatttacagcattctttccattcttgcttatcctgtcgctttgtcatggcagcagtggcgccgcacaatgagattgcaacgactacgtgagtttgtacgatcagaatatgatcatgcctgcttacgttcgtgccgctcacgggctc

SEQ ID NO: 236877 - DNA, 360 bp, Gossypium hirsutum
gactctcaccatcacggcttagacctagtcaacgcagccaactcaggtgagcttggagcccgtaggccaaggggccgtcctccaggttccaagaacaaaccaaagcctcctgtcatcatcacacgggagagtgcaaacaccctccgagctcacattcttgaagttgggaaaggctgtgatgtgtttgattgtattgccaactacgcccggagaaggcaaagaggaatctgtatattgagtgggagtggtaccggtgaccaacgtcagcattaggcaaccatctgctgctggagctgtggttaaccttcatggcagatttgagatactatcactttcaggttctttcttgccaccaccagc

SEQ ID NO: 236878 - DNA, 440 bp, Gossypium hirsutum
attttcatcaatcttggtgatcatcttgagatactgtccattgggaagtacaagagtcatatacatcaagtgatcctagataacaacgaagtgaatagaatttctatggctacacttcatggcccttcattagacacatttgtagccccagcatcaaggttcatcgatgagtctcacccaccagcctaccgagggatgacctacaaggaatccttggagtttaatggttctgatgaaattgatgtgcagtcatccctttctctgcttcgaattccattctctctctaatttcatgagctcagatactattggtagttcatcctccatgtgtcgtatattactatacactctccgtgttaacgaaataaaaataaataaagcgccatgattattgttgttgtctaggtgtttgtgggatggaattactttgtatgtgcttt

SEQ ID NO: 236879 - DNA, 357 bp, Gossypium hirsutum
cttatgcgttcttccacgcgtccggggtgaaggggtgagggccttattaaaaattgttgatgtttccagcacatcctcaaagttgaacacaaccatcaatggaccaagagggtcacggattgttggtgaccggggatctagagaaggttcatctgttgctcaatggccacatggggaggaagcaccttattggcttgggcagcaggctcttgaaactgaaagtgctcccagagacaagcagtggtcatcacaactgtcacccaatttggactcaaagcatctctgcaggacatcctcataccccgagcagcagcaaaaccaacatttttctagtgaaccaattctagtttttgattt

SEQ ID NO: 236880 - DNA, 281 bp, Gossypium hirsutum
cccactcgtccgataacagatctggttttctttttggcttccaagctcctgaaaaccattcctcaggcagctgccacgacttgttacgtcgccgcgcatccaagactgctaaatataagtgggaaatactttgctgactgcaacgaagcatggacatccaaactgggttcgaattccaaccaaacttgcaaagctttgggctgcctttgaaatcatggtttccaaacacgctaaagcagtgtttgatccgcttagtgccttcgattatcaccatatgtaat

SEQ ID NO: 236881 - DNA, 237 bp, Gossypium hirsutum
cggtttctttttcagacgcgtgcgccgtattgttgggtgcgctaagttaaagaatgctggggggtatacttatccttcttgtggatccgtcaccagcactggtttggtggtctcgtcaaagttaccaagattctctgatctttatacacttacgatagcaagtgcagattccaagtcgatatttgcagggaaaccggttgagttgaccaaaagtgttactcaatggttcactaagga

SEQ ID NO: 236882 - DNA, 464 bp, Gossypium hirsutum
gattttatttataacattgcatcagctaataggcctaaaatgggtcatattagaagggtttttgatttttgggataagaacaatatgagttgagctaatttgactgacctccatttctccattaaggaggtgtaggcagaaagcaaccacctcatctcctataaagtgctaacatttctggtaaaaaagagcaggaaatccatcttcgccaggtgccttcgtgggatgcatttcaaataaggtctctctcacttcttttgtataatgcgctcttgcttatccaattcctccttctcatttgcgttgcttgactgtgaaaaagctaggttggaatcatccctttcggcttcaatcaatgctgatagtttggctaaattctccagacgccatcccccataaatgtttagcttcatcgaaaaatgagtcttccatgatccactaggcttcaaatttgaattgatttg

SEQ ID NO: 236883 - DNA, 319 bp, Gossypium hirsutum
cccacgcgttcggtttcgaggtacttctgggatgggagtcgtgttaggttgcttcgtgttgatggcgacggcgttgacggcggaggctctggggtgccgttttgtttcgatttggataaggtggttgaagcttcaagcttggctattaggaacttttttattcctaagcaagtcagtgaaaattatataggctatgtgaagtggaagtttttgcacagggtttttagctctgcccttcaagttcttgctactcaagcaatgtttcgggctataggaatcgggtattctcgttcactcacttcagctgctgcacttaact

SEQ ID NO: 236884 - DNA, 405 bp, Gossypium hirsutum
tttggaaatctgtaatgaggagcagaagaaagtgttatatgagaactatgggaaaccagaccctgccaatgttgctaaagtgaaggctctatacaatgagcttaatctcaagggcgtatttgaggactacgaaagcaagagctatgagaggctcgtaacctcaattgaagctcatcctagcaaaccagtgcaagcagtgttgaagtcattcttagggaagatctacaagaggcagaaatagaatccagtttccaaagatgaatgtggctggaaaacctctcccactcttctgttctatgctcatttgtttgtcttaatattttataatcaatcatcttcttgttttctattccgacaaacattcggtttcagatttaaataaatttcatagagttctgtctctta

SEQ ID NO: 236885 - DNA, 322 bp, Gossypium hirsutum
cccacgcgttcgcccacgcgtccgcccacgcgtcggatttcttccgttgatctttggtagagattagctttttaatttttcattatgggaaagatcaagatcggaatcaatggatttggaaggatcgggcgtttggttgcgagagttgctctccaaagcgatgatattgagctcgttgctgttaacgatcctttcatcaccactgaatacatgacgtacatgtttaagtacgacagtgttcacggtcaatggaagcatcatgagcttaaggtgaaggactcaaagacccttctctttggtgaaaagcctgtcacagtttttg

SEQ ID NO: 236886 - DNA, 371 bp, Gossypium hirsutum
tcccacgcgtccggtttttagtttgattttggtggggcataaaagatgatcaggagtgcagtccgtgaaatactatctttcagagcatccatgcatcgtcaacttccgatggagcaacacccaaacgtttggctccacgtggtccttcctcttctcctccatctccatctacgtcttcgccgcgaccaccctccacagcttgctctctcacatcctccccaagcgccggggtgttccgcttggccctatcccagccatccacagcctctgcatctcgttaatcttcgctgtcattttcaccggcatcctcctatcctcggtcgccgatattcgcgacacccgctggttctggcgccgtacgaaaaccatca

SEQ ID NO: 236887 - DNA, 363 bp, Gossypium hirsutum
ccctctcgtccggtaaaaaccaagctatatgcatgcataagccttgcctgcactgctttcagagggtcttagtatgcaccctctttgtatgcattggccacgtggactccggactatcgaccacctctgagcgactgatctacaaactgggtgggattgacaagcgtgtgattgaaaggtttgagaaagaagctgcggagatgaacaagaggtcattcaagtatgcttgggtgcttgacaagctcaaggctgaacgtgagcgtggtatcaccattgatattgccttgtggaaatttgagacgaccaaatactactgcactgtgattgatgcgcctggacaccgtgactttatcaagaacatga

SEQ ID NO: 236888 - DNA, 390 bp, Gossypium hirsutum
tcctctcgtccgcccacgcgtccggattcatggctttctggtgaggatggcggtttgagcttacgaacgttggacaggcagcaaaacggacacgtgtttaagtcaccaaagatgattcttcttgcgacaaatattactaatgctgaactcgagaaagcaagggcagcaggttttgcagatactactattatgaaacctttgagggcaagtatggtggctgcatgtcttcagcaggtgcttgggacagggaagaagaggcagcctggaagaggcatgctgtatggatcgtctgtccttgggagtcttctttgtggaaagaaaatattagtagttgatgacaatatggtaaaccggagagttgctgctggcgcattgaaaaaggtttggagc

SEQ ID NO: 236889 - DNA, 454 bp, Gossypium hirsutum
gcatatcccagcaagagccactctctctaccttaagaatcgccatggactacgcttctcgaagaagtcaaggaggcctattcgaaggtctctacagagtcatcatgcgccgtaactctgtctacgtcacatttgtcatcgccggcgctttcctcggagaacgggctgtggattatggagttcataagctctgggaatacaacaatgttggggtaaatttctaattctaagaataccagtttttattttgtattttacttcacagttgcttagttatttgcggattgtttggactctgatttgcatattcggtagttattatttcactgtcactttgcacaagcacactgggatttgtatctgaatgtattgaagagacgatagccccttttctctgtttgtcaagatgtttaaacctttgtagtaattaagactgccggcggcaatactttttt

SEQ ID NO: 236890 - DNA, 403 bp, Gossypium hirsutum
gtttcctcttgagccatatgagtggtatcttgacctgcggcgatacggaactgttaaacattgtggattcgggctaggctttgaacgaatgattctctttgccactggcatcgagaacattagagatgttattcccttcccaagatatccgggaagagctgatctctgattggatttttctaagatgacgtgagaaaatggtcttgattttcagtttaatactcatgggttttagtaaatttttgcgcattggcaatcatattacgtactttgaaaagaattgtaaaagtataactgtttcttaatttttgttctttctctgttcatccttaacagcaccacatgtttgttatatattgatgttagtgttatcatctaatgcaataatatatacgtcttcttt

SEQ ID NO: 236891 - DNA, 335 bp, Gossypium hirsutum
cggtcgcttgggtgaagttcaaatcagatctgtcaaaggcatttgatgaagccaccacgtttcttaacagtattcaaatgcagctttctcatctctgcaatgggtcatcggaagaagacttaagtggaggtgagatggtaccccatgattatcacaaaaatggagaccctcaactcaaagacaaactcttggagaaatatagtggttatattagtacacttaagcatgaattttcaaaacacaaaaagaaaggcaaactacctagagatgcaaggcaaatattgcttcactggtgggatcttcactatacatggccatatccaacggaagcagac

SEQ ID NO: 236892 - DNA, 444 bp, Gossypium hirsutum
  unsure (1)..(444): unsure at all n locations
aattaaatggcggaaagagcaccgatcgaatccgtacaatgcttcggccgcaagaagacggcggtggcccttacccactgacagcgaggccgtggccttatcaagactattggtcttgctatctcgctttgtgtgctcagcagcctacttcacgtggcatccttgcaaccaaaggtattggcgctgaagttttcgacaagcctcaacctaactctcctactgtttatgactngccttttcagcggtgagacccggagcatgtatcaccgttgattatgcggtggctgacggcggcggatggatccaaaaccactagcagaaggttgcagctactgaaggagcaggatttgcatgtaaatatatatatcgtcctttttaaaagttcttcaatgggtcaattaagtagtagtagtaagtaagatgtttaaaagagtaagcggcagc

SEQ ID NO: 236893 - DNA, 447 bp, Gossypium hirsutum
gggccttttgccaatttgttactggtgcgcctagactggcacctggtggtctggcagtgctgaatccaaagcttacaattgttagaaagcattcgtcgtctgcaattgctgctacttccaatggaagtggaccctcagaatcagcagatgatgacttgcccagtgtcatgacttgtgctaattacttgaagcttcctccatattcttccaaggaaattatgtataagaaattgctatatgcaatcaacgaagggcaaggatcttttgatttatcatgatggcattggcaaagcttcgtttctactttaatggtggatcatccaaaatttgcgtccataggccctccaaattctggatgacttacaagcagaagcagaaaagaaattggaaggcggattctgtggaaaattgattcaggcaggcggctgcttaaaacttttgtatata

SEQ ID NO: 236894 - DNA, 387 bp, Gossypium hirsutum
gtcattatgaagggtaacgaagataggtatagctggggactgtttacaaggccaagagaaggctacgtagtaaaggttccaaatgagcttgtggatgacaacaagcccatccttttcaaacctcatgactacgaagaatatttgaaattttattactccgaaatcactcaagcagctgttaaatctggaggttcagctgttcaatctgagggttatataactcgtcttaaagcttattgtagtgtctaagatttggccatcaataattattatattgtagccaattgtttggggtctttctataaatatggctaaaaataattgtttttttctacaatattaagggtaagatattaggttaatacagtttgaatatgtgtcaaatga

SEQ ID NO: 236895 - DNA, 295 bp, Gossypium hirsutum
tgtttattgaattcttgccctcactttctcgaaaaaaaaaatgtcttcaggttgcaattgcagatctaactgcagctgcggtgacaactgctcatgcagcaggaaccttaaccttggatattcggagaagacaaccagcactcagaccatcatctccggagttgcgccagtgaagatgacctttgagggaccagagatgagcactactgaatcaggacatggatgcaagtgtggatcaaactgctcttgtgatccatgcaactgttgaaaagcttgatgaaagccatagattatg

SEQ ID NO: 236896 - DNA, 454 bp, Gossypium hirsutum
  unsure (1)..(454): unsure at all n locations
atcgatttcagtttagcattcataatgtcaggaagaggaaagggaggcaaggggttgggcaagggaggagcaaagcgtcaccgtaaggtcctccgtgataatatccagggaattacaaagccggctattcggcgtttggctcgtaggggaggcgtcaagcgcatcagcggcttgatctacgaagaaacccgtggtgttctcaagatcttcttggagaacgtgattcgtgacgctgtcacctataccgagcacgcgaggagaaagactgtgactgctatggatgtggtttatgcgctcaagaggcagggcaggactttgtatggattcggtggttaaatgtgatttagggtttaggttttagaatggtggtgtcttagggnggatttgaagtcttgctgtcaagaatgtttgagctttgggttagggattgtaattagggggtgtttacccgttt

SEQ ID NO: 236897 - DNA, 338 bp, Gossypium hirsutum
aaatacaaacccaaaaaaaaaaacggggtgttctttaaatcgcggggggtcaaaacaatccatgcttgcttcattagcaaatatgccgatgagttggctaaaaacgctgcttacattggaacccctggaaagggtatccttgctgctgatgaatccactggcaccatcggcaagcgtctttcaagcattaatgtagagaacgttgaagataacaggcgtgctctccgtgagctcctattcacaactccaggagctcttcagtacctcagtggtgttattctctttgaggaaaccctttatcaaaaaaccgcttcgggcaagcccttcgttgatgtttt

SEQ ID NO: 236898 - DNA, 489 bp, Gossypium hirsutum
gaaaatgtttacatggccaagctggctgagcaggccgagcgctatgaggaaatggtagagttcatggaaaatgtagcaaaaactgtagatgttggtgagctgactgtcgaggaaaggaaccttctctctgtagcttacaaaaatgtgattggggctaggagggcttcatggaggattatctcttctattgagcagaaggaagagagcagaggaaatgaggatcatgttgcaaccatcaagaagtataggagcaagattgaagctgagttcaagactgctgctgagaggaaggaagctgctgagagcactttgttggcttacaagtctgcacaggatattgctctcggtgacctagcgccaactcatccaattaggctgggacttgctcttaacttctctgttttctactatgaaattcttaactcacctgatcgtgcttgcaatcttgcaaaacaggcatttgatgaggctatttctgagttggataca

SEQ ID NO: 236899 - DNA, 183 bp, Gossypium hirsutum
gattcaaggttcagtgctaggaacactgactgagaaggggatcaaagctgttcaactaactaccgatttgaagcctggtttacccagtgaagcagaaagaatcaggaattgcaaggatagggtccttgctttaaaggaagaaccacatatccctcgagagtggctgtcccatgaagattcacc

SEQ ID NO: 236900 - DNA, 432 bp, Gossypium hirsutum
cccttgtaatttcatcggatctcccattgtctattctcatagttggtgttggaggagccgacttcaaagaaatggagattttggatgcagacaagggggaaagactagaaagttcaaccggacgtgttgcttcccgtgatatcgttcaatttgttccatttagggatgtacaaaacgggccttctgttgttcaagaacttctagcagagttaccatcacaatttttagcctacatgcgaagtatagagattaaaccatgcagttagatttttatacagaatgtacatatcaaaattattgttcgagtttgcctcttataagttggaaatgctacggtggcatagcaatgcttaaacttgccttgaaagagccaacagaatctattggcattatgacggtagattgaagattaatcagtcgaccaaaaatcac

SEQ ID NO: 236901 - DNA, 550 bp, Gossypium hirsutum
  unsure (1)..(550): unsure at all n locations
cagtgtttctcagatggaggctgttctccaaggtacctaatcattgatgatggatggcaagatactgtaaacgagttctataaagaaggagaaccactcattgaagggacacagtttgcaactagattagtagatatcaaagaaaacagcaagttcaaaagttcggaatcggaagccgggtgcaacaagctccatgaattcatcaacatgatcaaaggaaaatatgggttaaagtatgtatacgtctggcatgctttaactggcntattggggaggtgtacttccatcatctgaaacaatgaaaaaatacaatccaaagattgtttatccaatccaatcacctggtaatatagggaacttgagagacattatcccggacagcttggagaagtatggtgtggggatcatcgaccctcagaaaatctttgatttctacaatgatctccatagctatctctccagcaatggcgtcgatggagtcaaggtagatgcccagaatttgatagagaccttaggttctggcttcngtgnacgagtttcactgactaga

SEQ ID NO: 236902 - DNA, 500 bp, Gossypium hirsutum
  unsure (1)..(500): unsure at all n locations
cggacgcgtttttccaaatgtggtgaagctgagagcttacgattgggcccctgatgaaaagcttctcattagtgatttcatctccaatggcaatttggctaacgccatcagaggcagaaatggtcagccatcaacaagcctctcatggtcagtaaggcggaaaattgtaaagggagcagcccgtggcttggcctatcttcatgaatgcagtccaagaaaatttgttcatggagacgtcaagccatctaacattctccttgacaacgaattccaatcttacatctctgatttcggcctcaacaggctcattaacatcactggaaacaaccccgattcttcatccggcggcttcatcggtggactcccttacaaatcaatccaaacggaacgaaccaacagttatcgagcaccggaggctcgagtccctggcaaccgagcaacacanaaatgggatgtctattcatttggagtcgcattactggagctggtacgggcaagtc

SEQ ID NO: 236903 - DNA, 517 bp, Gossypium hirsutum
tgaaaataatggacagtgatgctggttctcaggatgatttcgtgggagaagtagctataccactggagcctgtatttatcgaaagaaacattcccctgactccatatactgttgtcaaggatggagaatatcgtggggagattaaatttggtctcactttcacccccgaggaacgtgaaagcagggattttgaagttgaagaatcttttggagggtggaagcagtcttcatacactgattaggcaggccacttatagttttcagccttaattcccgtttcaagaagtaactattaagtttgattttcggaccatgtttggttggatgttattaccatgttgtctttttactgccgttaattgtgacactgggaaattgtcactgattgaaatgtttgcctaatttgtactctggagatttagtgacatgttggttcttggatttgagcaagagatacggtttggttggtttttaagtaagcccgtacattttgaacacggaaaaaaaaacacggttt

SEQ ID NO: 236904 - DNA, 334 bp, Gossypium hirsutum
ggaatcactttcttttggaacttcggcttatgttactcaagatgatactttaatgacaacgcttacagtaagggaagctgttttgtactcagcacagcttcagctgcctgattgcatgtcaatatctgaaaagaaagaaagagctgcaatgacaatcagagaaatggggttgcaagattccatggacaccagaatcggagggtggagcaccaaaggacttagtggtggacaaaagcggagagtcagcatttgtattgagatcttaacatggcccgagcttctgtatcttgaccagcccactagtggactagatagtgcagcatcctaccatgtt

SEQ ID NO: 236905 - DNA, 500 bp, Gossypium hirsutum
cccacgcgttcgcgatgttgttgtgtcggaccggccacaatcggcggctacccttttcttcgctttcctccgccaaacctaagcaatactccatcaggtccgccgtgtcaccaccggaatggcgggagagccggcggtcggttgctatatctctgtttctatctcacttgctccttgcacctaaacatgcgattgcaggtaacttcttggataaatacgtgaaaaagaaaaagctggatccgcttgaggtttatgtgcctgctgttatattgactcaaatacaaattaaagacctggagaaaactttagaagttgatgataaaccggaatatgcaacctgcagatccctgctacgttctggtccggctgcatctcttcgtgtaaatatacgagctggggcacaatatgcttctgatgctggaaatggtgaaaacgctttcaaagacgtggatcaatgtctcagggcattggaggaactagattccttgtttctacatgca

SEQ ID NO: 236906 - DNA, 412 bp, Gossypium hirsutum
caaaactgaaaatgtcttgctgttcaggaaaatgtggctgcggcgctgattgcaagtgtggcagtggctgtaacggatgcagtatgttccctgacataatagagaagactacaactgagactattgttcttggtgtggcaactcagaaaatgcactttgagggatctgagatgggagttggggttgagggtggatgcccgtgtggagacaactgcaaatgcaacccttgcacttgcgggaagtgaacaacaaagagaagcagagtggcctttgtcattttaactaaataaattctattactttagtatgtatcagcaaatcttcatgaggatttggttcttaattatgtgtaatgtggcttttctgctatgtcagaatgtattatgatatttaagaaagtttgttttctatt

SEQ ID NO: 236907 - DNA, 475 bp, Gossypium hirsutum
ctttctccaagacatttgcagttttgtccggcgttcacagtttggttgtttgctttttgaagaggcttcggggaaaagatgatgttattaatgccggtgtagccggatgctgcactggacttgctctaagtttcccaggtgcacctcaggcacttctacagagctgtctcacctttggggcattctcatttatcatcgaagggcttaacaagcagcagccagcattggcacattcattttctgcgagaaacaagagtgcacaccacaagggacctcgtcctttagcactacccctttctatccctattccggatgagctgaaaggagctttttcttcgttctgcaagtccttggtaaaaccaaataaaggtaggtttcctacaggtaactaagtagtaggtggaccatttttcatttttcctgttgtttgtagaattttgcaagtgttgagaatgtagactgaaagttttgtctg

SEQ ID NO: 236908 - DNA, 508 bp, Gossypium hirsutum
  unsure (1)..(508): unsure at all n locations
ggagtgcgcatcaggctctatgttcgtggagccattttgggttacaagaggtcgaagtcgaatcagtatccaaatacgtcactgattcagatcgaaggggtgaacaccaaggaagaagtgggatggtactgtgggaagcgaatggcgtacatttacaaggctaaagtgaagaaaaatgggtcacattatcgttgcatttggggtaaagtaactaggcctcatggcaatagtggtgttgttcgtgctaagttcaagtctaatctccctcctaaatccatgggtgataaagttagagttttcatgtatcccagcaacatttgagatgcgaggtaggaattgcaagttggtaggatgagttgtgcaagtcgggactggattgcaatttagagctatattttatatctatgatgattttggtagctntttgtatttcttaagataatcaatattgttaagttcaaaatgtggaatctttgttatttataaaatatcagtatatttttggatc

SEQ ID NO: 236909 - DNA, 289 bp, Gossypium hirsutum
atgaggaacttttggaaatgtcacgttcctgggacattgtgggaattgatttaataagtggcgttacttgtaatgccccttatgagtgggttgataaaacaaaatcagattgggacttcaactccaatggaagagatcaggagacttacagagtcgttgcctatgattttgggatcaagcataatatacttcggcgcttagcatcttatggctgtaaaatcactgttgtcccgtccacttggccagctgctgaaacccttaaagtgaagccagatggagttcttttcag

SEQ ID NO: 236910 - DNA, 412 bp, Gossypium hirsutum
cccacgcgtccgggagtccttcgcatggaaagaacaaaaattaccgatgcttatcaccgtcatccaaggctcaagctatcgctagaggccaaaaggagcttatggaaatggtcagcagaatgcccgagtcttgtttcgaacttactttgaaagatctagtcgaacaacaacagcctgtggttgttgaaccgagacagaagagtgttgctgaagggagaggtaccatcgaccaacatacatacaacaaagagaaggggaagaagaagatgaagaagaatccgaagcctcaatttatatgaagtgggagcacagataatggagggcttcttttgaaaatggtgtttccattttccttagggtcaaagtgtaagaacaagaagaagaagaataatgagtctaatacaaatcataa

SEQ ID NO: 236911 - DNA, 453 bp, Gossypium hirsutum
catgatctttatccttgtttactgcactgctggtatctctggaggacacatcaacccggcggtgacgtttggactgttcgtggggcggaaggtgtcactgatccgagccctgttgtacatggtggctcagtgcttgggtgcaatctgtgggtgtgggttggtgaaggctttccaaaagacttaccacttcccattggatttgccgtgttcatggttcaccttgccactatccctatcactggcactggcatcaatccagcaaggagctttggagctgctgtgatttacaaccaagaaaaagcttgggatgatcaatggatattctgggttggacccttcattggtgctttcgttgcagccttttaccaccaatacatgctaagagcagcagccattaaagccctttggatctttcaggagcaatgcttaaaaacatttcaccttcattacaat

SEQ ID NO: 236912 - DNA, 477 bp, Gossypium hirsutum
cctatatatatcaaaccttggttttctgtaaatctataaaactggtttgattcttcttcgggttatcagacttttggtgggtttgggttttcttttttcgtttgatgaacaaagatgaccgtggaattgaagatggtatacggcggtgatggtggtggtagttttgcaagaaaagtggcggaaactgctttgaaagaagctgcaaattctgggattcagggtgttgaagaattgataacgttgatgtctaaaaatcaagagcttttcaatccagatgtttctattaaaactgctgctccatcaggttcagcagagtcagccatggatatccaagctgttacagataagactgttaactctttaaagaggttatttctttattggatcgaccgagaatcggccatgctcgatttagacgagcccctgttcttgacccaaaccaagatacagaacaggcttcgaagaagattcaagagc

SEQ ID NO: 236913 - DNA, 570 bp, Gossypium hirsutum
gcgccctctcgtccggtttataagagaaggttatcagtttgactacatctttgattggaccgtattaaagtacccacagctcggtggcagctaccgagtgcggcattccagtggaagagcaggtttagctgcagaagcagccattgaaaaacccgaaagaatctcagtgggaagagagattcgggatagattctccggtgcggttgaagcattttctaagagaaatggttcaagtcctagtcctcgtcgtgatcattctagacacaagactgctgagggtgtaaccttgtcaaagcatacgcacccagattcagataaaagatacagttcttctcgatatggtagcacttcaaggaaagctgtagtaacaagcaggcctggttcatccagtgaactcaatgacattccgcaaaaccgacaggtttcaagtagcagtcgcatgtctaccacacagagactccttgccttcgagtcgaaaacatccaaccgttcggccactgtaaaggtagccgtgacaatcaccctcttcgagttttgggctcctctcgttaggaaatgatggagaagata

SEQ ID NO: 236914 - DNA, 505 bp, Gossypium hirsutum
tcggtctcgtgggctatatgcggcaaaacgatgatgggaagactgtagcagcgatggatatgttggtgcctcgggttggtgagctcattggtggaagccgaagagaagaacggcttgattatctggaaaatcgtttagatgagttgaagcttagtaaggagagctactggtggtatcttgatttgcgtcgatacggttcagttcctcatgcgggtttcggactcggcttcgaaagactggtacagttcgccactggaatcgagaatataagagatgcaatacctttcccaagagcacctggttctgctgaattttagcggtgcaaacataaacgagttttccatattttcttaagcagttttttagctttcgtctttttctttttcctttctcaaattcatattttatactaagatatcccatctattctttttagggcactgaagactttagccacctttttgccttttgtatttttttttaaaattatattgaagtttataat

SEQ ID NO: 236915 - DNA, 394 bp, Gossypium hirsutum
ttcgttctgatgacataaatacatgtgcttatgagaagttgtagtactatcactatgggctataatcccatggtgctctttgacatgacgatcggtggtcagcccgctggtcggattgtgatggagcttttcgcagattgcactcctcgcactgcggagaacttccgtgccctctgtactggcgagaaaggcgtctgccgcagcggtgagcccctccactacaaaagctcttgtttccatcgtgtgatccctaactgtatgtgccaaggaggtgacttcaccgacggacacggtaccggacgagaatacatctacggatcaaagttcgctgacgagaacttgatcaagaagcacactggtcccggtattctgtcaatggctaacgctggaccgg

SEQ ID NO: 236916 - DNA, 309 bp, Gossypium hirsutum
ggaaggcttcttgatacacgcccccatttattttattgttcaaacaaattttcccttcaattttcgtataatttcctaggaaaagaaatatgagagagtgcatttcagttcacatcggtcaggccggtattcaggtcggaaatgcttgctgggaactttactgtctcgagcatggcattcagcctgatggccaaatgccaagtgataagactgttggtggaggagacgatgctttcaacacctttttcagcgaaactggtgccgggaagcacgtccctcgcgccatctttggttgatctggagcctact

SEQ ID NO: 236917 - DNA, 390 bp, Gossypium hirsutum
tgttgtttaagtggaaatggacttcgagtggctactggttcctacagcaatctgtttcgggtgtttggttgttctgaaggtagtacggaagcaacaacactggaagccagcaaaaaccccatgaggagacaaggtcaggcgacatcaaggccttcaagatctcttggtaatctctctggtgttgtccgacgaggtttgtgtttcacatccttactgattcgtaatttgaaatgatctgtaactcatttaattgcatattttcatgatttcgcttgattattagtgaattagtattatagccatttcctgagcacctagttttcaaataatcgactcaaaaagcattatatataatatcttttgaggtaaacatctatttaactacatgca

SEQ ID NO: 236918 - DNA, 501 bp, Gossypium hirsutum
ttgatttccaggaaagatatgctgaaactggggtggacttaatataatactagggggggagatcacaaacgggtcgtcttaccctccgggagttgaagcgtgggaacttaattgctgcaatgcagcatgtggatgaagaggaagatattaacaaagtattaaggtacttctcttatgaacacttctatgtaatatactgcaagttttgggagctcgacaccgaccatgattttttgatagacaaagagaaccttatcagatatggtaaccatgctcttacctaccggattgttgatagaattttttctcaggttccaaggaaatttagaagtcgggttgagggaaaaatgggctatgaagattttgtttactttatattgtcagaggaggataaatcttcagaacctggtctggagtactggtttaaatgcattgatttagatggaaatggggtgcttacaccgaatgaaatgcaattcttttatgaggaacagttacatc

SEQ ID NO: 236919 - DNA, 386 bp, Gossypium hirsutum
tccctttcgttcgacgatatcaagcatatgatgaagttttgcaatagcctgcatggtggtttgaacaagcttgctgagttgttggaagtggaaagagttggtgtgtgtcatcaagctggctcggatagtttgctcacatcgtgcacgtttaggaagttgagagataactttttcaatggctccactgagaaatatgcaggtgtactgtatggcctaggggtcgaaagtggacagactactaattagaaagaagaaataataattgggaaaaggttgatgaatgtagactactttagtgtgagactttataattttcattgtatacattggcaaaaatgattgttaatttagttgtgagcttatctgctttgcttgcattataactg

SEQ ID NO: 236920 - DNA, 490 bp, Gossypium hirsutum
tgatttccaggaaagatatgctgaaactgtcatagacagaatattttactatataaatagatcagaaacgggtcgtcttaccctccgggagttgaagcgtgggaacttaattgctgcaatgcagcatgtggatgaagaggaagatattaacaaagtattaaggtacttctcttatgaacacttctatgtaatatactgcaagttttgggagctcgacaccgaccatgattttttgatagacaaagagaaccttatcagatatggtaaccatgctcttacctaccggattgttgatagaattttttctcaggttccaaggaaatttagaagtcgggttgagggaaaaatgggctatgaagattttgtttactttatattgtcagaggaggataaatcttcagaacctggtctggagtactggtttaatgcattgatttagatggaaatggggtgcttacaccgaatgaaatgcaattcttttatgaggaac

SEQ ID NO: 236921 - DNA, 162 bp, Gossypium hirsutum
ttcacgcgtccgtatgatgccacttgcctgatcaaaaaattccataatgtatcagctaccattttgattgatcagggggaggatgacaaatttttacatgaccaacttctggcgcaaaagtttgaggaggcatgtaggagtgtgaatgtgccgttgttattg

SEQ ID NO: 236922 - DNA, 388 bp, Gossypium hirsutum
gtagttcgtgctgggacggtggtgaactatgcagtatagaacggtatcacgcagccactgcttttaaacacggaaccgaaacaaggtgaaaatggagaccaagaatacgatgatggtgaggaagaatcttgtgagaaaactcgtaaacccgtcacttctatcctatcagcatataggttactcacaccatcagtgaaggtataacaaaattttagctcacatgaaacatctatcctctgaactaactcagcgcttatcattctacaggtacaactattggtttattttatgcttaaatacgcaatggagatattactcgctgaagcaagtgtcatcacggcatattacttcatatggtcaaccaacagtgtagccatctttcttgcat

SEQ ID NO: 236923 - DNA, 391 bp, Gossypium hirsutum
tccacgcgtccgcccacgcgtccgcccacgcgtccgtttttgatgagtataagcctccacttcattgtacttgtagccaatcgagtatgccaacacatgtttctctcgttgaaccacaacaaaaaatgaaaaggcgaatgtaggctttgtttaaaaaccatgagttggaaaatggtggtaaggataaaacatctgagttggataaatatctagctgaggctaatgaggaatttgttgaagattttgatattttgtggtggaaagtgaacaaccctagatttcccactctttcaaaaatggccaaagatgtgttagctataccagtttctaccgttgcttcagagtctgcatttagcaccaggggacgtgtgcttgataaatataggagttc

SEQ ID NO: 236924 - DNA, 482 bp, Gossypium hirsutum
  unsure (1)..(482): unsure at all n locations
ctcttcttctccactaatccaccttcaatcccaataaacagtacagcatgcgccataatacaccagccctgaggctttgacaaatccagatcaaccagacttcctcacactcagagatccatacttttattgaaggcaagtaaaagaaggatatgaacgaggtgatgatggcagcggatgcaagctcgatgagaggaggtggagcgacgtcatttgcgtggtctgcgtcgtcgaatctgcttgctaataaccttcctctgctcacggccttgctcgctttcgctctcgcccagtttctcaaactctttaccaattggtttaaagaaaggagatgggattctaagaggatgattgattcaggtgggatgccatcatcacactctgcaactgtgacagctttcgcggttgctataggtttgcaggatggaatgggaggaccggcttttgctttgcagttgttcgncatgtgttgtgatgtatga

SEQ ID NO: 236925 - DNA, 482 bp, Gossypium hirsutum
tccacgcgtccgagctgcaaggctgtgagtggcagctaatgagaaggcagaggctgagaaaattttgcaaatcaaacgagctgaaggtgaggctgagtccaaatatttgtcagggctgggtatcgctcgccaacgacaagcaattgttgatggtttgcgagatagcgtgcttggattctccgttaatgtcccggggactactgcaaaggatgttatggatatggtcctggttacccagtactttgacaccatgaaagaaattggtgctgcttgtaagtcctcagctgtgtttatccctcatggtcctggagctgttcgtgatgtcgctactcacattcgtgatggactcctccaggccacacaccagtaactatatgattttttcttaagacaagacaagacaagcattagtagttttttaaggataatacctggttttaacgtttacctgtttagttctggatgtcatttttacattatga

SEQ ID NO: 236926 - DNA, 456 bp, Gossypium hirsutum
accacgcgttcgattttagatcacagcaagtggggtgtggcaggagaatgagtcagaatacctttaggaggttttatagttgaaaagttattctggatcaacgaggatattgatgactgtactttgaggttatccttgttgatgttgcacacaatgggatccgcaacgacccgagaattaactggatctgcaatcccgttcacaagcacagggaacttggaggactcacatctgcaggtaagaaaaacaggggtctgcatggaaagggtcacttgcaccacaagaatcggccgtctcgaagggctacctggaagagaaacaacaccctttcccttcgtcgttaccgttgagtttagtaggatactttcagacgtattaattgcttctatctttgtgggattttggaattccttttactgagtctgaaatttttgcaagttatttgtgtttgagttt

SEQ ID NO: 236927 - DNA, 458 bp, Gossypium hirsutum
aggatacagattctcaagatttcgcaagctaaattgaaggaattcatttcattttgtgaagcaatggaacttgtaccacaggaagagttggaagcttctgtgcaaggagcttcaaattcttttgctgaccgaagagctttgaagattgcttgttttagacgccaaagggctgcagaggcaaaacttacagaaataaaggagcggaaggagcggcgtggacgttcaacaaaagcagctaccttatccactcctgtggaggttggagaggactgatctgcttgatgatgatggggcaggaggaacgagaggcttggcttactactatctcattggctatttgtaaggcttttgatctgcttgaaatgctgaagaaggaagaggaaatgctttctgcgataaaggagaaacagctcaaggatggggaaaaggaattttctcaggctatccttgatgatcgc

SEQ ID NO: 236928 - DNA, 400 bp, Gossypium hirsutum
gttagtgccgcagcttctctttactctgtaatggcgaagtcaaagaatcacacggctcacaaccaatcttacaaggctcacaagaatggaatcaagaaacccaagaggcaccgccacacttccaccaaagggatggatcctaagttcttgaggaaccaaaggtatgcaaggaaacacaacaagaagaatggagaatcagccaatgaagaagagtaggcttttagtggggtaaaagaaaattctagcctgggttaggggtttctaattatggctgttttgtttgtttcaatggaaattagggttttgtttttttcagcattagcactattttgattattatctttgttataaaatatttgaagctttgagcttatcaatattgagaacatgtttcgagttt

SEQ ID NO: 236929 - DNA, 457 bp, Gossypium hirsutum
gtgatatcctctgaattggatcctgatgtcctaactaaagacaatgatgaagtgcaaaagcagaatctaaatatggaaactgtggacaaggatgaaactgagttttgaaaaaaagataggtgcggcttatatggccttccatcgaattgattagccaagccattacaattgaattgttgagttcccaagtggcataagtaggatcagccatggttggtcgtgggatttctccattgatgtaccctaatttgccacgaccacgaatcaccataagaaccgattgagaccattgcaagaagttcttcccatttagccgatgattggtgattataagggaggaattaatttcaccttgagtgattccctgattgatattctgagttatttgtgatgtctcagtttcagagaaattctcattgatatcacccattggaggactaaaccacagaaattttta

SEQ ID NO: 236930 - DNA, 415 bp, Gossypium hirsutum
gaaaagcgaccttatgttgataaggccgagaaacgaaaggtcgagtatgaaaagaacatgaaagcctacaataagagacaggctgagggtccccaagaagatgaggaggaatctgagaagtctgtatctgaggtgaatgatgaagaagaagatgatgatgaaggcagtggagacgaagatgatgagtaggaaaaatccagggaggatagcataatcaaactaggctgtgatagtgtttgatcatcttatgttaatgctttttaaatgcaaatttcatttaagcaaaaatgtaactctggatgctgttggtttcttttgacgtttcgaaattaatagttgtagatgggtacatttgttgctacatgtactttgcatttgaagttgaatggcgtaagataggtaaatccttttctaa

SEQ ID NO: 236931 - DNA, 333 bp, Gossypium hirsutum
taacatggaagaacagcttaattagcttcggagatgcactcaaatcgtggagttcattagatgctactccatgcagatggtttgggattcattgcaactcacaaggcgaggtagttgagataaggctgaaagcaatagagttgcaaggctcattgccttctaatttgcagtctctaaaatccttgaagacccttgtgctttcatcaaccaatcttacaggcacaatccctaaggagctcggtgatcagtatgagctaagttatgttgacctcagtggcaattctctcactcgttgccttgatattggcatctctgctctccgctctaatgtcc

SEQ ID NO: 236932 - DNA, 269 bp, Gossypium hirsutum
cttcattgatttctgcttgcagctacgctggtctttttctccttctccggcgacgatctcaattcaccggaagttctcgccctaaggattacctctatcatatccttcgacatcttgtgattcagcatattctaacttgtcgccaccatgaatcccgaatatgattatctgtttaagcttttgcttattggagattctggtgttgggaaatcgtgtttacttctgaggtttgctgatgattcatatctggaaagttatatcagtaccat

SEQ ID NO: 236933 - DNA, 173 bp, Gossypium hirsutum
gaaacttggttcgcaataaggaacgatctgttaaaagaaggcagcgccttgtggggccaaattcttcgactttgaaggcacttgaaatattgacaagctgctacattcttgttcagggaaacactgttgctgctatgggttcatttaaaggtttgaaacaagtcaggaggatt

SEQ ID NO: 236934 - DNA, 196 bp, Gossypium hirsutum
agaagcaaacgcttctctatcaccacaaggaaaaacacttcaccgccggagagatcgttcgcgacatcatcatcggcgtctccgatggtttaactgtgccctttgctcttgccgccggattgtctggcgccaatgcctcgtcttccattgttattaccgctggtatcgctgaggttgccgctggagccatctctat

SEQ ID NO: 236935 - DNA, 209 bp, Gossypium hirsutum
  unsure (1)..(209): unsure at all n locations
gctcgacagaggggccagcaggtgactctctgaatcccattaaccctattgaaaagctagaaggagctcatcagcataagagagaacttagatattacaactctgagatgcataaggctgctttttcgttgccttcattcctgaagagggagngtgaggctactttgcgactagcaggaatctgcgtgtctcctagtcctaagcaaata

SEQ ID NO: 236936 - DNA, 430 bp, Gossypium hirsutum
cccactcgttcgataggctttcaggttttttgaccggaatcgagttggctacgttagggtgagatctaaatcttaatacttattctggtatattcttttacaatggtgatgattggtggacgctggtattatacaggtcgaagatatgaggttgatgattcatagcttgggaaagtttctatctcatagggatgtcaaagtaggattcacgattctatgattctttctgcagttgtttgtcataatttaactttttatatggtactcttgcattatgggtactcatggcattgtttacctgcatcaggaactacagcaaagtgcattgttagagagcaacacaggaagggacgatcacattctttacgataagctggttcgtatgtctgacatataaaagcctttggggtccaataagatgttataatct

SEQ ID NO: 236937 - DNA, 503 bp, Gossypium hirsutum
aaatttaaaaacctcatgaccttcgaagaagagaagcaaaacccaaagctagcaggaagataatgacaggtctagtaatgatgaccaaaggaggtggctgtggtggcggtgggaagggcggaactaaaggaagaggaggagggctcaagagctgtgaggaggaagaagaacggcagaaccagatttctgtcgtggcctttcttttggctgctttgaggaaatccatggtgtcttgtcgtgttgatagacgagacgaagtaatgtcttcttccaccgttcaccatatggaaatcggatggccgaccaacgtcaaacacatcacccatgttacatttgatcggttcaatgggttcttgggtcttcccgttgagttccaagtcgagatccccggtcgggttccaagtgctagtgctagtgtgtttggtgtctcagccgaatcaatgcaatgctcgttcgattccaaagggaatagtgtccccactatactcttactaatgcaggag

SEQ ID NO: 236938 - DNA, 432 bp, Gossypium hirsutum
ggaagagcaattgctgtcaagcaattgtctgcagtatcccggcaaggcaagagccagtttgttacagaaattgccactatatctgctgtgcaacaccgtaaccttgtcaaactatatggttgctgcattgaggctgaacaacgtctcctcgtttatgaatttctggaaaacaagagtctagatcaaatattgtttggaaaaagtttggatctcaactggacaacacgctatgatatatgcttgggagtagcacgcggtttagcttatcttcatgaagaatcaagggttcgcattgtgcacagagatgtcaagtccagtaatattttgcttgattctgatctcaccccaaaaatctccgattttcggtctagccaaactttacgatgataagaagacccacataagtacccgtgttgcagggacaattggata

SEQ ID NO: 236939 - DNA, 458 bp, Gossypium hirsutum
ggccagccccatgtgcccatgggtttgacaacgatccgtccgccgcatccctaaaaagctctttcaccaggcctagtatacgacatctcgaccgaagaatacatcacattcttgtgctcactcggctacaccgtcgaccatgtcaagaccatagtgaaacgccccaacattacatgttcgacgaaattcaaggaccctggtgaactcaattacccatcgttttcagtcttgtttgggggcaaaagggttgttcgatacactcgtgaattaacaaacgtaggccctgcaaggtccatatacaaagtcacagtaaatggaccatcgacagtagggatctcagttaggcccaagacactcatctttagatccgtgggtgaaaagaagagatacacagtcacctttgtagctaaaagaggaacaagcccaatggctaaacctgaatttggttcaatagtatg

SEQ ID NO: 236940 - DNA, 491 bp, Gossypium hirsutum
  unsure (1)..(491): unsure at all n locations
gactttattacctctatatccccttccgccactccttcgccgtccccttccgtttccgagtggtggaaaaccgtttctctttacaccgaccagaccggagccaacgtttcccggactctcgttgtagctaaagaacactccgatacgcgttactcccatgggtatcacctcacgcgcctttctgttcaacaagtcatcgccactgccgtcaaagctgccccgttccccgtcgaccaccgcaacggaatctacttaatcctcacctcccacgacgttaccgttcaagacttctgtcgtgcagtttgcgggttccattacttcacgttcccatccatggtgggttacactatgccctacgcttggatcgggaactccgggaaacaatgccccgaggtttgcgcttaccctntcgccgtccctggctacatgggcggcggtggtccggnggcgttgctaccgccgaacggagacgtcggattggacgggatgat

SEQ ID NO: 236941 - DNA, 485 bp, Gossypium hirsutum
gaatttaggtcaccgccgtgcccattccgaaatcataactcttcctgatgatattaacttcgacggtgatctcggcgtcgttggggcagccgacgggccttcctattccgatgaaacggaggacgatatgttgtctatgtatctcgatatcgataagttcaattcttcttccgtcacctcaatgtttcaggttggcaagtcgttgacaacgactgctccaaattctggtccatcggctgcggtgagtatgggagcagggacggcaacgtccggtgaggaaaatgcgagtgttggtgttgggtcttctgagaagcctagaattaggcaccaacatagccagtcgatggatgggtcgacaagtattaagcccgaaatgctcctctctggttcggatgaggttacgcctgctgattctaagaaagcaatgtccgctgctaagcttgctgagcttgctcttattgatcccaagcgtgctaagaggatct

SEQ ID NO: 236942 - DNA, 453 bp, Gossypium hirsutum
gttcactgttgcatcctcaaagtaattatagacagattcactgttgagctgacttctcgatcttctgatttgattgatcatcataatcgttataaaaagccgaaagatttacattatgacaacgaagccgagcttaaagatattcgcaaagaagaggatgccaaaaagagaaactctcgtcagagaacatacatgaaacgaattatcgttcatccttctttccataacattgatttccgcaaagcagaaaagattctttctgatggtgaacaaggcgaagccattataagaccttcttcgaaaggcaacgatcatcttactctgtcctggaaggtctatgatggtattcatcagcatgtggacattcgggaagaaggcaaaaacaacgtcttttcacttggacagcaattatttattggcaatgaaacttttgaagatcttgatgaaataatt

SEQ ID NO: 236943 - DNA, 393 bp, Gossypium hirsutum
gtgctttcgtttgaaaagcttcgccaggtcaggcgcaacctagatcaagccaagaccttacttgaggctttgattaagagagaagagaagaagagagatgttctggaatgtgaagttagtcttcagaggatccaaatgaagtacaagcacgaaactgaactcctcgaagatattacgcttcctggatttccaccaatatctagcaagtttgcttctagtgaagatgagtttatggactcggatgaccttgcaaacagccgtccacgtgcacgacctgctgcagttcagaatccacctctaacagattctaatgtaggcatggctcctactgcaagtgttaagcaagagttccggcggcgacatttgttgcatggatggctccataaactggat

SEQ ID NO: 236944 - DNA, 467 bp, Gossypium hirsutum
aataaaatcagattttataaaaaaaaaaccagattttgtcgaacaaattctgagcaagtgtccgtcactgctactccaaacgaatgctaaaggtcaaactcctttgcacgttgcagcagggtatggacattctgctattgtgaaacttctaatcaattcttgcgcaaaagctagggatggagattttgagctgggaatggatcaagtaagtgcagtgagggagatgctgaggattagggatcaagaatccaacacggctttacatgaagcagcagggtgtggcaatgttgaagtggtgagtgcttgtggttcctgcccttcccccaaccccaaacctaaacctaaacctaaaccaaagccaaaccctactccctccccatcttcttctggcaagtgccctagagatgctcttaaactcggtgtatgtgctgatttgctccgtggcttgctcaacgtcaccattggta

SEQ ID NO: 236945 - DNA, 467 bp, Gossypium hirsutum
cccactcgttcggtttcccactgttgtctgactttccaaaaaacctaactgaaaaacaaaaacaaaaattcgaaactaaagactcaaattgaaatcaaagagagaagctaagctaaagattgcgaattgctctttcggaagttttcaagcttatggtgtccgtgaaccccaacccagctcaaggtttttacttcttcgatccgatgaatatgggtcttcctggtgttaattcagccccgcctgccaataaggtggcgccgccgcttcatgttccacctcctcctgccacctccggtgctggtaatactacagtgtatccggaggatcccagtaagaaaatccgaaagccttacactattaccaagtctagagagagctggactgagcaggagcacgagaagtttctcgaagctcttcaattatttgatcgtgattggaaaaagattgaagcttttgtcgggtcaaag

SEQ ID NO: 236946 - DNA, 521 bp, Gossypium hirsutum
  unsure (1)..(521): unsure at all n locations
tgaatgcacaatcagggggttcttgcattgatgaactgacagcaatagctaaacttcacagtgctgaacttctcaaaaccctggttaagttacagagccagcttgaagggttcaaatatgcttattacaatttgtatcagtcttttactgaaaggttgaacaacccttcaaaatatggtttcaaagatgcaacgacagcatgttgcggctctggtccgtacggaggagtttatagctgtggagggaagagaggatagaggtgtatgaactatgtgataaacctggtgatcatttcttctttgattcatatcatccctcggaaaaggcctaccggcaatttgcggagttaatgtgggctggcaatactgatatcgtttggccttacaatcttaaaatgctatttcaagacaatgcattttacccgtagaataacttttttttttatttcgtattaattccaaaaataagatatcgngtattcgtataattatattatataaaatgtcttacttcaatatttt

SEQ ID NO: 236947 - DNA, 361 bp, Gossypium hirsutum
tccacgcgtccgggaagatagacttggtgtatggtgggggaagtgttgggttgatgggtttgatatcccagacagtgtatgatggaggttgtaatgctcttgggataattccaaaagctcttatgccttctgagatatcaggagaaacggtgggagaagcgagaactgttttagacatgcatgagcgcaaggctgaaatggcccgagaagcggatgcctttattgctcttcctggtggatatggaacaatggaagagttgctggagatgataacatggtcccatcttggaatacataagaaaacagttggtttgctaaatgttgatggttactacaataatttgcttgctttattcgacaa

SEQ ID NO: 236948 - DNA, 446 bp, Gossypium hirsutum
cccactcgttcgcggacgcgtgggtttttttttttttgaaacaaatataaattaacttattttttcatccaattatttcactgatttgtaaggtacataatttatggattggaaggcgagaaggatatactaaagggtagagggtggttgtattatgataaattggcgaaatcagggtggaaaggtaaggcagagattatggagacggaaggtgaggatcatgtgttccatatctttaatcctgattgcgacaacgccaaccgcttgatcaaacgtttggcttctttcttcaaccaagggaagcttccttttcaatggaaatgtgaaagcgaggtgcttggttagtaagtaaactaaaaaaagaagggtgagattgagatataacctattgtcaacatgccctgcatctgttggtatttcctttccattatacaatttgtcttaac

SEQ ID NO: 236949 - DNA, 438 bp, Gossypium hirsutum
  unsure (1)..(438): unsure at all n locations
gcagtagacggcctgctgaggattggactaggacatgcaaaacttaaggccagccgaactggatttaaaccttacaaaaggtgttctgtggaagccaaggaaaatagagtgatgaacaccggcagtcaaggtgaagagagaggtcccaagagggtacgattagaaggggaagcttcgacttgacttttacgctattgcatgcaattaacaaatgcgatgtttgtttgttcaatgcaatccctaatttttttttcccatatcttatttcctttttatatgttgatcttaaagactagcattacattgcagctcacgagacgctttcgtgtggtggngttgtactatctaatatctacattgacttaatcgtctttatagacttttttgaattaaaaactcctctgagatagaagcatgaaagtaagtactgaatctttt

SEQ ID NO: 236950 - DNA, 420 bp, Gossypium hirsutum
tggaaaaattgtacttttgtcaaagggtgcagatgaagcaattcttccttttgcttatgttgggcaacaaacaagaacatttattgaagctgtagaacagtatgctcaattggggcttcgtactttatgcttagcttgccgtgaattgagagaggatgagtatcaagagtggtctttgttgttcaaagaggctagtagcacattagttgatagggagtggaggattgctgaggtttgccaaagattagaacatgattttgaggttctaggtgttactgcaatagaggatcgtctacaggatggtgtacctgaaacaattgagacactcaggaaagctggaattaatttttggatgctgaccggagacaagcagaatactgccatacagattgctctttcttgcaattttatttccccaga

SEQ ID NO: 236951 - DNA, 439 bp, Gossypium hirsutum
gatttatggatgatcattatccagttcgaagtgctttttcgcttctcaaccagattctagatgaatatcagaaaaattttggggagtcttggagaaatgcacaagctgatagcactcaaccttggccgtatctgaatgatgctttgaccaaatttcaggaccctgcagaggcggataaattattgaaaattcagagggagttggatgaaactaaaatcatccttcataaaactattgatagtgtgcttgcacgaggtgagaggctggacagtttagttgagaagagttcagatctgagtgctgcgtctcagatgttctacaagcaggctaagaaaaccaatcaatgttgtaccatactgtaaacttgcaagagaaagcaacaatgttgtgatatgggattcgcttatgttggccttaaagctgatgatgattgatgact

SEQ ID NO: 236952 - DNA, 552 bp, Gossypium hirsutum
cccacgcgtccgaaaaaattaagaacatgggtgtcactatcaatgctgagattgagtttccagccattgagtttcgttcatcagatttgaagcgaggaaccgatggatggcgccatttgtgcaaaaaggttcaagaggcttgtgagaaattcggttgttttgaggtggtgtatgatacgatatcgacgaaagttcgagaagagacttttgggttgatgaaagaattggttgaggtcccggtggaacggaaacaaaagaacactagtcccatgccttaccatggctgggttggaccatgcgagcaagtttctttgttgtatgaaggcttcggaattggaaatgcctccaactatgattgtgttaaaagttttactcaacttatgtggcctgaaggtcacccacacttttgcgacactatatataccatgggaacacaaatggaggagctaaacaagctaatctggttaatgctaattgatcgctatggattaggagatgactcactgaagttgaactacacaacattggtgcggatgatgaaatacatggctc

SEQ ID NO: 236953 - DNA, 408 bp, Gossypium hirsutum
gtcaattcatggtggctgctgaacctgcagatttcgttcacgtgtatagtacgcgtgctgattacgagaaaagacaagagattgacttctttggggagatttcgggagtatctctgagtccagacgatgaatctttgtatataggaatatgggacagaacgtatgcaagtttgctgcaatacaacaaaagacacacatatgcatacttggattcgtacttgtgataatgtcaactgcgtgctgttgtagttatggcgctctcttttgtgctctgttttgtttgtgtagggtgatatgaatgaagattaaatattatatgacagtataataagtgtatgttgtgttagaacttttctagaaaggtgcatgtacagtacaatatcatcctctaaatcatatgctatttgt

SEQ ID NO: 236954 - DNA, 423 bp, Gossypium hirsutum
cccacgcgtccgcttgagtttctgctacctactctaatattatagatcatctccctgtagggaaaacaacctgcaattaaactagggtttgagctttttcttattgacagtaaagttttaagacttgtaaaggtaatcctacaatatacagagagagagagagagagagggagtagtggtggtactggataagaatgaaggagagtggaggaaggaagcagggagcagcgtcgccatgtgcagcatgcaaacttctaaggagaaggtgtgcccatgactgtgtttttgctccttatttcccagccgatgagccccacaagtttgctaatgtccacaaggtcttcggtgctagcaatgtcaacaagatgctccaggaactgccggtgcaccaacggggagacgcggtgagtagcatggtgtatg

SEQ ID NO: 236955 - DNA, 398 bp, Gossypium hirsutum
cccacgcgtccgcccacgcgtccgtcatgctcgaatatgttcaatcatcaggagatctggtaaagatgtggaggagctgaagaatgggacattagtattggagcataaggatgagcgcgatttggggctccatttgctgcagtttgctgaggttgttgaggaggcttgtaccaatttgttaccgaatgttgtgtgtgactacctctatagtttatccgaaatcttctccaaattttacagcaaccctgagtgcaaggttatcgggtcagataaggaaacaagtagactactattatgtgaagcaactgcagcggttatgagaaaatgcttcaatctcctgggaatcacacctatttacaagatatgattgtactttgaaagctttacatataaccttt

SEQ ID NO: 236956 - DNA, 502 bp, Gossypium hirsutum
ttcattcgtccgcccacgcgtccggcagaccaggaaaacctatgaacaaaaatgttctcaaatgagaaaccgcaacactaaacgagatggcctctattctggtgacaaaactcgagctgaagtaaaagacttgcatagcagaatcttggttgcaatacgaagtgcagaaacaatctccgaaagaattgaaaaactgagggatgaagagttgcagccacaacttattgagctgctacacggactaatgaggaactggcagataatgttggaatcacacgaaactcaaaaccgaatcatgtttgaagtaaagtctttcaactgtcccacttacggaaagttttgcaacgactctcaccgtcttgctactcttcagctcgtggcagaacttcataattggcgttcttgcttcgttgcgtatttatgttcacaaaagtcatacattgaagctcttagtggatggcttgcaaagttcattgcacccgaagtagaattatgctccaag

SEQ ID NO: 236957 - DNA, 378 bp, Gossypium hirsutum
ctccattcgtccgcccacgcgtccggtggctcatgcatttgccctcttcgttggggtgtccattgcagccaacatctcaggtggtcatttgaatcccgccgtcacctttgggttagctgttggaggcaacatcaccatcttaactactattttctactggattgctcaatgctttggctccatcgttgcttgccttcttctccagtttgtcaccaatggcttgagcgtcccagcccacggcgttgcttcaggaatgacggctgtggaaggcatggtgatggagattgtgattacatttgcactcgtctacaccgtttatgccacggcagctgacccaaagaagggttctctcggaacaattgcacctattgcaattgg

SEQ ID NO: 236958 - DNA, 345 bp, Gossypium hirsutum
tcttctcgtccggccacgtgatgtgcgttcgctgtctttacaaggatcccgccacacaagatgtcgtgtacggcagagatcaagcgcttctcgtacctcggcccaacgacgttcgatcatcggctcctaaaatcgaacagttgagattctttttcatctcgactcgagccatagccgaggcgagaaggctgatagagtgcagtaacgacttgacaagcgcttaccatttgttgggctcggctcgagccttgttgatgcagtcgaattcgcagtcggccgaagagtatgccagagggttagaagttgagttggcggaattgcattggaggaaacagcagatgatgg

SEQ ID NO: 236959 - DNA, 449 bp, Gossypium hirsutum
gttttatagtaaaagttttaagagctaagatctttaggaaaagaaggaaagcgtccaaatggcaaagcattcagctgaagttgttgttgaaggattaaagaagattctcctcaatgtccaagaagagctggatgagaaggttcaaagcaaagttgagaagcttatcgccgagctccaaggcagagagcatcatcatcgtcatcatcccccttgtgaccatgatgctcaaaggcttgacgatggctttcacttcttcaagacccacatatttgacaaacaccgagaatgtttcaatgaacttgcaaaagctcagcatccaaagttcttggtgtttgcatgctcggattcacgagtaagcccttcagtcgttttgaatttcaaaccgggagaagccttcgtcggccgcaatattgctaatatggttcctcattttgatcgggtgagacaca

SEQ ID NO: 236960 - DNA, 408 bp, Gossypium hirsutum
aaggaattcccagttatggaagaggacatggaacaagagaaacatgtgctctacacactgccaggctttcttgcgacaccttggtggatttctggtcagctcttggagaagaaactcggcaatctcttttaagaatgaaggaagaagatttcattgagaggctcatgtacaggtttgacagcaagagattttgcagagattgcagaagaaacgttatccgtgagttcaaggagctgaaggagctaaaacgcatgcgtagagaacctcgatgcactagttggttttgtgttgcagatacagcctttctgtatgaggtatctgatgacagtgtccaggctgattggcgtcaaacttttgctgacacagttggaacttatcaccactttgagtgggcagctggaactgggg

SEQ ID NO: 236961 - DNA, 318 bp, Gossypium hirsutum
ttttctcgtccgcccacgcgtccgctcaactcggtcctgctgagcggttcctaaaagttttggtcgacattccttttgcttttaaacgaatggaagtgctgctttatatgtgctctctttacgaggaggttacttttgctagagagtcttttgaaacattagagattgcatgcaaggaactcagaagtagccgcttattcctcaagctcttagaagctgttcttaaaaccggaaatcgcatgaatgatgggacattccgtggtggtgcacaagctttcaagctcgacacacttttgaagttatcagatgtcaaaggag

SEQ ID NO: 236962 - DNA, 216 bp, Gossypium hirsutum
cttcatgaggaaagatgttatggccaagtgtgctcatttggcccaatttgatgaggaactttacaaggtgaccggtgaaggtgatgacaagtatcttattgcaactgctgaacagccactctgttcttaccacgtggatgattggatccaatcgtctgagctacctataagatatgctgtatattcatattgttcacgcaaagaagctggttcaca

SEQ ID NO: 236963 - DNA, 420 bp, Gossypium hirsutum
cccacgcgtccgacaaaatccaaaaataagccaattgtcaatttttttaactatggcttcaaatcccaaggttttcttcgacatgacgatcggaggtcaaccggccggccggatcgtgatggagcttttcgcagacgtcactcctcgtaccgacgagaacttccgggcactctgtaccggcgagaaaggcgtcggtcgttccggtaaaccactccactacaaaggctctaagttccaccgcgtgatccctgatttcatgtgccaaggaggtgatttcacagcccgaaacggaaccggaggtgaaatcgatatacgggactaagttcgccgacgagaacttcatcaagaagcacaccggacccggcatactatacatggcgaacgccggtcccggaacgaatggatctcagatctttattt

SEQ ID NO: 236964 - DNA, 395 bp, Gossypium hirsutum
cggtcgcgtgggcggacgcgtgggcggacgcgtggggttttggaaattgttgatatgatttgaaattttattgtttatttgaaatttttttttgatgctgtagaaaccagagaaaaatgaccaagtgttacccaaccgttagcgaggagtaccaaaacgccgttcaaaaggctaagaggaagctaagaggtctcatcgctgagaagaactgtgctccactcatgctccgtctagcgtggcactcagctggaacttttgatgtcaagaccaagaccggaggtccattcggaaccatgaagcaacctgctgagctcgctcatgctgctaacaacggtctcgatattgcagtcaggcttctcgagccgatcaagcagcagttccctatcctttcatac

SEQ ID NO: 236965 - DNA, 316 bp, Gossypium hirsutum
cccacgcgtccggaagtatagagcctttagatttgtgtaatgttcaagttccgtactatttcaggtgcccaatctcactcgaattaatgcgagacccggtaactgttagcaccggccagacctatgaccgaaccagtatcgagtcatgggctgctaccggcaacaccacttgtccggtcactcgagcaccactgtcggatttcactctcatccctaaccacacacttcgccggcttatacaagattggtgtgttgcgaaccgggcttttggtattgaacgaattcccacgcctaaacaaccggctgaaccgggtat

SEQ ID NO: 236966 - DNA, 398 bp, Gossypium hirsutum
gaattacggtcaaaaaccgatcaagggctcaccatacccacggggatattacaagtgtagtacggtcagagggtgtcccgctaggaaacacgtggagcgagcgaccgatgatccgtcgatgttgattgtaacatacgaaggggagcaccggcacggggaaggcgcggcgcaggagaacatggctccaggtgtggggctggtattcaagtcaacttgataaacaaataaacttaaaagagttttgtaatattttagtggttgagggggctgaatgtaaatttgttttttccttagatatattataaattttcctaatgaaaaaagtaaagcttaattaaattaattgttgattggtgatgacgatgaaaatagcaataataatatcttaataattctac

SEQ ID NO: 236967 - DNA, 406 bp, Gossypium hirsutum
cccacgcgtccgcccacgcgtccgattcgcaagagtcttccctcctcttttggctactccatacctgccgcctcctacaattctatctccttttccataaagattcaatattgaagcctgcgccatcttggatcttacatttactttgtcggtggcggatcaaaaaccccaaaatttgcttaaagatctagctgtagctgttagatctttgaaatccctgtgttctcttttttttttttctgaatctgggtctttctctgatctgtaatgggtttgagatataaggctggcttgttcttgataggtaccgttgttgttatttgggtaacttctgcagaagtaacccaggatatctttgctgactataagcagccatttgcggttacatatcttggagcttctctta

SEQ ID NO: 236968 - DNA, 495 bp, Gossypium hirsutum
  unsure (1)..(495): unsure at all n locations
tgtattttctggatctaaggaaaaaatatggatctgtactagctatcgatcttgtcaacacgactggaggtgagggacgcttaagtgaaaagtttgcaagtgcagtgcaacctatacttagtgacgatttaagatatattcactttgatttccataagatctgaggacatgttcattttgagcgcctttcgatcctgtatgatcaaattgcagattttcttgacaaaaatgggtacctcttgttgaacgacaagggtgagaaaatgaaagagcaacttggagttgtaaggactaattgtattgattgcttagaccgcaccaatgttacacagagcatgataggtaggaaaatgttggaactccagcttaggagaattggtgtttttgctgctgaagaaaccattagctcacacacaaatcttgatgaaaagtataaaatattgtgggctaatcatgnggatgacgtaagcatacaatattctggcacttctgcac

SEQ ID NO: 236969 - DNA, 556 bp, Gossypium hirsutum
gggttttacaacctagtgataaatttctcatttttgcatcggatggactttgggaacatttgacgaatcagcaggccgtcgagattgtttccaactctccacgagcaggaattgcaagaaggcttattaaaacagctttaaacgaggcggctaggaaaagggagatgagatatgatgacctgaagaaggtagataaagggataaggcggtttttccatgatgatattacggttgttgtcatctttatagaccaggagtcgctgagtacgaagatgcctgttccggagcagtccgtaaaggggttcgctgactccattggaccatcaaacttcaacattctttaagtcttgagatgtaaatcaggaaatgcaagcacatgtggtctatcatcatctgaattaatagcttgccacttcaaataaacagtggggtttctgtatggattttacttcctttttttctttctccttaccaagcaagaaaagtttgaactaattttgattttactagtatcactttgattcccaactttatgatgataaccccctttttagag

SEQ ID NO: 236970 - DNA, 444 bp, Gossypium hirsutum
tttacgcgtccgcttgttgtgaggaagaaaaacaagcgttactgcccaatatatttcaataaggaagatattgaaaaagaactttcaaaggtttcaagggcatcaagaggacctggtgtttctcagcaaatcatggttggaagcttggaagatgttctgaagaaaatggagatgagcgagaaaaactcgggctgggaagatctaatattcattccacccggtaaaagctattctcaacacctccaagatgtggtgaaagtatgaggcagttcggatgttacttctgcctgtccatttgataacataaaaaatgcgattacagcaactcagaagctcttgaagtagaattcggaatggaagagatgggaattaagagtgggatgtacactgtctgatgggttctccatatgttaccgggaaaaaaagaagagaaaagaaagaggc

SEQ ID NO: 236971 - DNA, 393 bp, Gossypium hirsutum
tttttgtacatcgcgtggctttcctatcttcatttcatggtactctacgacgaaaggctcgtttttgatctgagtttggaacctgatatggagattgaagatatgatttgaatgttttttttgtcaaaaccagaaaaaaatgaccaattgttacccaaccgttagtgaggagtaccaaaacgccgttcaaaaggctaagaggaagctaaaaggtctcatcgctgagaagaactgtgctccactcatgctccgtctagcgtggcactcagctggatctattgatgtcaagaccaagaccggaggtccattcacaaccatgaagcaacctgctgagctcgctcatgctgctaacaacggtctcgatattgtagttaggtttctcgagccgatcaa

SEQ ID NO: 236972 - DNA, 441 bp, Gossypium hirsutum
ccatctcccaagttgagagatttgtatagcagcttctcctctcaacctccacgccaaacatgccttcacataagactttcagaatcaagaagaagctggccaagaagatgaggcagaacaggcctatcccttattggatccgcatgcgcaccgataacaccatcaggtacaatgcgaagcgtaggcactggcgccgtaccaagctagggttctaagctttatgtgctttatttgtagttttgtactcaagcaaagctctgtttttttgtttatttcatgacattttgatgtggccttgaacgtttttatgtgatggttgttgacgatatttagccattgtttcgactgttgtctatctaatgtcttgatttcgagctttgaatttttatgaaactgaatcattatgttctttggaattaatgaaaactgttattattcagt

SEQ ID NO: 236973 - DNA, 459 bp, Gossypium hirsutum
ccctcgcgtccgaaatgggatgaagctatgtattatgtgctgggagatccaactatgaagccaaaagggtatgacccaatgacggaagctgtgttgctgtgggaaagagacaaatctgctactaagacaagatacaatcttaccccttttgcaatatccttaaatgaattaactcctgatttattggaaaaattgcctccaacggactcaagactgaggccagaccagagacacttggagaacggagaatatgaaatggcaaatgcggagaagctgcggttggaacagttacagagacaggcaaggaaattacaagaaagaggatggcagccaagatggtttaacaaggatgaagatggttgttatcgatacattggaggatactgggaagcaagagagaaaaggaaatgggatggaatccctgatatattcggccagtgtagcggtagtagtcataat

SEQ ID NO: 236974 - DNA, 392 bp, Gossypium hirsutum
tcttcaatgcagagcatccacagataatatttgataatattctcaaccgtaaaataccttggccacgggcaccagaagaaatgagccttgaagcaaaggatttaattgatgggttgttgacagaagatcctaatcagagacttggagccaaaggagcatcagaggtgaagcaacatgtatttttcaaagatatcaattgggacacccttgcaaggcaaaaggctgcctttgttcccagttcagacagtgcacttgatactagttactttaccagtcgctactcatggaatacttcaaatgaccacacatatcctggtagtgattttgatgattccagtgatgctgacagcttaagtggcagtagtagttgcatgagcaaccgacagatgaag

SEQ ID NO: 236975 - DNA, 459 bp, Gossypium hirsutum
gtttaactctaacaaatatcaggcggggatggatttgttcctcaacgccaaagcggtgcgcctacgcggtcaccatgacaagtatctcgtcgccgaggaagacgaagaatccgtttctcaagaccgaaacggatcctccaaaagcgctcgatggaccgtcgaattcgtacccgggtcagaaaacatcatccgcttaaaaagcttttacaacaagtatctcaccgcctccaaccagccctttttacttgggatgaccggtcgaaaggtgattcagtcgctgcctaggaggctcgactcgtcggtcgagtgggaacccattaaagtaggatctcaggcaaagctcaagactcgttacggtaactttttgagagccaatggagggttaccggcttggaggaactcagtcacccacgatattcctcataggacggctactcaagattgggtgttggggatgtg

SEQ ID NO: 236976 - DNA, 427 bp, Gossypium hirsutum
  unsure (1)..(427): unsure at all n locations
ccctctcgtccgcccacgcgtccggttcaaccttgaaaccaatgtctcttcttcctcaaacactaacccttttagccttttcacatatagtaataatcctatcaaatgcggaaaccacttccgattatagtacctttatattcaaaaactgcaccaccaacacatttacagattcaaccaagttccattccgaaaccctttcgacctttttcgaagaacttgtatccaaatcttcccaagagaagttctacaaaactaccacgggagatgataacaatggcatttcaggcttctttcaatgcagggngtgatctaaacaacaatgactgctacaaatgcataacatctcttcctgaaatgttgaacattttgtgtaaaaagctgtttcggctcggattcagctccatggctgcaatgttcactatga

SEQ ID NO: 236977 - DNA, 400 bp, Gossypium hirsutum
ggtgcaacagcttacctgaaaaaacagcgaattttgctgatgagaacttttcagtaagtgtgagcaaatcagcaaatgaggttgttgctacctatacaaaagatgagaccggaatggatctcattattcgtcttcctgcatcttacccattacggcctgtagatgttgactgtatgaggagcctagggataagtgaagtgaagcaaaggaagtggttaatgtctatgatgatgtttgttcgtaatcagaatggagctttagctgaagccatacgagtatggaagcgtaattttgacaaggaatttgaaggtgttgaggagtgccctatatgttacagtgttatccacactgtgaaccacagccttcctcgtcttgcttgcaagacttgcaagcacaaatt

SEQ ID NO: 236978 - DNA, 473 bp, Gossypium hirsutum
tttacgcgtccggttgccaaatacttcattacaagcccaagtggaggatccttgtcgcctatgttagacttgtatcaggacaaagtcactatggattcctggtaccacctgaaagatgcagtcttagaaggggggagtccatttaacaaggcacatggagtaaagaccagtgagtatatgaaaaaagatccaaggtttggaagcatcttcaaggccgctatgatggattacaacaagcttttcgtggaagagatgttgaaaagttaccgaggttttgatggcttgaattcattggttgatgtaggtggcggcaatggttttattctccacagtattgtttccaagtaccctaccattaagggtattaactttcgatctgccacatgttattgacaagtcaccctcctatcctggaattgagaatgtggctggagatgttttcaagagtgtaccaaaaggagacgccattttca

SEQ ID NO: 236979 - DNA, 464 bp, Gossypium hirsutum
ttagtctccatctttctttcttcactaacaaatttaaccagttttttgggagttaaatagcttgaaatcgatggcaggaatgagattgtcgccggaagagtctacggaagctaaccaacatcttcagcttccgcagcaacagctgcagaccggtcgagaagcggcttccgatgacgacaggtcggtggctgcagattcatggtctataaagagcgattacggaagcacacttgatgatgagcagcgccacgctgatgccgccgaagccctgtcctccgctgccaacttccgtcccgcctctgattacagttccgacaaggacgaaccagatgcagagacatcaatgcttggtcttcagagttactgggatgctgcatatcttgatgagcttgccaattttcgtgaacatggtcacgttggtgaaatttggtttggaactgatgtcatggatactgttatttctt

SEQ ID NO: 236980 - DNA, 525 bp, Gossypium hirsutum
ctgtcgcgtgggttgcgggaaaaaaaaatgggttcttttctttcaagcttgttaggctcttccggttcaccatcagaggattcaccatcttcatctgagtcttcaagggtctcaaccttccattcagctccaagatggcaacttcacttcaattctgtcaaagagagcccaaagcttatggttatagatttctcagcttcctggtgtggaccatgcaagttcatggaacctgttctgaatgaaatggctgctaaattcactgatgttgactttgtaaaacttgatgttgatgagctgcctgatgtggcacaggaatttggagtgcaggcaatgccaacatttgtgttggtgaagcaagggaaggaagttgatagggttgttggagctcaaaagaatgagcttgagaagaaggttgagaagaatagatgctaaaaagactatatacgatatctgcaatttgaaatttcagtttgaatacttaaattaataaatatgtcaaatggagtttcttgagtatgataatgc

SEQ ID NO: 236981 - DNA, 398 bp, Gossypium hirsutum
tggttagcattcccatcaaatgggcagcctgaagtgacatctgcttggcaaaccccagctgctgaaccagggaaggcagattgggaattggctttggttgagtcagctagtaacttgtcgaggcaaaaagcagctttgggtggtgggcttgatccattattgttgaatggcatgtatgatcagggaatggtaaggcagcatgttagctctggtcagttaagtggggggagtgccagtagtgtggcattgccagggccggggaagacaccggttttagctcttcctgcaccagatggaacagttcagaatgtcaatcaagacccatttgctgcgtcattgagcattccacctcctttatatgtgcaaatggctgacatggaaaagaagcaacatttact

SEQ ID NO: 236982 - DNA, 370 bp, Gossypium hirsutum
ccctctcgtccgcccacgcgtccgcccacgcgtccgggtgatttagataaacgtcgttcaactacggggtatctgtttactcttgcgaaagccccagtgagttggaagtctaccttacagtctacagtagctgtgtctactacagaggcagaatatatgacagttacagaagctgttaaggaggctatttagcttaatggattattgaaagacttgggagttgttcaaagtcacattagtctatattgtgacagtcagagtgctattcatttagcgaaaaatcaagtctatcattcaagaaccaagcatatcgacgtaagatatcactttgtgcgggaagtctttgaaaaaaaaaaaaaaagggcggccg

SEQ ID NO: 236983 - DNA, 245 bp, Gossypium hirsutum
atcatgattttgacaaggtgcttgcaagacagaggccaacagtgagcaaagctgatcttgaggtccatgaaagatttacaaatgagttcggagaggaaggttgatagatttaatgtaacttttcacattgatctacactagttgtaagtgcaaacactgtattttatttataacttctggatcatcgaatgaatgtttgacacaatccgaatctcttgtttatacagtgtaaataagattataag

SEQ ID NO: 236984 - DNA, 323 bp, Gossypium hirsutum
  unsure (1)..(323): unsure at all n locations
tcttgtttgagcctagtgagttgacctcatggggtttttaccgagctggaattgctgagttcgntgctactttccttttcttgtatatctcggtgttgaccgtgatgggagttgttaaggacaaaaccaagtgtacaactgttgggattcaagggattgcttgggcttttggtggtatgatctttgctcttgtttactgcactgctggtatctcaggtggtcatatcaatccagcggtgacatttgggctgttcttgggtaggaaattggtcgttgacaagggcaatatactacatggtgattgcagtgcttgggagccatat

SEQ ID NO: 236985 - DNA, 284 bp, Gossypium hirsutum
tcgtccacgcgtccgcttaaacgaacattggcggggtttataacacaatatgactattgatatcgagaccacggcggagcaaggcggcggagcggagctctcagcgaaggactaccaggacccaccaccggcaccgctgattgacttggaagaactcaccaaatggccgctttatagggcggcgatcgctgaggacattgccacccttcttttcttgtatgtcacgggggagactgagatcgggtataaagcccaaaccgacccgggaaagaatactggtgacc

SEQ ID NO: 236986 - DNA, 525 bp, Gossypium hirsutum
ttttaatgaaactttaagattatatggtctacaagaatggcttaataagagaagttgtaagagaagttcagattggaaatctagtgttacctgctaatatagatctttatattgcaaatgttgtacctcaacatgaccctcaactatggggagacgatgtccatctttttaaaccagagaggttcgcagaaggaattgccaaagctaccaattacaatgcagctgcattttgtccctttggaattggacctcggtcttgtgttggtatgagctttgcaaccatggaaacaaagattgcactctccatgattcttcaacgctataccatttctctctcccctgcttatgtccactcaccaatatctgttctcggcattcaaccagaacatggaattcaagtaatactcaaatcactggacagcaatgtttaatgtacatggttgctatgaattcaaggtttaaccttgctggtttatgaattcttgtttaagagattacatttaatatgttaattaaatgcttact

SEQ ID NO: 236987 - DNA, 428 bp, Gossypium hirsutum
tgttcttccacgcgtccgcccacgcgtccgccggcgcgttcggtaaaagaagaaattgaagcctgcggaggagaaaaggcggtggagtggaagcgaataatggagagaagctttgagaggatggatatggaagttcaacaatctacggtggactccgtagagaatccgaattgccgatgcgaactccaaactccacagtgcgatgccgtcggatctaccgctgtggttgccgttgtcactcaggataagatcatcgtagctaactgcggtgattcccgcgctgtcttgtgccaaaacggcgtcgctcttcccctctccgacgatcacaagccggatcgacccgatgaactgctccgaatcgaagaagccggtggtcgagtaatttactgggatggagctcgagttcttggtgttttagccatgtcaag

SEQ ID NO: 236988 - DNA, 437 bp, Gossypium hirsutum
tccacgcgtccgcccacgcgtccgccagcgggttcgtttacacgtccgttggttttttatgagctccaatttagtagtcagtggcataaagatccaaaacagtcctcagtttcatatgaaattcgatgggtgcgaaggggttttgatagaaaaactagtgatatcaacccctaaacttagcccgaacaccgatggaatccacattggaaacacaaaatctgttggtatatacaattcaatgataagcaacggagatgattgcatttcgatcggtccaggatgcttggatgtgcacattgaaggtgttacttgtggtccaagtcacgggatcagcattgggagccttggggtgcataattcgcaggcatgtgtttcgaacataaccgttcgaaacacagtgataagagaatcagacaatggggtaaggatcaagacat

SEQ ID NO: 236989 - DNA, 390 bp, Gossypium hirsutum
  unsure (1)..(390): unsure at all n locations
gcagaagcaagaaaagcttgttgtggaaccgggttgttggaaacatcaatattgtgcaatccgaaatccattgggacatgcgcaaatgcatctgaatatgttttctgggatggattccacccatcagaagctgcaaacaagattttagcagatgatctgctgagcagtggaatttctcttatttcctaaggcccaaaaaggaaaacaatactcgcttatgtcataatgaatttggttgtactctttgtttccatgttgngattttcatttctatttatcacttgaattatgaatggaaaaagaactggttctgcttagaacctgtgattttccatttgtttcataagtatctgtaataacccaattcagacatacaataaaaaaaatgat

SEQ ID NO: 236990 - DNA, 331 bp, Gossypium hirsutum
tcttccacgcgtacgcccgcttggtcttcgggggagtgttttaaatattgaggctttctcgaactaagagaactctggctttccttttgatgcttggcttttggaggagtctctcttggtgcagttcacaaagtgggcgattccaccggctggactagtcttgggaatattgactacctcaagtgggcttccaccaagaattcccatgttggcgactctcttctttttcagtacaaccctcaattccacaacgtgatgcaagtgacccacgacgatttccagtcatgcaacggaacatctgccatcgcctcctacacctctggatcccgac

SEQ ID NO: 236991 - DNA, 293 bp, Gossypium hirsutum
tttatccagaaggggagatcttttacatcgggggggttctttggattgctcctacggttccgcccgcggagaagaaggtagcggagaaccgtgagatagtgaaatggcgcatcaaagagggattggatttcaagctatacctccctcactaccgtgccaaagaggattggaaacgacattttgggaatcaatggacgagacttgagaagaggaaggccaattttgatcctatgtccatccttgcacctggacaaagaatttttaaaaggactaatcaataataataatttagt

SEQ ID NO: 236992 - DNA, 414 bp, Gossypium hirsutum
tttattgttggccgtcaaatggcagagaccggggtcgatccattgatatcgaatacgttagctgctcctgataagtataaatgttcggatgaagttatttccattgctgctatgctttctgttgggaattcgatcttttaccgtccaaaagacgaacaagttcgtgctgatcacgcgaggatgagttttcataccagtaacgtcggtgaccatattgctttaatgaatgtttacaattcctggagggaaacgaactactcgacacaatggtgttacgaaaattatgttcaggttaggagcatgaggcgtgcaagagacatccgggatcaactagagggtcttttagagagagtcgaaatcgaactaacaggctgtcctaatgatttacaggctataaagaaggccattatatct

SEQ ID NO: 236993 - DNA, 493 bp, Gossypium hirsutum
tcgtgccatgattactcgactgcaggaagagagggcatcgtttcaaatggaagccttgcagcacctgagaatgatggaagaacaagctgagtacgatatggaagcactgcaaaacacaaacgaccttcttgctgagaaagagaaagagattcaagatctagaagccgagctagagttttacaggatgaagttccccaatgaattcatgccggagggcatagtgaagtcagcatacaatttgcaaataacacgggacacaatggatcatttagaagctaatagtattgaagaaaaggcaatcttacatacagatacagttaccggaaaaccgaacatcggctccacagttgaagaaacatatcaatcatttgaggacacaaacaaagtcaccatgaagaatccattgtctgaacatgaacatgggtaccaagaagaactcattccttgaggctttatctacaaacactacgaagatgccctgaagagatgctac

SEQ ID NO: 236994 - DNA, 324 bp, Gossypium hirsutum
ttctttacaacacactctatggaagaagctgatgttttaagtgaccgtataggaatcatggtaaaaggtagactcagctgccttggaacctcgatcaggttgaagtcacgattcggtactggtttcattgctaatgttagcttcactggaaacaacaatggacttagccctcccaacggagatgcagctgacacaacacaccaacgggagtctgtaaaacatttctttaaaaaacatctagacgtggagccaaaggaggagacccaaaatttcttgactttcgtcattcctcatgatcgagaaaagcttctgactggatttttt

SEQ ID NO: 236995 - DNA, 509 bp, Gossypium hirsutum
aacgcagccataagtccttacgagaggaccatgacggaagcttattggtctcctgattttcttactcaaacgaaggagccaaatcctccttgtgagggcgaactattgcaacacacacgaaaaggtgtacttagatggaaacgagtcaatgtctacatcaacaagaaatctcaggtaacaaacaaacaaacaagatggtaaaaatgcgagaaaacatattcagtggtaaagttttcactttacaagctcttacagacgctctattgtcaggtcatgattaagctaaaaagcaaacacgtggtagggtgcattttctaagaacaataaatgtaagtattgcattactctaccctctaatttcgcattaatctaatgacttctcatctaattaatccctttgcacttcctttttatgttagtttctttcttttactttgactgatagagctttagcaaaaagcaactttttgacacaaaaacactaccgccacccacgttacctgtaactt

SEQ ID NO: 236996 - DNA, 292 bp, Gossypium hirsutum
tcgtggtcatagggggacacgctggtatcaccattttaccgctgctgtcaaagacgaaacccactgttagatttactgatgaagaagtggagcaactactgtcagaattcaaaatgccgggacagaggttgtggaggcaaaagcaggtgcagggtctgccaccctgtccatggcctatgcagccgcgagatttgtcgaatcatcccttcgcgctttggatggagatggagacgtctacgagtgctctttcgtacaattcgatctgaccaatctttcattctttgcatctagg

SEQ ID NO: 236997 - DNA, 271 bp, Gossypium hirsutum
gcgctgtgtcaaaatttcaaagagccaggcgtgtcggagttcctatcagccatggctgccggctggaactcgaagctgatagtggaatcgtggtcgtacgggagtcccatagcaaccagcgtaggcctcgccgtagcggcgcgtcacacgtgcggaagacacatgtgcgtagtcccggatgaacggtcaagattgggctacatcaaggccatggaggaatccgggaccttgtcatcgacggcggtgatcgtcggagaagcggaggaagtga

SEQ ID NO: 236998 - DNA, 331 bp, Gossypium hirsutum
tttcacgcgttcgggaggctgaagctcagtcaaagtgctgtcttaaaaccataggtgttgagctcactttcaggtgccatggagtaccagggctggaactggtgtagaaagcaggcgtggggatctgcttaataagtatctgtacttgtctgggagagtggacatgaggcaaattgagaggacaatccagtacttgattggatcgggaatggatcctcatacagagaatagtccttaccgaggattcatatacacttcgttccaagaaagggcaacttttatttcccatgggaatacaggcaggctggccaaggagtatggggatattaac

SEQ ID NO: 236999 - DNA, 397 bp, Gossypium hirsutum
tttttatttctccctgactgttgcataacaaataaccagcaccatcttgtggatctcctgatttttttccatttgcatgtcaagtagcttgtgaggctaaaatttccacgtatttattggtttctctattcttcttgttcgcttcgttttctttgtaggtgccatggcatttgatgtagaatatgcacgatggctggaagagcaaaaccgacaaattaatgagctgagaacggcagtaaattctcatgcaagcgatgcagaacttcgtattattgttgatggtgtaatggctcactatgatgaaattttcaggttgaagagcaatgcagctaacggctgatgttatccatttgttgtcaggcatgtggaaaacacctgccgagaggtgtttcttatg

SEQ ID NO: 237000 - DNA, 307 bp, Gossypium hirsutum
ttgaatttgtcgcttcgccacaaggagcatatcagtgcctatggtgagggaaacgaaagaagactgaccggaaagcatgaaacggccagcatcaacacgttttcatggggagtggctaatcgcggttgctcaatccgagttgggcgtgacactgagaagaatggaaaaggttacttggaagatcggcgtccggcatcgaacatggacccatatgttgtgacagcattgctggcagaaactacactattgtatgagccaacacttgaagctgaagcacttgctgctcaaaagattgctttgaatgtct

SEQ ID NO: 237001 - DNA, 378 bp, Gossypium hirsutum
tttgatcaattttttggtctcggttccgagacacgaagaactaagactcatatccctgatccttatgggatagaaatcggtagccctactaagattccatcagggtttgtagaaacatgggggttgaacgtccatgctatcgatacaaggggagtggaagataggatgggatgtaccgaatgtcggtgcaatttgtataatgttaccaaggaggaaaatggaacacctttgagcccaaattatgatgggggactattatgttgctatgatggcacaaaatgtaggttgaaagatgggtttattggcatcgaaagaaccctttaccttcaatacaccgtgaagtgggtcgatatgaatagcttaattgtaccggtgaat

SEQ ID NO: 237002 - DNA, 450 bp, Gossypium hirsutum
acactgttcctgtgccaaggcactggtctcagaaaaggaaatatttgcaggggaagcgcggtattgagaagcaaccttttcagcttcctgacttcattgctgcaacagggattgaaaaaattagacaggcttacattgaaaaagaggacagtaagaagttgaagcaaaagcaacgtgagcgaatgcagccaaagatggggaaaatggatatcgactatcaggttcttcatgatgcattctttaaatatcagacaaagccaaagctgacaactcatggagatctctattatgaagggaaggaatttgaggtaaagttgagggtagatgaagccaggctctttatcacatgagttaaaagaagctcttggtatgccagagggtgctccacccccatggcttatcaatatgcagaggtatggtcctccgccatcatacccacacttgaaaata

SEQ ID NO: 237003 - DNA, 433 bp, Gossypium hirsutum
gtgatgaagaacaacataggcttttggtctatgagtttatgggaaatggttcattgtcgaacttccttttcggagtgttacggcctagttggcaaaaaaggttacaaattgcatcaggaattgcaaaaggcctcgcatacttgcatgaagaatgcagcacacagatcatccattgtgacattaaaccacaaaacatactcttggatgattgtttaacggccaagatatctgatttcggattagcaaagctgttgatcaacagcaaaactcaaacgctgactggcgtacgagggacgaaagggtacgtggcaccggaatggttcagaaactccccggtcacagtcaaggtagacgtttacagtttcggagtgatgctgttggagatcatatgttgcagaaaatgtgttgaagtggagatggatgaagaagcaat

SEQ ID NO: 237004 - DNA, 152 bp, Gossypium hirsutum
tcatggttcaaatgtgactgaggaagaactagagacacacacgatatcagcttggaaggagggaaaggtgtatcttggcagacagattgatggcaatgctaggtcatatcctagatgtcttgttcaagctggaccatatgattctttgaaga

SEQ ID NO: 237005 - DNA, 245 bp, Gossypium hirsutum
tgcttacgcgtccgccgccatatacacccaaaccgccggttgtgaagcctccaccggttgtgaagcctccgccatatacacccaaaccgccggttgtcggcgttcgcgtttaggaacatcagtttgacgaagatcgagtcacggccacaccgtaaccggccgatccggttagtcgacgacgccaatgtaggaacggcgaagcatttcgaatacatgttttacgtggatttcgaagcgtcaatggt

SEQ ID NO: 237006 - DNA, 354 bp, Gossypium hirsutum
  unsure (1)..(354): unsure at all n locations
cttcattccacatctcttttatgtttccttttactcgaggaggtaaaataaatatagtagaaatttggaactcaattaagtttatgtttgttaaaactatgcaggttttcggattgatgactaaaccattagttaggatcttgcttccttctccaaaacatctctcgagaatgctttcgtccgagccaactactcctaaatcattcttcctaccacttctcaacaatgggcaagaatctgaggctgaacaaggcaaccgaagcngtgatccgngccgtccagcttaagaatgctcttgaccactccttccccaccgtgcactattattggagaaaattcgatgatgccttcatg

SEQ ID NO: 237007 - DNA, 505 bp, Gossypium hirsutum
cccacgcgtccgctttcctatgacagatgccaggcatattaaggcaggactgtctgtattggccaaatacaagagacctttactcgtacattccgagattcaatcacttgttgaaagccacttagaaactaaagatggtggtggtgatcctcgatcatattcaacttatcttaaaacaaggccaccttcttgggaggaggcagctgttagagaacttttgactgttacaaaggacacaaggagcggaggtccggcagaaggtgctcatcttcatgtggttcatttgtctgatgccagttcttccttagatcttataaaggaagcgaaaaggagaggtgacagcataactgttgagacttgccctcattatctagctttttcagccgaagaaattcctgatggagatactcgtttcaagtgtgccccacctatccgtgatgcagccaataaagaaaaactatggaatgctttatggaaggagatattgacatgctgagttctgatc

SEQ ID NO: 237008 - DNA, 445 bp, Gossypium hirsutum
cccacgcgtccgcttgaaagtgcgcttaatggaaagaaattctttggtggagaaaccattggaatggtagatattgttgctagctctgttgggtatttcattagggtcactcaagaaattatggggcaaaatctgctgtcagctgacaaatttccccaattattccaatggtctgaagatttcgcaaattgcagcattgttaaggaaagtttgcctccaagagacaaactacttccctttgtcaaaggtctcattgccaaatatcagcaagataatgctaaggcctaagccctcccaatgaacgtctttcacaatgattgtcgcatgcattttgccatttttgtatttgctgcttttgtgtgtaatgacctacttgcttttatgtttcgagtgaaaaaataaattaactcattgtactcttaaataaattggttattaacttatc

SEQ ID NO: 237009 - DNA, 428 bp, Gossypium hirsutum
ttgatttcaaggccggtggctattatcaccgctctacatccatcccatgcacaagctgcggtcatttgcgctaagcgtcatggttttcaactaaggattcgaagtggcggacatgattacgagggactttcgtatatttccgacgtcccgtttgttatcctcgatatgttcaaccttaagtctatagatatcgacatgaaaaccgagacggcatgggttcaagccggagctactaccggcgaactttattatagtatagcccagaaaagcgatgtccatggattcccatctggtgtatgtaccactctaggcattggtggacacttcagtggaggtggttggggatttttaatgagaaaatacgggctttccattgataatgtcattgatgcacaattgatcgacgctaatggtcgaatccttgaccg

SEQ ID NO: 237010 - DNA, 537 bp, Gossypium hirsutum
aaaaataatttctcccaatattatctttgagatcttaacgtaaggtctctcatttgaaatgcaatttatctttccagtacactcaatatttgtaaatgatgcatgccctacctattagatgtgtgtattaccttatagtaggtccaagtctcttgacccgatggagcaacgaaggataagggacgatcactgcaaaaggcaaccctagcagtggataaataaagagtccctgcaacagggcctgttgttgtggagaggtaacaagcaaatgcattcttcaacttttcatttggatcagttgcaaatatcttcttgaaaagtgagtcgaacccaccctttgttatggctttcgccgttaggtttactttaccccacgcagcatccgataccgacgatccacttctcactgtagttttcatcattgtatatgtaaatatttttttgcaacatcttgttaaaagaattttcgataaaaaaatggggttaattccattaaagttctcaaaaatggttcatattttaaattagtcaccgaac

SEQ ID NO: 237011 - DNA, 435 bp, Gossypium hirsutum
ttcatgcgtccgggagaggttactcaggtgcagcggggatgattgagactactagctgtggtaggactggagcgatggggaaagtgcaacataaagatgcaataaaagagtctatccggagttgggttactgctggaaagaatgcaaaactaagtacaaaggctgctgctttaaacctcagttttgaccagcaatgcacgcactgtgagaaggaattaatcaacacttcactgttgaacctgcttacttatccatggatagaagaaaaggtgaacaaagggatgctttctctgcacggtggctactatgactttgtcaactgtacttttgagaaatggacattggattacaagggaagcatcatgaatggaaaaaccagagttgtagtgaaggaccgattattttggtgctaaccttctcggtccatcttatctt

SEQ ID NO: 237012 - DNA, 329 bp, Gossypium hirsutum
ctggttcttctgagtcatctctgagtgaatacacaaatgtcgattctattgaagaacgtgaccgatggatacagtaatgccaatagcttggccgatgctgagactaccaaggttactgctgaagcgagctgtgctccactgagaggaagcctatcgatgaggtgagatgggacttttgatgttaagaccaagacaggaggtccattcggaaccatgaagcatcctgctgagctcgcacatgctgctaacaacggccttgatatcgccgtcagacttctcgagccgatcaaggagcagttccctaacctcacctacgctgacttctatca

SEQ ID NO: 237013 - DNA, 358 bp, Gossypium hirsutum
tttcattcgtccgcttttgaaatacaatccggttcatgggaaagttccggttcttcttcacaacgggaaaccaagtgtagagtcttttgttatacttgaattcatagaggaaacggggatgcataatgcgccaatgatacacgatccttatgacaaagctaccgatcgattctggatcaagttcagtgactaaaagtgctaaacgaccctttgaatgggtaaatggatcgccttgattgagccagaggcagggacgaatgacccttggggtgaactaaagcctggaattgaccttctaggtcccgttgatgagatattctttgatatctatgaccgatatgaaccagtcaacgaacct

SEQ ID NO: 237014 - DNA, 252 bp, Gossypium hirsutum
cccattcgttcgcccacgcgtccgaagaaggtttgtgccctttgacacccgaagaaactgctctagtattaagagcgctcggtattgaccgcaatgttcaaatttacattgccgctggagaaatatatggtggagagagacggatggctccgttggcagaagcatttcctaatttggtcagtaagatgtatgttcggcatctacaatgcatgttatatgtgatctaacagtcggcttttcttgcacaacagg

SEQ ID NO: 237015 - DNA, 504 bp, Gossypium hirsutum
cgatgtcagtcaaggcttcccttttagcaaaggtggtccaacgtgtaaaagaactaaaagaacaagccctcgagacgactgagctcgacaacttgccatcggaaactgacgagatcaccgttctctcgtgcgattactcaggcgacgggaggttgatattcaaggcctcgttgtgttgcgaggaccgatccgatcttttacccgaattaatcgacatcctaaagtccttacacttgaagaccctgaaagccgagatggcgacgctcggtgggcgaattcgcaacgtattcatcgtcgctgccgacaaggatcatagcatcgagtcagtccatttcttgcaaaatgcattgaaatctttgcttgaacgttcgaatccgagtgataggtctaaaaggagaagagtattggatcataaaataataatgtagtagtgaccatatatataattatccatagccattgtttaaaagtttcattttaagggttcttttttttttaatttta

SEQ ID NO: 237016 - DNA, 269 bp, Gossypium hirsutum
cccactctttcgcaacagaaaggattgaggcaacaggtcgtcgcctggcaaattattgcgagcgctttaatgttccgtttgagtacaaggctatagcagctcaaaactgggaaaatattcgaattgaggatatcaagattaataacaatgaggtgctagctgtaaattctctttttcggtttgagaatctgcttgatgagactgccgaagtggacagatcgaggaatgctgtgcttaaactgatcaggagaatgaaccctgatattttt

SEQ ID NO: 237017 - DNA, 445 bp, Gossypium hirsutum
cggacgcgtggggaaaatggcagcaaagtatataattgcttctgttgcgggatcatttgccattgcttatgtatctgatctgcttgtttctgatagtaagatttttggagggaccacgccttccactgtttcaaacaagggatggtgggaagaaactgacaaaaaatttcaggcttggccccgcacagctggtcctccagtcgtgatgaatcccatcagccgccagaatttcatcgtgaagtctggttctgaatcttgaagacctaagtcttgcatttggttttgtcaatgatttcagttttaattgctactccctgtgaataaattctggtgccagactttgtttagtctggctttgcatttggaggcattctttgttctttttacaatttttgactcaatctgtctagaggacgatattgttcatgcttgatctaataaattt

SEQ ID NO: 237018 - DNA, 478 bp, Gossypium hirsutum
tccatgcgtccgctagatcgcgagcggctgccctttataaaacaacaacccgctcttttgaattttatatctttaaagcttatctttcttttttcaaacgaagctctgaacttattgtctctatttgaggagcaagttttgaggttgtggtctaaaaaacgaaaatggtgaagatctgttgcattggagctggttatgtaggtgggcctacaatggctgtgattgcacttaaatgcccatctattgaagtggctgatgtggatatctctgtgcctcgtattaatgcatggaatagtgaccagcttccaatctatgagcctggtcttgatgctgttgtgaagcagtgtcgtggaaagaaccttttcttcagcactgatgtagaaaaacatgtgcgtgaggctgatatagtcttagtttccgtcaacactccgaccaagactcgagggcttggagctggcaaggctgcagatcttacata

SEQ ID NO: 237019 - DNA, 461 bp, Gossypium hirsutum
gctgtccttatcgctcgattccatacccgacgcccatgtagccgttcaactcctcttcatctctgttgatccttatcttcgtaccagaatgagcggccaagaagacggcttatattttccgcagttcagccttaaccaggtgataactgcttttggagttggaagagtgatgagatccaaggacgaaaagtacagtgagggtgatattgtgttgaatgctttctttcctgtagctgagtactgtgtggtgccatctagtgtcctcataagaaagattgacccagaggctggaattcccttgccagaatatctcagttgtcttggggttcccgggtttgcagcgtgggtggggatagaagtgctgggagaggcgaagccggggtcaaacgcattcatatcagcggcggcaggtggtgtaggaatggttgcggggcaattggctaagctcaagggttgtagag

SEQ ID NO: 237020 - DNA, 381 bp, Gossypium hirsutum
tccatgcgtccggtaaatatgcagcataatgttatgattgaggcagttgagaaccatatgccagaaaccatcataatcgatgagattggtacagagctcgaagcattagctgccagcactattgctcaacgaggagttcagctggttggcacggcccatggaatgaccattgacaacataatcaagaacccttctctacagatccttgttggtggcatcgagagtgtaactcttggtgatgaggaagcaaggaaaagaaaagtgcaaaagactattctcgaaaggaagggcccatcgacttttacatgtgctgttgagatgatatctaggactgaatgtcgtgttcatcatagacttgatgcaacggtggatgctatactg

SEQ ID NO: 237021 - DNA, 431 bp, Gossypium hirsutum
cctttgtttccggtatcttgccgctgaggttttggaattggctggaaatgccgcaagagataacaagaagaacagaatcatcccgaggcatattcaattggcagagaggaacgacgaagaattgagcaggctgatgggaggtgtgacgattgcgaacggaggtgttttgcctaatatcaatcaaagtctattgtcacggaaggccgggaaaggtaaagtagagaccggttccgcttctcaggcattttaggtaattttgtgtaacatagtatgtaatggaattacgttcctgttattgcaaatatcattcctagtaatgaaatcgttgaattgagttttgttgtaagcatttttttgccttttctccattgtcttgggtgattcatatattttcatcatttcccttggaagtactttccgccaacgctgac

SEQ ID NO: 237022 - DNA, 498 bp, Gossypium hirsutum
ttctacgcgtccgggactttacagagctgtcgacgtataccttaaggcgcatccatggatacctgaatcggagcgggaaaagatatgcggagtattagactgtcaaaagcttacactcgaagcatgcactcacgcggcacaaaatgagcgtttaccattacgtgcggtggtccaagtcttgttcttcgagcagttgcagctacgtcacgcgatcgccggtacattgttagcggcggaaacggcgccgatgaatgcggggagattgtcggggacgagaagagacgacgacgaagaagaagaagaacaacaagatgaggaggaggaaagggtggcgatgtcacgtggtgaacaaggaagcaccacgtggagagcagccgtgagggaaaatcaagtgttacgactagacatggattcaatgaggacgcgggtacatcaactagagagggaatgtttcacattgaagaaagtaatccaaaaaatcgaaaagggaaatccacg

SEQ ID NO: 237023 - DNA, 411 bp, Gossypium hirsutum
agcttcttttgtaaatggtggatcatcaccttcatttccatctcagagactcttggccttagctcagcagctgcgtcattacaagcctccaccttgttccttggacgaagaatctgttaccccagttgtccaaaacccagaaaagtttagacccaaaagagctgctgttttgatatgtctctttgaaggagatgctggggatttgcgtgtcatactgaccaaaaggtctttaacaatgtctactcattccggggaagtttcattgccaggtgggaaagcagaggagggagacaaagatgatggtgatacagctactagagaagccaaagaagagattgggttggatccttcacttgtgaatgttgtaacctttcttgaaccatttttgtccaagcatctccttagagttgt

SEQ ID NO: 237024 - DNA, 483 bp, Gossypium hirsutum
tttctgctgctctcttcgagctaagcgtaggtggtgcttatctggaacacctatacaaaatgctatcgatgatttatacagctatttcaggttcctgaaatatgaaccatattcagtatatacagcattttgccatgggataaaaggttctatagctaaagactatgtaaaaggttacaagaagctgcaagctattctgaaggtagtaatgctgcgacgcacaaaagcaaccttgattgatggggagccgataattaagttgccgccaaagtcagttctcatgtctaaagtggactttacagctgaggagcgggatttctatacccagctagaagctgattcacgttctcaatttaaggcatatgcagctgctggcacggtgaaccaaaattatgcaaatattcttttgatgcttttgcgccttcgtcaggcttgtgaccacccactccttgtcaaaggatttgactccgactccattcgaaa

SEQ ID NO: 237025 - DNA, 448 bp, Gossypium hirsutum
  unsure (1)..(448): unsure at all n locations
cccattcgttcgctgaaaacggcggctcaacccttgtgcatgaacatgccggcggccactctcaccatgtgcccatcttgtgaaagaatcggcggcgttgccggcgatgggaattccaagaatccattttcgatgccgacaaagcctcgtttctataaacccgtcactaatccttctgcagcatgttaatcaattaagttttatatagaatttagtaacaaaataatgggagagaacagaaaaaaacccacatcctctctatttttgggttaaaaagggtttgcagtggattaaaaggtagtgtaactgtaattaattaattaatttctagacaagaaaagaacagtagaattactgatcaatctcctctcttttttttaattttatattttgaaatgatcattagaaagatacagnatctatatgtattatttttattccatgctac

SEQ ID NO: 237026 - DNA, 410 bp, Gossypium hirsutum
atgctgcatggatccttgacaagtatggtgagcgcagcatgtgcatgggtgaatctggggtttgcacagatgcagaaaggcatcaacgtgctcattctttgtggtggcaagcttctgagcagggtaacgaacatgcagcattacttattggggatgcatattactatggcagaggaactgtgagggattatgagcgtgcagctgaagcttacatacatgcaaaatcccaatcgaatgctcaagctatgttcaacctgggatacatgcatgagcatggccaaggacttccttttgacctccatcttgccaagcggtactatgatcaggcattagagctaagatcctgcagcaaagttgcctgtcacactggcactggcaagtttggtgggtacgaaagaactatgctgact

SEQ ID NO: 237027 - DNA, 315 bp, Gossypium hirsutum
gacataagcaagtgaaaggcagtgaaaaccccagaagttactacaagtgcacgtacccaaactgcccaacaaagaagaaagttgagagatccttagacgggcagataactgagatagtttacaagggcagccataaccatcctaagcctcaatccactaggagatcatcatcttcttcttcctcttccattgctattcaggcttccagtgctgccacctctgagatccccgatcattcgtttataagccatggcagtggccacatggactcagctgcaacaccggaaaactcctctatatcagttggggatgatg

SEQ ID NO: 237028 - DNA, 312 bp, Gossypium hirsutum
ttcacgcgtccgcccacgcgtccgcggacgcgtgggttacggtatcgacaatatcgttaagcctaaagacgaaactgtatgtttaggaaataatatgaactattttggtccatttcaaagcacaaattatactgcgaaaaacagtaggagttattcaatgacgagaagcccttcacatgctcaagatcatataatggccgaaagaaaaagaagagaaaagctcaaccagcgtttcattgctctctcagcaattgttcctggccttaagaagatggataaagcttcagttcttggtgatgcaattaagtacgt

SEQ ID NO: 237029 - DNA, 272 bp, Gossypium hirsutum
attcaatccttctggttttgagtggcagaagattgttgatgattggactgattggaataagtggataaacaaccgaggtggtataggtgtaccttcagaaaaaagttgggaatcgtggtgggaagaagagcaagagcatcttcaatattctggcaagcgtggtattattgctgagatattgttagctttacgtttctttatctaccagtatgggcttgtctatcacttgcatgttacaagggaaaccaaaagttttttggtttatggtgcat

SEQ ID NO: 237030 - DNA, 360 bp, Gossypium hirsutum
attgtttcagatctatcggtcgatagaatatcttagcagaggagacggaagaaaatggctggaagcccagatcacttgttcaatttgaggaacaatttctatttgggttcgtaccaggctgccatcaacaacagcgatctgcccaatctctcccccgacgacgccgtcgagcgcgactgtcttgtttatcgctcttacatcgccttcggcagctaccaactggtgatcaatgagatcgattcctctgctgccactcctctacaagccgttaaattgctcgctctctatctctccaaccctcatgataaggaatcgacgatttctagcttgaaggaatggttggcagatccagctattggg

SEQ ID NO: 237031 - DNA, 358 bp, Gossypium hirsutum
gctgattacgagaaaagacaagagattgacttctttggggagatttcgggagtatctctgagtccagacgatgaatctttgtatataggaatatgggacagaacgtatgcaagtttgctgcaatacaacaaaagacacacatatgcatacttggattcgtacttgtgataatgtcaactgcgtgctgttgtagttatggcgctctcttttgtgctctgttttgtttgtgtagggtgatatgaatgaagattaaatattatatgacagtataataagtgtatgttgtgttagaacttttctagaaaggtgcatgtacagtacaatatcatcctctaaatcatatgctatttgtatgatc

SEQ ID NO: 237032 - DNA, 431 bp, Gossypium hirsutum
atcgtctgagaatgcggagtggaaaatacattgcacttcacttaagatatgagaaagacatgcttgcttttactggttgtacttctggtttgactgatgcagaatctgaagagctgagaataatgagggagaacacaaagcattggaaggttaaagatataaactctactgaacagaggataggtggcttttgtccactaacccccaaagaagtcgggatatttcttcaagctattggctatcctccatcaacattaatttatgttgcatctggtgaaatttatggtggcgatgctcgcctttcagagcttatgtctttttttccaaatctagttttcaaggaaaaactggcaacaaaggaagagttgaatgaatttgctaagcatgcatctcaaagtgctgcactagattacattgcttctttggaagcg

SEQ ID NO: 237033 - DNA, 285 bp, Gossypium hirsutum
tttgatagataaaatgaaggaattggagagtgtttgtaaccctatcattgctaaaatgtaccaaggtgctggtggtgatatgggtggtagtatggatgaggatgctcctccgtctggtggaagcggtgctggccccaagattgaggaagtagactaagtaattggtgtgggctctattttaaattagattcgcttaaaatacagtttattgcttgaacttgggtaattgattttgatattggtttttagacttgtttttcaatgagatgacttttaatcctttat

SEQ ID NO: 237034 - DNA, 347 bp, Gossypium hirsutum
ttttggaggcttccagaactggtacttgtggttaagtttacagggcataaacgagggatctggtgtgtagagttttcacctgttgatcaatgtgtaataacagcatcaggtgacaagactgtaaagatatgggctatagctgatggttcgtccctgaaaacatttgaagggcatacatcaagtgtattaagagaatcatttcttacacgtgggaccaagtttgtatcatgtggtgctgatgggttggttaagctgtggacaatcaaaacaaatgaatgcatcgctacctatgatcagcatgaggacaaggtttgggcattggccgttgggaaaaagacagaattgtt

SEQ ID NO: 237035 - DNA, 479 bp, Gossypium hirsutum
ctttttcccctaattttttgagaacttgccttgttagttaatgttaattgtcctcacttgaagaaattatgtttgaaaatctttagcttgtttaacttaaattttgttctcacaaaaaaaaaacccccataaattctgtaaataggtctgatatatgttggcttgtaataaatagcggcaagaatgagggtggctgccaatgagaaagctgaagcagagaagatattgcagatcaagagagcagaaggagatgccgagtcaaagtatctggctgggcttggtgtagctcggcagcgacaggctattgtagatggacttagagacagtgtgctggccttctctgagaatgtacctggtacatcatcaaaggatgtcatggacatggttcttgtgacacagtactttgacacaatgaaggagatcggtgcatcgtcaaaatccaactctgttttcatcccacatgggccaggtgctgtaag

SEQ ID NO: 237036 - DNA, 395 bp, Gossypium hirsutum
gaagtttatggcgagaaggcaatcctagtcactgaagtaaaagagcttgaaaatcgcttgctcagcttgtcagacgaaagagacaaatctcttgctattcttgatgagatgcgtcaaaccctcgaagctcgacaatctgccgcacaggagttgatgaaagcagcagagcaggaaaagctggaaaaagaagaatctgctcgtaacgctcttgctgaacaagaagccattatggtgaaagtggtcgaagagtccaagattctaaggcaggaggcagaagaaaattccaagttacgtgagtttcttatggaccgtggccagattattgactcactacaaggagaaatatctgttatttgcgaggatataaggttgcttaaacagaagttcgatgaccg

SEQ ID NO: 237037 - DNA, 508 bp, Gossypium hirsutum
ctttttctgtgttttgagatattataacaagaataataataatttgtcatagtagagataaaatttgggttcgtgtttgattgatcgatctgtcgatggaggattctgcgagcagcgatgaagattactaatattcttccaatcgagattccctcgacagtctcgagaatgaggattctaatttacaatgggccccttcaaagggtcccactaccaaggagccatcctgaattaaatgacaagcctgtagctgtatgccattcagacaatccaaaaggaactgctgaaatctcttctgcaaattatcctactcgagcttatggataggagcaaatggtttggagaactccgttgggaagaaagtttgcgggatgcacacgagtttggaaaacttattctgtttcagaacttggatctagcttactcatcagcagaagtggaggtaatatctattatgaatcacaattaagttgtgtttgaagcattttgtatttacacgcataaattt

SEQ ID NO: 237038 - DNA, 425 bp, Gossypium hirsutum
cccactcgtccgctaatttcaatctgttcgttttaaaacttgttttattattcttttgaagaatatgtcacttcttacagatcacgttaaccttaatctctcagactgcactgacaaaatcattgccgaatacatatgggtgggtggatcaggcatcgatctcagaagcaaagcaaggacactttctgggcctgttagcgatccttcaaagcttccaaagtggaattatgacggttccagcactggtcaagcctctggcgaagacagtgaagtcatcttatatcctcaagctatattcaaagatccattcaggaggggcaacaatattcttgttatgtgcgatgcttatactccagctggtgatccaattcccacaaacaagagacgcgctgctgctaagatttttagccatcctgatgttgtcg

SEQ ID NO: 237039 - DNA, 454 bp, Gossypium hirsutum
gttcctagtaaaaagattcaggaattgacaaacaaattgattcagttcatggaagttcacatttatcccttggaaaatgaattcaacaaacttgcaaggtctgatttacgttggacagtgcatccagaggaggagaggttaaaagagcttgcaaagaaagaaggattgtggaacttatggattccttttgatagtgctgctagggcaaaagaacttatttttaatgggagtgaacgtgctcactgtacacatgatcgtttacttggtgcgggcctctcaaaccttgaatatggatacgtttgtgagattatgggtcgctccctttgggctccgcagatctttaattgtggtgcaccagacactgggaatatggaggtattgttgcgatatgggactaaagaacagctaaacgaatggcttgttccactgcttgaggggaaaatacgctctgcat

SEQ ID NO: 237040 - DNA, 509 bp, Gossypium hirsutum
ttttctcgaaagagttggtctggggcagaagaaggttgatatgactattgtattcaaggacttcaagcgagatgtccttcggattgactcgattccctctacatcactagatggcatcaaagagtggcttaataccactgatctcaagtactatgagagcagactaaatttgaattggcgtcctatactgaaaactatcactgatgatccagaaaagttcattgaagatggtggatgggaatttttgaacatggaagtcagtgattccgagtctgagaactcagaagagtctgaccaagggtatgtgccttcagatgtgcagtctgaatcaggatcagaggatgaggatgatgatagtgaatcgttggttgaatctgaagatgatgacgaagaagactcagatgaagattcggaggaagatgaaggaaagacttgggaagagttggagagggaagcaagctatgcagatagagagaaaggagatgattccgatagcgaggaagaacgga

SEQ ID NO: 237041 - DNA, 455 bp, Gossypium hirsutum
attgttctccatatttttgggaccagccccatgattttgttccagagaggtttcaggtacaaaaggagagtgaaggcattgaaggatgggctggttttgacccgtctcggagccccggagcattatatcctaatgagattatatctgattttgctttcttacccttcggcgggggaccgagaaagtgcgtgggagatcaatttgcactcatggagtcaactgtggcattagccatgttgttgcaaaagtttgatgtggaactaagaggatctcctgaatccgtggagctagttacaggagcaacaattcacaccaagaatggattgtggtgcaagctaaagaggaggtctaatggccattgatatttgttcttcacctttgtatctaaacttagagaaagtgtacaacgtatttttggacttactgaaaaggaaattaaatatatgggtttattc

SEQ ID NO: 237042 - DNA, 270 bp, Gossypium hirsutum
  unsure (1)..(270): unsure at all n locations
gtttataggaaaaaaaaaaaaaagaagcagaagaggaaagaaaagattaaaaagctttgcaaaaatggtgcttcatcatctcgaatccgttcaaaagtgctctacgccacttcaaaacacgggcttcgagaggaactggatggtatccactatgagattcaggcaactgaccctacagaaatngatcttgaagtgctgaaggaccgtgctaactgagcgttgcattatttaactgttccattcaagaagttaccccctcgctttgctgac

SEQ ID NO: 237043 - DNA, 475 bp, Gossypium hirsutum
cccattcgtccgagacgtggttcatgtcagagctagaagaggtgaagctactgatagtcacagtttagcagaaagggttagaagagggaaaattaatgagagactaagatgcttgcaagatattgtcccaggatgctataagacaatgggcatggcagtcatgttagatgagatcatcaattatgtccagtccttgcagaatcaagttgagtttctttcaatgaagctaacagcagcaagcacttattatgacttcaactcagacacggatgccgtggaaagaatgcagagggaaaaagcacagggggcaaaagatgaaatggacaaatttatgagagaaggagatactgaaagactagcttgcttccactcatcaacatggtcctctttgacttaatttctacatccatgcctatacttaattgccttacaaaacatatgatcatggagatgctatatttttcaactctttttt

SEQ ID NO: 237044 - DNA, 451 bp, Gossypium hirsutum
agaatcttatgtccaatagtagcagaaatcggtgccgatgaacgattaccagaatctagttggacaccgcctcaatgttccgatctgggtatcaagcacacaatgcatacattcactcagacaacaccccatgtaacagcgcggcatggaatgaagagtgtgaccattaaggctacatacagggaagatataatcagatttcggatctccttaagtagtgggatagtggaactgaaggaggaagtggccaagaggctgaaactggaggaatgtctagatgtttcaagatcatcaggcagcaatatcattcgattatcagttcacgacacgatggccaatttagggagttcctgtgagagcactggagagttgtgattatgttgggtatatatatatatttaaagtgtaattcttatagtcagtcctagaatttaggcgagtgaaactgaag

SEQ ID NO: 237045 - DNA, 510 bp, Gossypium hirsutum
cgagtttagttgttggctgcaagaaagtgtatgtcaccgtgtacaagaagaagtaagctctgtgaacgattcaggttacttggaacacttattctttctcttgactgggcgacaacttgatgcagctgtggagctggcagcttctaaaggagatgttagattggcttgtttactaagccaggctggtggaccaacagttaatcgttctgatgtttcaagacagcttgatatttggagaattaatggtctggacttcaatttcatcgagaaggacaggattcggctttatgagttgcttgctggcaatattcatggtgctttgcatggtattaagattgactggaagagattcctaggattgttaatgtggtatcacctaccttcagatactgctttgcctgttgtgtttcgaacttatcagcaccttcttgatgatggaaaagctccgtttcctgttccaatttatattgatgaaggaccagttgaagagaatgcaaatttgagcagagt

SEQ ID NO: 237046 - DNA, 273 bp, Gossypium hirsutum
tattttcctatcgaaatcatcaacgctgattccatgcaagtctatcaaggtcttgatgtcctcaccaataaagtccccctccgtgaacaaaatggagtgccacatcatcttttgggtactgttagctcagatgtggaattcacggctaacaagttcagggattctgctattcctattattagtgacatattatctcgcaaccatttgccagtcattgttggaggcaccaatttctatattcaggcagttgtgagttctgtccttcttgatgaa

SEQ ID NO: 237047 - DNA, 344 bp, Gossypium hirsutum
ccctcgcttccggcgaaatggaagagatgcatttgactcccgatctactcacatataacgtgctgattcacttgtatgcagagcacggagatgttcaaaatgcagtttttttgcatcgagagatgatagaccgtggaatttgccctgacaaattgacctacaatagcttgattttgggacagtttaaaaacggaaagttgttagaaataaaggatcttgttgatgatatgaaggccaagggattggttcctaaagctgatacatatacccttctgattaagggatattgtgaacacaaggatttcatcggggcatacttttggtatcgggaaatgtttgaaaac

SEQ ID NO: 237048 - DNA, 251 bp, Gossypium hirsutum
caagtttatggtgatatcttgtcctttgtcaccatcagaggagcttcacacaccgctccagcttcacagccaaagcgatcaatggcactgtttaaggcagctcttagcgggaaaccactgccagaagcttgagcgttcccatggatccatataccttttttatttcagcattatgtattctccaaactaagtgtcagtatccattgtactgccattggcaatctttaataattaaataatgaaagttttca

SEQ ID NO: 237049 - DNA, 478 bp, Gossypium hirsutum
ccgaaaccaaatcctttgaaagttcaaacctccgcaacttttttcttggccatgacaacctacggcacgatcccagcttccacactcccttcggccaaccttgaatacctatctcgagccaaagaacgtatcaaagatggcctcggagctcgacatccatggaaactcatgttcaacatccactccctcaactgccctcgaaccttctctgaagccatttccaggtttagagctaacttagcttacttccgcatgaattatgccataatcgtgcttctaatccttttcctcagcctattatggcaccccatctccctcgtagtcctcattatcatgatggccctttgggttgttcttgtacttcctacgggatgagccattggctattttcaaccgcacgatcgatgaccgtgtagtgctggtcgtgttgggcgtttcgacttttgtgtcttgctgttgactgatgccaccagcaata

SEQ ID NO: 237050 - DNA, 258 bp, Gossypium hirsutum
ccctctcgtccggtcagcggcggagatgagccaagtggaggagacgatgagttacgtttacaagaacccaaatgcgcctatagaagatcgaatcaaagaccttgtttctcggatgaccctgcaagaaaaggtcggtcaaatgacccaaatcgagctctgtgttgctactcttgacgatgtcagaaacctctccatcgggagtatggtcagcggtggagggaaagagcctttagagaaagcaatggcatccgattgggc

SEQ ID NO: 237051 - DNA, 392 bp, Gossypium hirsutum
ctcttgggggtttgattgatgaagaggctcttgtgagggcattggatgctgggactgtagctcaggctgctcttgatgttttcagcgaggagccaccgaaacaggacagcaagttggtgcagcatgagagggttactgtcactccacatcttggtgctagtacaatggaggctcaggaaggagcggctattgaaatagcagaagctgttgttggagccctgaaaggggaacttgctgcgactgcagtcaatgcaccaatggttcctgctgaggctctaacagagttgaaaccatatgttgaactcgctgagaaacttgggaggttgggtgtccaattggtagctggcggaagtggtgttaaaactggaaaagtatcatatgcttcctctaga

SEQ ID NO: 237052 - DNA, 490 bp, Gossypium hirsutum
gttttaccttaaaatgaagggtgattatcataggtatcttgctgagttcaagactgctgctgagaggaaggaagctgctgagagcactttgttggcttacaagtctgcacaggatattgctctcggtgacctagcgccaactcatccaattaggctgggacttgctcttaacttctctgttttctactatgaaattcttaactcacctgatcgtgcttgcaatcttgcaaaacaggcatttgatgaggctatttctgagttggatacattgggtgaggaatcctacaaggatagtacattgatcatgcaacttcttcgggacaacctaaccctttggacatctgatatcacggatgaagctggagacgagatcaaggaagcttccaaacccgagtcaggagagggaccagcagtgatgagttaagttcatatgatatgtactctgtatttatgttgcaggttgtacttttacgtacatgcaacgtgggct

SEQ ID NO: 237053 - DNA, 423 bp, Gossypium hirsutum
gctctatcccttaacctttcatatgtttctcgtatctcttcatctcattcccaaacccttggaacttccttatcagtttcaaattcatccttttcactctcagcagcttcttctccttcaatcccctatgtgtactgtggcagaggggataagaaaacagagagagggaagcggttcaatcactcttttggcaatgcaaggcctagggacaagaagaaggggagagggccaccaagggtgccagttccaccatcaccaccgagaaaagataagtttgatgatgatgagaagataaaaattgaaattgatgaatccctttttactagttaatgcttaatttctttaatttttctattggaatggcttaaattgagacaacttgctgtgtatgctgcaatttgctgttgttaacattactctttt

SEQ ID NO: 237054 - DNA, 343 bp, Gossypium hirsutum
gggttatcttccattttctttgcgttttgttgaaatgaatggtgaaataaaagtttattctccgctcaacaaaatattcgatctcttacgccttttaacggaactacatggcgacccaatctgtgaaagtgggaaacgcttccttgggtgcatgtgatagagatctcaaggagtccttttgcttctccggtgaaattgcatatgctgaaatgaatggggactatgagcaatctcaagttgcatatattactttcaaggactcaaagggggcagagactggtgctcttctttcgggggcaacatttgttgatcagtctgttaccatagaattagctcctgatta

SEQ ID NO: 237055 - DNA, 228 bp, Gossypium hirsutum
tgtcttttcgtccggcttgtgctgctctaaatggaattataatgggtgataaaactctcaccattaggcgagcaaaccagggtgctacccagcctaaacctgagcaagagagtgtactccagcacgcacaacagcagattgctttgcagaggcttattttgcaaccacaaggggtgcctacgaaagttgtttgcttgactcaagcacttaatgtggatgatctcaggg

SEQ ID NO: 237056 - DNA, 325 bp, Gossypium hirsutum
ttgctgaacaagtgtggggtgattagccctcgtttcgatgtcggagttaaagagattgaaggttggactgctaggctacttccttccagacagttcggatacattgtgcttaccacttcagctggtatcatggaccatgaagaagcaagaagaaagaatgtcggtggaaaagtacttggtttcttctattgagacaaatctgagttctttttatttggtttatttctcttcatgtaggacatggtagttttcctcaacctaagtttggtgtcaatttaatttttgtttatctgggattatacctatgttttgggtatggtgtttg

SEQ ID NO: 237057 - DNA, 426 bp, Gossypium hirsutum
cccacgcgtccgcccacgcgtccgctttggtctttgaaaatatttccatggattttatcaccgggcctccaccttcaaagggtaaaatcttggttatggtggtcgttgatcgactttcaaaatatgggcattttgtgggtctgccaactcatttttccagtcaaatagttgcttctgcctttgtgcaagaagtagtgcgattacacggcattcctacggagattgtctcggaccgtgatcctcgtttcctcagtagcttctggaaagaagtatataggctccaaggcacgacactgagtatgagcaccgcataccacctacaaactgacggccaaacggaggccctcaaccgatgcttggaaatgtatttgagttgctatgcctcggaccaccctacctcttggatgttatttttaccttgggccg

SEQ ID NO: 237058 - DNA, 233 bp, Gossypium hirsutum
cggtatccttggcaaatatcacggagatccacgaaggattggacttttcttctaatgatcgaaggtattcttttggaatattctctgtgaaattttcaactgatggacgagaacttgtggctggaagcagtgatgactcgatatatgtttatgatctggaagcaaacaagctttcccttcgaattatggcacacacggctgatgttaacacggcaacctttgccgatgaaagc

SEQ ID NO: 237059 - DNA, 465 bp, Gossypium hirsutum
cttcgatgctcaaaatctcagactgatctggggatcgtggagtgcacgtgttctcttcttctttttcaactgtttttcttctttcagattaagacataaaatccaagcaacgacatggaggcagtgcctatacagagtgaaaacttcaagctagggttcattggagcagggaaaatggcagagagcattgccagaggagtggtacaatctggtgttatgcctccccaacgcatttctacagcaatccactcaaatcccagtcgtggtactcccttccagtcactcggcatctctgtttatagtcacaacaccgacgttgtggatgctagtgatgtgataattttttctgtgaaaccccaagtagttaaaactgtggtcttgcagctgaggccgttactttcaaagaaaaagctcttggtttcaattgctgcaggagtaaaactgcaggatctggaagaatgggct

SEQ ID NO: 237060 - DNA, 448 bp, Gossypium hirsutum
ctcttcttaccggagatgcatttctaactctcaccgagggcataggtttagtgggtgagatttcatttacagataattcaagctggactagatgccgtcgtttcagacttggtgctagagttgtggatggctctggtggcactagagtaagagaagcaaagacagaatccttcattgtcagggatcaccgtggagaattatacaagaagcatcatcctccatctctttctgatgaagtatggagattagagaaaattggcaaagatggggctttccataagcgcttgagtcgggaaaatatcaacactgttaaggatttcttgaccatgctctgtataaatcctccaaggcttcaacatatcctcggcaccggtatgtctgctaagatgtgggaaatcaccgtggagcatgctcgaacatgtgtgcttgataagaggaggcacgtgta

SEQ ID NO: 237061 - DNA, 129 bp, Gossypium hirsutum
tcctcgcgtccgcttgaagatgctggtgtgtctcctgaagaggtaaactacataaatgcacatgcaacttctactcttgctggtgatctggctgagataaacgctattaaaaaggtattcaagaataca

SEQ ID NO: 237062 - DNA, 184 bp, Gossypium hirsutum
cccattcgtccggaaaaacaaagacagttagtttggcccctacgatacaaaataattaaagggattgctcgagggcttttataccttcactcagattcgcgtctcaaaatcatacaccgtgatcttaaagctggtaatattctattagacaaggacatgaccccaaagatttctgattttggta

SEQ ID NO: 237063 - DNA, 237 bp, Gossypium hirsutum
ttcatgcgtccggaaagactgttcgttgcagaaaagaaatttcctatttcattttctggccaggttacaaaggacaaaagggatgccaatgtccaaatggaactggccagttctttaaagcacggggaaggtaaagcaacttcattgggttttgatatgcagactgttggaaaggacttagcctatacactgcgcagcgagaccaggtttagtaatctgaagatgaataaggcaatg

SEQ ID NO: 237064 - DNA, 200 bp, Gossypium hirsutum
gctgtctatcttcttcaaataaactcagacgagcaaacatgactctcagtttagtaatcgatttacggctaaggacatcagctactacattaaccttactaggatgatactctattgtacaatcataatccttaagcaactcaacacacctacgctgcataagatttaactctttttgagttaacagatacttgaggctc

SEQ ID NO: 237065 - DNA, 398 bp, Gossypium hirsutum
gtcgattgattcttcgaaaaccataaacgaaaccaaatatggcggagaaagcaatcgagtcggttcaatgctttggccggaagaagacggcggtagccgtaacacactgcaagagaggccgtggtttgatcaagatcaatggttgtcccattgagcttgtcgagcccgagatcctccgtttcaaggccgtcgagccaatccttctcctcggccgtcagcgttttgccggcgttgacatgaggatccgagtcaaaggtggaggtcacacttctcagatctacgctatccgtcaaagcatcgctaaagcccttgtcgctttttaccagaagtacgttgatgagcagagcaagaaggagattaaggatattttggtcgggtacgataggactttgctggtc

SEQ ID NO: 237066 - DNA, 354 bp, Gossypium hirsutum
tttttgttgttttcatttccaatgacaataaacagattccactgtggcatcaaaaagctagccatagagcagatggtgtaattctctgggattaccatgtaatttgtgttcagaggaagaaagatggtggtactcatttagtatgggacttggattcaagtcttccatttccttgtcctttagctacctatgtgtcagaaactatccggccatcatttcagctcttttcggagtttcagaggtttttccgggtagtgcatgctcctttatttcttcgtcattttgcatctgatagaagacacatgaaagattctgaagggaactttactgctcaacctcctccatatgaaccca

SEQ ID NO: 237067 - DNA, 396 bp, Gossypium hirsutum
gccttgcttttgcattatttgggccacaagaatctcagttgacattagactggccaacaagaatgaagatctgcattggtatagctagagggttagcttacctccatgaggaatcaaggttgaagattgtgcatagagacataaaggccactaatgtgttgcttgataagaatctaaaccctaaaatatccgacttcggtttggccaagcttgatgaagaagataatacccacattagtacccgagttgcaggaacttatggctatatggctcctgagtatgcattgcatggccatttgacagagaaagcggatgtttatagttttgggatagtggctctcgaaattgttagtgggaggtgcaacactagaagccgcccaaagcaagaacctttca

SEQ ID NO: 237068 - DNA, 130 bp, Gossypium hirsutum
gagtttcattacttggctaatccagtcaccaaccatgttcaaagtgctgagcaacacaaccaagatgtgaattctttgggactaatctcttccagaaaaactgccgaagctgttgatatcttgaagctga

SEQ ID NO: 237069 - DNA, 367 bp, Gossypium hirsutum
ttttctcgcaactgtgaccccattgttcctaacaacactggggatgttcgataagaagaagggagaggagatgattgcgacttcagcagtgttgaaaggcaccgttttggagcctgaagattttgcacatgcagcgctgtatttggcaagcgatgaggctaaatttatcagtggtgtcaacttgccagtcgatggagggtatagtctcagcaaccagtcatggaagatgggattcgcagcactttttgggtaaacctttactccttggacaaaatttccttgaataaggaaataaaagttacccaaaactgcgctacttgtaataagattgtattgtcgatcagtctcatgtaatgcttttgatgtg

SEQ ID NO: 237070 - DNA, 395 bp, Gossypium hirsutum
gtgtaaactccaattcctcaagctcctcgcagcttcagaactctgggtctgaagaggacctgcaccagcagaatatgatggaccaaagaaaaagaaagagaaaggaatctaacagggaatcggcaagaagatccaggatgaggaaacagcagcacttggatgaattagtggcccaagtggctcagctcagcaaagaaaacaaccaaatcctgaacagcatcaacttcaccacccaccactatctcaacattcaggctgagaactcggttctgagggctcagatgatggaactgagtcaaagactcgactatctgaatcaaatcctcagttatctcaacaccatgagcgccagtgagttggtgtacgaaactgatcagtgctttgaaacaagtact

SEQ ID NO: 237071 - DNA, 136 bp, Gossypium hirsutum
tcgctggttgattacaacatccaaaaggagtccaccctccatttggtgctccgccttcgtggaggaatgcaaatctttgttaagaccttgaccggaaagacaattactttggaggttgagagtttagataccattg

SEQ ID NO: 237072 - DNA, 235 bp, Gossypium hirsutum
cccacgcgttcggaaagtacagtgtctggattggaggatctatcttggcatcactcagcaccttccagcagatgtggatttccaagggtgagtatgatgaatccggtccatccattgtccacaggaagtgcttctaagttttgtaattgcttttgatggtgatctacattttgcatttagttggctttttttgtgtgcggtgtcaagtgaactccaaagtctggtttatgtgggg

SEQ ID NO: 237073 - DNA, 390 bp, Gossypium hirsutum
ctcttctcatttccaaagggctgagcactgaagaagaaaaagtagcatagatcggcaacgtaacagtgaaactcgggggaaatggcgttggcgttcgacgagtacggtaggccattcattatacttaaagaacaagagcagaaaacgaggctgagcgggctcgaagctcaaaaagccaacatttccgcaggcagagcggtctctcggatcctccgaacctctctaggacccaaaggcatggataagatgctccaaagccccgacggcgatgtcaccatcacaaacgatggggcaacaatattggagcagatggatgttgacaatcaaattgctaagttgatggttgagctgtctcggagtcaggattatgaaattggggatggaacgact

SEQ ID NO: 237074 - DNA, 162 bp, Gossypium hirsutum
tcttgattacaagaactgactgcgttgataaaaactgatattaccaccttgaatatggcactttctgatttacaaacacttcaaaacatggagattgccgatgggaattactccgaggatcgaattgttcattcgaccactgtttgtgatgacttgaagaac

SEQ ID NO: 237075 - DNA, 309 bp, Gossypium hirsutum
tcggtgaagctcttcataaaggatggatccatttagattggccaattcgacaccaaatagcacttggggtcgcacaaggcttggcttaccttcaccatgatctgttgacacctattattcacagagacatcaagtcaaccaacatcctattggacgccaattatgaacccaaagttgcagatttcggaatagccaaggttttacaagccagaggaggcaaagattcaatcattaccgtcatagcaggcacctatggctatttagccccagaatatgcgtattcaagcaaagcaacgaccaagagtgatg

SEQ ID NO: 237076 - DNA, 478 bp, Gossypium hirsutum
catctatagaagcgaaatggctggttccagggttgctcatgctaccttgaaaggaccaagtgttgttaaggagatagttatcggaataacacttggcctttgtgctggtgggctttggaagatgcatcactggaatgagcagaggaaagtgagagcattctacgacatgctcgagaaaggtgaaatcagtgtcattgcagaagaataaatgttcttttagtcttgtgaaagtgtggacagcttcagctgtgtttcgttatatgcattctcttcatttggctcttagatagaagatgagcaaaacacaatttggagcttctaagaataatgtcatcattttgggatcttgatttcatatttgcatagcaaatccaagcgatttttcaatctagtgcctttgttggtttccatttgacattgttgtttgatttggagatgtttgaaagctctttatatttctactcaattggtatttgtc

SEQ ID NO: 237077 - DNA, 330 bp, Gossypium hirsutum
ttttggcatggagcttctttgcacacaagataatccagagtacaagtatacaatagccatgatgggctatgggcctgaagaaaaaaatgctgtgcttgagttaacatacaactacggggtcaccaactacgagaaaggaaatgactatgctcagattgcaatcggcacagatgatgttttcaacactgcagaggctgttagactttttggtggaatagtcacccaggaacctggacctttacctggtattaacatcaagatcactgcatgcttagatcctgatggttggaagacggtttttgttgataatattgatttcctcaaggaaat

SEQ ID NO: 237078 - DNA, 455 bp, Gossypium hirsutum
  unsure (1)..(455): unsure at all n locations
gccaattgccgatcacacttttgtctgaaaccagcaacaatggtggaccaactcaccgacgaacaaatcgctgagttcaaagaagcttttagcctcttcgacaaggatggtgatggctgcatcactacaaaagagctgggaacggtgatgagatctcttggacaaaatccaactgaagctgaactgcagggtatgatcaatgaggtcgatgctgatcaaaacggcaccatcgacttcgccgagttcttgaatttgatcgcacggaaaatgaaggataccgattccgaggaggaacttaaggaagctttcaaagttttcgataaggatcagaacggctttatttctgcagccgagctccggcacgtgatgacgaatctcgnggaaattttgaccgagagggaagtcgatgaaatgattcatgaagcagataccgacggtgacgggcaagtgaacta

SEQ ID NO: 237079 - DNA, 510 bp, Gossypium hirsutum
gtgttgtgctcttttggtcttgactccattatttgaatacataccacagtgtgctttggctgctatagtaatctctgctgttataaccctggtggattatgaagaggcaatattcttatggcgtgtagataagaaagattttcttctttggaccattacaactactacaacattgtttctcggaatcgagattggtgtccttgttggggtaggcgtctcacttgccttcgtcattcacgaatcagcgaatccgcatattgctgtcttggggcgtcttcctggcaccactgtttataggaacattcagcagtatccagaagcatatacttacaatggaattgtgattgttcgtatcgatgctcctatctactttgcgaacataagttacatcaaagacaggctacgagaaacgaagttgtgggtaataaatcgaccaaacgtggaccagagttgaacgaatttattttgtaatttggagttggcacctgttacatacatagacgcgagtgc

SEQ ID NO: 237080 - DNA, 369 bp, Gossypium hirsutum
cccacgcgtccgattataccattcactgtattattggaaactgtcttcctcaaaaagcaattcagtcaaaagataaagctatccctcttccttttgcttggtggaggtggcattgcctccattactgatctccaactcaattttgttgggacaatcctttctctccttgccattgcaaccacctgtgttggccaaattctgacaaacaccatacaaaagaggctcaatgtgtcttcaacccagcttctgtaccaatcagctccatttcaagcagctattctttttgtgtcaggccctttggtagatcagttcctcaccaatcaaaatgtgtttgcttacaaatattcccctatagtcctggcatttatc

SEQ ID NO: 237081 - DNA, 307 bp, Gossypium hirsutum
cccacgcgtccgctttccacctcgaccctaccaaatggggtgtcaatgtccagccttactccggttccccggccaacttcgctgcttacacggccgttctccagcctcatgataggatcatgggactcgatttgccttcaggcggacatttgactcatgggtattatacctccggtgggaagaagatttctgctacgtctatttacttcgagagtttgccttacaaggtgaactccactacggggtacattgactacgataagctggaagagaaggcgttggatttcaggcctaagcttatcatttg

SEQ ID NO: 237082 - DNA, 495 bp, Gossypium hirsutum
  unsure (1)..(495): unsure at all n locations
gaaaagacggttctccatgattgtttggagactattgacgagaccctcgacgagctccacgaagctgttgaggatcttcatgagtaccccaacaagaaatctttgacccagcacgcggatgacctcaagaccctgatgagtgccgcaatgaccaaccaggaaacttgcttggacgggttttctcacgagggtgccgacaagaaaatccgtgaggtcctgatcgatggcgagaagtacgtcgaaaagatgtgcagtaatgcgcttgccatgatcaagaacatgacggacactgatattgcaaacgagatgatgctcaagtcatcgaacaggaagctgaaggaggacgaaagcggcattgcctggccagagtggttgtccgctggcgacaggcgcctgcttcagtcgtcttcggtgacccnaacgtggttgtggcggccgatggtagcgggaacttaaaacggtgtcggaagcggtcgccaagcaccggagaaagca

SEQ ID NO: 237083 - DNA, 305 bp, Gossypium hirsutum
agataattctctcccttttaaagcttcctcatctttcatcttcccccaccccctaaattcccaaatattgaatcttgtttttctaaatatggaagacctgagcttcattgtgggtgttataggcaatgtcatctcagttctggtttttctttctccagttggaacgttttggaggatagtgaagaatggatcaacggaggattttgagagtcttccttacgtttgcacattgttgagttcaagcttgtggacttactatggaatcacaaagcctggggcttaccttgttgccactgtgaatggct

SEQ ID NO: 237084 - DNA, 384 bp, Gossypium hirsutum
  unsure (1)..(384): unsure at all n locations
cagagcctccttcaccaacctccgctctgttcagcccgtgatcttttgatctttctccatggctaccatttccaagctcgctaaccccaacccagtcgcttctctttcattatctttcaaacccagatcttcttcatcgcttaaatgcttcgttgggttccctaccaggcctgctttcagctctaagctggtttcatcttctagcttgtcctcgataaacacccaccctttcaggggctccttggttgtcaggtgttctcttgctgatggaaacggagnttcagtgaagacgactactttgcatgatctgtatgaaaaagaagggccgagtccatggtatgacaacctttgcaggccagtgaccgatttgctgccactgattgc

SEQ ID NO: 237085 - DNA, 259 bp, Gossypium hirsutum
cacgatgaacgtcatatacaggccagttcttgataagggatttatgatgcttatggatggacaccgtattgaggaccttcagaggatgtactcactgttttcaagggtcaattctcttgaaccactcaggcaggccgtgagttcatatattcggagaactgggcagggcattgtcatggatgaagagaaagacaaggacatggtgccttcattgttagaatttaaggcttcacttgactcaatatgggaagaaagcttt

SEQ ID NO: 237086 - DNA, 337 bp, Gossypium hirsutum
atttttaggattatcaaaatcctcccttctcattttcttccatgaagccccactctcgctcgtaaaggtctaaattcctgggtgttgaagcctccaaattgttgatcaatggctgaatccttgggtccacgattgtacagctgctataattgtggaaatcatgtttctctccacgacgatatcatttccaagtcttttcagggaagaagtgggcgagcatttttgttttcgcatgcaatgaatataagagtaggagcaaaagcagacaggcatctaataacgggtctccacacagttgcggatatttactgtggtgattgcggtgagttgttaggtt

SEQ ID NO: 237087 - DNA, 346 bp, Gossypium hirsutum
  unsure (1)..(346): unsure at all n locations
ttcattgacctgtccttcatcttcaacaccaatctgaacatgaagaccaccttaccggtggcggaagcggcggtggatcagccgatgacttgatgaacacaggtcataatgaccttgttgctcgtagaccaaggggtcgtccacctggttccaaaaacaagcctaaaccaccagttattatcaccagagaaagtgcaaacgccctaagagctcacattcttgaaattggcaacggctgtgatgtattcgattgtatagccaactatgctcggagacgacanaggggtatctgtatattatcgggcagtggtacggtcaccaacgtcaccattagacaaccatcagc

SEQ ID NO: 237088 - DNA, 449 bp, Gossypium hirsutum
cccatgcgttcttccacgcgtccgcttttatttgtcaatggcttcatctgtatcattgtacgaggttcttggtgtaccagtgagtgcaaacggtaatgaaatcaaggcagcttatagaagacttgcgaggacgtggcaccctgatgttgtgtctgtaaatcagaaagaaatgtctgctgatcggttcatgagaatccatgcagcgtattccacgttgtcggatcctaatcaacgtgcggattatgataggaatcttagacggtggaaccgtccctttacgactatggaagcaactgcgacggcggtgggttcctatgggttttctagttatggtggtaataggaattgggagaccgatcagtgctggtagttaattatatgtatttttttttaattattaatgtatttttcatgttcgtggtccataaaaatcaatctttttagaattt

SEQ ID NO: 237089 - DNA, 307 bp, Gossypium hirsutum
cccatgcgtcctttcattctctctctaaaaactctcattctctcgctctctctctctctctctctctctctctctctctctttcttcacaagaaaagtttttctttcgtgaattcatgtcggaggaaaagggccggccattgccaaaatctggtgaatgggatgtcaacgatcctgcatctgctgagggattcactgcgatcttcaataaggcaagggacgagaagaaaacaggtggcaaacctgagtcaccggcaaagtctgattctaatgttaagcctggagctgatcctggcaaaacccaacct

SEQ ID NO: 237090 - DNA, 372 bp, Gossypium hirsutum
tcggtgttttgttggccggtgccagagatgacgagatagaaaggttgaggaggtacggcagagctgtgggtgtattgtatgaagtggtgaatgatgttttgctgtcaaaattgacagaaaaagaaggaaccgaggggcaggaaaagaaaggtaaaggttatgtgagcttgtatgggatcgagaagtcaatggagattatagaagagcttcgaagcaaggctaagaacgaattggatggctttgaaaagtatggtgactgtgtggtgccactctatagcttcatagattatgctattaatagaggtttcaatgttagtgacttgagtcaatgatgtgcttttttttcatgttggtgaatttacattgacgatt

SEQ ID NO: 237091 - DNA, 490 bp, Gossypium hirsutum
tgtgattctgttggaacttctaacaggcagatgcgcaggtgatgtaattccaggggaagaagaaggaatcggattgatagaatgggttcggttgaaggtagcagaaggcagtggcttgtcttgttttgattcggctttagctcaagaaatgggggatctggctgccgagaaaggaatgaaggaggttcttgaaataggattaagatgtgttcgatctctttcggagaggccgggtatcaagactatatatgaagatctttcgtcaatatgaatcagcatttggtttttgcattctcgtaaatgttaggcaagtcggggacttaaactagattcaaatgatcagggaatttaatctctcattgggctccctgtttttgcatctttttggtcgtttttggcgcatctggttttagcttttaatttctattcaaaatttgttgtacaatgaatgcacattatggaatggatagaaggtgtttctagattaaaa

SEQ ID NO: 237092 - DNA, 490 bp, Gossypium hirsutum
gcttggttcatcagagtcaaccaagtatctgttcttgcagtatgcagatcagataatggggcttttcctaagtgtttttgcttgtaggagtgcgactgtgcacgaggaggccatgcttgcaatcggagcccttgcttatgctactgggccagattttgcaaagtacatgcctgagttctataggtacttggaaatgggtcttcagaatttcgaagagtaccaagtctgtgctgtcacagttggtgtcgtgggtgatatttgcagggcattagaggaaaaagttgttccttactgtgatgggatcatgacacaacttctcaagaatttatcaagcaatcagttgcatcgttctgtgaagcctcccatattttcatgctttggtgacattgcattggcagtaggagagtatttcgaaaagtacttgatgtgggctatgtctgcccttcagagtgctgcagagttgtctacccatacaacaggtgatgatgaa

SEQ ID NO: 237093 - DNA, 500 bp, Gossypium hirsutum
gtcaatacgtcggcactgaagtcctttccctcgatgctttccttcattctcttggctcttctggctcacgcctcaccaatccaatgtaaacacccacatccaaaaataaacataatcatcttagccgggcaaagcaacatggccggtcgtggaggagtgttcaacgacaccataaccgagacactaacttgggacggcatagttccgcctgaatgccagccaaacccttcgatcctcaggctaaccgcaaacctaacatgggttgaagcccatgaaccactccatgcagacattgattacaacaagacaaaaggggctggacctggaatgccatttgccaacactgtgttgaacaaggaccctaactttggggtgatagggttggtgccttgtgccatcggagggacaaatataagccaatggcagaaaggagagtttttgtatgagcaattggtgaaaaggtctcaatttgcaatgcaaagtagagtgtatagagctat

SEQ ID NO: 237094 - DNA, 444 bp, Gossypium hirsutum
tattccatggcaaagacgatgaagtaatcccgctcgaatgcagctttaatgttcaaaaaaaaatccctcgtgcccgagttaaggttgtcgaaaacaaagaccacattaccattgttgtcggcagacaaaaggtctttgccagagaactagaggagatttggaatagatcatcaagaagccattaaaagagtgccattttaattagtttggaatttataagaagaagaaaaaaaatcagtgaaatttgcgtaaagatgacatgagattggcaggctttttcgttctatgttaattgcttaagaccaatgtgagatggtttggtgtgtccatgttgtggaaattgcttaattaattgtaaccatatctatgatgaaacataatgtcctggtaaacacctacccatatatatatatttaaattgttataaataattaatatactcat

SEQ ID NO: 237095 - DNA, 480 bp, Gossypium hirsutum
gtcaagcaacatcacgtttctgatattgctactgttctgagtcgagcttggaacgctggcgtcgatcgaattatcgttacgggtggttcccttgaggagtcaaaggaagctcttgctattgcagaaactgatgggaggcttttctgcacagttggagtgcacccaactagatgcaaggagtttgaagagagtggggatcctgaaaaacattttcaaggacttttggcattggctaaggagggaattcaaaaagggaaggtggttgcaattggtgaatgtggattggattatgacaggcttcacttttgcccaccagaagttcaaaagaagtattttgagaagcagtttgaattagcatatgccacaaagctgcctatgtttctgcatatgcgtgcagctgcagaagatttctgtgaaattatggaacgaaatattaacaagttcactggtggggttactcattcatttactggtagtgct

SEQ ID NO: 237096 - DNA, 496 bp, Gossypium hirsutum
attttattttggagatcatgtcgcaagattttcttcggcttgcggccttttccgccttgtttccattttcaaaaggctagttaataattaagctgaatccgcagcaatgctacgaagcaccacggtctccaccgtgagacccggcccaaaggccagtaagacgccccactctagcccttcagtggcggcggcggttttgccttcttctgttgacctttttctcatctcatcaagaacgaataggacgcttggactccacatgtttccatactcacttaacacatgccagcttgctttaagcttgtcgcttcccaatccaagtttctcttcaatacgtttaagaacagctgggccaccgggatgaactacgtaaaacaatttgttccaatcatcaacaccacatggacctaatgtttcgaataagcattgctcaatgttgttggcaattacattgggcaactttttagacaaataatacgccatacccatttcacgt

SEQ ID NO: 237097 - DNA, 463 bp, Gossypium hirsutum
ttcctatcttcgtcgctctacaagcttcacatctgcacccttgattctcaatcagacggctgtgacagctccaccccatcacggcggtcgtgatgtccgagaaaaacaaaaggtagtaatgcaaatggaacaagctccaccgaagccaaagccgacggaaattcacgacgtggtctttggaatcgcggcttcttccaagctatggcagcagagaaaagagtacatcaagatttggtacaagccaaaccaaatgcgtggtgtggtttggctggacgatcgcgtcaaatactctgcccaagacaaccgaacccttccaccgtttcgagtctccagcgacacttccaagttcccttacaccaatcggaagggtcaccgttccgcgattcggatctcgaggatcgtgacggagactttgaggatgaagatggataacgtccggtgggtcgtgatgggcgacgatgac

SEQ ID NO: 237098 - DNA, 352 bp, Gossypium hirsutum
gttggtggtaaactcgataccgaaagtggtgcatgaggtacagcttgctaatgctaaaaaaccagaatgggagctaaagaaggaaaatgcattaaagcgtgaaggtgaaatactagctaaatttgctcctttaaaagggttttccctttgaaagaaattatgtgttatcatatcattgtctgttggtaatatcttgaacaccataggtatgggactagttttatatttatttagtgataataaaataacagtggtagctttgctgagactgcaatttggtagtgtattgcttttgaggattgttgtaacttggtaactttggctagtgccccctttgtacttttgaaccgtc

SEQ ID NO: 237099 - DNA, 311 bp, Gossypium hirsutum
ctctaacattcctacttgcccacagacatcaataccacattgaaaacaaaatggctggagcttgggtgcttaacaatggcgtatatcggctggaaaactagtctccggaagaccgggtttttggtgcacttaccgtcgggtgaagttgtatcgtcctactcatccttggagcacattttgagaggtttagggtgggaaaggtactacgggggtgaccctgatctctaccaattccacaagcactcttccattgatctcatttcactccctaaggatttctccaagttctgctccgttcacatgtatgatat

SEQ ID NO: 237100 - DNA, 211 bp, Gossypium hirsutum
tcgcccactcgtccgcccacgcgtccgcttaattgccgtttcaagaaataactattaagtttgattttcggaccatgtctttgccaaagagttggaacctcataagccacttgcgaagttcttgtgcatcaagggaattgttttcttctgcttttggcagggagtggcgcttgacatacttgttgctgtgggcatcattcgagcaaatcat

SEQ ID NO: 237101 - DNA, 269 bp, Gossypium hirsutum
cccactcgtccgccatgaataaactgttaatggaggagaacgataggttacaaaaacaagtttcccaacttgtttgtgaaaaaagctactttcgccaacagtctcaacagcaggcggggttagccaccacagatacaagctgtgactcagtggtgacaagtggtcatcaacaccatttgactcctcagcatcctccaagggatgccagtcctgcaggacttttgtctattgcagatgaaactttaacagagtttttatcaaaggccact

SEQ ID NO: 237102 - DNA, 271 bp, Gossypium hirsutum
acctaggaatgggttctttaggtaagttcaagccatattttgctgcaattttcctgcaagttggccttgcaggaatggatatcttatctaaggctgctctcaaccaaggcatgagcaattatgtactcgtcgtctaccgccacgccattgccacccttgttatggctccttttgcagtcattctcgaaaagaaagtgaggcctaagatgaccatatcaatctttatcaaaataatggttctcagcttactggagccagtcattgaccaaaa

SEQ ID NO: 237103 - DNA, 319 bp, Gossypium hirsutum
gtctctttgctgctcagatactcttccagggacaaacactccccaaaaccagaaggagagaccaaagaacaaaacctaaaaacttgctagaggcggcagacacaaacgtgctaggccaaaagagaagcagggaaggaagcacaaagtagaacgggaaaaatgaagctggaagtgtatgctgatcgaatgtcccaaccatctcgcgctgtcatcatcttctgcaaggtaaatggtatagattatacggagcgcaaggtagatatctcaaagagagagcatttgactcctgaatttgctgaaatccatcccatgaaacagc

SEQ ID NO: 237104 - DNA, 223 bp, Gossypium hirsutum
  unsure (1)..(223): unsure at all n locations
gaatttgaagatgaggttggatccgagtgtgcaaaatatggaactgttacccgagttctgatatttgagataacagagccaaatttcccagccgatgaagctgtcagaatctttattcaattcgagagatcagaggaaacaactaaagcattaattgacctcgatggacggttttttggggggagggtcgataaagnctnattttatgatgaagagaggttaa

SEQ ID NO: 237105 - DNA, 110 bp, Gossypium hirsutum
ttcgaatggttaaaacttcgaacagacaaggctcttgtggaagatcccaagttcaagcgctacgtggagctctacgcgaaggatgaggatgctttttttagagattatgc

SEQ ID NO: 237106 - DNA, 283 bp, Gossypium hirsutum
tccgtctggtgccgctgcaagcctatttcgcaaacagcaaacggagcagacagtcagataagcagagaaaatggaggcagccagaactgttaaggacgtttcccctcatgacttcgtcaaggcttacgccgcccatctcaagcgttccggcaagatcgagcttccttcatggactgatattgtgaagactggtaaactcaaggaacttcctccctacgatccagattggtactatatcagagctgcttccatggcaaggaagatatacttgaggggaggtcta

SEQ ID NO: 237107 - DNA, 261 bp, Gossypium hirsutum
cttgttatatcttctacacatttctccctaacatggcttacttcgaattccttccagtaaagaatgaaggtgatggatctattgaaatgaagagcaacaatgaagatactgaacttgttgatcttgtaaatgtgaaggctggtcagtgttatgaactagttgtcacaacttgtgcaggattatatcgatataaagttggagatgttcttatggtgagtggtttttacattaatgtacctcaatttcaatttgtggagagga

SEQ ID NO: 237108 - DNA, 423 bp, Gossypium hirsutum
tcgggtttatagaggagggtgggagagacacacgaagggagaaggtttagaatgggtaaccttaaacaaaagtggacggcggaggaagaggaggcgcttctggccggaatcaccaaacacggtcctggaaagtggaagaacatccttaaagatcccgaatttgcccctttcctcactcaccgctccaacattgacctcaaggataaatggcggaatttgagtgtcagtacttctactcaaggtgccagagacatatcaagagcacccaaggtaaaagccattgttgcttcccttcccaacactcccaattcttttgctccagttgcgtctcgtgctcacaatgtaacttctggtactgttgtgggtgattcttcaaacaacggtatagacgggaagaatgctcctaggtataacacaatgatt

SEQ ID NO: 237109 - DNA, 346 bp, Gossypium hirsutum
tttcttcgcgtccgcaaagggtgaagtcccgaggggggattcaatcgaggatgatgcatcaaatgatgaccgatcctcccttcgtactggtttgctgggttctgaagctgttcttgtcctagaacttaagagcattgctgatgtaggccttgtgggggatgcccaatgctggcaaaagtacacttttaggggcaatatctcgagctaagcctgcaataggccactatgcgttcacgactgtaaggcctaatttagggaatttgaactttgacgacttgtcaattacggtggctgatattccaggattaataaagggtgcttaccagaatcgtggactcggacatgc

SEQ ID NO: 237110 - DNA, 440 bp, Gossypium hirsutum
tcgtcttcgcgtccgctccacgcaaatggccctgtttgtttgcgttttattccttctcctttcctctgcttctgcttgtgatcgctgcctgcaccagtccaaggctgcttatttctccaaagcctctgctctttcagcgggagcttgtggatacggttccttggctttaggtttaagtggtggacaccttgctgctggtgtttcttctctttacaaagatggagccggttgcggtgcctgcttccaggtttgtataattcagtttttattctttttttcttatgatggaagtttgagttttgatttttcttcatattttggtagataaggtgcaagaattcaactctgtgcagcagtgaagggactaggatcacactaactgatctcaatcataataatgaaacggaatttgttcttagcagcagagcattcatggcgat

SEQ ID NO: 237111 - DNA, 239 bp, Gossypium hirsutum
tttcaagatctcgcagatgctcaccttaagtaaatttaatcccacatgaaatttagcagatcgaaagattttttcttttctaaaaatggcggaggagcatagatgccaaacgccggaaggccaccgtctttgcgttaacaactgcggctttttcggaagtccggcgacaatgaatctttgctctaaatgttatagagatttccgtcttaaggaacaacagggagctacttccatcaaat

SEQ ID NO: 237112 - DNA, 272 bp, Gossypium hirsutum
aattcctacacctttcattagcaaaagtgatcagggcgggctttaaatcaaacggcggataactaagcttgtccgtaatggaacaaatgccattgatgaaatccgtggtgtatgaatcgtttcgtatcgacccgccagttcaggttcaatacggaaaggcgaagaaagatcttttgattgaaagtcaccatgccgtatacgaagtgaaagaaggggagatgttattcggataccaaccgtttgcgacgaaggatccgaacatatttgacaga

SEQ ID NO: 237113 - DNA, 416 bp, Gossypium hirsutum
ttttcttgttagaggggagggaaaaaaagaaatgggtggagtgagatggtttgtcggggttttatttctaagcactttgctcctttgcagtgctgatgtacatcactatgaattctttgtgcgagagtcaaaatttaagaagatgtgcaacacatcgactttgctggtcgtaaataatagttatccagggcctgagattcgggttcacagaggtgacactgtcttcgttaatgtccccaaccagatgcttatgctatcaatggacatttaggagacacatatggatgcccaactgatacaatattccgcatggaagttgattataagaagacataccttctccgcataatcaatgctgctgcttcattttcactcccatttggatctgtgctatcatctttaaaaaaattttcgta

SEQ ID NO: 237114 - DNA, 370 bp, Gossypium hirsutum
attatgggtatattggagatgctatttcccaaatacgcaggcattaatttatgttggtgatgcaagtgacacaagaaattattcgctctgctattgactttaagagggacccatggcctaaggtttctgacaatgcaaaggaccttgtaaagaaaatgcttaatcctgatccaaagcagcatcttacagtacaggaagtgcttgaacatccatggctacaaaatgccaagaaagcacccaacgttctgttgggcgagactgtgaaagctagggtcaaacaattttctataatgtacaagctgaagaagagagctctaagggtgaagagaccagaccttctggttggtcttcagcagatcctacacacagg

SEQ ID NO: 237115 - DNA, 258 bp, Gossypium hirsutum
cccacgcgtccgggttaagctacagctcaccaagggctgtatgcgcactgggcctcttgatgcctaccatttccttcttgctttccatcattctcaggacagcaaggctggattggagaagcacaagcagccaagccaaaatgattggaacttttatatcaatcgcaggtgcaatttttgcagaactatacaaaggcccgtttacacgaccatcacctgtttcacttgaccaccaccttcaagttataccaaaacttt

SEQ ID NO: 237116 - DNA, 441 bp, Gossypium hirsutum
ttggtttggtcaatacttttagcatcgattttctgtcttttgtgggctcgagtcaacccctttatatcgaaaggaggcattgttttagaagtgtgtgggttgaactgtgactaaaaataaattgtagaagaaaaaccaaaggagtagaattagatgttcagtgttcaaagcaagcaaggctgtctgaaaattgcataaatcggctacgattttggtcaaagatgaagacatctcccaattcaacatggttgccctcaaggtgaggaaaagaggaaaacgtgttggaaggtgtttgtagatacatatatatatacaaaactgtgatccaatatttgtcagtgttttcctccgttttgattctttctatacttttgtgggttttgtgggttagaagttattgatttcataaagtcttttgtattatctcttaagagaagagac

SEQ ID NO: 237117 - DNA, 424 bp, Gossypium hirsutum
ttgttcgtccaaaaaggagtggcactttggctgaatattctgttgccgaagagaatctattggctctcaaaccaaaaaatctgggtttcattgaagctgctgccattcccttagccattggaactgcctatgaaggccttcaaaaaactgccttgtctcctggtaaatccatcctagttttaggcggtgctggtggggttggcaccatggttattcagctagctaagcatgtctttggagcatctaaagttgcagctacctcaagctcagccaaactggaattgctaaagagcttgggtgctgatttagccattgattacaccaaagacaactttgaagatttgccagagaaatttgatgtaatatatgatgcaattgggcaatctgaaagggcagtgaaggctatcaaagaaggtggaaaggt

SEQ ID NO: 237118 - DNA, 398 bp, Gossypium hirsutum
ttcttgaattcttttattatagctactaagactggtagtgctgaggtttttgtgtttgattatagcaaacatccttcgaaaccgcctttggatggggcttgtagtcctgatttgagacttaggggtcatagtactgaaggttatggtttgtcttggagtaagtttaaagaaggtcatttgcttagtggttctgatgatgctcagatttgtttatgggatgttaatgctactcccaagaacaaagctcttgatgctatgcagatctttaaggttcatgaaggtgttgttgaagatgttgcctggcatctcaggcatgaatacttgtttgggtctgttggggatgaccaatatttacttatttgggacttgagaaccccttctgttaccaagcctatcca

SEQ ID NO: 237119 - DNA, 350 bp, Gossypium hirsutum
tctttcctcatccccaaagtccccgacttctttactttctgttcaacaattaaaggttcctgttggtggcaaggcgccaactggtggtattgcagtgagacatgtccgtcggtctcactcagggaaatccattcgtgtaaagaaggatggtgctggtggtaagggtacatggggaaaacttcttgatactgacggggaatcacatatagatcgaaatgatcctaactatgacagtggagaggaaccatatcaacttgttgggtcaactatttctgatccactagatgagtataaaaaagctgttgtttcgattatagaagaatattttagcactagtgatgtggaagtgg

SEQ ID NO: 237120 - DNA, 405 bp, Gossypium hirsutum
tcgttaaattcccaaagcgatacttaattgtgcttgtatcctttgtcagcacatgcgtatgttatatagaacgtgtgggtttttccatagcatacacagttgcagctgatgctgctgggattaaccaatcaagcaaagggacaatactatcaacattctattacggttatgcttgttctcaggtacctgggggatgggcggctcaaaagatcgggggaaggcaggatcttcttctctcattcgttttatggtcatcaacttgttttttggttccattagatcccaatagagtcactatgttggttgttgctcgcttgcttgttggtgtggcacaaggtttcatgttcccttctattcacactgtcctagcacagtgggtaccaccacatgaaaggtcaagatctg

SEQ ID NO: 237121 - DNA, 436 bp, Gossypium hirsutum
ctcttttgttcttatctcttggactgccgccttcggtctcatcgaacttgcctgagcctctttggtacattcttatgacaccaatattgtgtttggagcttaaaatctacggacagtggatgtcgggtggtcaaaggaggctttcgaaagtggctaacccttcgaaccatctcgcaatcgtcgggaactttgttggggcattgttgggtgcatcaatggggcttaaagaagggcctatatttttctttgctgttggactggctcattatttagtcctttttgtaacactttatcaaaggcttccaacaaatgaaacactcccaaaagagctccatcctgtattcttcctttttgttgcagcaccgagtgttgcttcgatggcatgggctaaaatccgaggctccttcgattacggatcacggatagcttacttcat

SEQ ID NO: 237122 - DNA, 360 bp, Gossypium hirsutum
tctttttggaagtgaacaagaagggcgtacatacgactggttttccacacacacatttttttaggaaaggagaagtgggagattggagcaattatctcacacccttcatgattgaatgtttggagaagcttattcaagagaaattgaatggctcgggtttaacatttaaactgtcctccaaaacttcaaacaatatcgcttccccatgatcgtggggatgtctattctaggttttttgggagtgaaatctcttttattcccattttctttataaataatctgtactaatcatgataagaataaattgttttggggtatgtttttgtggattttatgtgaaaataaataaaaaattgcatt

SEQ ID NO: 237123 - DNA, 398 bp, Gossypium hirsutum
tctctcacgcgtccgcccacgcgtccggaatgatggctggttgtgtcactctttcggaggacaatgcttcaactacacagcttttcaacctgcaattgatgttttgaaagaggttcgagtgtttcttgaagcaaatccattggagattgttaccattatcatcgaagactatgtgacatctccaaggggattgagtaaagtattcgatgctgccggcttgaggaagttctggtttccggtatctcgaatgccgaaaaacggtgaaaattggccaacggtcgatgatatggttcaaaagaatcagcgccttgtggttttcacttcgaagtcggctaaagaggcctctgaaggtatagcttatcaatggagatacatggtggaaaaccaatatggagatg

SEQ ID NO: 237124 - DNA, 241 bp, Gossypium hirsutum
ttatcattaattatctgtttttcttactatttagtaccccaataaccccccccccacacaaaatggcaattgcttggtctgaaaaagcttcttttatggaggttatgtctaggcctccttctttatctccaccggtcattctaacccatgacgaattgaaaaaaattgccgaatacaaagccgatgagttcgctgaatcaggaatggttctgggtctaggcactggttcgacagccaaaca

SEQ ID NO: 237125 - DNA, 344 bp, Gossypium hirsutum
tattttcggttggagaagacgagagctcatctctctgctttaaagctcctgtccaggtagaaatctcttcttcctttgcgatgagttctttgttgttcagtcgccatggcttctaagccggattttaaaggaactcatggatttgcaagaaagatccacccacttcttgcagtgctggtccagtagctgaagacatgcttcattggcaagcaacactcatgggaccctgagatagcccttatgctggaggagcgtattttagttaccatccatttacctccagattatgcttataagccttctaaggccacgtttaggaccaaggtcttccattctaacattaa

SEQ ID NO: 237126 - DNA, 427 bp, Gossypium hirsutum
cctcacgcgtccgcaacatctccctcggcggccgaggtggcacgaatcctggacagcttaaaatttcttcaggggggattttatggaagaaacaaggaggtggaaaagctgtagaagttgataagtctgatatcttaggggttacatggatgaaggtccctaggacaaatcaacttggtgttagaatcaaagatgggttgtattacaaattcactggattccgtgaccaggatgttgccagtttgaccagtttttttcagaataattgtggaatagccccagaagaaaagcagctttctgtcagtggtcgtaattggcaagaagttgatttaagtgggaatatgctcgcctttatgactggtacgaaacaagctttcgaagtgtccttagcagatgtgtcacacacacagcttcaaggaaaaaatga

SEQ ID NO: 237127 - DNA, 373 bp, Gossypium hirsutum
attgccgatactaagtagcagccaaaaggttgtattcatttttcatgaccttatgcatggatcagatatatcatggcgaattcttcagaaaaaattgtgtcttccacaatggaatctgataagtgagatttcgcgtcagtgcttacataattttcttctgtccgaagaaatgactcatcgaaataatgagtcaccattgatatcgacacatctgagatcgccaaatgttcaggagttcctctattcaatccttttccttcttcttgttgctggatatctcgttcgtacacatcttctctttgtttcccgagcctatagcgagttacagacagagttcgaaaaggtcaaatctttgatgattccatcatacatg

SEQ ID NO: 237128 - DNA, 268 bp, Gossypium hirsutum
cccacgcgtccgcccacgcgtccggaagattaagatgggttcaaaaatatttcatgatttataactattgtactgatttgaaacgtttccctcaaggtgttccaccagagtgtaaacgcccaaggttctaaaatcaaacctctcctcctttccatgtaatatattctttttttcactactttcttactatgtattcaagttgcactcaacttgatgcttggggatggatggaatacagttgctattattattattcttttttttatgt

SEQ ID NO: 237129 - DNA, 276 bp, Gossypium hirsutum
accgttattgttcgagaacaaaagagtaggcagaagaagcataataggatgtgtacaaaggaactagctttagcattccttctattaacagctgcagctaggagtcttttatcagcacagggtatccattggtacttcttgctatttcaagggatatctctccttcttgctgggctagacttaattggtgagcagggtttataagaagagcggccgatgtaaatacaggcggactcgaactcggggggttaccaaatgaaaacttcgggcggagag

SEQ ID NO: 237130 - DNA, 386 bp, Gossypium hirsutum
gtggtgttagggtcaagcttgacgatggagaaagtggctgctgctaaacagtttatcgagaatcattatagagctcagatgaagaatattcaagaacgcaaagaaagacgatgggtccttgagagaaagctagctgcttcagatgtgcccaaggaggaacagatcaatctgataaaggatttagagaggaaagagacagagtttatgagactcaaaaggcacaagatttgtgttgatgattttgatcttttaaccattattggcaggggagcctttggtgagggttcggttgcgccgggagaagaaatctggaaatatttttgcaatgaagaagttaaagaaatctgaaatgcttatgaggggacaggtagaacatgttagagctg

SEQ ID NO: 237131 - DNA, 243 bp, Gossypium hirsutum
tcgtgatgtcggacgacgagcgagaggaaaaggagttggatctcacctctcctgaagttgttactaaatacaagagtgctgctgagatcgctaacatgtttggaaatatgcagaggctttgcagttagttgtaaaagaatgcaaaccaaaaactaagattgttgacatttgcgagaagggtgatgcatttatcacagagcaaacaggcaatatgtataagaatgctaagaggaagattgagag

SEQ ID NO: 237132 - DNA, 380 bp, Gossypium hirsutum
gtagcagctcttggaaatattcctaccattgctttttgtgacacagactcaccaatgcgatatgttgacattggtattcctgctaataacaaggaatgttctatggtgccccggcagtaattactttccgcattcccacaaaggctgctttgcaggaggcatattcaactccaatcttgccattagatgttcttgcagaaagacctcctgagaagaagtttgactgggctaagaggttgctggctaagtatggatctcaaatctctgtgatatcaattgtggttctattcatctacctgatcgtgacaccatcaaaatccagtgctgcaaaagcaagcaagaagaagcgctaagtatagtagatgtgctgagaaaagccg

SEQ ID NO: 237133 - DNA, 359 bp, Gossypium hirsutum
ttgcaaaaaggcgcttctccttatttcatagacagcatgttgagaaaccaagttcaggatttggtgatcccaagggcttttttgcagaagccaaggcggtccattggttcctcttattcttattctaagcttcccgaggagcccatcaagctctctgttcggaaactggatggctcttcctttgatgttgaagttataaagtcagccaccattgccgacctcaagctggctgttcaacacgtgtttagtcatatgccaaggaaaggtcccggcaagatttcatggccacatgtttggggacatttttgcttgtgctatgatggtcaagaagttgctcacagacactgatcatatcatga

SEQ ID NO: 237134 - DNA, 192 bp, Gossypium hirsutum
ctcacgcgtccgagttctagatcgcgagctagaacgtggacttcatattcggtgatgccgccgccgttttccagagctgcaacatctacatccgtcgaccaatgagcggccaaaagaacaccgacacggcccacgggagaaccgaccagaatgagaatacgggcatagtcatccacaattcacgagtgacag

SEQ ID NO: 237135 - DNA, 215 bp, Gossypium hirsutum
ctctctaaaatctcacttcaaaacagggggggttttttttaaactaaggggcaagttttcgatcgaaaatcaagaatccactgtccgtgaaatcaagcctaataacagaagaatcatgggaggtggtggacctgatgaagatgacaccattaaccagaagtggccgccatggctgaaacctttattgaaagaacaattctttgttcaatgcaagc

SEQ ID NO: 237136 - DNA, 314 bp, Gossypium hirsutum
tttcattttttcgcccacgcgtccggaaaagctagagaggctatttgaagtagtggaagcagtataccctgataagaatttggtcactttcagagagatcgaaggagacctaacggaagagtataagagctttgtaatcacgattcaagtttcgcccaagagcgagggtagtggcagcttagtgcactggactttggaatacgagaagctgcacgatgggattgcgcatcccgagactctgctgcaatttcgtcaagatgtctttaaagacattgacgcccacctcacccaagcaagctaaacagtatcacatg

SEQ ID NO: 237137 - DNA, 330 bp, Gossypium hirsutum
gttaaagggtacatttcaaaattcgagtttcggggcaggtggtgctaccattgctgctggaagattagttgttgacaatggcgtccttaaggcagtttggccacacagtggacattaccgtccgttagaagaaaactttaatgaaagctttaacaacttcatttcatttctgagggagaacaatgtaggtcataacaatgtcaaggttaaaaaaaggtactattctttttgcaaatgaaaagaatgcgctgattattggtgctgataatgcttgtttttattatattcagatgactccggtggatgaggaaggaaacttggctggcaagc

SEQ ID NO: 237138 - DNA, 440 bp, Gossypium hirsutum
gttcaaggaagaggctgaaaaggagattgcagaatatcgagctcaagtggagaaggagtttcagaggaaacttgccgagagcagcggggattcaggtgctaatgtgaaacgccttgagaaagagactgaagcaaagattgaccacctgaaaaatgaggctgcaagaatatcagatgatgttgtccaaatgcttctcaagcatgtaacaactgtaaagaattaggccccttgagatggcaaacattcaatatatgttactgttgttcccctgcatgatgtaatatttgcgttgttgccctcacctggtttagactctggtgagtaaattagaccctttttatcagatacatcagtttgagaacatgtaggacaaattgtgtgcctatctatttatgctggggaaaagagcaataaagttttaataatgtcaatatttttgc

SEQ ID NO: 237139 - DNA, 318 bp, Gossypium hirsutum
tttttggcaggcttttgatgaggctatttgtgagttggtatactttgggtgaggaatcttacaaagatagtacattgatcatgcaacttctccgggacaacctgaccctttggacatctgacatcacggtattccccccccccccacacaataagtttgtgtttgcacacaatcatgaaattctcatgcagctctgctgtctccagacataaaaaaaatctttaaaatgccacatggatatgaaaaatgcctaaagctatattcctgagtgaacttagttgctttcattgacatgactacagttctctaccatgttct

SEQ ID NO: 237140 - DNA, 226 bp, Gossypium hirsutum
atacatttaaagattttccagcatcatcgctggctttcattgacactcttcttgcaattgatccagcggaacgtctgactgccacttctgcactgcgaagtgaattctttatgacagaaccttatgcttgtgaaccttccagcctccccaaatacccacccagcaaagagatggatgcaaaacgacgagacgatgaagctcgaaggctcagagctgctaaataaag

SEQ ID NO: 237141 - DNA, 153 bp, Gossypium hirsutum
ttcatttctattatctcacattttcgtgtcatggcaacaccttctagcatccctcttgcattcaccgttcgacgatgcaaacccgaacttgtcgctccggccaagcctacaccacatgaacaaaaactattatcagacattgatgatcaaaag

SEQ ID NO: 237142 - DNA, 161 bp, Gossypium hirsutum
gtcctcgtttactgctccaaataccggaaaagagaaatcgtctggcgagaaagacagggaagctatgcaggttgatggtcctccggagaagaaaaccgagcctgagccatcatttgagattttgaccaacccagcaagagtggttccagctcaagagaagt

SEQ ID NO: 237143 - DNA, 376 bp, Gossypium hirsutum
gaaaatttagtttatgaaaatcaaactaacgaaatacacactctttctcagtctttaattaattcctcttccgcctgactcagatcagatccgttttctatccacaaacaaagaagcaaattcgtttctttgtttcaagaaaacaaagaaatgtcaaattcgcatagcgatacgatacctcttcacccctcgtcccaatcggacatcgacgagatcgagaatctaatcaatgccagcgtccaatccggtccagccactgtactcccggcccgccctccaagcccacctcgggcctccatcccggtctcttcttcccccttcatccagtccaaaatccctcctccgcctccgcagtcttcatcatcgtccaatcata

SEQ ID NO: 237144 - DNA, 285 bp, Gossypium hirsutum
cccacgttttctatttgacaattcctactgttcagcacctaacagcaaccatgtggactgacgaaggaatggttaagagaattagaggggaagctttcactaccagagtgagcgttcagcttggaaatgagatgatatatgcggctcgtggaatttttaatcgtttgcttcctgatgtttacatcgctagtgattatagaaaacgcttagaggctggaaactcgcctggatatggaatttcactagttgctgaaactacttctggctgctgcatctctgcggata

SEQ ID NO: 237145 - DNA, 307 bp, Gossypium hirsutum
cttgatatggtttagattgtaatggggcttgaggaagagtttggaatcactgtggaagaggacaatgcccaaagcatatcaactgttcacgatgcagccgagcttatcgacaagctctgcggcgagaaaagtgcctagaaacaaaccaaggacctaagtttgggattcatttgccaatttatttgtgaactcatcatgcctatttatttgttcaaatctagtaaaactcataaagtggttggtattttagttaaattatggatttaacgcttttgtgttgtaagtcaagaaaatactatttgatctt

SEQ ID NO: 237146 - DNA, 262 bp, Gossypium hirsutum
tctcttgtggaaatcaaactcaagttcatcgacacctcctcgaagtttgggcacggacggttccagacaacacaggagaaacagaaattctatggtcggctcaaggcataatcttggaaaaaccggtcggaaattcatggttggattttgttttgcattttatcaatttgatgaatgtttgaatttgctgagttggttcagtttttgcgctatagattgttcctagttttgaaccaaatatacccaatatcgtacttgtttt

SEQ ID NO: 237147 - DNA, 345 bp, Gossypium hirsutum
cccacgtgtccgttccgatgatggtggcttgtcacaccgggccttacccttatgctgtcctgtattgccatagccaagtgactgaaaacagggtgtttaaggtatcattggacggtgagaacggagataaggtgaccgcggtggctgtttgtcacaaggatactacgcaatggaaccgtaaccacgtgtcgtttcgtgtgttggggattgagccaggaacgcccggtgtctgccatttcttcccggcggataacttcgttctggttccagacccttgaatttgtagtaattgtctttcctaggatacgagacttgggttgtcataaataataatactcgattcct

SEQ ID NO: 237148 - DNA, 366 bp, Gossypium hirsutum
cccacgtttccgttcacgcgtccgcccacgcgtccggctttgataaaggttcagattattgctcgggacaaaataccgcagacttccgaaaatatatgttatttatgcaaacatttcttagtaagatgagattaaaattttggagtgtcaaacaaataatactgtttgaaaagttcagaattggaatagactgctgctttaaagtatctgtatggatggttacgtcatcacacaaagtatggtactctttcgccacccgagcttgctaattctttgtattatgcatatgtaagtacactagggtataattctttgtttttttggttagtttttttcttttggaacaatgccttgatattgcaatct

SEQ ID NO: 237149 - DNA, 181 bp, Gossypium hirsutum
ctcatggaccaaaactttaccatcttgaggttgctgttggcccattcattgctggtgtaaaagataagtgccataatcatgtttgatgttactgcccggttgacatacaagaatgttcctacatggcatcgggatctttgcagagtgtgtgagaatattgctattgtcttatgtggaaaca

SEQ ID NO: 237150 - DNA, 390 bp, Gossypium hirsutum
gaggtgtttgcaggattaaagggtcaccattgtttccaacatgatgcttaataacaagtttttgttcctatgcttagccttattattgggtttgatgcaaaatcatccacagctatttcgaaatgtatgatcatgggtgcagcagcttcaactgtttactacaaccttaagctaaggcatcctacactggatatgcctatcattgattatgatttggctcttcttatccagccaatgctcatgatgggaattagcattggagtcacttttaatgtgctctttgcagattggatggtcacagttttacttattattctctttctaggaacatcaacaaaggcattcttcaagggtgtagaaacgtggaaaaaggaaaccatattgaaaaag

SEQ ID NO: 237151 - DNA, 477 bp, Gossypium hirsutum
cccactcttccgcccacgcgtccgcccacgcgtccgcaaccttccctgatcagtctgcaatggttttcaatccttctggcttgtatttccttgttcagttggaccatttttgcagttagtccagacgctccattgacattggattactacaaatcaacatcccccactgtgtttgagattgcgaggaaagaaatggagtgtgaagtaaactctgatcctcgaaatgcagctttggttcttcggttgcatttccatgactgctttgttcagggttgtgatgggtcagttttgcttgatgatacaatcagtttacaaggagaaaagaaagcttcggcaaatgtgaattctttaaaaggtttcgaaatcattgacaggattaagaacaagcttgaatctgagtgtcctgggactgtttcctgtgctgatatcctcaccgttgctgctagagatgcagtgattctggtgggtggaccttac

SEQ ID NO: 237152 - DNA, 501 bp, Gossypium hirsutum
  unsure (1)..(501): unsure at all n locations
gtctgtttcttccttatcacactcatgttacaactgagcttgttggtactttgggttatattcctccagaatatgggcaagcatgggtagccactttgagaggggatgtatacagttttggggttgtcatgcttgagctgctcactggcaaaaggcctgttgatatgtctaggccaaaaacatcaagagagttggtgtcctgggtgcagagattgaggagcgagggcaagcaagatgaagtcttcgatccactcctgaaaggaaaaggttctgatgaagagatgctgcaggtgttggatgtggcctgcctgtgcatcaaccagaatcctttcaagaggccaactatccaggaagttgttgagtggctcacgggtgttggaacaatcaatagaaaccaaaataaagattcgtgaaaagtgctgttcattgctttttacgaaacagatacgtatacctgcacanaatgtctgaatcagtttatgcatacttttgcttttttta

SEQ ID NO: 237153 - DNA, 376 bp, Gossypium hirsutum
ggctttcctttttttttttttttgggagaaagcttggagttttggtttggttcttttgtggttcagcactttaagctgctatctggttaatgcagctgacgataaaaatggtggttttggagcttctttcatcttcggtgattctctggtggatgctggtaataataactatttaccaacgttgtctagggcaaatattccaccaaatggaattgattttaaagcttccggtggaaaccctactggcagatataccaatggtagaaccattggtgacattgcaggagaagagttgggagtaccaaattatgcagttccatatcttgctccaaattctactgggaaagctatactttatggtgtaaattatgcatca

SEQ ID NO: 237154 - DNA, 442 bp, Gossypium hirsutum
ggatcttataaccttttctcttgaggccaaacgtgcagcaacttgggatgaggaatttgaccatctgaggttctcttacaatgggaacgtaattgtcgtaccggaaggccatttatcatcatggaaatccccggaaagtgaccttacagtggagagaacatctgacaagaatagtgtcttagtgactttacctgatattgctgagatttcagtaaatgtggtgccggtgaccagggaagatgatcgtattcataactaccaaataccctctgacgactgttttgctcacttagagctgcaattcaagttctacggtttatcttcgaaagttgaaggagtacttggtaggacttatcagccggatttcatgaaccctgcaaaaccaggcacggcaatgccaatagttggaggagaagacaaatatcgaacgtcatcacttctc

SEQ ID NO: 237155 - DNA, 459 bp, Gossypium hirsutum
gaagttgtatgaggaatttaacctcaaggagcttattgaagagcttactaacttggcaggagctttcaatcttgcagattttgtgccttttttgggtgcttttgacttacagggactcatagcccgtacaaggacacttggtgaaaaacttcacgaagcccttgagacgattattaacgaccatcagcaacaaaagcaagatgattttgttggtacaatgcttacagaattaaataagcaaatgaatcccgatggtgatataatggatcgaaatagcatcaaagccataacaatagatatgattgtgggttccttggacacctcagctgcaacattggagtgggcattatcagagctcataaggcatcctatggtaatgctgaaattccagcaagagttagaaagtgttatcgggaagagaatggtggaggaaaatgatttaccaaaattggagtacct

SEQ ID NO: 237156 - DNA, 436 bp, Gossypium hirsutum
cgagttgttggagagactcaaggaagaaatccaaagactaggccagatccaatcagatggttcttacaaggtcacattcggggtgctatttaatgatgatcgctgagcaaacatctctgaagcactagttgggacactaagagcagcaaagaaacgaaaagttgttgcatatgatggtgaactactgctgcaaggagttcatgacaatgtggaaatcattctcaaagctacaacaccagcagcagcccagagtagcaactaatgcagttctaaacaaataattgcaattatagttttgcagcaaaagtttgatgatattctatgtaattactcaatgcttatcatgtttgaaagcttcttcagcataagtgcataaccgtatttttgaatactcttttatgaaattttccagagtgtactacacccagatttgtat

SEQ ID NO: 237157 - DNA, 347 bp, Gossypium hirsutum
ccctcttcgtccgaacgagtatgtcctgacaagccggaattttattcgtactgtgacagatattcgtggtgaatggttagttgatatagcaccacattattatgatctcgaaaacttcccacagtgtgaggcaaagcgagtcctcgaaaagctttacagaaaaaaggagaaggatcgggaggagagtcgaaacaggagatgaagtgctacgaccatacaagttgttttgacatgaatttttcttcaacggtgctatttgggagttattacgtagtatgttagttgataaattggaagaagcaaaaatttcttgtaacatcatgtggaacttcttcccctagctatct

SEQ ID NO: 237158 - DNA, 393 bp, Gossypium hirsutum
atcacagacaaaatgaccaagatcagaacatgttttttgcgatcacgtcattcaatggagttggatcaggtagcatttccccaagttgccatggtggaggctgcaaaggaaaatctagaaaaaggccgtcgccattctttttcatttagaggggaaataaggaccagcagccaatcagctccacttttttctgagaataaatctgacccttgtgagaaaattcaaccgttatcagcacgaaagtttagctcatatgtattaccgacaccagttgctacagaaagttctattggattaggtaatccagctccccaatcttcaaaagcaagtttgaatgagcaatcaaacaattcatggcattcatcttcacttgaacataagaaacatgagatg

SEQ ID NO: 237159 - DNA, 425 bp, Gossypium hirsutum
cccacttctttgcccacgcgtccgcccacgcgtccgcccacgcgtccttccacgcgttctcgaacagttaggctgaaccaccatacactaaagcttctcaagtattggacatggcaattcgttgtcatccgcccagtgtgttctgtcttgatgataaccctgcaacttcttcagttttatccatcttggttgagctggacattcacaatcatcctcaatgtgtctgtttcattagcattatactctttggtagccttttaccatgtctttgccaaagagttggaacctcataagccacttgcgaagttcttgtgcatcaagggaattgctttcttctgcttttggcagggagtggtgcttgacatacttgttgctgtgggcatcattcgagcaaatcatttctggttggatgtggagcaccttga

SEQ ID NO: 237160 - DNA, 418 bp, Gossypium hirsutum
cccactcgttcggtcctactccgttgtcgcaaagaagatttggatttggtggagtctgttctggagtcagcaaaggaggaatatgcttctaaagtgaatgttcatccaccagagataatcgttgatgatgtccatcttccccctggcccttctcatcatcatggttttttccatcatcatgctgaggctcatggacctttctgctctggaggtgtagtcatagcatctcgagatggaaaaattgtgtttgagaataccctggatgcacggttggatgttgcattcaataagaaacttccagagatccgcaagtggctttttggtcaggttgctgcttgaaggctgaagatggtattgtttttctcagcagcttttgtcatcggccatagagcatagtgattaagttatttgttccatg

SEQ ID NO: 237161 - DNA, 255 bp, Gossypium hirsutum
ccctcgtgaccgctatgtttcgccatatgcagtataacatgtattctttaaaacgactggatattttgaagcgcatggtattgttttgcaaggcagctgttgaggttccttggtatgttccatgtggaggtgtctgctatggagatggaaatctggttttcattgctaatgattggcataccgccttgttgccagtctacttgaaggctaattatcgagacaatggtttgatgtccttcactagatccattctcg

SEQ ID NO: 237162 - DNA, 450 bp, Gossypium hirsutum
aaaacttttgtattgatatttctcaaggtcacatgccaaatcatgtttacgaggccaagctcgagtctgttgcacaggatgagaaatatttgccttgctggagtgtacttgacattggcactggcaatggtctactccttcaagaactagctaagcaggggttcacggatttgactggtattgattatagcgaggttgcaattgacttcgctcgaagtcatgctgacagagatggattttcaagcatcaagtttctggttgatgatattcttgagacaaagttggaaagacaatttcaacttgtcatggataaggggactcttgatgccattggcttgcatcctgatggacctatcaaaaggatgatgtactgggactcagtctcgaagttggttgccccaggtggagtgttagtgattacatcttgcaaccatacaaaagatgaattgg

SEQ ID NO: 237163 - DNA, 435 bp, Gossypium hirsutum
cccacgctttcgcccacgcgtccgcccacgcgtccggaccaaccatctcaaagtgttgaagaaataatgcgtatcatacaagaggctaagacgacaacagccgaaggagccaaagttggtgagcaagctgctgccggttcatccgatcctgatgatgtggaggcagatttagaatctgaaatcgatgtcagtggtgactttgaagctcctatgtgagaacccgatgttaactgcttcaacaggatttgtgcatcgaggtttggagtgttatttggattacagtttatatatatggtttttatcgtactgggaaaatgttgtacagcagacattaacactggatcggtgttgccttgctttgtattaccttggtttagtgtctcatgttgtacatttcatactttgtgaagcatctttcagaaatgatttcaaagc

SEQ ID NO: 237164 - DNA, 316 bp, Gossypium hirsutum
cccacgctttcggcgtgtaattcgtacgtcggaacttgtgcttatatgagtccggagcggttcgatcccgacgctaacggtggtaactacgacggcttccttggtgatatatggagtttgggattaactttaatggaactttacgtgggtcacttcccgtttctacaggccggtcaaagacccgattgggctacacttatgtgcgccatatgtttcggcgatccaccgtctttgccgccgggtgcttccgatgagttcagaaatttcatggagtgttgtttgcaaaaggaatctagtaaaagatggacagcttctc

SEQ ID NO: 237165 - DNA, 436 bp, Gossypium hirsutum
cttctgttttccttgttctcttctacattcagcgaaggggtgctctgagatcacataccaaaatggtgaaggccgttgccgtccttggcagcagagaagcagttccgcacagaggtcagcacaattgggacgatccagcatgttaatctagtgcggcttcgagggttctgctctgaaggtataaggaagctgttggtgtatgattacatgccaaatggttctttggatgcccatcttttccatgaagagaaatctaaagctctaacgtggaaaacaaggtaccagattgcacttggtacggctagaggcttagcttatcttcatgagaagtgcagagattgtattattcactgtgacatcaagccagagaatattctcttggatgctgaactctgtcccaaagtcgcagattttggcttggcaaagcttatcgggc

SEQ ID NO: 237166 - DNA, 417 bp, Gossypium hirsutum
gctgttctagaacttctagggaaaactgggactgtaacaagcttctggatggaccatattaagacccattgctatgctacatattcatctgtagaagaagcaatagagacaagaaatgctgtttacaaccttcaatggccacctaatggtggacgcctattggtggctgactttgttgatccccaggaagttaaaacccggcttgatgctccaccacagactccaactactcctgggacttctggttctactgctcctcaagctcaacctgcttctcagccccagccctctccacgtcagcaggtttctagacagcagcatccaccaccttctgcacttcctccaccgcctttgtctaacccttcaccagttagagaacggctccctcttcctctgccaccggcagagaaagtagat

SEQ ID NO: 237167 - DNA, 445 bp, Gossypium hirsutum
ctaacttttctttatccttaacttttgctaaccgcaaaccctgttacttcaacaccggagttatggtaatcgaccttgatcgatggagagagggagactacaccacaaagattgaagaatggatggagcttcagaaaagaataaggatttacgaattgggttctttgccaccatttttgttagttttcgccggaaatatagtgccggttgatcatagatggaaccaacatgggctcgggggagataattttagaggtttgtgcagagatttgcatcctggaccggttagccttttgcattggagtggaaaagggaaaccttgggcgaggcttgatgctaacagaccctgccctttggacgctttgtgggcaccatatgatctcctgcaaactccattcgctttagattcttgattgaattgaaagaaacgggaaatgcttgttaa

SEQ ID NO: 237168 - DNA, 363 bp, Gossypium hirsutum
agcgttgtttaggtgttctcccgcattgaccacaagtttgatctcatgtatgccaagcgtgcctttgttcactggtacgtgggtgagggtatggaagaaggagaattctcggaagctcgtgaggaccttgctgcacttgagaaggattatgaagaagtcggtgctgagtcaggcgagggtgatgaggaaggtgaagatgagtactaaataagtaatgtttgagtggagggcttgcattttgctacccaatgatttgtttccttttatcgtgtgtttttgcttattctattgtgtgaacttcgactcttctaagctttgttcaagactatatggactgcaatagatttgacgagtagttcggct

SEQ ID NO: 237169 - DNA, 438 bp, Gossypium hirsutum
ctttctttcacaagctctgaaaaaagtaagaaaagcagagaagagaagagaagagaagaggttttgtcaatttgaaacaatggcgacgacagggcagccaaaacgacaaggacaacagcagcagcagcagcagcaacaacaaaataaaacgacggagaagagaaagccagtgtttgtgaaagtagatcagctaaaaccagggaccaaaggccacaccttagtcgccaaggtattgtcctctaacatggtccttcaaaagggtcgagccgcttctcgaaatctccgccaaacccgcatctctgagtgccttgttggagacgagaccggcactgtcctcttcactgctcgtaatgaacaagttgacttgatgaagcccgatgacactgtaattcttcgtaatgcgaagattgatatgtttaagggttctatgaggctggc

SEQ ID NO: 237170 - DNA, 437 bp, Gossypium hirsutum
gtgtgatcttatagctagcatgtcaccactattcttccaaacaacaacttttatcagatagttttctttttcttcttctcttgtcttttattacagtcagacactccgtacaaaagcaaaaacatggcatcatcttcttcttctgaactaacccttgattgtaaacctcatggccattttgcggcgccgtccaagtgttacgcagaccagcagcagattgttgttgttaatcatacattgaagcttgaagactacctttctcgtctcgaggaagaacgccttaagatcgatgctttcaaacgtgaacttcccctttgcatgcaacttctcaccaatgctttggagtcatcaagacaacaactacaggcataccgagcgaatcaaggaccaaaaccagttcttgaagaattcatgcccctcaaaacctcagtgtcgga

SEQ ID NO: 237171 - DNA, 437 bp, Gossypium hirsutum
cttattttctaatgaatcaagatgatctcctccatgcttttactttccttccaagggatctcaacttcattgattatactagcaatccgggttggaaacagaggggagagataaaccgaattgttgtagacccccaacttatattataagagcaataccccaattaactatgatgttgaaactcgaaaaccagacgctttcgagatttttggaggttcaccatgggtgattctttcaagaccattcatggagttttgcatctatggatgggataacattccaagaaagctattaatgtatttcaccaatgtagcttaccctcttgaaacctatttccacacagtgatttgcaattcatttgagtttcaaaacacaacattgagcaatgatttaaggtacgacattattccgaaatcccctaagcccaagattttaaa

SEQ ID NO: 237172 - DNA, 437 bp, Gossypium hirsutum
cccacgcttttggcggccctttttttcctctaccaggtgattttagctttgtgtgagttcctttaagcaattagccaagatgcagaacgaagagggtcaaaacatggatctttacatccccaggaagtgttccgccactaacaggctcatcacctctaaggatcacgcttccgtccaaatcaacgtgggacacttggatgagcttggcagatacactggcacattctccacttttgctctttgtggatttgtccgtgcccagggtgatgctgacagtgctctcgacaggctttggcagaagaagaaagctgaagtccgacagcagtagttggatacctttttaccctagtctatctccgagcttgggaatgaaaaatctcatggcagtgactattatgttctaggtcttttcaggttaaactatgtcaaatttatat

SEQ ID NO: 237173 - DNA, 384 bp, Gossypium hirsutum
gaatgatcttatcaatcctgaggtgaagatatcgatgggggaaaactctcctgatgatccccgacaaaggaagccggacataaccaaagcaaaagaggtgctcggatgggaaccaaaggtgaagttgcgtgacggacttccacttatggaggaggatttccgactgaggctcggggttccaaagaagaactgattgaaagctattttgcagcaacagaagttacaaatataaagtgctattgcttcttttcctttttataatcaaattccaatatgcttatcttcaatgcataataatggcagcaattgagttattttggattttgtttttaatgttttttgaacgatatttgagttaaatggaacacaatttttgcctttcat

SEQ ID NO: 237174 - DNA, 405 bp, Gossypium hirsutum
tcgttttctaaaaaaaaaaaaaaaatctatgttaaatggctgtctccatttctgtctcatcggcgctcgtcttcctcgtccgctcagatcaagcctcgtcaactcgtactctaacttttcagcggtccggtcaagcgccgactcagccatggcagcactcaactcagtccgagtagccgcggttcagatgacctccgtcaacgatctcgcctccaatttctccacttgttctcgcctcgtcaaagaagcagcttcagctggggcaaaaatgatttgtttccctgaaagtttctcctttctgggtcccaagtctgaggatagtcttttggttgcagaagctttagatggaccaattatgcaaaaatattgctctttagcaagagaatatagcatttggttgtccct

SEQ ID NO: 237175 - DNA, 315 bp, Gossypium hirsutum
ctcgattctattctcatccaagtgcacatgtgcgcgctctcaggccatttgtccgtcgcttttttgtgcatatagcctcaatcaattcaaaatccaaggtggaaataaacggcatctgtggtgcctcttaccaggtcttcaatataggtgccatcaactggcaaactgatatcgataagtgctcaacacgggaagtttatagtcagctagcaagaggaatgactatactgtggctcgacactgcagccaaagaattaggatcgtaatatttccatatcacatccattaactttcggattatcaggataaataccc

SEQ ID NO: 237176 - DNA, 343 bp, Gossypium hirsutum
gtgatttttgccgaatgcattcttcctgattaccccgaccgtagccttgccacgaagttggttgtccatattgattgcattatgttggctcacaaccctggtgggaaagagaggaccgcaaaggaattcgaggcactcgcaaagggtgcgggatttcaaggcttccaaattacatgttccgcttttggcaccaacatcatggagtttctcaaaagtgtttgaatcttacatgcttttggattctgaagcttggtgattgttgtctcaaaggtggattttctggaattacatactttttgtctgacagaaaacaataaagaatgaaatttcatggcttttacgt

SEQ ID NO: 237177 - DNA, 465 bp, Gossypium hirsutum
ggagccttatgttcgacctggtaaatgtctttgaagtgggggttccttaacttcttttatatgccaacccatcggatccattgaatggagaagctgctgctcttatgatgcgtgatcgtgctgcctatgaacaaagagttaaagagtattgtgagaaatatgccaaacccgaagacattggagcaaaggcggaagagaagtcgagcgacgaagagctgagtgaagatgaatatgctgcctctgatgatgaggaaatcgccggaaaacccgatccttaagccaacataagattaccctttttttcctagagaaaaaattgtgtgttgtacattgatattttcaggtccaggaaaatttgaagttgagcaaaaactatggggggacttaatggaaaaaatttccaaccccttggttttctgtctattttccatggatgttgtgtaaattaaaatcaactgtttactt

SEQ ID NO: 237178 - DNA, 376 bp, Gossypium hirsutum
  unsure (1)..(376): unsure at all n locations
agatgctataacgaccaaacaaaagttggngcaaaaaggtgttacaattacaaggagtttttgagtccctcacccccctcaaaaacccagccagaaaggaaaatacaaacacctcttctccttgctcaggagcatcgaagccagcttacaaatggcagcgaagagaatagaagctcaggctttattgatactgatgcctgccttgctgcggatgtcccttgcagctgtttacaaggttggagactctgctggctggaccaccattggcaatattgactacaaacagcgggctgcaacaaagaccttccaagccggtgacgtgattcttttcgaggacaaagctcagctacacaatgtgatgcgggtaacccattcg

SEQ ID NO: 237179 - DNA, 310 bp, Gossypium hirsutum
ggaagattatagagaaccaaacagcatgctcacctgccagggaggcctacaggaagcagttggctgagaccttgaacatgaaccgcacccgaatcttggctttcaagaacaagccaccagcacccgtcgaactcttcccttccgagcactcaacggcttcagctcatccgaccaaatccttaaagcctagaagacatattccccagagctctgagagaacattggatgctcctgatctcgtcgacgatttttacttgaatttattggattggggcagcagcaatgtactagcaatagcactcggaaacac

SEQ ID NO: 237180 - DNA, 335 bp, Gossypium hirsutum
cccacgtgaacgcccacgcgtccggcggtgtacagataggggaatctttaaacaatacttttggggcatgggacaatgccaagaagtacatggaggccggtgtgtccgagcatgcaaggaccctaggtccaaagggacccgatcctcacaaggcagctgtcatcggtgacactgttggagaccctctcaaggatacctgcggtccatcacttaacattcttatcaagcttatggcaggcgagtcacttgtgtttgctcccttctttgccacacacgggggtctactcttcaagatcttttagggaatggatggctggaaacgcacggtggaaggc

SEQ ID NO: 237181 - DNA, 404 bp, Gossypium hirsutum
cagactttccaaaggaatatatatatgagccgtggacagcgccactaagcgtgcaaactaaagcaaagtgcattattggaagagattatcccaaaccagtggttttgcatgatactgcaagcaatgaatgcagaaagaaaatggggcaagcttatgcacttaaccagagactcaatggacgtgtaagtgaagaatatttaaggaagttgagaagaaaatttgatgaagatgaagataagcaggaacccaaacccagaaggcagagacaaaagctgataaaatgagctgcaaaatctactttttcatccatccatatctttttttcttttttaaactataacttgataacttagaacttgttattgtgttacatgtttggcacgtaatataaattgataacttgg

SEQ ID NO: 237182 - DNA, 354 bp, Gossypium hirsutum
  unsure (1)..(354): unsure at all n locations
ctctaaattttgaaaccctaaaaaaggggctcgccaaaagggggcgttttgaaacgatctttcgggacgcacgacagngaaaagatgagtagccgcaccagcaggactctttacgtaggaaatcttcccggtgatgatcgcgagagggaagttgaagacttgctttataagtatggtcctatagctcaaattgactagaagattccaccaaggcctacaggttatgcatatgaagagactgaagaagctcgagatgctgaagatgccattcgtggacgcgatggatatgactttggagggcatcggttacgggctgaacttgctcatggaggacgtgggcgctcatccatagat

SEQ ID NO: 237183 - DNA, 474 bp, Gossypium hirsutum
ccttatcagagctcgggtactctcatcttcagccggaggcatggtgaacgtacctaagaggaagaagacctactgcaagagcaaggagtgcaggaagcacactttgcacaaggttacacagtacaagaagggcaaagatagtttggctgctcaagggaagcgccgttacgatcgcaaacaatcaggttatggtggtcagaccaaaccagtgttccacaagaaggccaagaccaccaagaagattgtgctgaggctgcaatgccagggttgcaagcatgtatcccaacatccaatcaagaggtgcaagcattttgaaattggtggcgacaagaaggggaagggaacatctcttttctaaatggtgtttatttatttcatgtcatgtcatgttgttgggaaccttttaagacagtatggaatttttgtttttctaatgtaatgttttccgagggatatggtgttctttaagcactt

SEQ ID NO: 237184 - DNA, 351 bp, Gossypium hirsutum
cccactttttcgcccacgcgtccgcccacccctccgcgcgggcgttctacagaccctgtggggctgctgaggcaattgaaaagattctcacccacaacagcaagggaatcaaattccaaattctttcgaacccagaatttcttgctgagggaactgcaattcaagatctttttaatcctgatcgtgttcttatcggaggccgggaaaccccagaaggcaataaggctgtccaagcattgaaggaggtttatgctcattgggttcctgaggagagaattcttaccaccaatctttggtctgcagagctttccaagcttgctgccaatgctttcttggctcagaggatctcat

SEQ ID NO: 237185 - DNA, 413 bp, Gossypium hirsutum
gcacattattgttttgatgcaaacttcacagaacagatcagcgagaacatttatggattactcttccgtaactcaagccatggatggtatatgtggactatatgaaaggaaacttaaggagctaaatccagcaacaagaaacatcacatatgacattgctgatctttacaattttattgatggccttgcagatatgagtgcccttgtctatgatcacagtattcaagcatatttgccttatgacaggcaatggattaaacagaaagtgtttcaacaccttaaaaagttggcacattaaacctttttcagtaaaagagaatttgattagggaaaaaacatgtaccaagtgcagaagacctcatgtgataattgtgctgttggttccctcactttttagaaccattgcagctttc

SEQ ID NO: 237186 - DNA, 357 bp, Gossypium hirsutum
  unsure (1)..(357): unsure at all n locations
gngttgtgtccaagatgatgaaactcgcaggccatcgatgggttaggtagttcagatcctagagggcgttttggatgtgaacctgcctccaattccgaggtttctacaagtgcttggggacaattcggagcatgtagtcttcttcacagagtcatcttcaaaccagagttcacagacaccgagctacacctcaactgcgtcttctcaggcgaagagtaacacatcatcaatgagttcatgaatcttgaaaaacattttccggaaataagttacggtagtttggtttcagcatgtgtaaatatgttgtaatttcagagctgtttttacattattttcctaatacgcaagccattccta

SEQ ID NO: 237187 - DNA, 412 bp, Gossypium hirsutum
  unsure (1)..(412): unsure at all n locations
cgatnacttgtgagctgagagggatatcctcactaaagggggtcattttttaattgttcagcttagatactctttccagacaaagtctaagctttatttaatcctggactttataaatggaggccatctcttctttcacctatatcgccaagggatattcagtgaggatcaagcaaggttttatactgctgagattgtatctgctgtttcacatcttcactactgcggcatcgtgcatcgtgatcttaaacctgaaaatattcttgtggatgctgatggacatgttatgcttacggatttcggactggccaaggaaattgatgaatcgagccgatcgaattcaatgtgcgggacaacagagtacatggctccagaaattttacagtccaaaggtcacaataaagatgcagat

SEQ ID NO: 237188 - DNA, 463 bp, Gossypium hirsutum
ttttctatgacatcacaagcactacattttaccgaatgctgtcagcaagaaggtacattttagtccccagttacagactgatcctaggcaaaattatctccatgctaaatctcgtcttcagccttcagatactcctgcatcaaaaactctttcttggcacttatcctcagaaaccaagtctactttgaaagggacttcacaaactttagcaagcaatgaaatctcaaaacctcctgcgcccgcttctgaggttttccagttagtggagaatggagacaatgcaagggcaaagtcttcagcagcactttttcctgcttctaatgcacttgtcccatcactgggtatcacacatagggagttggagggttccaaacctttgacagcattcaggtcatttgataacccaaagcgcgacattatacgtgcacctgttaggagcaaaagtgtgctgtcatctttcttt

SEQ ID NO: 237189 - DNA, 434 bp, Gossypium hirsutum
tgaggttttgtcttgaagaaaaggaaagggaagctgggctgaagttgcaaaaagctcaggagcttggaaaagcagaactagctgcagcgattgcaaacgagaaagcagcacagattgaaaaattggcagaagcaaatcttaatataaatgccttatgtatggcattttatgcacgatctgaagaggcgcacaaaagtcattctgttcacaagctagctctgggagcacttgctctagaggatgcgctttctaaaggattaccaatccaaaaagaaatagatgctctgcgcacctaccttgaaggtattgaaaaggattcagtgttggatttggttctttcgtctcttccagaagaaacacggtaccatggtaccaacactgtactacagttgaatcaaaagttcaatgcattgaaagggaccctaaggcacttc

SEQ ID NO: 237190 - DNA, 451 bp, Gossypium hirsutum
cccatgcttccgcttttctcatgaaggccggaaaagctttgcatcgtaagcgggcggagatcagagttcagttcagacacgttccaggtaatttgtacaagcgtaattttggaactgatttggacaaggctacaaatgagcttgtgctgcgtgtgcaacctgatgaagccatttatctgaagatcaataacaaagttcctggtcttggaatgagattagaccgcagtgaccttaatttgctttatcgagccaggtatccaacagaaatcccagatgcatatgagaggttgctcttagatgctatagcaggggagcgaaggttgttcattagaagcgatgagctcgacgctgcttggtcactgtttacgccgttgttgaaagaacttgaagcaaaaaagatttctccagaactatacccttatgggagcagaggacccgtcggagcacatta

SEQ ID NO: 237191 - DNA, 457 bp, Gossypium hirsutum
cccacgcttccgcccacgcgtccgcccacgcgtccgggagatcaatggaggggaatgaagaagatgttagattgggagccaacaagttcccagagaggcaacctattgggacagcagctcagtcccaagatgataaggattacactgagccaccaccagcacccttgtttgagcctagtgagttgacctcatggtctttttaccgagccggaatcgctgagttcgttgctactttccttttcttgtatatctcggtattgactgtgatgggagttgttaaggacaaaaccaagtgtacaactgttgggattcaagggattgcttgggcttttggtggtatgatctttgcacttgtttactgcactgctggtatctcaggtggtcatatcaatccagcggtgacatttgggctgttcttgggtaggaaattgtcgttgacaagggcaatatactacat

SEQ ID NO: 237192 - DNA, 483 bp, Gossypium hirsutum
cgctgcacttttcacaccttcttcacttcagcagagaaaacagaggcaggcagccatggcaaggatcaaggtgcacgagttaaggaacaaatcaaagacagagctgttgagtcagctcaaggatttaaaagccgaactttctctccttcgtgttgccaaggtcactggtggtgcccccaataagctctccaagattaaggtggtgaggctatccattgcacaagtattgacggtgatatcccaaaaacagaaggctgctttgagggaagcttataagaacaagaagtttttgcctcttgatctccgtcccaagaagaccagagctattcgccgccgccttaccaagcaccagcaatctttgaaaaccgagcgggagaaaaagaaggagatgtactttccgatgaggaagtatgccattaaggtataagcttgaaatttgacttaggatggatacctttatgttagtttcaaagtgactactcg

SEQ ID NO: 237193 - DNA, 445 bp, Gossypium hirsutum
gagattattgttttgttttgttttggttttaggaatgggggactccattttgagaacattagattatgaaagcaaaggatttgtagcagtggggctgctttgtttgatgatgatgatgattcaaaagggttatgcaagagaattccaagtgaattggggtcttcatagtggctccaatgctcaaacttacaatcaatgggctgaacacaacagatttcagattggtgactcacttgtgtttaactacgcaccaaaagaagattcagtgctatatgtgagtgaggatgcctacaagaactgcaatgtagagtcaccctggtccaaatacaccgatggccacgctgttttcttattggatcattcagggccataccatttcatcagtggtaccaaaggcaattgccaaaagaacgagaagttagtggtcgtcgtcttagctgatcgg

SEQ ID NO: 237194 - DNA, 406 bp, Gossypium hirsutum
  unsure (1)..(406): unsure at all n locations
agactantcatggcgaacgccggtcccggaacgaatggatctcagttctttatttgtaccgctaagaccgagtggctcgatgggatgcatgtggtgtttggtcaagttgttgaaggtatggatgtggttaaagccattgaaaaagttgggtctagcagtggaaggactgctaagcctgtcgttattgcagattgtggacagctttgttaagaacaagaacaagaacaagaaatggaataatgttgactctggtctatgaatggtgattcatgtctgaaatttatcatttttatgtgttttcttttgctggttactggatttggcttaggttgttctctaagaacatgactgccataaataatgtacgctatttatcatcatatttgaccatataattgagttatta

SEQ ID NO: 237195 - DNA, 296 bp, Gossypium hirsutum
  unsure (1)..(296): unsure at all n locations
tgggtggtgggcggggggtaggtaggtactggtgacgggtttatatacangtttggctgcaaaaaaaaaaaaacacacacgatgtctcgcgtgtacgtggtcaacctatacccaccagtatcagagcggcatcttgaagatgagtaacgtgtctctgcagttattcggagtgtatgggttgctcggaggcctcctggttatgctttcattgactctgatgatcacagagatgctgaggatgccattcgtgaattagatggcaagaatggctggagagttgagctttctcataactc

SEQ ID NO: 237196 - DNA, 289 bp, Gossypium hirsutum
cccacgtggtcttaaaagtccagaattagggttccgatggcggcttttcttagcatattccctgcaactccgacatcttttgggtccctttgtccttcaattagatcacagcttttcgttcaaaatatattccccctgttattgttcttaatttcaagcaacaatggcggagcacttggcctcaatcttcggtacggagaaggaccgcgtgaattgccccttctatttcaagattggagcatgccggcacggggacaggtgttcacggctccacaaccggccgacgatc

SEQ ID NO: 237197 - DNA, 351 bp, Gossypium hirsutum
agaaagctcgtccacgtgatcgacctgcgcgggcaattcctgctccagaagcaaatgctgagcttcaagccaaccttgatagacgacggttaataacacatgcaaatgccaaaagcaagagtgagaaatttccacctccacaccaagatggaactcttggttatcctttgggttctgcacatccgatagatcctggttatgatccacccgatgttccgtttagtacaagtttctcatattcaaataaagcaccaatccagacatggtctggccctttgatcgactcttctggggctggtgctcctaggagaaagaagcacatgtcaggtgatggtcattcacattcaaagt

SEQ ID NO: 237198 - DNA, 465 bp, Gossypium hirsutum
gtcactttcagcaaacatcgttggtcaggtaatttaatatgctatttcataatccacaatgctttggctacttcaaactgatactttccctactaaatttgaaggctgcggttctgaaagggtatccatcggagataacgttggtttccttctattgcctctttgggaccattcaatctgcattggttactttgatttttgaaagagaccccaacgcttggatgttgagtccagatatcgagctcatttctgtggtctactcagctttatttggaaatgtggtaacattcggcgtgcaagcatggtgcatacggcgtaaagggccggtctttgtggccatgttcaagcccttaagtattgctattgctgccttcttggggttcattttccttggtgaaacgctttatattggcagtattgtgggagcagccataattgtaacgggcttttatggggtgatatggg

SEQ ID NO: 237199 - DNA, 452 bp, Gossypium hirsutum
atcattttgtagtcaaaaaagtgaagctaggagacaggataacagcacttcaacaaattgtgtcgccatttggaaagactgatacggcctctgttttactagaagcaattggatacatcaactttctacaagaacaagtgcagttactgagtaatccttacatgaagcccaactctcataaggatccatggggcagcttggatataaaagagcagaaaggagatattaaggttgatctaaggagcagaggtttatgtttagttccaatatcttgtaccccaaaagtttaccatgaaaacactgcttcagattactggagcccaacatatagaggatgtttgtatagatgaagaattaaatctcatgctcgctttgacacgcacaaacacacgtacgtatatttatatgtatgtattacttttaaggaaagcaattggaatcattttgtagtc

SEQ ID NO: 237200 - DNA, 221 bp, Gossypium hirsutum
cccacgcgtccggccagactcaattgtggtaacccgggattcaccgttaaagaagaaaacggagggattagctttggttggatgggccgaactctcaccgtcgcatcagcctggcgttaacttcacctttttctctctaatattggtattaattgctagaagaaaaagcgaacaaaattccagcaaacccaaataataaaaacttgtgtttggattcctcg

SEQ ID NO: 237201 - DNA, 429 bp, Gossypium hirsutum
caaaaagaaaagtaatcatttttttttcttattttgtagaaaatggttgaacttgattggaaagcaaagatggtttcttccgatattccaaagaaatctccaaagctctctaacaaactccaagtttccattccgacgccgtttcgtttctccaatatgtcttctccgctctcgacttcaccttcggcgtccaaagcttatgattattatctccggttaccggagctgaggaagttatgggagacacaagagtttcccgcttggaaaaacgaggtcgttttgaagccggctttgcacgctttggagattacgttccggttcatttcgatcgttttgtccgatcctagaccgtatttgaaccgtcgggagtggacgcgtcgactccagtcgcttaccacgagtcagatcgaactcatcgctatgttatgc

SEQ ID NO: 237202 - DNA, 320 bp, Gossypium hirsutum
ccttgacaggagtgtatggattctggaagcatgtttccaaccttgaacgccgtgagagtcgtcgttaccttgagatgttttatgctcttaagtaccgtaagctggctgaatcagttccattggcagaggagtaaattgaagctgttaaataacattgggccggtttttcttggagaataatattctgttttgtaatttcaattggagaagctcctttgtatttcatcttgtcttttccttttccttttttcgccggcattgtttgaacatggggttgtgcgcccgtcaattccagttaaatatggtgacttttgtttttc

SEQ ID NO: 237203 - DNA, 255 bp, Gossypium hirsutum
atgaaatgagccgatttggagctgcagagctccatgccgatgctgccatcattggtggaactgcatctcaagaagtcattaagcttatgacaaaacaggtagttccaatgactggcacgtctgcattcaatgcgattgatcacaagtcccaattgttgaatctgtgttagagaacttgacgcaacgcagttgtttgaagcccaacggcactattcatctcatctggttcaaactacctcatttaatgtcgatttc

SEQ ID NO: 237204 - DNA, 265 bp, Gossypium hirsutum
gggatgacccttttcatatgagagagcagtagcttggaaagtgttgaacgaagaagagaatgctcattgtatctgctttatgtttgtcaactggtcttttgtctaaaactctcaccccaaaaaggggagacaaattatcctatcctgttttgttggcttgatgtttatctatctgtagtccgtaaaactttttatgctaaatcatcatgtctgttattcctctatacttttaagacgactgcttaatgttatgacaatcttatgc

SEQ ID NO: 237205 - DNA, 442 bp, Gossypium hirsutum
cccactcgtccgtgactagagagttgggtcataaatctgatggtgaaacgattgaatggcttttacagcaggctgaaccggcgatcattgcagccaccggaactggtactataccggccaatttttcgactcttaacgtttcgttgagaagtagtgggtctacgctttcagctccaccgtcgaaatctgctcctcactcgttccatggtgctttagctttggcttctcatcatcacccatatgaagaagggtttgctcatagcgctttgttcggtctccaccatcatcagcaacagctgttaagggcagatcaaatagctgaaactttacctgcaggtggcggtggtagcggcggctgtgggaattcaagtgagaactatatgaggaagcgctttagggaggacttgttcaaggatgataaccaacaacaaggtgaaaccgg

SEQ ID NO: 237206 - DNA, 477 bp, Gossypium hirsutum
gaaaatgggtgaaaaaagtgaggatcaagcatagatggaaaacatgggagttctaggcaaggtggtggattaccttctattgttatcattcttcagcatgacattaacagctcagttggacatgcccgagtgcatgctcccccacgcctacaatcccttctatcaagtttataccacgttaacccaagattatttggtgcttgagcagcctgcttttttcaaggcacttatgacgttggaacttgttcaccaactccctctcgctttgcttaacatctatgggttgttatactctaagccctggttcaacaccacctgcctcctgtttggtgcctctatcgctgcctctacgacagctatggtgggagacattctcaattcccagaaggcatcagccaatttgatggccatgtattatccaccgtttcttccattaggggttctggctatagtgcgaggggtggttggacaatcgag

SEQ ID NO: 237207 - DNA, 440 bp, Gossypium hirsutum
ttccactcgtccgtgattgcttatcagccttatgcaatgggtagaatgaggttcatttggggtgacaatgcggaggagttcagacctgagagatggcttgacaagaatggcatgttccagctagaaaaccctttcaagtttacagctttccaggcaggacctcggatttgtctgggtaaagagtttgcttataggcagatgaagatcttctcagctgttcttctcagctactttgtattcaaattgagtgatgagaacagaacagtgacatacaggacgatgatcaatctccatatagatgggggtcttcatgttcgtgcatttcaccgatgtcaaacttaaacctggtttcatctgttcgctgtctcggttcattgtaaactttaaacatctatataccacgtgaaacctgaatcatcttttgtcctataaaacgggtt

SEQ ID NO: 237208 - DNA, 450 bp, Gossypium hirsutum
tcctctcgtccgcccacgcgtccggaaaatatgggcaaaaagtggtcaaagggaacccatatccaaggagctactacaagtgtacacatccgggatgtccggtgagaaagcacgtcgaaagagcatcccacgatcttaaggcggtgatcacaacctacgaagggaagcacaaccatgacgtcccagcagctcgtggcagtggcagccattccgtcaacagacctttactcgacaacaacaataacaatggggcaatgacaataaggccatctccacttaacaatcccatgagcaacaaccaagctcttcggggtttgaggcaatcgacaaccgaaggtgaatcccctttcatgctagaaatgtttcaaggcaacggaaacttgggattctcgggtttcgggaactcgggagggtcaattatgaatcaacatgatgtaaacaacatgtttt

SEQ ID NO: 237209 - DNA, 515 bp, Gossypium hirsutum
cccactcgtccgattggacccaaattcttgaatgccagcgttggtttcggcggatcctgtttccaaaaggacattctgaatctagtttacatctgtgagtgcaatggccttcctgaggtagctgagtattggaaacaagtcattaaaatcaatgactaccagaaaaaccgtttcgttaaccgcgttgtgtcatcgatgtttaacaccgtttcaaacaagaagattgctattttagggtttgctttcaagaaggatactggtgatactagggagaccccagccattgatgtatgcaaagggctattgggagataaagctcggttgagcatattcgatccacaggtcactgtggaccagatccaaagggaccttaccatgaaaaaatttgactgggatcatccccttcacttgcagcccatgagtcccacaactgtgaagcaagtcacttgtgtgtgggatgcttatgaagctacaaaggatgctcatggaatatgtattctaactgagtgggatga

SEQ ID NO: 237210 - DNA, 379 bp, Gossypium hirsutum
gtcatgtgagaaacgtaatgatagagaatattgataaagttttggagagaggtgatcggttagaattgctggttgacaaaactgccaacatgcaaggaaatacctttcgcttccgaaagcaaactcgccgttttagaaacacagtatggtggagaaacgtcaaacttacggttgctctaataatcctcctcctaataattatttatgttgtgctggcttttgtttgccgtgggatcacactaccttcatgcctaaaatgaggtcaagagcttgagattcaaactccttcggtacttgccccctttcctcttgcttatagttttatttgtttgtttttagttatatataatatttatattgagttgagttgagttgattt

SEQ ID NO: 237211 - DNA, 313 bp, Gossypium hirsutum
ctcgatctgagcatcagaaagccactgccactggttttggagaatctttattacctaccaaagcaagtcagaagataaagtggagaatggaggaaccacagccagaacttccgaaatcccgtggaagagaattttagccagcaggcctgtttgggcaatcgtggtaaataatttcacattccactatgccctttatgtattaatgaactggctgccaacatactttgagctgggcctccagctcagtcttcaggaaatgggttcttctaagatgttgccttatttcaacatgttcatattttcaaatatcggt

SEQ ID NO: 237212 - DNA, 254 bp, Gossypium hirsutum
tccctcgcgtccgcccacgcgtccgcccacgcgttcgtgcagctgcggcgacagctgctcatgcagcaggaaccttaaccttggatactcggagaagacaaccagcactcagaccatcatctccggagttgcgccagtgaagatgacctttgagggaccagagatgagcactactgaatcaggacatggatgcaagtgcggatcaaactgttcttgtgatccatgcaactgttgaaaagcttgatgaaagccct

SEQ ID NO: 237213 - DNA, 118 bp, Gossypium hirsutum
agctggtgtggcttttatcaaagcattcgtcctacacagatgggactatcgctgaatattgatatgtcttctacggctggcattgagcctttgcctgttattgattttgtaacacaat

SEQ ID NO: 237214 - DNA, 135 bp, Gossypium hirsutum
cagttatcttactgcattactcaatttgtcgagaaagactgcaagcttgctgacactgttatacggggcttgctgaagtactggccggttaccaatagctcaaaagaagtcatgttcttgggtgaacttgaggaa

SEQ ID NO: 237215 - DNA, 118 bp, Gossypium hirsutum
taatttccttcgttggcactcacgagtacttggcacctgaaatcattaaaggccaaggccatggaagtgctgtcgattggtggacgtttgggatctttctatacgaacttttgtttgg

SEQ ID NO: 237216 - DNA, 248 bp, Gossypium hirsutum
cccacgcttccgcagaatatgaaggaagtcgctgcttttcttggacatgtcggcagcaaaacttcatgtggctatggagtcgctaccgggggaccattggcttggggtctttgctacaacaaagaaatgagccctagcaaaatatattgcgatgattactataaatacacctatccttgcacaccaggagtctcatatcatggcccgaagaagaagcccgtttcaaggtccgtcaaagccggtctcca

SEQ ID NO: 237217 - DNA, 237 bp, Gossypium hirsutum
cttttaaatgtctccctaacccctgcccccctttaccctcacttccgtctctctcttgtttcctcctagcccaaaaaaaaaaaaccctctttcctttctctcgttctttttcccgttcaatcatgtcttgcttcattagcaaatatgccgatgaggtggctaaaaacgctgcttacattggaacccctggaaagggtatccttgctgctgatgaatccactggcaccatcggcaagc

SEQ ID NO: 237218 - DNA, 411 bp, Gossypium hirsutum
aatattagttgctctactctaccatcttcccaatggagacttcaaaatattttccgagcgtagagacactagatgaaggttaccaaaagacattcaaaaactgcgatgaactgctgccaactctccctcaaaccaaaggttggtggttcggccagcttttccaataccatggcttttggatatcaggtttttgtataagaggaagcatgttgaaccatgaccacttcaagcctcgatccacagacatcgtcgtcgcaacatcccctaaatgtggcaccacctggctcagagccctcgttttctccattatcaacagagcttcctttgatttcagcgaccatcctttgcgcaaagcaaacccacaagacttagtcccattcttcgaaaaaattattcataaagatgggtcaa

SEQ ID NO: 237219 - DNA, 245 bp, Gossypium hirsutum
ccttatccaaaatccacatctttcattctaatatgcaaaaaagaaaacatggttgtttgatatctgacaaattttccacctaggaatcagtgaagtgtgtgttctgttctgtctgtatctttttcttatactcattgtaactttggtctggtctcaaaaatgggaaggcaatcttgttgttacaagcaaaagcttaggaaaggtctttggtcccctgaagaagatgaaaagcttttaaggcatat

SEQ ID NO: 237220 - DNA, 278 bp, Gossypium hirsutum
cccatgcgtccgtcaaagcaattaatgagaatgaagaggaaagttttagaagtataatggctgaacctactcaaggagtttttacatttgaaatgcttcagccccatttctgtgaattggtggtatctgaggatctgaatgcttatgtagaaaactttgaaaaatgggttcacgagacaaaatttagaattatgcgaccgaacacaatgaacaaatttggtgctgttttagatgactttggtctggaaaccatgcttggcaagttgatggaggacttt

SEQ ID NO: 237221 - DNA, 378 bp, Gossypium hirsutum
cccacgcgtccgcggacgcgtgggcgaaccagcctttgtcttctctctgtccttcactttctcttcatttcttccctcacaaacaagaaaattcaactcagtaaagtaagggtttcttctttcttctttttaatacctttggaaagtgggaatctgggaaacggctctagatccggacagaaaccatggcgggtcataggtttgacgtcacatggaccttctctctggtagctctcttcttccttcgagcccattggttctacctccctggtgttgctcctgaagatttcaaaaagggagatccattgttggtgaaagtgaataagctgacttcaactaaaactcaacttccttattcctattattccctaccctttt

SEQ ID NO: 237222 - DNA, 468 bp, Gossypium hirsutum
cccacgcgtacgatttggcctgtcaatagcatcgggatggttgagctcaacaaaacaaggcgatggcagaagtgaagctccacggcttctggtcaagtccttttagtcatagagtgatttgggctctgaaaatcaaaggagtaaattatgaatacatagaggaagacctttctaacaagagtgaactgttattgaagtacaatcctgtttacaaaaaaatccctgtccttgttcatggcggcgagcctattgccgagtccctcgtcatcctggaatacattgaagaaacttggcccaataatccactactgccgattgatccttatgacaaagccatcgctcgattttggattcagtttggagtagacaagggtccgattttcagtgacttttttcgatcaacgtgtggtgaagaacaagagaaaacaacaaaggaattattagaagccttgaaaatcatagaagagc

SEQ ID NO: 237223 - DNA, 481 bp, Gossypium hirsutum
tgtgtgaagaaaatccagtgggctgagcctgggacagaatttggtcggcggaggagtgcaaggcaagagagctgtgatgtcttctctggcaagtgggtttttgataaccaatcgtatccgctttacaaagagtctgattgcccctacatgtcggaccagttggcatgccataggccataagcatggaaggtctgatctgcaatatcaatattggagatggcagccccataactgcaatttgaagagatggaatgtgactgaaatgtgggagaagttgagagggaagaggctaatgtttgtgggggattctctaaacagaggtcaatggatatcaatggtgtgcttgttacagtcagtgatcccggcagataagaaatccatgactccgaatgcgcagcttaccattttcagagcagaggaatataatgccacagtggaatttctctgggctccacttctggttgaatctaattctgatgat

SEQ ID NO: 237224 - DNA, 401 bp, Gossypium hirsutum
cccacgcgtccgcccacgcgtccgcccacgcgtccggggtgctgctaaaggactcgcttttctccatagtgctgaaataaaagttatatatcgagacttcaagacttctaatgtcttgcttgattcgaactacaatgcaaagctttcagattttggattggccaaagacggaccaacaggtgacaagagccatgtttcgaccagggtaatggggacttacggatatgctgctcccgagtatttagccacaggtcatttgactgccaagagtgatgtttatagtttcggagttgtgttactagagatgttatccggtcgccgagcggttgataaaaatcgaccttctggagagcatagtctagtggattgggccaaaccttacctagccaacaaaagaaaaa

SEQ ID NO: 237225 - DNA, 381 bp, Gossypium hirsutum
cgtccggaaaaatgggaagcaatcaggctgcagtgtctttcttaaccaacatcgcacgcgcagcttttggcctcggtgccgctgcaactctcctcaatgcctccatgtacaccgtggacggtggcgaaagagctgtaatctttgatcgtttaagaggagtgttggacaaaacggccgaagaaggtacccactttttggtcccatggctgcagaagcctttcatctatgatatacgtatgaagcctcacaccttctcatctatttccggaaccaaggatctccagatggttaacctcactcttcgagtcctttctaaacctaaggtggataagcttcctgaaatttatcaacgccttggtctcgagtacgatgagaaagtgc

SEQ ID NO: 237226 - DNA, 324 bp, Gossypium hirsutum
tatgtttctcaacaagggaacctaattgattgggctgttttttttggattaaacggggaggaaaaaaaatgcactcaagtcatctgcttctggaagagccaatcaggatggcttcaatcctggagccatcaaaggctacttttttcccggcaatgacgaatatagtgggaactttaggtccaaggtctcgatccagagaggttctttctggttgccttactgctggaatgtctgtggctaagttcgatttctcttggcatgacccggagtatcatcaggaaacattagagaatctaaaggcagcctttaaactcactaaaaagc

SEQ ID NO: 237227 - DNA, 439 bp, Gossypium hirsutum
  unsure (1)..(439): unsure at all n locations
ttttccttatgcaaatcctgatggagatttgggggtacttattggtgactggtgcaagaccagccacaaggcactgcagcaaactttggactctggaaaatctcttccctttccccatggagtccttataaatgggcagactaaaaccacctttactggagaacaaggcaaaacttacatgttcagaatctcaaatgttggattgtccacctcactgaacttcaggattcagggccattcgatgaagttggttgaggtcgaaggctctcatgtaattcagaacttatatgactctcttgatgtgcatgtgggacaatccgtgaccgtcttagtaaccttgaatcaaccaccaaaggactactacattgttgcatccacaagatttacaaggaccgttctcactgcaacngcggtgttgcactatgcanactcgcaaacc

SEQ ID NO: 237228 - DNA, 504 bp, Gossypium hirsutum
ctttcttcttgctttactagtatagctttcatgccggtcctcctctttgcagcatttgcatcttttagaatatcatttatctcattctcaaccatcttattggaatttggttctaatttttccatgtctatgtatcttccatcgcccttcccttctcgtttttccattttcccagcattttccatcaacttctgaaatatccttccttttctggagacttcctcaaaggtaccctcttctttaattacaccattagagataagaaggatgtagtctacatgtggaagaaaatgcagctggtttgtgacaagtattctggtttttccttgtaattcttccttgatacacctgttgaaaacctgcaaatgacttcagattagaccatatagcataaccacaagaaatctattttgagatcaaagaaggttgaatgttcaaatccaaaaggttgaaaatacattagaaagaaactggaattgtggaaagaatatatgagaaatattt

SEQ ID NO: 237229 - DNA, 480 bp, Gossypium hirsutum
cttacgcgtccgggctttgtcaaacggtgggttcgggagggaagccgccggattatccggcgtcataccggagggtttggttccagcttggtactggactgaccagttcgccatggaagttatttaccacaaccgtgtcttaagccacgagtgccggacgacggagccggattccgcgatggcgttttacatcccgttttatgccggactcgctgtcggaaaatacttgtggcttgggtatagttcgaaagatcgtgatcggtactgtgagatgatgttggaatggataaaggatcaaccgtactggaaccgttccgacggctgggatcatttcatgacgatgggtcgtatcacgtgggatttccggcggtctaaaaacgaagattggggttccagctgtatttacatgccgggtatgaggaacatcacacggcttttaattgaacggaacccttgggactatttcgacgtcgtcgtccc

SEQ ID NO: 237230 - DNA, 428 bp, Gossypium hirsutum
cctattcttccctccttcactttctctgatcttctttctttgccttcgccacaaacttgcaaaaagagcttcgcttttcatttttttcttacgaaaaacaaaaaaagaaatggctaataatttgatgcgggccgttcaatacagtaaatatggcggaggagccgatgatttgaagcatgttgaagttctgattcccagtgcaaaaaaggatgaagttctgatcaaattagaggcagctagtattaacccaatcgactggaaaatacaggaaggggtagcccgcccatttttacctcgcaaattcccccacattcctggcaccgatgtagctggagaaatcgtacaagttggatcaggagtccaaagtttcaaagttggggataaagttgttgccgtacttggtaatggaggtgcactagctgaatatg

SEQ ID NO: 237231 - DNA, 97 bp, Gossypium hirsutum
cccactcgtccgccactttgttcgtacactggagaaaacttggagtccatatgccgtggcagaacatttcatgcaccctgtgaaattgcattttagt

SEQ ID NO: 237232 - DNA, 368 bp, Gossypium hirsutum
gcgctttttttgttagctcgtgatccgatcattccacgcacggaccggccgttcaaaacgagcatcgtcttcgcacacgaagaaggaaccagcgtgcttttcaaagtgttgtcggcgttcgcgtttaggaacatcagtttgacgaagatcgagtcacggccacaccgtaaccggccgatccggttagtcgacgacgccaatgtaggaacggcgaagcatttcgaatacatgttttacgtggatttcgaagcgtcaatggcggaggtcagagctcaaaacgcgttggcggaggttcaagaattcacctctttcttgagggtattaggcagttacccaatggatatgacgccttggtgcccatccagggg

SEQ ID NO: 237233 - DNA, 268 bp, Gossypium hirsutum
gaaaattttgacctcaatgattgaggtggtgaagatggatgatatttacacagcaatggagaggctggagaagaacgatgttcgatacagattcgtcgtggatgttgctggaagcaagcttgatcaatagagccaaattaaatacaaacacaaactctctttaatcaacaaagaaatactacatgtttaaacatatgcctgtttgttgttgctctgttttctctcttgtgttcaacatgccttatggtaataaactaaaacatatatg

SEQ ID NO: 237234 - DNA, 303 bp, Gossypium hirsutum
ggccaatgggaccgaaaaccctttgcaatgcatgcggagtgcggtatatatctggcaggctctttcccgagtaccgaccggcggcgagtccgacgtttatcccgtcggtgcactcgaattctcataagaaagtgctggaaatgaggaccaaatgtgggacagctgatgcaccagaaatgatcccaaataaaagcaacccagcactagattacatatgaagggagggctttggagaattttggaaccctaatgttgattgggttaaaactttcacaatgttttccccatcccaatctcttttaa

SEQ ID NO: 237235 - DNA, 441 bp, Gossypium hirsutum
gctatttactacaaaaagttactccctgcacttgggaggaattagttaaggaatgtggtggatataaatacagtttatggaggttttgctgcagctgttattgatgatcccctgtggaccatgaatgtggtgtcttcctacgctgccaacacactgcctctggtctacgatcggggccttattggaacttatcatgattggtaatttcaaatgcatttacatggcatctgaatcctagtcatgttgttcttttgatgtttctcatgggtgtctaatctgttgcatcttttccaggtgtgaagcattttcaacatatcctcgaacatatgatctccttcaccttgacggcctcttcacagctgagagccacaggtagatattgggtgcatttcccatttgatgttctttgtttgttctgggttgtgaacataattgcatgtt

SEQ ID NO: 237236 - DNA, 418 bp, Gossypium hirsutum
gtctctatcaattaaggatgatgagattgatattggggtgggagcactacgtcctgacctgacatctttcatgaatgagtggaggaccatattctctcgatttcatctcataattgttaaagaccctgatttgaaagaggagctcaaaattccagagggctttaaccttgatgtctataaaaagcctgacatagatcgtgttgtgggtacttctacttcaaccattttctctggctattcatgccggtattttggctatctggtttctcggaagaagtacattatctctggggatgatgactgttacccagccaaggacaataaaggcattttggtggatgctggtgcccagcatattactaaccttacaaccccgggcacaccattcttttttaacactctgtatgaccctttcact

SEQ ID NO: 237237 - DNA, 390 bp, Gossypium hirsutum
cccacttcgtccgtggatcttctgggtcggacccttcgggggagctgcctcagctgcattgtaccaccaatacatcctcagagccgcagccatcaaggctcttggatctttcaggagcaatgcttaagtccagctttcattttcttacgaacttcaaccaaaaaagaaatggagaaccttgagttcagtgtggaccattgaaatgtaaataaatatttatgaacaagggtgtcttattttcttgctttcaatgtattttatttcgtgtttgtcatctttgttcatccttatcctctcttcttttttccttttttttttccggtgatgcttttcatgttaattttttaatgcataattctacaagtaaaatatattgtttgttttagtgtc

SEQ ID NO: 237238 - DNA, 239 bp, Gossypium hirsutum
agaatttccgtggggcagtcgatgctttccatgtgactgccgaggacacaactggcgccggtgactcctttgttggtgcattgctatgcaagattgttgaaaacccaaccattcttgaggatgaagcaaaattaagggaagctggaacaaaattttagggaagtacaaatgacattttaatttttgtaatctctatctttatactttgtaaatgattaaatcgaattttttttaatttt

SEQ ID NO: 237239 - DNA, 464 bp, Gossypium hirsutum
cttttattatgtctccctcctcccttttacaatacaaataccttccatgccagaccaagtaaaccaaaagacaaaatgagacaagaaggaaaacccaagacaccaaaacacagccaaggaggcacaggccggtcctgtggcttatgccttttcattttcctcctcttggcaggagcatcagcagttgctgtgtgcctcatctaccgtccccgcaagcctcgtttcgctgtagtaggtgcagctatctaccaactcaacgccacctcacaacccatcatttccacttccatgcagttcaccatcgtgacaagaaaccccaacaggagagtctctatcttttacgacaagttgcaagcttctgtttcgtacagaaaccagcagattactcccgcaatggacttgccaccactgtaccaagaggcaaagagcacggtggcactgacccctctgctgggtagcgggac

SEQ ID NO: 237240 - DNA, 281 bp, Gossypium hirsutum
gtggtgttcggacaggtagttgaaggcatggatgtggttaaagcgattgagaaggtggggtctagcggtgggaggacttccaagcctgttgttattgctgactgtggacagctttgaaaaagggcttattgaattgtgtttccttcataatatctggtctttttaggctccttttttttatgctatgctgcttctatggctactgggttttggtgttttttaagaagttgcttgatgtagctttttcattaactgccataaataagataggctttattttc

SEQ ID NO: 237241 - DNA, 438 bp, Gossypium hirsutum
ctcatttaaaatcggacatgcaacctttcctcacccagggacttatatgcagggttctggaaaactaggacttgggattagaaacgatgttgctcgtagtaatttctttgtagattcaagtacttgttacgaacttgtagcagctgagtatcttggagatggagttgtttctgagccaggttggttgcagtttatgagaaaatggggtccaactattgtccatgatattagtattttgcctttggtgcttcggtattccatggcaaacattttcatcaagcttccagttgagctctatggaagggaaggccctactgggcctaaggagaagaacaattgggtaggcgatgaaagaggctagttttccggtggcctccgatctcaatcaactcttgttgttacctatctgttgctgctgtgttcatcataagttcatag

SEQ ID NO: 237242 - DNA, 409 bp, Gossypium hirsutum
acatgtgagcccagcttaacattcttgcttgccaaattcgatggtatacttggtctgggatttcaagagatttcagtaggaaatgctgtgcctgtgtggtacaatatggtcaaccaaggtcttgttaaggaaccggttttttcattttggcttagccgcaactccgaagataatcttggtggggaattggtatttggcgggatggatactaaacatttcaaggggaatcacacttatgttcctgtaacacagaaaggatactggcagtttgatatgggtgatttcctgattggtaacgaaacaacaggattttgtgccggtggctgcagtgctattgctgattcagggacttctttgttggctggtcctacgggtattattactcaaatcaatcatgctattggagcat

SEQ ID NO: 237243 - DNA, 449 bp, Gossypium hirsutum
cccacgcgtcttattgggtacctgaagaaggtggatatctaattggcaatttacagccggctcacatggattttaggttcttcacacttgggaacctctggtccattgtttcatcactgggcacttcaaaacagaatgaagctattctcaacttaattgaaaacaaatgggatgatattgtggggcatatgcctctcaagatatgctatcctgcagtagagaatgaagagtggcgcataattacgggcagtgacccaaagaataccccttggtcataccataatggtggatcttggccaacacttctctggcagtttactttggcttgtgtcaagatgggcagattagaactagcccaaaaggccatagctttggcagagaagaggctttcaagagaccattggcctgaatattatgacacccgaagtgggaagtttattggaaagcaa

SEQ ID NO: 237244 - DNA, 445 bp, Gossypium hirsutum
ggatggttcttgctgccaccctttgtcttagacgtgccccacgtgctagaccgcaaatgggcgttgttgtgaagctcctacaaggtgatgctgatgtgaccaagtgggcaagattgcaagtgaatgcatccgaaggatccgatacattggatgatgaagcttgtcctggtcggtccaaccttcaatcccatcttagtctcgcattgcttgatgtggaggaagactcggtctccatgagcagcatcgagcaacctgtgtcgttagaggactacctcaagggtcgatggagccgttcatcaagctttgactaacttcattaccgccagagataagctgcaaaataagcattcttccatttatggatcttttcacccatccttgtatattctttcggttccttgtttgacttttcaatggcattgctcattgcttacggtaggtgttg

SEQ ID NO: 237245 - DNA, 429 bp, Gossypium hirsutum
ttctgttgcatcttacagagagcgagttcttaaagcacttaccagaaagtttagattgcacgaagatatatccctctactcaattgcaaagagatgcccaccaaactttactggtgcagatatgtatgccttgtgtgcagatgcttggtttcatgctgcaaagcgtaaggtgttgagtccagattcatcttccatggatcaagctgactccattgttgtagaatatgatgactttgtgaaggtattgagagagctttcaccatccctttccatggcagagcttaagaagtacgaaattcttcgagatcagttggaagggtcttcaagctgaatgagaaaggtgaattggcaaattacatgctacgaaaatacaataaaatatgtcaaaagcaaaagattctttttaccatttattttatggatagaact

SEQ ID NO: 237246 - DNA, 380 bp, Gossypium hirsutum
caatttttgaactgggatccacagaacagaatcaaagttcggattgtgtctgctagagcttatcattcattgttcatgcataacatgtacgggtaagaccactttgtctaccgatcacaacaggtatctgatcggtgatgacgagcattgttggagtgacaatggtgtgtcgaacatcgaaggtggttgctatgccaagtgtattgatctttcaagggagaaggagcctgatatctggaatgccattaagtttggaactgtgttggaaaatgttgttttcgatgaacatacgagagaggtggattatggtgacaaattagttacagagaatactcgtgcggcctatccgatcgaatacattccaaatgctaagataccat

SEQ ID NO: 237247 - DNA, 452 bp, Gossypium hirsutum
tttgacttagtttggcatgctgattgagtttctatttgaaaagtttcctaactttgaagatgctactgaaactgccattggagatctacaggcattctataaagcttcaaagcagagatttgattctgatcctgcatttaaggagagagctcaacaggcagtggtgcggcttcagggtggagaagaaaagtatcgcagggcatgggcacaaatatgtgaaatcagccggactgaatttcacaaggtctatcaacgacttggagttcatttagaggaaaaaggagagagcttttataatccttatattcctggggttatagaagggttgaccaaacaaggattagttgaggaaagtcagggagctcgtgtgatctttattgaaggcattaatatacctcttattgttgtgaagagtgatggtggtttcaactatgcatcaactgacctggctg

SEQ ID NO: 237248 - DNA, 197 bp, Gossypium hirsutum
attgcctacctgttgctgctctaattgatgagaagatcctttgcatgcatggtggattatctcctgacttgaaaaaattggatcagatccgtagcatttctcgccctgttgatgtgccagatcagggccttctctgtgatcttctttgggctgatcctgataaagatcttgatggctggggagagaatgatagggga

SEQ ID NO: 237249 - DNA, 164 bp, Gossypium hirsutum
cccactgtgtcttgttcaaatctcaaatcgtctgagttcatcaccctgtgttttggtatctgggaagtttggttggtctgccaacatggagagactcatgaaggcacaaactgtcggtgatacctctactttggagtttatgaaagggagaagggtgtttgaga

SEQ ID NO: 237250 - DNA, 314 bp, Gossypium hirsutum
accttcggaaattcccggccaacttttccccggcggcaccggcggcggcggagattcaaggaatggggcggggtcggaccaaaacaggggaggaaatcttccggtagggtatatgggcgctactactctggcaggaccttggatttccacactaacaggaagatcatcgaagaagttgccattatcccatccaagaggctccgcaacaagattgccggcttctcgacccatgtgatgaaacggatccagaggggtccggttcgcggcattttcttgaagctccaagaggaagagcgtgagcgccgcatggattt

SEQ ID NO: 237251 - DNA, 387 bp, Gossypium hirsutum
gtctgaaaatgtctcttccatggaggctttgtctttgtctcctcctatgtctccgccggttatcctaacccaagacgaattaaaaaaaatcgccgcttacaaagccgttgagttcgtggaatcaggcatggttctgggtctgggcacaggttccacggccaaacacgccgtcgaccggatcggcgagttgcttcgtcaaggcaagctcaccaacatcataggaatccccacctccaaaaaaacacaagaacaagctatttctttaggtatcccactttcggatctcgacagccaccccaccattgatatggcaatcgacggtgctgatgaagtggacccgcatcttaatttggtgaaaggcagaggtgggtctctgttaagagagaa

SEQ ID NO: 237252 - DNA, 451 bp, Gossypium hirsutum
gcgaaataatagctaatacttaattaccttctcataagtattgtgtcctcccaagttctttcatttagtgtttggattggatgcagtatttatcttcagtaaatatggtcttatatgaataggtatccaacaaattctacttcacatttactgtccgccccgaggccatgaaagagggattgaagattcgaaatgttgttccagctactgaggaggaagcacggcgggtgcttgaacgtatggatgctgagaggtcccaatagtgctgttttgctctatattcatttgaaattttgaatctttctcgtatctaagagaaccccatggtcgatatgcaataagtgaacaagcccagtgtctgtaattcaacacattttttcattgtcaagatccaatgatggaaatttttccatctcaatctcccaaaaagaaaataaaggtcggacaaggg

SEQ ID NO: 237253 - DNA, 396 bp, Gossypium hirsutum
cccacgtgtctgggagcaatggcagggtacaccggcttcacaagcggccttgtcaatggcaggcagacatacataccattctatagaattatagagaaacgaaacagcgttgtgattacggataggatgtgggcaagactgctgtcttcaacgaatcaaccaagctttttgtgcctcaaagactccattgaagacacaggcgatgaagaacaatcaaatcaattgttggcgaatggacattgtggcgaagaggaagaacaatcaaatcaattgttggcgaatggacattgtggcgaagaggattctctcatttcaaagatatgatcaactgaggtgataatgtggcggtgaatgctttctgcaggcaggcgaggcttttggttaacacagtattgt

SEQ ID NO: 237254 - DNA, 459 bp, Gossypium hirsutum
tcaggttattgatgaaaagattagagagctctcaaactgtcaaatagtttatcccggaattgattttcagaaggaagctggtattcctaaaaaagtcgtcaaagttgaggatatccctggcttgaaggaagctggttggactcctgatcaatggggtcatactcgatttagagccttaattgtttctgcagacaacgcgacaaatcagaaacatttaactggtttcatgcgctcacttttgaaggcttgtaaaaaaagcatgcttgtccccctcttctcgcaatcaaacaccttgtctaagatgcaggggaagctaatttccactttcaggattcttgcaatggcctaattacagtataattataaatgttaataagtcattgtccttttgcttttactcttgataacttgattctctccaagtgtttatttgacattagatgtctatatgagagcatc

SEQ ID NO: 237255 - DNA, 110 bp, Gossypium hirsutum
ctggatctggattaaattattagcggtgaagatactcgaacaactctgatgataaaaaatattccaaataagtatacctcaaagatgttgctggctgccattgatgaaaa

SEQ ID NO: 237256 - DNA, 238 bp, Gossypium hirsutum
tcgtgcctcaaaggttccagatgttagtccaaccaatgtctccgaggttcagaacggtggagtgaccgactgctttctgatcgaattgaattttcctaccgttccagctattgatttcaattctgctgaggcttcacttgtatcgaaagccttgaacgatgctccacttattgatgttaagagaacgactcccgcagatgatatctttgttgtgctcccatctggaaaatctgttacc

SEQ ID NO: 237257 - DNA, 365 bp, Gossypium hirsutum
aaatcgtgcctggtgttctctttatcgatgaggtgcacatgcttgacatcgagtgcttttctttcctgaaccgtgctcttgagaatgagatggcccctatattagtagttgctacaaacagaggcataacttcaatccgtggcacaaattacaaatcccctcatggaattccaattgatcttcttgatagactactaatcatcactactcaaccttattccgaggatgaaattcgtaagattctagacatcaggtgccaagaggaagatgtagagatgtctgaagatgcaaaacaactgttgaccaaaattgggcatgagacctccttgagatatgctatccatctgatcacagcttctgcactg

SEQ ID NO: 237258 - DNA, 259 bp, Gossypium hirsutum
cttgcttaatacctactaccaaaccaaaacaccaatttcccctcaaaagtaaaaatcccaacctcattttccttcaaaccaaacacacccttttaccatcatggcccctaacatcaccactaccaaagctgccactatcactgccaaggctcccgagagggcttatgttacgttcttggctgggaacggagactacgtcaagggcgtggtgggtttagccaagggactgaggaaggtgaacagcaagtacccacttgtg

SEQ ID NO: 237259 - DNA, 146 bp, Gossypium hirsutum
accgattgaaggaattgatcaaatacaaaggctttcaggttgcccctgctgagcttgaagccatgctcattgcacatcctgatatcatcgatgctgctgtggtcggaatgaaagacgaggcggttggcgaagttcctgttgcgttt

SEQ ID NO: 237260 - DNA, 192 bp, Gossypium hirsutum
ctcagtcctaaacagagatttgtcagagaaggagctccaaatgaaaacaaggagagaaattatggttcttggggcccagttgggtaaaacaaacatcgcagcatgggctagcaaagaggaagaggataaggatgcatccacttcactgaaaattgtagcaccagaacaaccatctaagagtgtcattgaaac

SEQ ID NO: 237261 - DNA, 350 bp, Gossypium hirsutum
cagttttgcgacctggtggcattggtctcaaggatggtctgctctttgctgctctcagtgctaagacacaagggaaagatgtgggtataccagaatgtcagggagctgctactgcaaagtctccatggaatgctcctgagctctttgaccttttggttcttgatggtgaatcaattagggagtggctctttttcgataagcctcgaagagcatttgaaggtgggaacagaaagcagaggtctttgccggattacaatgggcgtggctggcacgagtcgagaaagcaagtcatgaatgaattcggaggactgaagagatcatactacatggatccacagccactaaaccat

SEQ ID NO: 237262 - DNA, 389 bp, Gossypium hirsutum
gttatattcttagtctcttacgaagtgaaactatggctcaacttaagaagatggattgcgaaatagtgatcaagacaccagctgataagttctacaataccttcaggaccaaatcccatttgataccaaagatgtccaacggattaatgatagatggcaaacttcttcaaggtgattggaatactgtcggctgtgtcaggctctggtcttatgtttccgaaggtaagtctgagatggttaaagagatacttgagaacgttgacgacgaaaacaagacaatggttttcaaagtggcggagggtcaaatcttgaactattataagagttggaggagcatctttaacatcacgcccatgggtgaggggagctcggcgaaatggactatggaa

SEQ ID NO: 237263 - DNA, 433 bp, Gossypium hirsutum
cccacttcgttcgctccccctgtctacattagtcctcttgacctgagccccaagtactctgacaagttcacaggtcttcaggaatattgcaagacgtatggtgaaaattattgtttggggcagctagttttttggtataaccagaccagtgttgatccagattccagcctgtttagagcaagtaggggttgcttatcattacctgacattggttgcttctacgccaaggttcagaagccatcaaggcatcgagtttatggcccaaagactgtcaaatttatgctgtcatggatggagaagcaagctcagagaccatggccgaaggaccgaatatggacattcaaaggtagtccgagaatctttgggagtccaatgctagatgcagttttgaacaatagttcactggacagagagatggtgcaatggttgaagc

SEQ ID NO: 237264 - DNA, 272 bp, Gossypium hirsutum
cccactcgtccgctagcaatcaaatgtcaaatagaaccttatggtctgaagtgaagggcctggttctggaagcaaaatcagtcgtaaagatcccatcatttcaaattatcgttgctcagggtgttactggttcattcccctggtctgcattgtcatttgcaccgatgtggttggagctaattgggttctcccacaagaaaactgcattcctgatagccatgtttgtgattgctacttctgcggggggcctttttggtggtaggatgggggat

SEQ ID NO: 237265 - DNA, 443 bp, Gossypium hirsutum
gtggatattggaccgtttccttatcagaaaccagcaactaatgttaacatgatgaatgtgcctggtgcttatgtgatgaatccctgcaatgtgcaatgcaatgatcagatgtattgccttcatcctggagtcgaaaataaaacaggagaagctgcagcactgaatggacaaggatttaatggttgtgactttgacaatattcagtgcttggcgaatcagaactctacaggtgggattggaagtgcagggtcgaatggcaattattctggcacaaaaaggaggaaaggtaaaagtttaggagtctttcttttgatttttttgcataatttatgttgatataggaatgttaatctctaatttgatttatctattatgactagtatgttggcttgagtgtagttatttacttcactagtttctggcttggaactctacaaggtgta

SEQ ID NO: 237266 - DNA, 353 bp, Gossypium hirsutum
accagttcttgcctcaaccctctccgggtgaatccgacggcccataaagactccgacttatcaggccctatctttctctacttatccctctgcttattccaactcctcgctggcaagatccaattcggcgtcatccttggctggatcgtcgtctcctcgattttcctctatgtcgttttcaatatgttagcgggtcgcaacggcaacctagatcttcatacgtgtacgagcgtggttggttattgtatgttaccggtggtgatcttctctgcagcatcgctttttattccccaggggactagcgttgctaggcacgccgtggcggggattttcgttgcttgggccactagggc

SEQ ID NO: 237267 - DNA, 350 bp, Gossypium hirsutum
gtgatgttttttatgcgtcgagcaacccgagggaagcgtttttcaattaccgagaccttgacgtcggtagcaacgaaagcggcgagacggattttgaggttgcgaaggaatacggggcagagtatttcaggaacaatttcatgaggctggcgggtgtgaaagccaagatagaccctgagaatttcttcaagaacgaacaaagcataccgcctttgtcaacgccgccatctgattaaaacaatatatgaaatatattctcaattatctttgtctactttttagttcttaatatcgagtgtttctttgatgtacaatagtgattattcttaagaccatttatgaactttaat

SEQ ID NO: 237268 - DNA, 443 bp, Gossypium hirsutum
cccacgcgtccggagccagccgatctcaacaacaggaacatgattgttgtagatgttggtggtggaactggtttcactactttgggtatcgttaagcatgtggatgctaagaatgttacaattctcgaccaatctccgcaccagcttgccaaggctaagcaaaaggagcctttgaaggagtgcaggataattgaaggtgatgcagaagatctccccttccgtactgattatgccgacagatatgtgtctgctggcagcatagagtactggccagacccacaacggggcatcaaggaagcatatagggtattgaaactaggaggaaaagcttgtctgattggtcctgtgtacccgacattctggttgtcatgcttctttgcggatgtttggatgcttttccctaaggaggaagagtacattgactggtttgaaaaggctggatt

SEQ ID NO: 237269 - DNA, 454 bp, Gossypium hirsutum
cccacgcgtccgctttgagtatccatacaataatgcgctacatcatcatgtggaaagtataatattatcttgtctggaaagcaagaatgatgcaatagtcgaccatcttcttcaagaatgtgatttgatcaggaaattgatccaaactgacaaatatccatttctttctggtgacaataatcagccaactttacctgctgctggaaaacatgcaccacgagcgggaaacatcggtcacattacacgtatctcaaataaacttgtacagttaggaggcagtaatagctgcattcagacacgtctacagggaaatagcgaatggaatgagtggctagctaatgttctgcaagaacgcaatgcagttgaaaatgtttatcgatgggcgtgtggacgcccaacagcattgcaagacagaataagcgatgaagatgatcttcttgatagagattatgat

SEQ ID NO: 237270 - DNA, 440 bp, Gossypium hirsutum
gcaaccaatacccgaacagtagatcacccttttcttttaatcattttgcttttacttacacatgacttcaaccacgctctccacatctccacctctccttccaaggccgtccaccgaacctactcaaccccccgtttccaatgacccgccatcctttacccccatccatgatgcgtctgatatcaaccaaatagagttactctccgtgtcttggaaccaggattatggctgctttgctgctggcacctcccaagatttccgcatttataattgccaaccctttaaggaaaccttcaggcgcaatctcaaaaccggtggtttcaaaattgttgaaatgcttttccgctgcaacatcttggcacttgtcggtggggaatccaattcccactatcctccaaacaaagttataatatgggatgatcatcaaagtcgctgcattg

SEQ ID NO: 237271 - DNA, 431 bp, Gossypium hirsutum
gaagaactgatccctggctttaagttctctcgatgcagttacctccagagcctcctccgtccctccgttatcagtgaactagagttagcgagacatggtttgaagttgttgaagaggaatccatcatcgtttacgccttgtttggatgggcgatatcttttgttagggcctactaaagtgcttaatcatagggagatctccaagttctccagacgagatgccgatgcttatccgaaatatgagagtcaattagagagattctgtacactcatggatccacttttggattcatcgcctcctgaatctttgcaaggtatttcatctctccaagagcgtctcaagaataaagtacacaactcggtattttggactcgtttgctgcaccaggctgcttccttggggcagaaagacatggcggattttatggatct

SEQ ID NO: 237272 - DNA, 292 bp, Gossypium hirsutum
cccacgcgtccggtcttccccagctttggagagcgatacttgtcttccgtgctgttcgagtccgtgaaacgggaagcagagagtatggtgtttgagccttgagatgaaacatggagaaggtaacctattgatcaagcaacattaccaactttccccattgatggttcttgttttcttctagggttatataaaaaaaaaagaatgtgtttggacatggtgttgaaccctgtttgttgctgttcactgtatttcttttcaaagttttaacacatattaataaatatgttacatt

SEQ ID NO: 237273 - DNA, 493 bp, Gossypium hirsutum
cttcttcatctctttcctttaatcacgaaaaagaccatgggagtttccaataacataacagcagttctcaacatagttgctctcctctgttccatccccatcatcgccgccggcatatggttagaccaaaagcccgacaacgcctgtgtccacctcatccggtggccggtcatcctcctcggcttcctcatcctccttgtctctctcgccggcttcgtcggcgcttaccgttacaaagaaaccctccttgctttctacctctgttgcatggccatcctcattgccctcctcctaattttgcttatcttcgctttcgtcgtcaccaggccggacggcagctatgacgtgcccggaaaaggttataaagagtacaggctcgatgggtactcggcttggcttcgagaacatgtggttgataacaagagttggagaaaaatcaaggcttgcttggctgataccggtgtttgtcctaagcttactcaaaaatttatta

SEQ ID NO: 237274 - DNA, 403 bp, Gossypium hirsutum
cccacgcgtccggaaacaggtagcaaggttgtttgggccagctatattcgaggcatcaaagctaaaagttctgtttttaggagtggatgagaagaagcacccagggaagcttcccagaacttatacacttacacatagtgatataacatcgaaacttaccttagcgatctcacaaacaattaacaactctcaggtaaatctttttatctcatatttcttttgagttttttgtttttttattatttagaataaaaaaacaggggatttggggctttgattacagttgcagggttgggcgaacaaattatacagggacgaagtagtggctgaatggaagaaagtgaagggaaaaatgtcactacacgtccattgtcacataagcgggggccatttcctcttggac

SEQ ID NO: 237275 - DNA, 305 bp, Gossypium hirsutum
tgatgatcccagcagacagttctggacgatctttccttgtgaaattgccagatggcaaagatttttactattggtgctcggaaagatcaaagctcttgggggttgaattgctctcaaagatgaaggatctaatcaaaagaaaaccatctatagctgaattaactggaatcagcgagtcacgattaggctgttttgcaactcagcttcatgcctatctcctaggatcatctgtgaatcctgaagctagttgttctagttcacctttacccagtaccacgcacgatgctattgttgtgcacaatggg

SEQ ID NO: 237276 - DNA, 297 bp, Gossypium hirsutum
gacgaatttggatcggttcttggagtttacgactcctgtggtttcggctcagtatttacctaagacaagcataagaggatgcagagggcaggagcgcggactggagtgtcctccatattttgcgcttaaggatttgagggagtcttttaaagaatggagtgcatatggagctggtgttcctcttttgttgaacgggagcgactctgtaatgcaatactatgtcccttatttgtctggcattcagctgtatgatgaccaatcaagaccctccccaaggcagaggatgcctggtgagga

SEQ ID NO: 237277 - DNA, 313 bp, Gossypium hirsutum
  unsure (1)..(313): unsure at all n locations
ttcatggtcacctgctatgactgttagttctatctgtatcagcattctctccatgctatcgagcgcgactgccaagcaatgtcccgaagacaatgacaggtacgtaaagaactgtaggaatggccgatctccgaagcagacacggtggtggttccatgatgataaagtttaattgaagggaagatcatgccctgcatcaaatttgtttttaatgacttttttcatgaaagtgatgcttgatgccatgtaagcacatgaatgagaaaactatatatctttatgacacttttttttttcttttttttggaacana

SEQ ID NO: 237278 - DNA, 473 bp, Gossypium hirsutum
ggggttttcacagaatgctggcttagattaccaagacactttcagtccggtagttcgtgctactaccattcgcacggttcttgctatctcaatcatgaaaaattggtcgctaagactagctgatgtcaacaatgattttcttaacggggagctggctgaagatatctacatggaacaaccaccagggtttgaagaattcggtcctaatggagagaagattgtttgtaagctaaacaaacctctcttcgcgcatggttctaaacactcaaatagtatctcgttgatcaacttggttttcgtgctgctaaggcagatctgtcgctattcatacatgctgcatccgacagtattctgttgctcatgacctatgttgatgatattgttctcaaaagtagttctaattcaaagattgacagagttgtttaactacttcatacaaaatttgctctaaaaaatatgggacccttactttt

SEQ ID NO: 237279 - DNA, 434 bp, Gossypium hirsutum
ggccaccaattcatgtacttgtaatatgcccaactcgagagcttgcgattcaagctgcttcagaagctaagaagttgctgaagtatcacccatctatcggtgttcaggttgtgattggaggtacaagacttgctctagagcaaaaaaacctgcaagcaaacccttgccagattcttgttgctacacctggaaggctcagagaccatcttgagaatactgctgggtttgcaacaaagctgatgggtgtgaaggtccttgtacttgatgaagcagatcgtttactagccatgggttttcgtaaagacatagaaaggataattgctgctgttccaaaacaaagacagacacttctattttctgcaacagttcctgaggaggtccatcaaatctgccacattgcacttagaagagatcatgaattcatcaatacggtt

SEQ ID NO: 237280 - DNA, 335 bp, Gossypium hirsutum
cccacgcgtccgcaaaatttgtgttcgaagattacatgaagctttacgcagtgcttaaattccaggccaaggagcccaggtttgaagccatgaaagccagggaagcaactgctcccattgtaacagcttaaaagagaattcaataccttacgtagctttgtgtttgatcaagaaaggggtactgttaatctattttaagctttttaatggtgtattaaagaaaaaagaagtcagtgtttactgtaggtgagtgttttgattgaatattctaaacagtgacgaccctgtcaatttctactatactatacaatgtaacattgaagtagaaaagattt

SEQ ID NO: 237281 - DNA, 451 bp, Gossypium hirsutum
agctattgtaggttcaccacaatgggggaacaagaccattttaacaggacaaaaccatttcggagacctggtcgtgttcgacgaccccattaccttggacaacaacttgcattcgaaaccagtgggtcgggcccaagggttttatatctacgacaagaaagacatattcacagcttggttgggtttctccttcgttttcaattctacccaacataaaggaagtataaacttcgccggtgctgatccattgatgaacaagacgagggatatatcagtgattggtggaacaggtgatttcttcataacttgtgtcattaggtaatataatgttatagacttgtagggtctggaacatgcttagcattttgatcaattcttctgttcaaaacaaggctacatacattatcatatttctggagaaatgcggactcgaattatgatagttatcaaa

SEQ ID NO: 237282 - DNA, 498 bp, Gossypium hirsutum
gtccagggaaaactattccacatcaatgctgctatgcggagctagaggcgatgctaatgctccagccaagtcattgttttggcaaccaaggaaagggcactcttacgtattaacatttgaatcagagagagacagaaatgcagctatcatggttgcacgaaagcatgctctcgactgtagcgtgatgcttggaggaccagatgatgaaatgtagaagctaaaaatgaaaataaaaatactaacttcaagagagtgtctacaacttgtgataaaaaagccaagagtttaattgtgtgagtaaatttttaatattttgtatggcgtgtttgcagtgtgggagagaagaaaggatatgaaaaaaaatttgggttttttttttccactaatttggttggtaatggtggcattgttttaggcagcgtttttttggtttgcctaatattaattatcaccagttgtaacaaatttgtcccctttggtttactttttcttaattga

SEQ ID NO: 237283 - DNA, 486 bp, Gossypium hirsutum
cccactcgtccgcccacgcgtccgaagaagccttactgtaactgtttgattgatctctgtgttaacttagatttgttggaaagagcttgtgatctgttagagctgggactttcactagagatttatgccggaatacaatcaaggtctccaacacaatggtccttgaatctcaagagtctatctctcggggcagctttaactgcactacatgtttggatcaatgatttgacaaaggtacaggagtctggggaggagcttcccccattgctcggaatcaataccggacacgggaaacacaaatactcggagaaaggattggcaactgtcatcgagtcgcatttgaaggaactagatgctccattccatgaagcctcagataaagctggctggtttttgacgacaaaagttgccgccgagtcatggttggagtcgagacgttcacccaacttggtagttgcataggttgtgtgtgttcatgaacgagtc

SEQ ID NO: 237284 - DNA, 410 bp, Gossypium hirsutum
ccgttctttgcgaaggaaggacgctttcagaggcgtggctcacgagaatccgagggccttctccccgtcggcttacgaattcttccaccccaaaacccaaaatcatgacaccaaatacccatgtgcagcctccaaatgctcaccattgcctgtagcagctgaagtggactctaacaaagcacttgaaaccaaagcattaccacaacagaaacccgggcatccactcggctggtggagtgtgcatagtttggttagacttgtggcttcggcatgggcggtttctatgtgattcaaacccgccgagttactgctacaactaatcaaccaaacactggtcagctcgatgcctgatagtgtactcttcaagcaccaaatctccattgtataaatacatataggcgaatgctcta

SEQ ID NO: 237285 - DNA, 467 bp, Gossypium hirsutum
gtaaattctgcgcaagagaagagctggaaagctacctggtgacaccaccttgattttaaaagcatggtggcagtcacattccaaatggccttacccaacagtgagtgtgatgtatttctcaggtagttctgatcctcaaaatgtgttcttttcaacagttttctgataaagtgttgcttcaggaagaagacaaagcaagattagcacagaaaacaggattacagttgaagcagattaataattggtttataaaccaaagaaaaaggaattggcataataacccctccacttctctgaagagcaaacgtgagaagtaggctgctaatgatgtatatgtgtcttgatgaaaatgagcttttcacgagaacatttgtcgattttaatttggaaaagaagtatgcaggttaaaccagtgatgaagccttaatgtaagcaaaagacaagctctctgcatagcattaatatag

SEQ ID NO: 237286 - DNA, 443 bp, Gossypium hirsutum
gaatagaaacaaggccttggtttttttagtaggcaaagattatgtttctgcagtgagggaatacgaggagtgtatggaaagggatcccgcagatgttgtggctgttaataataaggcgctttgtttgatgtatttgagagatttgtcagattcaattaaggtattggagaattcactcgaaagagtacctaccgtggcattgaatgagactttggtggtcaatttgtgtagtatgtatgagttggcatatgttaatcactcagagattaagaggactttgagtaattggattgctcgagtctctcctgatgattttgacgcatcctgtaccagggtttgagtctttgtgccaaaaacaaaacaccatttgatgccctttatggtctgatgaatctgaatttgagcagattttgacgagtaaagatgcagagagttggttcaaa

SEQ ID NO: 237287 - DNA, 405 bp, Gossypium hirsutum
atcgttacttgtcttccccaacttcgaattcattgtattccaggtatatggaggggaagctaggatttccacactacgaaagctattccccttgatggaagacaaaaagagcctagcctctttggcggaaagggtccatataaaaggaaaagcttctttgttggctgctgttgattactatgtcgggatgcatagtgacatctttgtctcagcttctcctgggaatatgcacaatgctttggtgagtacttctgactcatagaataatgcaccatggattggtgaatgcaatgaattttcctgccttgtgctgggtaaattgtatacatatgaagctgctaatagatgacagttacaatgatgcaaacaggtgggacatcgaacttttgagaacatgaagaccat

SEQ ID NO: 237288 - DNA, 462 bp, Gossypium hirsutum
gttgtttgaggacctttttagcggcctcaagccgggctcgatgttagccgaaggcagtgaaccagattacctgttggaagctgtggttggtcatgtttacgagggttctttccatatgcctaatcgatcaaatacacaacttcctacatcttctcaacctcaaaccgtggagagtgactattacggagaaacccaaaagggaccaaagcagtccagcatcaaagtaagaagggctaaaccgggtgacaacccaaaggctaggccaagggatagacagttgatccgagatcggcttaaagagcttcgagaacttgttccaaatggtgctcagtatagcattgatggtctcttggatcaaaccattaaacacatggtgtatttaaggagagtgaccaaccaagttgagaaattgcagcaatgggcgcaccgtgaggtgaccagtcgtaagaatattagatcatc

SEQ ID NO: 237289 - DNA, 448 bp, Gossypium hirsutum
gaagatgtttccatgggagaacctgacgtctcctttgtagatagcgatgccggtgatgataaaaccagtgctgattattacttcgattcttactctcactttggaattcacgaagaaatgctcaaggatgtagtgcgaactaagacatatcaaaacgttatttatcagaataagtttctattccagaacaaagtagttcttgatgtgggagctggaactggaatcttgtccttgttttgtgcgaaggcaggggctgcacatgtttatgcagtcgagtgctctcacatggctgatatggctaaacaaattgttgaaacaaatggattgtctgatgtgattacagttttgaagggaaaaattgaagaaattgagcttcctgttgccaaagtagacatcattatatcagagtggatgggttactttttgttgcttgagaatatgttgaata

SEQ ID NO: 237290 - DNA, 458 bp, Gossypium hirsutum
atagttaaccaagtatgaatccaactcttgttttcttcatcatcatcttatgcagtacttccatcagcatttgcctggcagataatgataatcttcaggatgcttgtccgaccaacacgacagttacacggatggtgttcataaacggtttcccttgcaagaacccttcaagcatcagttctgcagatttcacgacatcaaatctaaaagatgctggagatacagacaactttcttcattcctcagtaaatatagtcactgctgcagatttcccaggcctgaacaccctcggcctatccattgctcgaaccgacctcgatctggatggcatggtaatgcctcattctcaccccagagcctctgagttattctttgttcgcaaaggcatcgttcttgcaggtttcattgacaccaacaatactctctttgagtccttaatcaatgaaggagatgtgttc

SEQ ID NO: 237291 - DNA, 473 bp, Gossypium hirsutum
ctcccatcagcctccagctcaagagttaatcgcaagagacttgcatgataatgaatggaaatttaggcatatatttcggggccagcccaaaaggcacctcttgacgactggatggagtgtctttgtaagtgctaaaagactagttgcaggtgattcagtgctttttatatggaatgataaaaatcaattacttcttagctccacgatctcgtcttttagtactgatatttcgtgtaggatgatcattggaaagaagtatgatcacgacgattttagtgaaaaggggttcaaagctacgcttcgagagggtaaattggagctacgattaatttagctgattatattcctcaaattagagcacttgatctccagggactaacaaagcgtatgaaaattattgccaaggattttgatgacttttttgagaagataatcgacgagcatgttcgatctaaagacgaaaacagagtcaa

SEQ ID NO: 237292 - DNA, 446 bp, Gossypium hirsutum
  unsure (1)..(446): unsure at all n locations
gaaattttgtaggcatctgatgattctggcaacccttgcatgttggagggttttgatggtacttatacatatggaggaaatcagtataaagcatcagctccttcatcgggtgcaagcatggaagaatgcaggagggtgactcacaaggctcttaaaataaatgacacatgcatgcatatgaagtgcacatttggtggtatatggaatgggggaggcggagatggacagaagaatttgtttattgcttcgttcttctttgacagggctgctgaggctggttttatcaaagctgctgatccagttgcaacagttcagcctcattcttttgcagaagctgctaaacgagcttgtggaaccaagtacacagatattaaagcaacatacccagctgtggatgtgggtaaccaggcttatctatgctnggatctagtttatcagtacaccct

SEQ ID NO: 237293 - DNA, 314 bp, Gossypium hirsutum
gtctttgcttcatccagaccagagagttgaatatgaacggggtacctttaacaatgacttgtgtggagaacgctgtgatgagcccactatcatgatccttaatctcaaaggccatgccccagatacttgaaaaggggggttacaccttgttcacaccacattacataacttggtattgtcctcaagcttttatattcagcagtcagtgcaagtctcagtgcataaaccatggaagatattgtgcccctgatccacaacaagattttggagaggggtatcaaggaaaggatgtggtgtttgagaacttgagacag

SEQ ID NO: 237294 - DNA, 297 bp, Gossypium hirsutum
cggtcgcgtgggaaataatacgactatatttgttggtaatttggattctaacgtgactgaagaccatttgagagaggtcttcagcccatatggtcagttggtgcatgtgaagattccacaaaacaagcgttgtggatttgttcaatttgctgataggagttgtgctgaagaagcactccgaatactgaacgggactcagttgggtggacaaagtattcgggtttcatggggtcgtagcacatcaaacaagcaggcccaagcagatccaaaccagtggaacgctggatattatggata

SEQ ID NO: 237295 - DNA, 468 bp, Gossypium hirsutum
gttttacctgctggaatttatcatcgctttactctggatacagacaactatattaaggcaatgcggctctttgttggtgatccaatttggactccgtacaatcgtccgcacgatcatcttcctgcaaggaaggagtatatcaagaactttttgcgggaggaaggtggtggccaagccgttgatgctgccgcataaaatcaacattcatctggtggtggccaagtcgttgatgctgccgcataaaatcagcattcatctctggtatcgtgtcttataaaatatgaaaccccggatttgtggtaataaataagtctaggcttgtctgcttttgatgcgtggatatggatcgtattggatgttgcttgctatatattgcctattccatatcgaaaattcgcaaacttgctatgtatttctacattgtatgtgcttactaccagattggctcttaataatcaaagtttacat

SEQ ID NO: 237296 - DNA, 426 bp, Gossypium hirsutum
ctctgttgaaggcattttgagagatcttcctggtgttagtagggctgttgttgctttagccacttcattaggggaagttgaatatgatcccactgtaattagtaaagatgatatagtcaacgcaattgaagatgctggttttgaagcctcacttgtacagagtagtgagcaggataaaatcatacttggggttgctggtgtttttaacgagctagatgtacagcttatcgaaggcatacttagcagcttgaaaggggttcgacaatttcgttttgacagaagttctggagaacttgaagttctttttgatcctgaagttgccagttcaagatccttggttgatggaattgaagagggaagtaaggggaagttcaaactacatgttatgaatccatatgcaagaatgactactaaagatgaagaaac

SEQ ID NO: 237297 - DNA, 444 bp, Gossypium hirsutum
gaagcttctcaggcatcttagacatgagaatgtgattgctttgaaagatgtcatgatgccgactcataggagaagcttcaaggatgtttatctggtttacgaacttatggataccgatttgcatcaaatcattaagtcttctcaagtgcttaccaatgatcactgtcagtatttcctcttccagttgctccgaggcctgaaatatcttcactcagcaaatattcttcacagagatctgaagcctggaaaccttcttatcaatgcaaattgtgaccttaaaatttgtgactttggactggcacgcactagcaatgccaagggtcaattcatgacagtagtatgttgtcactcgctggtacagggcccctgagcttctgctctgctgtgacaactatggaacgtctattgatgtttggtctgttggatgcatctttgcggagcttc

SEQ ID NO: 237298 - DNA, 289 bp, Gossypium hirsutum
tggtgtcaggccctgaggtctgcaaggaccagcaactgtgtgaaaccatgatcagtgatgagagtcatatcgtatgggacaaggcactactactatcccgacacatggtggtgtcatattgctgccacagtgggggattgattgatgaggccaaagagcaaattggtgatagctctaagccccaaggttcagagccagaatcagaatcaggttcaagtgggttcaggagcttcttgcaccacactgtactagatgcatttgaatctcgaggaattcatgttccttctag

SEQ ID NO: 237299 - DNA, 414 bp, Gossypium hirsutum
gatattgtttctaaccggttcatttacattcagtgagaatgggggtgtaaaaagcagaaccggtggtttgagtgtttcattggctggatcggatggtcgtgtaataggtggtgggcttgccggtgtactgttggccgctagccctatacagattgtggttggaagcttcatgctaaatggctacaaagtgcataaaaggaagccttaccgtgagcagcacacagttgcagcttctgcagtcgccaccgctccttcggccatggcgatggcagaagaaggaaggccaatcatctcacaagcaaaactagattgtgaaaacaacgtgaaaccaacatgtgctttccaagtggggagccttgaggaagcaagtaaaaacataactgatcataaaaacatagcaaatattgcagcagc

SEQ ID NO: 237300 - DNA, 349 bp, Gossypium hirsutum
atttttccttttctttctactcttaactccacagcggacaggtcgataccagtttcactctttagcagctcgcactctttcgttgtttattgtacagaatgtttctcaaggtgcagatgccctggaatgtcataattcctgctgacagcttggatgccaaaggcttgatgctcaaaaaggcaatagtgatccgccttatggatgaatttgcttgcaagaaggccaccaaggatcgcggatatttcatggctgtaacaaccctagagagcattggcgagggcagagttagaccagaacacagggatgtgcttttccctgttgtcttcagcggaattacattcaagatgta

SEQ ID NO: 237301 - DNA, 335 bp, Gossypium hirsutum
gctgtcaaagctataaatgagaaaatcctctcagtcttggatgaaacaggatcgggcagggtggacttgggcatgttttatgctgttcttgcgcccctttgtagtggacctccagataagcgaaaaaggatcgcctttgatgcactcttatggcgacctgtaaatgaaggtggttctcatattagaaaggtagatgcagttcagtacatcaaattgttgagggctatatttatcccttctcatggagctagtgaaatgctggaagttcatggagaaacagatacctcaatggtatctttcaatgagttccttatcatgttcaatgatcctgattg

SEQ ID NO: 237302 - DNA, 402 bp, Gossypium hirsutum
aggaaatggcatctatctcttccaataatggctactttgcaccggcttgctggacagctgctttctgatttgattgaccgtaattatttctacttgtttgacatggagtcattcttcacagctaaagcattgaacatgtgcatacctggtggtcctaagtttgagcctctataccgtgatatggagaaaggggatgaggactggaatgaatttaatgacataaacaaactaattatccggtcacctcttaggacagaatacagaattgcttttcctcatctttataacaataggcccaggaaagtaaagttgtgtgtgtatcacactccgatggtcatgtacattaaaacagaagaccctgatttgccagcattctactatgatcctgtgatacaccccata

SEQ ID NO: 237303 - DNA, 289 bp, Gossypium hirsutum
cggacgcgtggggggatcgacactaatttcacagggacatcaaagacaacagatgatgaagagtttggagaattgtacaccttcaaatggactactctcctcattcctgcaacaacagtgttaataattaacctagttggagttgtagcaggcatctcagatgccataaacaatggataccaatcttggggaccactttttggaaagctcttcttctcattctgggtcattgtccatctgtatccattccttaaaggtctaatggggaggcaaaacaggacgcccacca

SEQ ID NO: 237304 - DNA, 344 bp, Gossypium hirsutum
catcttttttatttcgcctcgtctacctcgacttaggtgaggcatgagtgcaagtttggtgagcagccacaatttagatgacgacgatgtcgaggatctagagatgttgctcgaggcatatttcatgcaactggacgggacgcgaaacacgatattatctgtccgcgaatacatcgatgacacagaagactacgttaacatccaacttgacaaccaacgaaacgaactcattcaactccaattgacgttgaccatcgcatcgtttgccatagccgtcgagacattagtagctggatggttcggcatgaacatcccttttacatggaacaacaaggaggggatat

SEQ ID NO: 237305 - DNA, 391 bp, Gossypium hirsutum
cttttttaaacaaagccagtaattttgttgtggtgggtgctgtttaataattaaaacgtgttggaataactccagaaatgttgttgtgggcaaggtccaagttttgaagaaattgaagatcacaaattttatgaggaatatgtcaatcaaagttatttgatcgaaggcttagaatcacaagatttgagagcttatcaccaatccatgctggtacacttccactgaaacgattttcactaagatcaaacataatgaaatgatatggttatgcttgttttgaattaaggttttattatatggatttaaattagctgtgactgagtttctgaatttttggatgtttgttttggttgcttaaatttatagataaatgcttaagactgttattgcc

SEQ ID NO: 237306 - DNA, 477 bp, Gossypium hirsutum
cccactctaacgcccacgcgtccgcccacgcgtccgacgaggcattcacagtggcaaaggagtgatgatggaggtgaaagttcagaaacagattcaccgagtgattcattgagagatatacatgatatttctttgaacctaaagttttcaatggatggagataggagtggagctagtggaaatgataattctttagattccgaagggaatgaccgaaatagtaagttggagaatgccgctttatcatggtcaaaaggtgttttaaaagatcaaaggaaagctggatccggagacagaattgaccatggttccagcacaggtaagtttccagcattaaggaggaggaaacatatttttgtcattgctgtggactccgactccaatgaagaccttcttgatgctatcagaaaggtttttgaggctgtcgaaaaagaaaggattgaaggctctataggttttatattgtcaacatacatg

SEQ ID NO: 237307 - DNA, 422 bp, Gossypium hirsutum
ctcatttttcacaccgatgtcgtcccttctgagcgtgggaagtgggattatcatccttggggtgcccacatcgatgaaaatggtaatatattcgctagaggctcccaggatatgaagtgcgtgggcatgcagtatatggaggctgttcgtaggttgaaggcttctgggtttcagccaaaacggtcactttacttgtcgtttgtccctgatgaagagattggtggccatgacggtcttgagaagttggctcaatccgatgttttcaagaatatgaatgttgatattgtgcttgatgaagggttggcttcacccaatgagaattacaggttattctatggagagaggatgccgtggtggctggtgataaaggctactggagctcctggacatggggcgaagctttacgacaacagtgcaattga

SEQ ID NO: 237308 - DNA, 456 bp, Gossypium hirsutum
gtttttctgtaaaaggattggcaccaatgtcgaaggtgggcggatatgatctcagtggggatgcaatgatggaggattggttcaagcagtttgaggagcttgccgggtctcaggacatggaatcgattgtagagactgtgatgcaaaaacttttttccaaagagattcttcatggaccgatgaaggaaatcgaagaaagatacccacagtggttagatgagcacaaaaccagtttgagcaaagaagaacacgaacgatactccctccaatacgagctgataaaggaacttaatggagtttatgaaaatgatcctcgtaacttcacctggatcgttgacctcatgcagaaaatgcaagaatgtggccagccaccaaatgatatcctgcaagatcttgctcctgaattcggtttatggaatcttgactagctatccccagagatggtggattcacagc

SEQ ID NO: 237309 - DNA, 442 bp, Gossypium hirsutum
gcaacttttaaggagatataatctgcgagatatgtcatgggtcttatcaacctgattatgctggtccacctcgcccccagacggacgaaacagctatcgatattggtggaggctggacaatctctggcacccctctggatttgcgtgattctcgccttttggccattgcagaggcagaacgccaatttttggaaactgggtatgacgaatatgctgcatcaaatgccactggagctgcattttgccgttcagctgctgtaattttaatggcacttctgctattgcggcatgcagtgactgttccagatgccgattcagatgatgatgtctcttctttcttctcttttttcttgcttcgagctgctgggtttctcttgccatgctacatcatggcttgggccatcagtatattacagcaacgaaggcaaagacaggaagcagc

SEQ ID NO: 237310 - DNA, 365 bp, Gossypium hirsutum
ctgatgcgtgggtcgcccacccgtccatcgcatcatgtttcttgatgaaaaccccaggggatttgaacaagctaacaggtttgggattacagaatttgcgaatccaaaagactactataagccaattcaagaggtgattgtcgagatcaccgactgaggagtggatcgcagtgtggagtgtacagggagcatccaagccatgatttccgcttttgaatgcgtacatgatggctggggtgtttgcgtgctaattggtgtgccaaagaaagacgatgcattcaaaactcatccaatgaatctactacatgagaggacccttaagggtgctttatatggcaactataaaccacgcactgatattccca

SEQ ID NO: 237311 - DNA, 479 bp, Gossypium hirsutum
cggatgtttggtgcttttggggaaattaaagaaataagggaggttccaaacaagcataatcacaaagtcattgagttttatgatgttagagccgcagaagctgcccttaatgctctgaataggagtaacagtgctgggaaacagatcaaacttgaaccaagccgtccagggggtcttaggcgctttattcagcctgagcaggaacaagatgaacctaatatatgtggaagtccttttgatgagttatcagggcatattggagtaattgcatctggtggcatggagaatgcatctaaccaggtgttacattcagttatccagtcacctgttaatacatttgttgaacctcgtcggagttctactgttcctattaacttagcctctccagcaagagtggcacctataggccaaaaattaagtcttcgggagcccaaccactctatggatgaaatgaaatatgctaaccatgggataccgag

SEQ ID NO: 237312 - DNA, 399 bp, Gossypium hirsutum
  unsure (1)..(399): unsure at all n locations
attcttatcccaccatgtcacctgcaaccaccgccctggtnttcctatatacaactattgtggagctcaaatgcacacaacatcacacgcatactcgccaaaaaccctgagttctccaccttcaaccactacctcaccctcactcatttggcttccgagatcaaccgacgcgaaaccattactgttctggccctcaacaatgctgccatgtcatctctcttgtctaaacaactctccctctacaccctcaagaacgtcctctctctccatgtcctcgtcgactacttcggttccaagaagcttcaccagattaccaatggaactgctttgacgtccaccatgttccaggctagtggcgccgctcctggttcctctggctacatcaacatcactgatctt

SEQ ID NO: 237313 - DNA, 487 bp, Gossypium hirsutum
  unsure (1)..(487): unsure at all n locations
actggtttcaactggtacgttatattccatggccaggtgtgccgttttcaccgatgaaggcggggatttcgagggtcaatatttcgctttcatgtccgacgccatgtcaatcatcgtgggatcgttgctcgggacatcaccggtaacagctttcatcgaatcatcaacagggatacgagaaggtggacgaacaggactcacagctttaacagtggcgggatattttctgctagctttcttcttcacaccgcttttggcgtcgataccagcatgggcggtggggccgccgctaatactggtgggagtgttgatgatgagagcagtggtggaaattgagtgggatgatatgaggcaggcaatccctgcttttgtgacattgatattgatgcctttaagctattcgatagcatatgggctaattggtgggattgggacttacattgtcttacacattgnggactgggcaagggatgtgctggtaaagtat

SEQ ID NO: 237314 - DNA, 476 bp, Gossypium hirsutum
cgtgtatgtggaggcggatactatcgccatattggtgtgttcttttccaaaggtcgggggttccaaaacgagtatgcgtttaaggcagtgaaagcagctgggattacatcaattggtgttcgagggaaagactccgtctgttttgttactcagaagaaagttcccgacaagcttttggatcagactagcgtcactcatcttttccctattactaagttccttggattgttggctactggcatgacagctgatgcaaggaccttggtccagcaggcaaggaatgaagcagctgagtttcgtttcagatatggatatgagatgcctgtggatgtattgtccaaatggattgctgacaaatcacaggtttacactcaacatgcttatatgagacctcttggagttgttgctatggtgttgggtattgatgaagagaaggggccccaactctacaaatgtgatccagcaggccattttta

SEQ ID NO: 237315 - DNA, 391 bp, Gossypium hirsutum
gaaattgatgccttctaagggaaatcagcaaattcctaaggtccatgtgaggaaacagtggcaaaactatgtaaaaacatggttggaccaatcaggaagaaagaagcgacgaatagaagcacgtaaagcaaaagccattagagtatttcctcgtcctttgggtctcttgagacctgttgtacatgctccaactattcgctacaatgcaaagatcagagctggtcgcggttttactttggaggaattaaaggcagcaggagtgaacagccttgttgcaagaactattggaattgctgttgatcacagaagaagaaatagaagtgatattagtctcagagccaacgtacaaagacttaaggaatacaaggccaaattagtattgttccctaag

SEQ ID NO: 237316 - DNA, 458 bp, Gossypium hirsutum
ctgtattcgaagggttcatgaacatgtttcttgaggaagaagctgactttgctataacgatgatagaggctttcggaggcagaatggatgaaatccgggaaaatgaattaccttacccacatagagcaggcatcttgttcgaatccacttacattgtccaatggacaaatgaagcagaagcgggaaggtacataagctggatccgaagactctacagttatatggccagttatgcttcgaaatctccgagagaagcatattataattacaaggatctagatcttggaactaacaacattgttggttacacaagttacgaacaagctagcgtttggggtcttaaatatttcaagaataactttaaaagattggtgcagataaagaccaaggttgatccaatgaatttctttagaaacgagcaaagtacccctcctctttgatctccatgaaagaagaag

SEQ ID NO: 237317 - DNA, 416 bp, Gossypium hirsutum
tccacgcgtccgaaaccagttgcatgcagcaggggaatgtagaacccaaactctcttcttcgtaaaccaaacgtctccaagaaactcctctcccccaaaatggcgatttcttatattcatctcttcatactatcgttcgtttccatttctcgcttccttgaaatttcaaaagctggagcggaatcggagcttgtagccgatcttttaacccttcaatcgcaatcagaatcgggtgttatccacttagatgatcgaaccgtctcgaaattcatcacttccaccaaaacccctcgtccttactccctcctcatcttcttcgacgccatcccattacacgacaaatccgacctccgcctccctgtgctcgtccacgacttcgccctcgctgcctcttctttcatcgccaaccacaacag

SEQ ID NO: 237318 - DNA, 441 bp, Gossypium hirsutum
tcgttcacgcgtccgcccacgcgtccggccttatcatcttttttagccttattttattcgtcgaataagcgatttctgtttttcgattttctctctctttctccggaaaaaaaaaaagaaaattttttagatctagaatctgcgatcatggagatggagcgcgtgacggggttccctcatacgcatatggatcgccgaccaagaaagcgtccgcgattgggctgggacgtaactcagctgccaccgcaggctcaggtaggaatgttttgtgcacaagaagttgggagagtgacaggctttgcttcttccactgcaaaagcacctgcagattatgctagtactattactactagttcttctgtagttctaaagggaggagtggctcaaaatggttctcccccatggcgagacgatgacaaagatggacattacatgtttgag

SEQ ID NO: 237319 - DNA, 430 bp, Gossypium hirsutum
aacatacccgatagcactcgcaatactattttagcaattttaacctcttgcatttgcatccgcttttgtgcttggctgatggtgtgttcatcttgtcaaacacttatgaaattacacaaatttaaagggaaaaagtgtaggattatagaagttataattacaataacattaggggaatcattaggtgggttaacaataggtggagcaaatgcgagagggttatgcaattcaatttgatgtcgaatatcaagaacaatatcttcataatctggcttgttcaaacagtcatcacatgcacaacaatccttgcagtaaatccctgctgcaaagcactcacaataactgccaatcacaacaaacaacaaaactcaacagatgttccaaacatcttcactttttttgagcaccctctgaacattcagggtatgat

SEQ ID NO: 237320 - DNA, 481 bp, Gossypium hirsutum
cccactcgtccgctgggaatgaaattgaagagggggaagctcacgagggaggagctgtttgggacattttccggaggcaagatgttccaaagctgcaagattaccttaaaaagcactttagggagtttagatatgttcattgttgcccagtatcacaggtttttcatcctctacatgatcagtccttttatctgaccatggatcataaggcaaagcttaagcaggaatatggaattgaaccttggacttttgttcagaaacttggggaagctgttttaatacctgctggttgtcctcatcaagtccggaacattaagtcatgcataaaggttgctctcgattttgtttcgcctgaaaatgtcggtgagtgtgttcgcttgactgaggaatttcgtctgcttccccgtgatcatagggaaaaagaggataaactagaggtgaagaaaatgactgtacatgcagtccagcaagctgtgaaata

SEQ ID NO: 237321 - DNA, 416 bp, Gossypium hirsutum
gttttaccgtggatgacatgtacaaggcatgcgagagatttgaaagtcttggagtagaatttgtcaaaaaaccaagcgatggttttgcattcatcaaggatcctgatggttattggatcgaaatctttgatttgaaaggaattagacaaatagttaacagtttagcttaagttaatgcttcaccaagttcaggaaattgatctgacaaactcaagtgaaatcttaattgaagcacatttcattctagttatgtttatgttttctttatgtttgatgtgtataacaagtaaggtgaaaataaagagttttgtaagagaaaattcaaccttgaaatttactaaattctatttatattacatataaatttgtatgccaatgtatcatgtacgtgctttacaaagtcatgaatgaagtag

SEQ ID NO: 237322 - DNA, 380 bp, Gossypium hirsutum
gtcttttgactctgcagtttactgtcaccagactggggaacttatcacccttccatacaatgctgccatgccagtgtccctcaaggtccttgagcatgaaattttcacaatagcacctatcaagaatttggctccaggattcagttttgcacccttgggactcatcaacatgtacaactctggtggtgccattgtggatttaaagtatgaatttaaagatggtgccaaactatctgagcttgatattgaatatggaagtgaaagcagtggtcttaatgtgagggcggagaattctagcaatgaactggtgggaaaggtttgcatggaaataaaaggttgtggcaactttggtgcttattcatcagccaagccaagaaagt

SEQ ID NO: 237323 - DNA, 403 bp, Gossypium hirsutum
tttaaaaagggctttcggttatggaaagaatgatagattctctatgtgtatgggaatattggcttgcttgtttgtttgtttaattatagctaataggctgagaagattgcaactctagtcaaagctgcaaatgtctctgttgaatcttattggccaagcttgtttgctaagctttttgaaaagtgtaacattgaggatctcataaccaatgttggtgctgccggtgctggtgccccagttgctgcagctgcacctgttgcagctggtctggtgggtggaagctgctgctccacctcctgccgaggagacgaagaaggaagagccagaggaagagagcgatgatgatatgggattcagtttatttgattaggagctcctttcagtttatgaattcgttgattac

SEQ ID NO: 237324 - DNA, 314 bp, Gossypium hirsutum
gtcaatttggtaacttattagtattgttgtgtttcaagtgttgtcttccaatgcatttggttagattggtaatacttgcttcagctgccaactttaaccaagacatcgaagttacttggggtgatggcaggggcaagattctcgaaaacggaaaccttctcactctcaccctcgacaaattctccggctctggttttcaatccaagaaccagtatctgtttgggaagatcgatatgaacattaaactggtcccaggcaactctgctggcactgttaccacttattatcttcgttcggaagggtcgacatgggat

SEQ ID NO: 237325 - DNA, 425 bp, Gossypium hirsutum
tctccacgcgtccgcggacgcgtgggggatgatgaagaggaggatggatttttgaaggcattcaaggtagctaattttgaatataaggacgaagcagaaactgttgtggaggaagaagctcaaaaagtggccgtggaggaaaaaaataccatgaataattctgaaagaacaagttactgggaagagttgttacgagaccgatatgaagttcataaagttgaggagttcaatgctctgggaaaaggaaagagaagccgtaagcagatggtatctgttgaagaagatgaccttgctggtttggaagatgtaagctctgatggtgaggacgataactttgaagctgaactgactgatggtgacacaacttcatctggaactcaatctggtagaaggccttacaggaagaggaatcgtgtggatagtac

SEQ ID NO: 237326 - DNA, 416 bp, Gossypium hirsutum
gttaattatgtaagttggaaaagaaaattctaaataacagaaccacaaaggagacaaagaacaaatcttcaaaataataagataaattttccttactgaagaaaccaaaccaaatgataaaatatgcttctattaaagatccaacacatgaaagaagaatgccttaatattaggcagatttaaaaccaaatccatgagatatctacacttacacactacatgtattgtttgaaaattgctgaatgacaccagctgcagtccgagacatggacactttaagaactttcccatattggccaaaatattctagctgttggagaagctgcacacagagatgcatgtttaggtcatgatacaaggagaacaactagtttgagaacatgcgcaagaggaaagaatgagacagcacatcttca

SEQ ID NO: 237327 - DNA, 254 bp, Gossypium hirsutum
tcctcacgcgtccgcccacgcgtccgcccacgcgtgcgcccacgcgtccgtgttcatccaaatacccaaaagtcaagagtagattaaactaatggccggaatcggacctttgactcaagattgggagcccgtcgttattcgtaaaaaagcccctaccgccgtcgccaagaaggatgagaaagtcgttaacgccgcccgccgtgccggtgccgagatcgagtccatcaaaaaatcaaatgctgggacgaataggg

SEQ ID NO: 237328 - DNA, 361 bp, Gossypium hirsutum
tttccggacatcaagatccaatcccggcttctggaattccgggagttcaatcccatcccatgaccatccatcatcatatgcgtcatcaaccatatatcccccacaacttatcacgaattccctccgctccgatacccgggcaatggacttccggtctttgtcattgtttcgacgaccccgtaaactgtgcaatcacttgcgtatgcccatgtatcactttcggacaaataaccgaaatcatcaaccgaggatccaaatcttgtgtttcgaggggatttttatttggaatgttgtctatggtgggagctgcatgtttttattcatgtttttcccgatcaaagctacggtgacaatacgattt

SEQ ID NO: 237329 - DNA, 214 bp, Gossypium hirsutum
atttatgtatcgccttcgaatatggaaaaggacgcttggatgatcgtacatttctcagtgcagatattcaaaatataacgccgacccatgtgtccaatgctgctggcgttaccggcagacctaatgtagatgggtgtgaatctcacaaaacagaaacaatcattgccaatggggctggtactctaaccttggcagatggttgcagagaccatgg

SEQ ID NO: 237330 - DNA, 446 bp, Gossypium hirsutum
tttgcttctgtttacattcggtagaggaaggagagggtgccctggagtggtgcttggaagcttgatgactaccatgctgttagcgaggctattgcaaggattcgattggagcatcccgactaaccagggaaccattgatctttgtccaggaaggggagttccctttctggctaaaccactgcttgctgttgcaaagccacgattgctaccgcatgtctactctttctcaactgaaagtgaaatacagtgattaactccttgacgaagatgggggttgacaagggagacctgtttgtggcttggttctaatgaaattgtttttatccctagtatgtatttcctgttgtagcttatttcggtgtttgtatggggtgtactcacttcagcaacttcttatgtattgttttctcattaataaaaatggataagcagttagtagctgatgt

SEQ ID NO: 237331 - DNA, 337 bp, Gossypium hirsutum
tccttcgcgtccgatttgttcttaatcaacaacaacaaagaaaagaatgttcaagaaggcagtagaagctaaggctcagcagaggctatcaggtgccgacaggaagaagctaaaacgcaccatcagagaccgatttcccagagcttccgatgccgatatcgatgctttgcttccgcccaaggctgagattactgtttccaagtttcaaaatcgagtccatgtgtatggtgtagaagggggttttcctttgtttttcaatgttgatggccgtggctctgaaatataccctaccgtttttgctctctgggagctccctgaaatgttaccttattttatg

SEQ ID NO: 237332 - DNA, 413 bp, Gossypium hirsutum
tctcttcgtccgccacgcgtccgcggacgcgggggtcgataacaaggcttatatattctacatctttatattatgggtgacattcttcatatgctcttccacccatggcaagtcttagatcacccaaggtttctatggtctccactcttccacctagctccaaaggggttgaagatctgaaacggcctttcatggctccaaagctggtacaccaggcttcccacaccatgccacctgagaagattgaaatctttaaatctttggatgattgggctagggataacattctgattcatcttaaacaagttgataaatgttggcaacccaaggattttcttcccgatccttcgtccgatggatttgaagatcaagttagagaacttagagaacgggcaaaggagattccggatgag

SEQ ID NO: 237333 - DNA, 340 bp, Gossypium hirsutum
tggatgcactagttgggacactaagagcagcggagagactaaaagttgttgcatatgatggtgaactactactgcaaggagttcatgacaatgtggaaatcattctcaaagctacaacaccagcagcagcagctcagagtagcaactaatgcagttctaaataaataattgcaattatagttttgcagcaaaagtttgatgatattctatgtaatttttcaatgtttatcatgtttgaaagcttgcttcagcataagtgcataacagtatttttgaatactctattatgaaattttccagagtgtactacacccagatttgtatatgttttcttttggtt

SEQ ID NO: 237334 - DNA, 355 bp, Gossypium hirsutum
ggttcattaaggatcggttatggcatattttggatagagcatccattgagaagaaatcagtggacttgcaggacttgttgcttcggttaacgtttgacaatatttgtggccttacctttggtaaggaccccaaaacactctctcctgagttacctgagaactcatttgctgttgctttcgatacagccacagaagcaactctctataggtttttataccctggtcttctatggagattggagaagattttggggattggagtggagaaaagattgaagcgtagcctccaaattgtcgagaactacatgaacgatgccgttgaagcaagaaaggaagctccatcagatgatctact

SEQ ID NO: 237335 - DNA, 442 bp, Gossypium hirsutum
ggcggtggccagagacgcgttttgcttggtggacttagcaaaggaggcgtgggtgcactatgtgctatatatgtgtattggacggacgagggagatatagtggctggtgtgtcgatggttcctagtccgtatggtggaagccctatagcttcagatatcttgagagaaggtcaactcggtgattatgttaatatacggaaacttatggagattttgatttgtaaagtgattaaggtttggagttatgtgttatgcattttcttttctctttagtttctacaaataattgacagtatgatattatgcaattatgttcgctgcaatttctgagtttccatgggaggaactcagcacctgctttggtattttagtgattctcacctctttcctagggaagaagggtttatgagtctactttctagccaagtgcagtatccggata

SEQ ID NO: 237336 - DNA, 426 bp, Gossypium hirsutum
ttcattggtcttcatttaatcatttttagaaagaaaacccatttccctcccattatcatttgagtaattgaagaaaagtgtcgcgatggccaaaaccaagagaatcatcatcaccattctcctaaggcttctagcttttggtgctactctttctgcaaccgtagtcatggttacgagccatgagtctgccgaggttatgaacataaaattctcagcaaaatacagcaactcaccaacatttaagttttatgtgacagcggaggcaattgcaaccggatacggccttatagctctcttcctgtcttcgagaaggtcgtttgatcgcctgattgtgattctagatgtggtcatagcgttgacactaacttcgagcatctcagctgctttggcagtagctcagataggcaagaaaggggacactcatgc

SEQ ID NO: 237337 - DNA, 417 bp, Gossypium hirsutum
tggtctgtgaggacggcagttccgttctaaagggaaaactctttaatccaaacgcagacgttcccttctttttcttattttcaacaaatatggtttttattcttgctaatgttaatactccaattatgtgtttcttctctttgtgagttctccccagatttctgaaaaccccgaaatcaaaaaggtgttttctttttgtttgtttgttcacatcttcatccaaagcaaccatggcggcgtctgatcctcacgcgcctctccttcgtccgcgtcaacctgatggctcggctgctcgccctgtatcgttggcgcatttattggggcgagccacgggacggcgtggcgcttccatgctggttagggagacagcggcacgtgagttggaggagcggagggccgactgggggtactcgaagc

SEQ ID NO: 237338 - DNA, 133 bp, Gossypium hirsutum
atttatattaggcttctctgtttttatgggcttgggtgtgccacataacttcaatgagtataccgtagttaatgggtatggtcctgttcacacaagctcatgatggttcaatgacattgtagaatgtaccatt

SEQ ID NO: 237339 - DNA, 192 bp, Gossypium hirsutum
tgcgagacctccatactttatccagctgatggaggcaacatgcattgcttcactgctgtcacagtatgcacggtgttggatgttctaggccctccttactcggatctcgaaggacggcactgtacgtactacttggcctacccattcacaaaattctcaggcgatgaacaagtatcaattccggatgaagag

SEQ ID NO: 237340 - DNA, 252 bp, Gossypium hirsutum
ttctctttcgtgcggcagatcaccatcctgaggggaggactagaggaagttttggccaggaattacaaatatctaccatgttcactcatcaccagaagattgttgtagtggatgctgcaatgcctaatggagatccagagaaaaggagaattgtgagctctgttggaggtattgatctttgtgatgggagatatgacacacctttccattccctgttcaggaccttggacaccgctcaccatgatgattttc

SEQ ID NO: 237341 - DNA, 481 bp, Gossypium hirsutum
gttttgttttgcatgtattgacaactggggggcaatcacaaacctttgcccagtttgccagagtgaatttcagttaatcacctgtgtcccagtatatgacaccataggaagcaacaaagttgaggatgagacattttccagagaggatgattggtccattgaagggaagagcaacactctttctttcccgtcatactatattgatgaaaatttatctgcttggatggagatggctgcaaagttcgaagtttatccacaaccattgagggagatcccgatctcgatacatcaattgcttgtgactcttgtgatatatggtaccatgcattttgtgtgggatttgatactgagggcacatcagaagacacttggttatgcccaagatgtgtagcaaatcaagcttcacaagaatctggtgtggttcttgagaaaaaaaacaccccgcttggtccagagattgctaatggtgaatatgtgacag

SEQ ID NO: 237342 - DNA, 466 bp, Gossypium hirsutum
ccctcgcttccggtgaaagggcactggagtcgccgtgtgcctcaaggggctgctctggaggctgaatggaatgcaaagttttctgcatatgagaagaagtacaaagaggaagctgcagagctcaaatcaataatcactggtgaactacctgctggctgggagaaggcacttccaacatacactccagagagcccagctgatgctaccagaaatctctctcaacaaaatcttaatgcccttgtaaaagtactcccaggacttcttggtggaagtgcagatcttgcttcttccaacatgaccttgctcaaaatgtttggggatttccagaaggacacccctgaggaacgcaatgttcggtttggtgttagggaacatggaatgggagccatctgcaatggcattgcccttcacagccctggcctgattccatactgcgctactttctttgtcttcactgactacatga

SEQ ID NO: 237343 - DNA, 412 bp, Gossypium hirsutum
attcaatggcttcagcaacatgcagtatcttctggtcgggctctctttattttgcggagggctcctctcactcttccgattacaaactcatcacttcccttccatttttctgttctttcagcccaatttccagcctgaaactttcacatcactcgcttccggtgctacccaagcgagcatttcgggttttggcttctgattctacaacggacccacatgaaattacggatagttccggcgctgaatcaactattgacacaaaattaccaagaagaagtttactagtccagttcacttgcggggaatgtggtgaaagaacagagagactcataaaccgcttggcctatgaacggggacttgtgtatgtacagtgtgcagggtgtcttcaatatcacaaattagctgacaatct

SEQ ID NO: 237344 - DNA, 424 bp, Gossypium hirsutum
cccacgcgtccgcccacgcgtccgcccacgcgtgcgtccacgcgtacgcccacgcgtccggctttttgttacctcgatttcaagtgaatcagaatgggtaaggaaaagactcacattaacattgtggttatcggccacgtcgattctgggaaatcaaccaccactggccacctgatttacaagcttggtggtattgacaagcgtgtgattgaaaggttcgagaaagaagctgctgagatgaacaagaggtcattcaagtatgcttgggtgcttgacaagctcaaggctgagcgtgagcgtggtatcaccattgatattgccttgtggaaatttgagaccacgaaatactactgcactgtgattgatgcacctggacaccgtgactttatcaagaatatgattactggtacgtcacaggctgact

SEQ ID NO: 237345 - DNA, 431 bp, Gossypium hirsutum
cccacgcgtccggttttcactttcaaaaaacttcggacattcaccatgtctggcacgtgcggcaactgtgactgcgctgaccgcagccaatgcacgaagaagggaaacagcaacaccatgatcgttgagactgagaagagctacatcaacaatgttgagatggatgctccagctgagaacgatggcaagtgcaattgcggtactggctgcagctgcacagactgcacctgtggccactaagccaacatacaatggtcatgcttcagatcatggcatatatagggatctaaataatgaatttaaggttgaataatttgtgtctgttgtagtttgtgtggtgacttatatctgtcagttaacctttctctcctttactatgatgtaatggctatgcttatggccttatctggttaatgaagtatccttactat

SEQ ID NO: 237346 - DNA, 261 bp, Gossypium hirsutum
aaatggattgttatattatgttttacttcctgagtaaagcttgttgagctatgtggttgccattgtatatgagaatgcctcgatgtcaatacaggaacatagctcaaatagcaaaggttaaggttatgaggaaacaaggccaatgggaagacctcaaaatacctagaagcattggatctatcgtctgcctcaacttgcctagtttctccggtggattcaatccttggggaacaccgtataggaagaaatttcttgatagag

SEQ ID NO: 237347 - DNA, 435 bp, Gossypium hirsutum
ctcacccaagcatgtaccatcatcatatggatagctttcgctttccacgcagttgtcaatttcggacaatacccatacgccggatacctcccaaacagaccaacagtcagccgtcggttcatgccggaaccaggcaccaaagaatacgacgagctcgaaaacgacccagatttggctttcttgaaaacaatcaccgcacagttccaaactttactgggtgtatcacttatagaagtattatcaaggcattcaaccgatgaaatatacttggggcaaagagatacggcggaatggaccaccgacgatgaacccttagcggcatttgaaagattcgggaagaaactggtggaaattgagagtaggattatggaaagaaacaatgatagtaaattgaagaacagagttggaccggtgaaggtgccgtatacattattg

SEQ ID NO: 237348 - DNA, 438 bp, Gossypium hirsutum
gcgctttattatttgttaggaactgcgtgcgatttcagcaatggctaagcgagtgaatgagattatcatatttgcgttcgtagcgttattctcaaaagcaattggggcgaaaccatactggagaactagatggccaattgatagggtgtccactgagtgcttgacttggcaactagctgtggaggctaacaatgtccgtggatggcgcatcgtcccggctcattgcctcagccacatcgaagcttacatgaccggcggccaatatgagcaggatgttgactatattgtggagcaaatagagagttacgttagtgaacttgttgtaggtgaagatggcatggatgcttggatccttgatattgacgacacttgcctctcaaatgtcatttattacaagaaaaagaaatacgggtgcgagccttatgatccaatggcatt

SEQ ID NO: 237349 - DNA, 401 bp, Gossypium hirsutum
gcaatacttcagtgcgacatggtgtgggccttgtagaatgcttgcaccattttattgtgaactctcagagaagcacccttctctaatgttcttgttgatagatgttgatgaactaactgatttcagcacctcatgggatattaaagccactcctacatttttctttcttaaagatgggcagcaaatagacaagcttgttggagcaaacaagccagagttgcagaagaagcttactgctgttttagattcggtggggaatcatgggaaatgacatttgtgaggtttccagtttcaaagacttggcagtatcttcttttctgtctctgtttgtgttgtcgtgagctttggttgaatgtggtgtatttgtaaactgttgtttgttatataagtgtaatatttgc

SEQ ID NO: 237350 - DNA, 363 bp, Gossypium hirsutum
attttctcgactgaaaatatagaaagattggcaaagagaaatgtgaaaaaaggtgaatttggaatcgttcttcgctgatttgattttaagggaaaccagcatctgaaagacaaattttcaacctctcaggacctctacatctcacttcaattgactggaataactttcatcaccgaagatcggttgctgcaagcttggtccaaggagtgtacattcaagaacgcgatcgccaggagaatcgccgaggtgcccaagctcatgcgtcaccttggtgggatttcttcaatttttaactgatccgtcctctcgtagatgatgttgataactccatttttggtgccatttatgaaaacaagtctttta

SEQ ID NO: 237351 - DNA, 403 bp, Gossypium hirsutum
cccacgcgtccgcgtccctgtattggctccccttccaatagggttcgcagtgttcatggttcacttggctaccatccccatcaccggtactggtattaaccctgcaaggagtttcggtgctgctgtaatctacaataacgacaaagcctgggatgaacactggattttctgggttggtccatttgttggagcacttgcagcagctatatatcatcagtacatccttagagcagcagctatcaaagctttgggatccttccgcagcaaccccaccaactaaaaaaaatcaacccaaatagctttgtctccacttcactctttttctattttctccatttgttcgtttgtgtgtatgagaagattattatgaatgatgaatgatgatgaccctttcctttttatc

SEQ ID NO: 237352 - DNA, 351 bp, Gossypium hirsutum
ctgatggagaaagatgcttttgaagagctcaagaagttggcagctgcatcttcgaatgagaaatcaagtctgacagtcgaagctgaaccagtcaagaggcctactcaggtttctgatgctgtgaaacatcgtggttttgttgcttatgagcgtgaaggtgttcaatatagagatcctaatgttcggatgcatgactggaaggaggtcatggaggaatcaaaacctggcccacttttaaagacacagtctgctcgctgcatggactgtggtactcctttctgccatcaggagaactctggatgtcctctcggaaacaaaatacctgaattcaatgaactggtttaccaaaat

SEQ ID NO: 237353 - DNA, 433 bp, Gossypium hirsutum
gccgattcttcttaagtgggggtttatactggaagatcaagttcataagccgtctacaatacctatgggaggacataaagaagggagaggttgagatccctgaatttgtgcaaaaccatgacgatgttcttgagcaccggcccttaacagattatggtattgagccagatcctctccacttaacagaggtacctaacactgcttactcattagggaggtatgaagagagattaacctcaagggaattcatgtcatagtttcgatattaaacacacagctgaacccagtaaaagggtttgcaggctctggccagtaggaattatcaggtaaaacaagaaataagattgtctatagtagtctttatattgcgtgccttgaattgtgagaaatcgctacgctgtacttgtagttaattaaatttggtgtgttatgg

SEQ ID NO: 237354 - DNA, 435 bp, Gossypium hirsutum
cccacgcgtccgcccacgcgtccgcgaaaaagagcttgggtcatctctcaccagccgcaaccatggtgaacgtacctaagacgaagaagacttattgcaagagcaaggagtgcaggaagcacactttgcacaaggttacacagtataagaagggtaaggatagtttggctgctcaagggaagcgacgttacgatcgcaaacaatcaggttatggtggtcagaccaaaccagtcttccacaagaaggcaaagaccaccaagaagattgtgctacggctgcaatgccagggttgcaagcatgtctcacagcatccgatcaagaggtgcaagcactttgaaattggtggagacaagaaggggaaaggaacatctcttttctagatgtgatgatattcatgtcaaattttatgttatgggtttttacttggaacttcag

SEQ ID NO: 237355 - DNA, 425 bp, Gossypium hirsutum
  unsure (1)..(425): unsure at all n locations
cccacgcgtccggttcaccacaatgggggaacaagaccattttaacaggaaaaaaccatttcggagacctggtcgtgttcgacgaccccattaccttagacaacaacttgcattcgaaaccagtgggtcgagcccaagggttttatatctacgacaagaaagacatattcacagcttggttgggtttctccttcgttttcaattctacccaaaataaaggaagtataaacttcgccggtgctgatccgttgatgaaccagacgagggatatatcagtgattggtggaacaggtgatttcttaatggctcgaggagtggctactttgatgactgatgcctttgaaggggaagtatattttcgtcttcgaactgatattaatttgtatgaatgttggtaaaccattngaaatttaattttcgatttg

SEQ ID NO: 237356 - DNA, 442 bp, Gossypium hirsutum
tgattaaatatcctctatggtcctcatgaagatgaatgagatcgccgaggcatatctcgggtccaccatcaaaaacgccgtcgacactgtaccagtttacttcaatgattcccagcgtcaagccacgaaagacgctggtgttattgctggcctcaatgtcatgcgtataatcaacgagccaactgctgctgccattgcctacggacttgacaaaaaggcaggaagttctggagaaaagaatgttcttatttttgaccttggaggtgggactttcgatgtctcattgttgacaattgaagaaggaatcttcgaagtgaaagctactgctggagatacccatttgggaggtgaagattttgataatagaatggtgaatcattttgtgcaggagtttaagaggaagaacaaaaaggatattagcgggaacccaagagctttgaga

SEQ ID NO: 237357 - DNA, 429 bp, Gossypium hirsutum
cccacgcgtccgctttttatttcctttgttcgacttttctctgtttgcttccgtcacaactcaaaaaccgtacacaaaatgggcaaggatctgagcgacgagcaagtctcatcaatgaaggaggctttcactctcttcgacaccgacggtgacggcaagatcgctccatcggagctagggatcctaatgaggtctctcggcggtaaccccacccaagctcaactcaaagctattatcgctgaagagaagctcacggcgccctttgacttccctcgtttttttgatctcatgtccaagcatatgaaacctgagcccttcgataggcagctacgcgatgctttcaaggttctggataaggacaatactggctttgtctccgttgcagatctgagacatatactgactagcatcggagagaagctggagccc

SEQ ID NO: 237358 - DNA, 458 bp, Gossypium hirsutum
tgatatctgcagttgttaaagagttagaagacttgaagaaggttgttatgaaaggtgaaaatgaaggagaaataaaaaagggaacatttgatcccgaaaagcatattgatgcctacttgccggttcgagttaacgaacagagagtgagcaatcttttgcagtcactcctagttgctgcatcagtatgcgctatgcctgcaatcaagttgatacctacatcggttctttggggatatttctcgtacatggccattgatagtcttcccggtaatcagttctgggaaaggatgttacttctcttcatcacacctacccggcgatacaaggtgttggaacatgttcatgcttcattcgtggagtcagtaccgtaccgatttatggcaatgtttacactcttccagttcatatatctcctcatatgctttggtgtaacatggattcctatagctggaatcttg

SEQ ID NO: 237359 - DNA, 454 bp, Gossypium hirsutum
ccctcgcttccgaatccctctctttccttcaagttgccaacataccaggaaattaaatatgtcctaatataaacatcgaatggacacgcaaaagagtcaacccgacgagcaaaagagtcaacccgacaaacaatcgtcgtctgctgctgctcccctagtctcgacttcgtgtaggaagaaaaagaacgaagaggccaccttccttgaagacttgaaggatcacatcgatgagttcattaatgcttcaatggaagagcacaaaacttgctttaagaagaccatccagaagatgtttgggatgtcgaaagttgtagcagaaaggagtgcggctgaatccaaggaagctgaaaccgtgtcgaaataagattatcttcttacctctttagtaatgtgacttgtggactacatttatatgcattgaggttgcactgaaatgtagcttttggtttggtct

SEQ ID NO: 237360 - DNA, 446 bp, Gossypium hirsutum
tccctcgcgtccggttgggagattgattagtggagctgtttctcagcggcttacatgccgatcggtcgccccttccgagttaatttctcgtcgcctcatgttctcttcctcaagaacgccgtccttgctggctgtcggaaacccaagctccgtcctttcctccaattctgagtctttagcatctttgccatctctcaagtggaaccattttataggccaaaggagaagcatgtttattcaaactcaatcaacacccaatccttcgtctttgatgttttatccagggaaagcggtgatggaagtcgggagtgctgatttcccaaatgcccgttctgcaatgacttcaccattggccaaggccttgtatggaattgacggtatcactcgagttttctttggatctgattttatcactgtaacaaagtctgatgatgcttcttgggatc

SEQ ID NO: 237361 - DNA, 452 bp, Gossypium hirsutum
cccacgcgtccgatttcacagccggaaacggaaggggaggttaatcgatatactgatctaagttcgccgacgagaacttcatcaagaagcacaccggacccggcatactatccatggcgaacgccggtcccggaacgaatggatctcagttctttatttgtaccgctaagaccgagtggcttgatgggatgcatgtggtgtttggtcaagttgttgaaggtatggatgtggttaaagccattgaaaaagttgggtctagcagtggaagaactgctaagcctgtcgttattgcagattgtggacagctttgttaagaacaagaacaagaacaagaaatggaataatgttgactctggtctatgaatggtgattcatgtctgaaatttatcatttttatgtgtttttctttgctgtttactggatttggcttagattgttctctaagaacatga

SEQ ID NO: 237362 - DNA, 456 bp, Gossypium hirsutum
atctagttgtgggttctaagaagggccttcgatgacgaggaacatccctatctgccaaagcatatcctctacagacaaaaagaacagttcagtgatggtgtcggttatagttggatcgatggtctcaaggcccatgctgcccgacatgtgaccgataagatgatgttcaatgcttctttcatatttcctcacaacacaccaactacaaaagaagcatattactacaggatgatttttgagaggtttttccctcagaactcggctagattgactgtccccggaggagctagtgtggcatgcagcacagctaaagctgttgagtgggacgctgcctggaaaaacaaccttgacccttcgggccgggctgcttgggggttcatctctctgcttatgacgcagagactcccctcagcaacaagccatccaggttattgatagtataccacggatggactt

SEQ ID NO: 237363 - DNA, 401 bp, Gossypium hirsutum
ttcctacgcgtccgcccacgcgtccggaaatggggaggttaattaaacactctgtttacttccaatcttacaagggtcacaagaatggcatcaagaaacccaagaggcaccgccacacttccaccaaagggatggatcccaagttcttgaggaaccagaggtatgcaaggaagcacaacaagaagagcggtgagtctgccactgaagaagagtaaatttttaatggcaaaagatctagctttgattagtgttttctaattgttgtttttcccccgatggaattgagtgttcgtttactataatcaccttagttgaaatgttattttgggattgttgaatctcattttcaaaagagatttgaagctgtgagcttattaatattaagaacatgttttgagctt

SEQ ID NO: 237364 - DNA, 458 bp, Gossypium hirsutum
aattcttgcagaggaaataaggaaaggggctgcagctggtgttggtgttgaagccaaattatggcaggtctctgagactctatcggaagaagttcttggaaagatgagtgcacctccaaaaagtgatgtaccagttattacaccgaacgatcttgctgaggccgatgggtttgtttttggtttcccaacaagattcggaatgatgtccgcacaattcaaagcttttctggatgcaaccggaggtctatggagaactcagcaacttgcaggaaaacctgctgggatcttctatagcaccggatcacaaggcggtggacaagagactacagcgttgactgcaatcactcaactcgttcaccatgggatgatatttgttcccatcggatacaccttcggtgctggcatgtttgagatggagcaagtgaaaggtggaagtccatatggtgctggaacatatg

SEQ ID NO: 237365 - DNA, 437 bp, Gossypium hirsutum
gtttgcttggtgtcagtagtcctgtgaaactccagaatgtcatggctggtagtgcaaaatcagagttactgccctcccaagagacaccgattgatgttgctgagaagctagtagctttaaaggccatcttccaggatgaaagacctgtggtaggagggaaagaaggtcccgtttttcttcctggtccctatgacatgagggatccagatattccatcactaaatgtccaacgatcttctccactgcttcgtcctcaattgaatcatggaggtcctatgcttcatccattagattctcatcgctctaacatcggttctcaggtgaagttcgtggctccagaaggcatgatccatcatgatgccccaccaaatcatcatttacctgcaaatatgcttcatcctctccatcatcctagcagtggactaactggatttgat

SEQ ID NO: 237366 - DNA, 375 bp, Gossypium hirsutum
gttgtttcctctattaaagcgatgaaacccaggattgttttggttgttgaacaagaagcgaatcacaacggtccggttttcttagaccgttttactgaagctctccattattattctacccttttcgactcgttggaaggttcaggggtggcgccagcgagtcaagacctggctatgtccgagttatacttaggaagacagatttgtaacgtggttgcttgtgaagggatggaccgagttgaacgacacgagccgctgactcagtggagaactcggatggaaacggccgggtttagccctgttcatttgggttccaatgcttataaacaagctagtatgttgttggccctcttcgccagcggcgatgggtataga

SEQ ID NO: 237367 - DNA, 328 bp, Gossypium hirsutum
ttttcctcgcgtacgcccacgcgtacgaagaagggggggtttgatataggtcagaaatttgtagacatggctgcatctctagaaggggtggctacacatgttccactttacaaagttactgaaggaaatgaaccttgcttcttgacaacattcttgtaatgggattccacccaagctactgttcaaggaaactcattccaaaagaaggtggctttgctctttggggctagccatgctgtagagggccaggatcgatccaacggaaatcaagggggacctacacaatgagcttcagcgttagctgccttatcatctgcatttaatccat

SEQ ID NO: 237368 - DNA, 464 bp, Gossypium hirsutum
tctttctttacttccaaaaacatctctctctgccctttcgggctctcactcatctcttttctctccacaccccttcaaacaatgcctgctgattccggcgataggcgtcaggttgcagttccaggaactatggcgtcccacccaccacctaagctgacggagccacttccatgccctaggtgcgactccaccaacaccaagttctgctactacaacaactacaacctctctcagcctcgctacttctgcaaggcatgccgccgttactggactcaaggaggaactctccgtaacgtgccggtcggtggtgggacccgcaaggcttccaagcgctcacgttgttcttctggctcttctccttctgttgcagtttcttcttcctcgagcgtgacgcatgaagctgagtccgctcctatggttgttaaccctaccccccctatgcctggactcggaattaaacctga

SEQ ID NO: 237369 - DNA, 464 bp, Gossypium hirsutum
cccactcgttcggcaatcgtgcaaggaatcaactgataactctaaggatgcatcttgtgttgcagaaagtcaggacactggttcatctacaacatcgtcgtcaagaatggtagcgcaagatctgaacgatggttaccaggtaactgaagctctacgagcacaaatggaagtgcaacgaagactgcatgaacagttggaggtacaacatcgccttcagcttcggattgaagcacaaagcaaatacctacagtcaatgctcgagaaagcctgcaaagctctgaccgatcaagatcaagctgcttccacaggtctggaagctgcaagagaagagctatcggaactggctattaaggtttccaatgattgtcaagggatgatccctcctcatgataaaataaaactgccttccttgtctgaacttgcagtagttttagagaacaacagaacttccaatatgccgggtc

SEQ ID NO: 237370 - DNA, 381 bp, Gossypium hirsutum
tgctcttggagaaaacctcttcaagcaaagcgactacaacaccttccacataataaaatgctcgtttgtcctccaaattcatcctccttccactgctgaaacaacccttaacacaccgcgccaccgccaatactatagcgtagcagctagctaccctttatatttccatttctccatgctttaccaaaagcggtaccctataacatacaccatgccagtcccagacgccgttgctcgccaccacacccaccctgttggtcccagccagtgttgctcagccgtagtccagcagatcgctgccccagtttccaccgtctggtccgtcgtccgtcggtttgacaacccccaggcttacaagcacttcgtcaagagctgtcatgt

SEQ ID NO: 237371 - DNA, 367 bp, Gossypium hirsutum
cccacgcgttcgcccacgcgttcgattacttctcagctattcggtccactggaatcatagccattcaattggttcctggtgatgagttaaagtgggttcgttgttgcacaaatgatgaccttgtggccatggcttcacaaaatggaatggtcattctaagttcctgtgacattatccgagcactaagcagaaacaccagaggagctattgccatgagactgaaagaaggagataagatggcaagcatggacatcataccagctccaaggcatacagatttggataagacagcagaagattccattagctatgataagggtggcagtggtccgtggctcttgtttatctctgagaatggctatggaaa

SEQ ID NO: 237372 - DNA, 424 bp, Gossypium hirsutum
gtttgtgccacaaatgacaagacagtggcagtggaagtggtgcgtttagccccgcatcccaagtacaagaggcgtgttaggaagaagaagaagtttcaggctcacgacccagataaccaattcaaagttggcgattatgtgcagcttgagaagagccggcctattagcaagaccaagactttcattgcggtggctgtaccaagtaggaatgggaagcaggagaaggaggaggcaggggagcttgggattccattggagtctaaacagactcaagagcagccgcaggcttagtgttaagcccttcgcgtgggctccttttgttgttggtaaatttgtaatcttttgcaagtgatttcactgtttcaaaaactgcttttccttaatgtaataattgttgcttttcaagggtatggattgttttttg

SEQ ID NO: 237373 - DNA, 450 bp, Gossypium hirsutum
ccctttcgttcgcgacgttctttcgcttcaatttggggtggaggagatggaaatcagttgcagcttctgaaagttttaagctagcttgttcgaggattccgtcacgggaaccttggtttttcatggtggatcccaatcttaatcaatccgtagtcttcgactctgctgagagaagttggaagaaactcagtcatccgcctctcctctcgcagaactgtaactgcaactccattccggttgcagcagttggcggactcgtgtgtttccgcaatatgtccggcgattacttcgtatgcaatccggtaacaggatcatgtcgtgaactccctccggtgaatccggattctcaccatcgttcccttcatgctatagcaatgaatgcatattccaattatcatggctcctacaaactattcttagtctcgggtgatcttccgaagctttcataca

SEQ ID NO: 237374 - DNA, 439 bp, Gossypium hirsutum
cccacgcgttcgtgcaagaaactaaggcggctttagagaagatagttaatgtgagattgagcgctgcacagcctaagaatgttccgaaacagtcttcggattcaaagtatattaagtataagccttcacagcaatcggctgcgtttaattcaggtgctaaggagaggataattagaatggtagagatgcctgttgatcctcttgagcctcccaagctcaagcataagagggtacctaaggcttcggggtctccacctgtgccagtgatgcattcccctgcacgtcctgttactgtgaaggatcagcaggactggaaaattccaccttgtatttcaaactggaagaatccaaaagggtatactattccgctggataagcgtcttgctgctgatggaagaggcttacaggaggttcagattaacgataactttgcaaagct

SEQ ID NO: 237375 - DNA, 427 bp, Gossypium hirsutum
gtcttgagaggtgctggtgtgacagatttggaaactgaagatgaagatggctttccagtttctgcttcacaaaaaagcgaagatgctattcagcagcctcaaccagaaaccaaggaacttagagaaaaattaaaaacactgatgaagaaggggggaaaaagaagaagaaaaagaagcaaaaaggaaatgatacagatgacatcaatggtttaccgggtgatgaagttttatgtagcagaggtcttgctagtactagaatatcttcacatgctcgggattatctatcgtgaccttaaacccgaaaatgttcttgtaagagaagatggtcatataatgctttctgatttcgatctttcccttcgttgtactgatagtccgactcttgtcaaaacgtcctctctcgaatcagagccgttaaggaagaacc

SEQ ID NO: 237376 - DNA, 406 bp, Gossypium hirsutum
ggattttggaagcaaagacatgttggaatgtgtaggagaaaactatgtgatagggtgaggtggagctggcattgtgtacagaggaattatgccaaatggagagcaagtagcagtgaagaagctgttaggcatcagcaaagggtcttcgcatgataatggcctctcagcggaaatacagactttgggtaagattcgacacaggaatatcgtgcgcttgctgggattctgttccaataaagagatcaatttactaatatacgagtacatgccgaatggaagcttaggtgaggttcttcatggaaagggtggcggctacctcaggtgggatactaggctcaaaatagccatagaagctgccaaaggcctgtgctacctgcaccatgattgatcccctctcatactccat

SEQ ID NO: 237377 - DNA, 380 bp, Gossypium hirsutum
gtcgtccatgaatctataagggaaggatggcaatagggcacaggtttcatcacggaaagtgtaatgagggatcacatcccggagggctccagcgacacccttgcgttggcttgtgggccgccgccgatgatccagttcgccgtgcagcctaacatagagaagatgaagtattacgtcaaggattttttgttggtattttaaggaaaatttggagatgtttaaatgttttttagtcactgttctttgtcttgtattattattaatttttcccatggcatagcaaagttgttgggaaaacgatgtacatagagaaataagggtgttgtagtttgagagaaggaaaataaataataataataaatcttcttgtatcatgttct

SEQ ID NO: 237378 - DNA, 447 bp, Gossypium hirsutum
cccacgcgttcgcccacgcgtccgctttttctctctctatattgtctcatctcctgttccaccgccgttgatctcgatccgtatccccgttttcaaaaaagctccaaaaagatggccaatgctgcatcgggaatggctgtgcatgatgattgcaagttgaagttccaagaacttaaggcaaaaagaacccaccgctttattgttttcaaaatcgaggagaagcagaagcaagttatcgtggagaagcttggtgagccaactgagagctatgaagattttactaaatgtcttcccgctgatgaatgtcgttatgctgtgtacgattttgattttctaacagccgagaacgttccaaagagcagaatctttttcatcgcatggtctcccgatacatcaagggatcaggagcaaaatgatatatgctagctccaaagacagattcaagcg

SEQ ID NO: 237379 - DNA, 343 bp, Gossypium hirsutum
aatgctggagccatgatgagtgtggatgagactttaatgtgctcctttcaaatattgaagcctgctgataaaaaaaccccgatttaactttgggggcacggccacagccaggcctggtagcgcttctgccagtgtctttggcagcacgacaacagcaaagcccggaaatactccagcgggagtcaagtcgttcctcggcacaaggatatgagaggcccatatgcattgtggaaggcagagccaggttatgacatgaacaaaccacaattgcagtaaagacaactttgaggtccttttgatttccatatattatgctcaaatttgtaaaaaagattggaagaga

SEQ ID NO: 237380 - DNA, 452 bp, Gossypium hirsutum
aagtgatattaagggtctctggaatgatgtccaaccgaggatttggtgactttgacaggatgaggcatagaagccccagtcccatggcttcttcaaacattatgtcaaatgtttctggaactggattaagcaactggaatagtcttcctcaggagagactaagtggacctcctgggatgacaatggactggcaaggtgcaccggcaagccctagttcatacaatgtgaagagaattttgcgtcttgaaattcctgtcgatacatatccaaatttcaattttgttggacgactcctaggccctagaggcaattctttgaagcgggtagaagctactactggttgccttgtatacatcagaggcaaaggatcaataaaggatccagacaaggaagagcagctcagaagtagatctggctatgagcacctcaatgatccactccacatattaatt

SEQ ID NO: 237381 - DNA, 335 bp, Gossypium hirsutum
ctggtgtgtatccctccagataagactaggacctactgtcccggagcttgagcacattccggaggtttgtagagacgaagtggttcaatggaacttacattcgacaacattaggagagcagctgatggggttattgtcggaagggctgggattggataaggataccatcaagaatactacatgtttggatgcaagagtaatggttgggcactactatccatgctgcccccagactgatctgactgtgggcatcgtatcacatacagatccgggagtgttaactttgttgctgcaggatcacactggtgggctgcagattaagcatgaaggggagt

SEQ ID NO: 237382 - DNA, 361 bp, Gossypium hirsutum
cccactcgtccgcccacgcgtccggttggattgtcggggctggttatagggatattatcaaacaacaaatccaagggttcgtgtgggttgacgcaccaccatttcctttcgattggaggaattttgtgtttcgtacatgggctgttttctgttgcttattatgtttcagccactgctgctagtgatgaaggaaagtaagcaatatatataatctttaaagtaacttttgtttgtttgtttaatttttaaaacccaaaaagctttaaggatcattgatcaactatcactttcctcctacatgtaaaatcattttgtaaacatcttttgatgccattatcaaatcttgtaggacagctgatca

SEQ ID NO: 237383 - DNA, 463 bp, Gossypium hirsutum
gttattgactctggtgatggtgtcactcatgtggttcctgttgttgatggcttttcatttccgcatctcactaaacggatgaatgtagcgggtcggcacataacatcctatcttgttgatttactctctcgtagggggtatgcaatgaatagaactgctgattttgagactgtcagggaaatcaaagagaaactctgctatataagttatgattacaaaagggaatatcaactgggacttgagaccaccatccttgttaagaattatactctgccagatggaagagttattaaagtaggcactgaaaggttccaggctcctgaggctcttttcactccggaacttattgatgttgaaggtgatggaatggctgacatggttttccgctgcattcaggagatggacatcgacaaccgcatgatgctctaccagcatatagttttaagtggagggagcaccatgt

SEQ ID NO: 237384 - DNA, 451 bp, Gossypium hirsutum
aatgtagctaatctgcaggcagcatgggatctcccgatgggcattttttaagatcaatattgtcaaccgttccctcactaagctaaagcatgttattgaatctgtccaaggtgctgatgaagcatttgatttaacttcacttgccacaagttcactcccagctgctgtaggttccatttcatggacaaccggtttgaatggttcccatcaacaaaacttaacaaattccaaaccttcctagcctgaagttgacaaaaacgatttgcccacatgtgatatgccaggaagtaacacacaaggtttggcggatgatcagttgctgggagggaggacattgatccaagaacaacttttccctcaccataatgggctttcaccaagcttggataaaggggcaaacagattcaaaacagggagtggatctagagacgagagtgctgagacacctact

SEQ ID NO: 237385 - DNA, 434 bp, Gossypium hirsutum
cccattcgtccgggaaattgaaggcatggagtaatgggaggttgtaatcagtaaatcacagagtgatgatgagcggagacaaagatcgatactctatagcagcctttgtcattccaaatgagggtactataatcaggacacccgaagagcttatagatgaccaacatcctcggcttttcaaggacttcgatttcatggatttcttcctttttgccttttccgacccagcaaagcacatcgacaacggggagttgctccatgtctttgctggcctctcaccaccagtttccaattaaaatcatgcccatatcgacaagtaaaatccagtaaaatcaatgttacaaataataaactgagttctatactcgagatttgcgttcttgtattgtactactatgttatggttagtaataattttataattgtattgtacc

SEQ ID NO: 237386 - DNA, 309 bp, Gossypium hirsutum
gtgattgcaaaagctactaagtacaatgcagctgcatttatgccttttggattgggacctcgatcttgcgtaggcatgagctttgcaatcactgaagtgaaaactgcactttccatgattctgcaacgctatactttcaccgtctcccctacctatgttcacgcacctgcaccacgtctttcactcaagccacaacatgggattcagttgttgtttcattcactacattatgatgcttaaaattctaggctgttggtctccaatattgtaatatataataaaatgtggatgatactgtattttgcaacc

SEQ ID NO: 237387 - DNA, 423 bp, Gossypium hirsutum
tgtatgcttcctctcattagtcccccgactgtgcacgtgttaagacatcaatgggcatatacttgtgacaaggccaaactggagttggattatagacctagaagcttgaaagacgggcttgaagaaatgctcccctggttgaagagcttgggcgtgataaaatactaattactaatatgaattatgaagatgtacgaacttgatctcattctttaggccattgagaagtattccattaaatgctgagaggaatctatgttgttccttctgtttcatgcttgatgtagctttagccggtaatggcagtaataagaaactggttggcttgtttctttgtgttcaatgttgatgaataaggatcactgttgtacgatgattatgattcaggaattcttaatgaaatacttgaagctcatttgtatt

SEQ ID NO: 237388 - DNA, 455 bp, Gossypium hirsutum
ggcgcttttgaagaccgggttgcacagagagcggctggcttgaccaaatttcgcctgatatggaaagaaagatgttttgaaaagaaggtacggtatcagagcaggaagaagttggcagagcaacgacctcgtgtgaaggggcaatttgtgcggcgaaccatttctgattgggaaggaggaaaagataattcgagttacgatttcacatctgaagacagatattctgatagtttaagataacacaggcaaggtttgctgattactaactttacccttttccccttcccatgcctataaaatattgcgtacataagatgagcagtggctgtatgtcttgggaattaatacgttgacgtagtttctatatcgcatgaaaaacaaacaatagattttagaacttatatccgacttgcccggaactcaaaataattgaactgaaaggaaattcaaacatg

SEQ ID NO: 237389 - DNA, 265 bp, Gossypium hirsutum
cccattcgttcggtttactggcttgcatctcttcacggcctggtcaatgcggccgtgctgatggatatatcttggagggcaaagagctggagttttacatgaagaagatgcagagaaagagggggaagggagctgcctaaaattttgttgcttttgagtatttcatcattaagatcaaaatgtccttttttttttgcctttcaccatttgagaacatttgaaattgtgttagttttgagctttttttttttttagtttgaatatt

SEQ ID NO: 237390 - DNA, 372 bp, Gossypium hirsutum
atggttccttaatgaacccagctgtttcattcggaccagccttggttagctggacatgggacaaccactggatctactgggtcggaccccttatcggtggtgggctcgctggtctcatctacgagttcatcttcatcagcaacacccacgagcagctcccaaccaccgattattaagcctaatcagggtttaattgatttgtctgtcactttgaaaccggattttctacgatcacatttgagtctcctatctctttccttgtattttgtgtttaatttgtggccgtcgatcttgcatacttttttgctttttttcattcccatcctctatcatgatcatcatgaatggcagatgtttacaattgcatgccct

SEQ ID NO: 237391 - DNA, 264 bp, Gossypium hirsutum
ctttccgttcaagaaaagtagaagaaagcaaaaaaaaaaaaaaaaaaatggcgcctgaaccagaggatgagttcaaggacgagaaaaaccctagacctcttgacgaagatgatatcgcgcttctcaaaacctatggtttaggtccttattcaacgagcattaagaaagttgaaaaggagattaaggaaatggcgaagaatgtaaatgatttatgcggcatcaaggaatctgatactgggttagctgcgcctagccaatgggatc

SEQ ID NO: 237392 - DNA, 476 bp, Gossypium hirsutum
ccctctcgtccgctcaaatacctcatttttgcaggggcaattttctatctgtgtttgcctctattgaaactttaaaaatatgagtaacataaggttggtagaagccaagttgccaacagggttcaggttccatcctagagatgaagagcttgtttgtgattatttgatgaggaaggtggctttaactgataccttccaactcatgattgaagttgatctcaataagtgcgagccctgggatattcctgaaacggctcgggtgaatagcaaggaatggtatttttacagccaaagagatcgaaaatatgcaacaggattgcgaacgaatagggcaacaacgtcagggtactggaaggccactgggaaagataaggctgtccatagcaaaggcaccattgttgggatgaggaaaaccttggtgttctaccatggtagggctcccagtggaaccaaatctgattgggtcatgcatgaat

SEQ ID NO: 237393 - DNA, 342 bp, Gossypium hirsutum
agcctggtggctgaaaactcaggaagaggttggaagctattagcattaatactttctgcagacaggcggttcaaagatgctgaaaccatacttgagttcgctttagatgaatccagtggatcagatcaattagaacttctaagactgaaagctgtgcttcagattgctcaggaacggcccaagcaagcaattgaaacttacagcatattgctatctctgattcaagcacaaagagaagctcagtctaataactctggtcatgcaaagagttcccatacagagaatatagctggaagaaatatggaaatggcggactggcaagatctagctactgtttacacc

SEQ ID NO: 237394 - DNA, 462 bp, Gossypium hirsutum
ccttctcgtccgcagagactctatttgctgtcggtttcacttgctgtccgaagcccaagatggagctgaggttctcatgtccgagatactcattagtgccgaaaagggtggggaatttttcattgatactgaccgacaaatgcggcagggaccaactccaatacccagtccgcaaagcagtggggacttttcagcattaagtccgattgccggtggtttcgtaatgagctgcagagtccaaggggaaggtaagagtagcaagccattagtgcagctagctatgcggcatgtgacttgtgtggaggatgctgccattttcatggcacttgcagcagctgttgacctcagcattgaggcatgcaagcctttccgaagaaagataaggatagggtcccgccattctttatgaaaaaaaaaaaaagaattaaggtgatgtatttccatgaacaaagaatggctcta

SEQ ID NO: 237395 - DNA, 410 bp, Gossypium hirsutum
ttagccttcatttttatttttattttctccttctttcaccaaacaaaaacaacaatggcgatcagaaaatcatccaagctaccacaaaccgccgtcctcaaacaaatcctcaaacgatgttcgagtttaggcaagaaacaacacggcggtggctacgacgacgttggtctcacccctcccttagacgtacccaaaggtcacttcgccgtttacgtcggcgaaaacaggagcaggtacattgtacccatctcgttcttgactcaccccgagttccaatgcttactccgacgagccgaagaagagttcgggttcgatcacgatatgggactcactatcccttgtgaagaagtcgtttttcgatcacttacctccacgctccgatgaagttgaaaagtatagcacggcggcat

SEQ ID NO: 237396 - DNA, 464 bp, Gossypium hirsutum
cccacgcgtccggaaaccgtttcacttgatggtcctatttcaactagaactgcccaaacatgtcaatctcctttagtacctcatgaatttgtctgcccaattatgttggaaatcatgacagatcctgttattgtagcaactggacagacttatgaaagagacagcattcggaagtggttaaattccaaccatcgaacctgtccaaagactggacaaactttagaacacttgtctctagcaccaaacttcgcactccgcaaccttattctgcaatggtgtgagaagaacaaccttgaactgcccaaaaaggataattatgcttcttcagttaattattctgcagaaatcatggaagaaatgtcttcattggttctaaacctatcttctagtcagccaaatgtgcgtagagatgccattgtgaagatccgtatgctttcgaaagagaatccggagaacagaatttt

SEQ ID NO: 237397 - DNA, 458 bp, Gossypium hirsutum
ctgtctcgtgggcggacgcgtgggcggacgcgtgggcggacgcgtgggggaatgagtcaggtctatctaggaagtgccggtgcactcgatgtggatggcaaagagctgcctcgacttgtctatgtttctcgtgagaaacgacctggttatcagcaccataagaaagccggtgctgagaatgctctggttcgagtttctgcagtgcttactaatgcacccttcatattgaatctggattgtgatcattacatcaacaatagcaaggccatgagggaagcgatgtgctttttaatggatcctcagtttggaaagaagctttgttatgttcaatttccacagagatttgatggtattgatcgtcatgatcgatatgctaatcgaaatgttgtcttctttgatatcaacatgttgggattagatggacttcaaggccctgtatatgtaggcacagggtgtgt

SEQ ID NO: 237398 - DNA, 422 bp, Gossypium hirsutum
tttacgcgtccgcccacgcgtccgcggacgcgtgggctccggtgacggaacagaaaccacaacagcaacagcaacaacaacaacaaccgactcggtgcacggtttgcaggaaacgggtcgggttgaccggattcaagtgcaagtgcgggattacgttttgcgggtcacacaggtacccggaaaatcatggatgcacgttcgatttcaagaagattgggcgagaggagattgcacgtgccaatcccgtggtcaaagcagagaagatcgtgaggatttgagaagaagaagatggaaagccgatcgatcctttgacttttaatgagtaaaagaaaaagagaaatagaaattgtcaaactcgttaagattgcgacacgtgtttcggtgttggtccccatacctttaaaaattgggcttggataaaa

SEQ ID NO: 237399 - DNA, 422 bp, Gossypium hirsutum
tgttcatgcgcaggattctgaggaaaatggcatccagacagttagatgaacttggagacataagcacgcttgcagaaccaggtgtagttgatcagcttattgcacttgcggatagctgaaacaattacaagtgtagcagaagtggggttcctctatgtttgtctttggaggttgttgtactttaaaccatagtgcgggtttatacatcatgtgatgcaatgcgatgcgaggtaggtagtacttgtagaccaatgtacaattctacactgaaaacaataatcactatcacaataggcataataattgtacttctttttcttcccatctttgttaagtatccttctatcctatggggtaaaagtatgatggtagttattgtattatgggttttttatcgaagaaatagataaattggtatcaaa

SEQ ID NO: 237400 - DNA, 483 bp, Gossypium hirsutum
atttcattcgccccacggttgggaactaatgattggctctatatacaaagattttggatttgctcataatgatcaaattatatctggtcttgtttctacttttccagtcattctagatacaatttttaaatattggatctttcgttatttaaatcgtgtatctccgtcacttgtagttatttatcattcaatgaatgactgaaaaatgattcacggattcaattagaatctttcttactttcgagataagcaaagcatgcaaagtcgtacttactttactctttctacccatcaggagaatacaatttctcctctgtttcagtcattttttttttttttcagttttcagtaaaagtaaatagcagaatcgtggctagggaactatactagtgacctacctaattttattgtagaaattttcgggatcaatgattggaccatgcaaactagaaatactttttcttggataaaggaggagattac

SEQ ID NO: 237401 - DNA, 377 bp, Gossypium hirsutum
agtttgttttcattgacactgttttgcaacctttaattcaaaggcttccaagactaaaggttgtgatggaacatatcaccactatggatgctgttagatttgctgagtccggtgaagaaggatttttggctgcaactgtcacaccacaacatcttattctcaatagaaatgctctcttccaagggggattgcagccgcataattactgcctttcagtactcaaaagagaaacccacagacaggctattgtttcagctgtgactagtggaagcaaaagatttttccttggaactgacagtgctccccatgagaaacaaagaaaagaatgttcttgtggttgtgctggaattttcaacgcccctgttgcattatcacta

SEQ ID NO: 237402 - DNA, 466 bp, Gossypium hirsutum
tgtctaaatggctatgatcccgagtttatttgggggccgaaggagcagcgtcttggatcctttcgctcttgatgtatgggatcctttcaaggacttccctttcccttcttcactgacgacaggttccccagaaacctcggcttttgtcaatgcccgcatggactggaaggaaacccctgaagctcacgtctttaaggctgatcttccagggcttaagaaagaagaagttaaagtggaggttgaagatgacagggtgcttcaaatcagtggggagaggaaaatagaaaaggaagacaagaacgacacctggcaccgtgtggagcggagtagtgggaagttttcgaggaggtttaggttgcccgagaatgtgaagatggatcaagtcaaggcttcaatggaaaatggagttcttacggttaccgttcctaaggtggaagtgaagaaacctgacgtcaaagccattgag

SEQ ID NO: 237403 - DNA, 463 bp, Gossypium hirsutum
atgcttcaaaagcttttgacacaaatgctgaaacccgcatcagaagctgagggttcagggatatcgcctgaaaagaaagtgaggaaaatgagggcgtcaccgttcaacatgaaaagcggttcggtcttggggaagacgagcggttcttcactgtcttcaatgccggaaatcgatagcgatgaagatgaagaagtagctgtggttgtggaaccaagagctagaccacaaagggcaaaccggaccaagacaacttatgttgttagtgattccgagactgaggaagaagttaatgatgactcagatttcgaggaagattaggattgaggaaaactgtgatgtttatctttcagtgtaggaacgaacaagtaactctaattcttggctgcttgtttatggtcaacttaggttgtcaacgttgtgtaaaactgaaagtcatgaatttccttctgtttccattgcaaaa

SEQ ID NO: 237404 - DNA, 387 bp, Gossypium hirsutum
catgatcttcccaatgcaatgaatgctgccgaaataactgataagcttggtcttcattctctccgtcagcgccactggtatatccagagtacgtgtgcaacttctggggaaggcctctatgagggccttgattggctttccagcaacattgctagtaaggcatgataaaggatcagtgtattggttgttagttagacttgtcgaaactctggcaactcttgaagaggatatagcttcctgtttatccagcaacgtttgtaatgacagaatatttagctttgtttaatctttttacttggaattttcattttctttaatgtatttgtgttaaatattcggacttgttatggtttatatcggaaaaaaaaaatagtaacattgcatgtc

SEQ ID NO: 237405 - DNA, 222 bp, Gossypium hirsutum
cccacgtgttcgcccacgcgttcggcctgcacatttgatgtacgacggggaagacccaaggctgtttgagcacttctcggcggtggcgcagcggttgggagtgtacacggcggatgattatgcagatatattggaggcgttgataaaacggtgggggttggagaaaatggaggggttgacaggggaaggtaggagagcccacgattttgtatgtgggttagc

SEQ ID NO: 237406 - DNA, 300 bp, Gossypium hirsutum
tctcttacgcgtccgagcagaatcatacgttaggggggctttgttaggagcttgctgtatacctcacactggctgtgtcccctttctgcatagcgtaagctgttgtaagggcatgatacagcacggtatcctttgcttggacaggtcaagatatactcggaattgcattgagaatcacagttctggaaattgcccatgaacctaagctcaaggtgggaacagttctactcagttgcgctatcttatataacattgtctgggtttttgtttcaaagaagttgttccatgaaagcgtgatga

SEQ ID NO: 237407 - DNA, 399 bp, Gossypium hirsutum
tgtttgatttcggatgatggtaccttggtccgtgcagaggagaggttatgtggtatggcaaccgactactttcagcatctgtttacttttcaaggattagggatccatgacgcattctaaagggggttgattcgtgtgttactacggctatgaatgccttgttagtggtgccttttacgtatgatgacatccatgaggcattacaggcaatggcttcaaccaaaacctcaagccctgatgggcttccggtgctgttctataaaaagtattggcatattattggtcaggacattaatatttactggcttaatgttttacatggtgggacgtctctggctgatataaataacaccaacattatgctgattcttaaaattacgaatcccatacggataactt

SEQ ID NO: 237408 - DNA, 469 bp, Gossypium hirsutum
cccacgcgtccgcaaaaacagaacaatagcagcaaccggaaaacaaagaagaaaaacttaatcatggctcggttgacgttcgtgacctccatcatccttctgctatgctccgttgccgctggatcaactttcgacgactccaaccccatccagatggtatccgatggcctcaccggcttcgaatcctccgttcttcgtgtcatcggtcacactcgccatgctctctccttcgcccgttttgcatacaagcatgggaagaggtatgaaaacgtggaggagatgaagctacggtttcagattttcgaagacaacttggatttaatcagatccactaacaagaagggactgccttatactcttgctgtcaatcagtttactgattggagctgggaagagttccagaaacacagattgggggctgctcaaaactgctctgctaccacaaagggcaatcaccagctcactgatg

SEQ ID NO: 237409 - DNA, 334 bp, Gossypium hirsutum
cagacatgcttatgttcgtttcaagcgacataattgctcgatgtatggcttagtcacaaaaatgaagaagaagatgggtgcagcatgtttggggagttagcaaaaaggttgttgattctcttcactagttcctgtattggcgatatgttttcttacttgaggtgggttgatgtgcttactggatatattccaagtatgaaagcagtctctacggaattggatgcattccttgatcaagtaattgaggagcataaagctattgaaagtaatgaccaagttttcaataaaaaggactttgtatctatcattatgcaactccaaaaggatggcatgt

SEQ ID NO: 237410 - DNA, 269 bp, Gossypium hirsutum
ctattgaatatgctaagaagcataatgtgcctgggccagtgacaaagaaatcaatatacagcagagacaggaacttatggcacttgagccacgagggagatatcttggaggatccagcaaatgaaccgaaggaagatatgtacatgatgagtgttgacccgaaagatgctcccgataaacctcaatacgtgaaaattggaattgaatcacgcatccctgtttcacttgatggaaaaacttattcgccggctgaacttgttgctacactc

SEQ ID NO: 237411 - DNA, 428 bp, Gossypium hirsutum
ccttatgcgacggcggttaacagttatggtacggaatcggtaatctcgttgcctgatcgggtatcgaatccggaatggacccggtttaaatattcgagctccagatatgcggttcgggacgcccgaatcattttggatagttataatttgaagttgcccaatgtgagatggtctgtgttgggtgacgacgatacagtgtttttcactcataacttagtttccgtcttagcgaggtatgatcatcgtgaaatgtggtatattggcggaatatcagagagcgtataacaaaacggaatgcatgcatacgacatggcgtttggcggtggcggtatagcggtgagttacccattggcggagaaattagtcaaagcattggacggttgtttgaacaggtacttttatttctacggttctgatcaacgaatttg

SEQ ID NO: 237412 - DNA, 397 bp, Gossypium hirsutum
gcgtttttggcaagctcaaccgtcttgttataccggggcaacatgccgagaagtgctggccactcgactcttcctcgatcgaaaaagggttgctattgaatttcgaagatcggaacggcaagacatggcggttccggcactcgtattggaatactagccagagttatgtgatgactcatgggtggagccgtttcctaaaggaaaaaaagctcggccacggcgatacggtatcgtttcaacgcggagtcggggagctggttaaagcacggttgtacatcgattggaaactacggcctaatgcgctcgatccgttaccgctcgcacatatggagctccgaaatcagttcaacttgcttcaaccgctccggagggaacccatatgtatgtcacgaaatta

SEQ ID NO: 237413 - DNA, 467 bp, Gossypium hirsutum
tttataagcctcccacaagctttcatcgaacgggggaccctcattttatcttgagggccgtctctctctctctctctctcagttctgctctctcgatcgagttatagttgtatatgtattctatggtgacggtctagcatgtccaacgatctggtatctcagcagttgtcgatgcctggtaaccaaatggctcggctagaatcaatttccaactaagatcaggcttgagctgaattggacagctcagcttactgatctccaggaaagtttacagattgcatggcgatggcaaaaggcacatcgtgatggatacgcagcagcctcttaggtgatggttacctctctagagtctactcacaactattttatttgttatggcaattggcatattgaagactacccctaggtggcttcaattttaagctgtttatggaggggagggaaaatggagatgaaaattcactttt

SEQ ID NO: 237414 - DNA, 428 bp, Gossypium hirsutum
tcttacgcgtccggttcactgagaaagggtggagggccaaggaaaaccagaggggcaacaactattacaatggtaacaatgaggccttgttcactgagaaagggtggagtactaaggaaaaccagaatcgcaacaactattacaatggtaacaatgaggccatgttcactgagaaaggatggagtactaaggaaaaccagaacaacaacaactattacaatggtaacaatgagtacaacaatgttgagaagcaaggtatgagtgatactaggttcttggagaatgggaagtactaccatgatgtgagttctgagaacaactactacccgaaccggttcgagaactcgaggggagtcggttcgaggaacgagttcaacgagaaccgttacaataacatgggaaaatataatcagaatcaagaggagttc

SEQ ID NO: 237415 - DNA, 244 bp, Gossypium hirsutum
cgtttaccagcctagcgtttccatcacgacagaagggcggttcgaatgctgtcggggattattaccaaaaagcgtgttaagaagttcaagaggccccaaagtgatcgcaagatctctgtcaagacaaactggcgaaggcccaagggtattgacttccgtgttaggaggaagttcaagggatgcactttgatgcccaacatcggttactggtcagacaagaaaacacgccactatcttcccaatg

SEQ ID NO: 237416 - DNA, 309 bp, Gossypium hirsutum
gtcccttacccaagaatacggggcatgctttcttcatacgctccagtcatctctgctgagaaggcttaccatgagcagctatcagttgctgaaatcaccaatagtgcctttgagccctcatctatgatggccaagtgtgatccttgccatggcaagtatatggcttgctgtttgatgtaccgcggtgatgttgtgcccaaggatgtcaatgctgctgttgccaccatcaagaccaagagaactattcagttcgttgactggtgcccaactggattcaagtgtggtatcaactaccagccacccactgtc

SEQ ID NO: 237417 - DNA, 346 bp, Gossypium hirsutum
ttttgttcttctggatcagaatttgattgaagcgatgccgacttctccaatttttgttggaagcaaggcaaaacggttgttggagagggctgtctggaatgacacttcctttcttgcattaatcgacgtaatggactactcattacttgttggtgtggatgaggaaaaacacgagcttattcttggaataatcgatttcatgaggcaatacacatgggacaaacaccttgaaacatgggtgaagacctcaggcatcctcggagggcaaaacacctcaccgacagtgatatcaccccaacaatacaagaaacgattcagaaaagccatgacagcttattttctcatg

SEQ ID NO: 237418 - DNA, 280 bp, Gossypium hirsutum
tttacgcgtccgcccacgcgtccgtgacttcaaacgctgatgaagttcaaaagaaagtccttgaggagattctttcacgcaatgctcatgttgagtacttccaaagaaatggccttaatggtcacactgatagagaaactttcaaaacaatcatgcctgtcatcacctatgaggatatccaaccttatgttgaccgtattgccaatggtgatacctctcccatactttcttcccaccccatttctgagtttttgacaagctctgggacatcaggtgggga

SEQ ID NO: 237419 - DNA, 521 bp, Gossypium hirsutum
gtggtagcactatttggtctggctttataccatgggaaccgtcaaagggtcattgatgctggcactatcccgttgctcctccatattatagcgtcttcgaataaagacgagctcattgtggattcgttagcgcttttggcaacgttagccgagtgtctcgacggaacgttagcgatcctccaggcctcctcgtttcctttaataacccgaatcttgcaatctacaacatctcaagcggggaaagagcattgtgtttcaatcttcttgtcttgttgcactaatggcggtgacgaggccgttgccgtattggctaaggatacttcggtgatgagctcgttgtactcggttacgacggacggtacggctcaggcaagtaaaaaggctcggtcgttgataaagatgcttcataaattccatgaaacaagctcgtctggacagggtgtcaagcatttacgaatgaacaatcagttcatgtttggtagtatagtaaaatttatttgctgcatgtaaatatatatact

SEQ ID NO: 237420 - DNA, 445 bp, Gossypium hirsutum
  unsure (1)..(445): unsure at all n locations
cattgaccttgtgtcgcatgaatgatcagggacttgaggcgtgcaagccatcggtgacacagccgaacccggtcgacccatcacccgagtgttgcaaggctctgaaaggggctgacttgacatgcttgtgttcttataagaattcggtgtggctaggtactttggggattgatccaaaacttgccttggatttgcctccaaagtgcaagctccaaatgcctagtgtttgctaaggtttccagaagagcatgaagctgctttctcatgtttgttggactttcacaagtttctttgtattgttttgatgtgaaaatctttgcaaatcttgtatctgtttcgtgttaaattattatttggttattgaagtttgtacggacaagtgagtggaattggccgccttctgctctttttaattntcattactctttttatgtntttggtgttc

SEQ ID NO: 237421 - DNA, 210 bp, Gossypium hirsutum
cttttgcgtccgcagcagccgaggccaatatgtggggtgatccagatgctgcagatattgtgttcacaagtggagcagatgttttggctgtagggataaatgtaactcatcaagtaattttgacagattctgaccgagaaacattgttataatttttcagttttccttattcctggatttgatttcatttgattaacccagactttcctt

SEQ ID NO: 237422 - DNA, 321 bp, Gossypium hirsutum
cctatcgcgtccggtcattattgggcaatgcaggccgttgtctaagaccgtgaggtttaatgttttgaaagtgattccagcaggatcttctggtggtgggaagaaagctttcaccggaatgtaagcttttctatggtagtccatggttataggaaccaatagagaagataatcaaagaaattaagttcttaaactgcatttagctttgaggatattttactgttagaattgttttcttttttgggttattttcttgttttgattttgtcgaattacgaaatacggaattttgaagatatctttatttaagtttggctttgg

SEQ ID NO: 237423 - DNA, 452 bp, Gossypium hirsutum
cccttgcgtccgggaaacaggcaagtagttgttggagcattgcaattcgcttgcaccgacgatgtgcccaccaatctcgccactgccgaaaggctggttagggctgctcatgcaaagggagcaaatatcattcttattcaggaactgtttgagggttattacttttgtcaagcacaaagggaggatttctttcggcgtgctaagccttataatgatcaccctaccattaaaaggatgcaggaacttgcaaaagagttgggtgtggtgctgccagttagtttctttgaagaggcaaacagtgcccattataattctgtagctatcattgatgctgatgggactgatcttggactgtacaggaaatctcatatacctgatggaccaggataccaggaaaagttctactttaatccgggagatacgggctttaaggtttttcagaccaaatttgg

SEQ ID NO: 237424 - DNA, 385 bp, Gossypium hirsutum
cttccaggctttgcacctgttgtccctcaagagtgtagtgactgtgggaagaaatttaacatgggcggacctatatggtctgctcccatccatgatcaggattgggtaactagcatactagcagatgtaaaatcaatgaagaattgttatccggcctatgaacgcatctctgctgtattgactacaatttcggaggagttgcctgatgttcctctctttttgagtctgcacaacctctgtgctacactaaaatgcacttccccgtctgcagttattttccgctccgctgtcatcaatgcaggatatcaaatttgtggaactcatgtaaatccattgggactaaaatcagatgctcccatggatgtcatttgggacataatgcgct

SEQ ID NO: 237425 - DNA, 496 bp, Gossypium hirsutum
gtttgtcagtcttttcaaagataatgcgccatacggcagtacaacaaaggttgccaaaggaaaagaaaaagaaaaaaaataaattacagaagatgaccgagactggtaaaaattggcataagaaactaccgcttactctctatgcttacgctggggcaaacaccttcaattccagtagtttcaaaggttccaaccatcatccttggaatgggtacatagtttggttctcctgagcagtctgatgtgctgtcaatagctgcgatggttagctcgaggcggtggccattgattttcagctatggggcatcaggccgtacatagtctctgaagcttaaaatgatagattctttcttcaaaactagtttctgacaaagtggatgacggtatcatgaaggaagctctcttagacttctatacaaagaggaaacatgatcaaatcattatttttagggatggagttagcgagtctcaattcaatcaagtttggatcaagtta

SEQ ID NO: 237426 - DNA, 135 bp, Gossypium hirsutum
gttagcggtctgcatgatcttcaactcaacgggggatactgaagtgtaggaggggattgatcataaatttgatctcatgaatgccaaacgagcatttgtgcactgacatgacgttgagggcatgcaggaaggaga

SEQ ID NO: 237427 - DNA, 439 bp, Gossypium hirsutum
attatttaaaaactctattccaagaattaaatggagattttaaaaagaaaggaacaggaattccttcatactcatcagctcaaacaagggggattaggtttagggtttcttttggagtaaggtaaaagctcacacaaagatgccgcagccaccgcaaatgattcctgtgatgccttcatatccacctactaatatcactactgaacagattcagaagtaccttgatgagaataagaagttgattttggcaattttggacaatcagaatcttggaaaactcgctgaatgcgcccagtatctagctcagctgcaaaagaatttgatgtatttagctgcaattgcggatgctcaacctcaatcggctccgacaatgtcgcctcagatggcaccgcatccagcaatgcaacccggaggatattttatgcaacaccctcaagct

SEQ ID NO: 237428 - DNA, 402 bp, Gossypium hirsutum
cttatttcgccgaggaaaacaagatgtcaggggggggagattaagataagaagccgggccatcagtccgcggctcacatcatcctcaaagtcaaaggccatgacgggaatgaagttttcttcaggatcaaatgaagcacacaattgaagaagctcatgaatgcatattgcgaccgacaatctgtggatttcaactcgattgccttcttgttcgatggtcgccgcctgcgagcttgagatggaggatggtgatgagatcgatgctatgcttcaccaaaccggtggtactgtgtgaagcgagtactactttgccacatttagtatttgatgagttagttatggcctgattatgcagatgtttccaatgtttttatatacgatcttattgccatgttatgaagac

SEQ ID NO: 237429 - DNA, 306 bp, Gossypium hirsutum
ttggactagtggctgcccagaaggttcctctggtggccattctccggattcagtgagtggccttcctgacaggaaaggatctggttatgggtgcaactccaaatgattccatatagggacctggggagaaagctatagtgttttcccagtggacaaggatgctggatataaatgaagcctgtcttaaaagttcttccatccaatacagaatacttgatggaactatgacatttgctgctagagataaagcacttaaagatttcaacaccgtaccagacgaacttgttatgattatgtccttaaaag

SEQ ID NO: 237430 - DNA, 430 bp, Gossypium hirsutum
tctttttacgcgtccgcacaatttaattttcaggggagccctaactctgaatgtgggtgttatctaattttcttccttgcccatctctttgttttcccaaaaacacagtagtttttctccctttttttatttctgagttttcctgcaattttcccaaggagtttgattggtaactcaagagacatggttcaactcaaggaatttcgcattgtcatgcctatgtctttggaagagtatcaggtagctcaaatgtacatggcaatgaagatgcagcagcagagtacaaatggggatgaaggtgttgaagtcttggagaacaagcgttttcaagatgatgtatttggtaaaggtcaattcacatctaaagtatatcgtttacaaagcaaagcacctgcttggcttacaactattgcaccgaaagatgctcttg

SEQ ID NO: 237431 - DNA, 381 bp, Gossypium hirsutum
tcttccacgcgtccggttccttccttcgccgggtagtgcacttgtgacatcgatggggagtgaatcagaatgggtaaggaaaagagtcacattaacattgtggtcattggccacgtcgattccggaaaatcgaccaccactggccacctgatctacaagcttggtggtattgacaagcgtgtgattgaaagggttgagaaagaagctgcggagatgaacaagaggtcattcaagtatgcttgggtgcttgacaagctcaaggctgaacgtgagcgtgggatcaccattgatattgccttggggaaatttgagacgaccaaatactactgcactgtgattgatgcgcctggacaccgtgactttatcaagaacatgattact

SEQ ID NO: 237432 - DNA, 356 bp, Gossypium hirsutum
cttacgcgtgggcggacgcgtgggcggacgcgtgggctgccttcttcagtgtctggaaacggtatggtttcactccggagggttttaatcttgctacacttagtgttcagcatgggcaaaagagttatcctttgcgtccagagttaatagaaagcacgtattggctctacaaagctaccagaaatcccagatatctggatgccggacgagacatagttgctagcttgcaatatggggcaaggtgtccatgcggttattgtcatatatcggatgtcgagtttcacaagagggaggatcacatggaaagctttttcctggcggaaacagtgaaatatttgtggctccttttcgatttg

SEQ ID NO: 237433 - DNA, 361 bp, Gossypium hirsutum
cccattcgtccggaggaggtgttggtgattgagaagatcgaatttgaccgacatcaagtggtgaaatttgatgtgtacattaacgatgaagatgacacggtgatcggaccagacaacaccgaattcgcggggagtttcgtcaatgtgccgcataaacataagcatgggaagaaaatggcaacatttttgaggttagggttgacggatttgctggaggaattggatgctgaggatgatgatggtgttgtggtcactttggtgcctaaatttggtaagggtttagctaagattggtggcatcaaaattgagtttggtcgagattgatctactagtttcatgtttttttagacaaaattattaa

SEQ ID NO: 237434 - DNA, 346 bp, Gossypium hirsutum
actatcatgctctgaaagcttcttgtagtttggcagagaaagatggcccctatgagacatatgctggctgtcctgttagtaagggcattcttcagcctgacatgtggggttttactccttcaggtcggtgggattggactgctcttagggacatgatagccaagaatggagtgagaaattcactattgttagcacctatgccaactgcttcaactagtcagattcttgggaataatgaatgctttgagccatatacctccaatatttatagtcgcagagttttgagtggggagtttgtagtggtaaacaagcatcttcttcatgatttaactgagatgggtctttg

SEQ ID NO: 237435 - DNA, 452 bp, Gossypium hirsutum
cacagtttttatcgacgaaaaccggtattactccgcggattacgaagagttacatcccggaatcgatgcctacgatgtacaatacacgaccaagattagtgaaaccagggagctaataacatcggctaaagaacagattcggaacgagtgcaggccggtccaaaacctgttgttctcagagtgcaagcttgggatcaatgatttgccgaaccatgtttacgaagtggattgggatttaatattgattgatggaccaagaggtgatggaccctactgacctggaagaatgcaacccatcttcacttcgggggtgctagcgagaagcaaaaaagggggcaatccaaagactcacatattcgttcatgattattacagagatgtggagaagatgtctggggatgagtttttgtgcaaggaaaacctgggggaatacaatgacacgcttgcacatt

SEQ ID NO: 237436 - DNA, 462 bp, Gossypium hirsutum
gcaacttttgtgatcctgaaacctctgcagagttgggggtgcaagaaaaaatgcccctgctcgaatggtttgccaacgagtacaagcgcttcggttgctctcttgaattcgtcacaaacaaatcccaagaaggatcacagttttgcagaggcttctgtggcattggaggtatcctccgctatcagcttgacataagatcattcgatgagctatctgatggagaagtttacgaggattctgaatgataaagcactgcttaaagatggtatgatggcttgagagcctatagagcccagatgtaatgcttcgtctttttacttatttcaccttttgattcaaaagtaactatagacactgttggtttggtttttgctgaattgtgctgtctctgtcaattggattgtgattgcttgtaatcaggaaccgttcattgttttttacttcttcggtgttccatgcaaa

SEQ ID NO: 237437 - DNA, 495 bp, Gossypium hirsutum
agaggatgcaattgtaaaagatcaagttgcttaaagaaatactgcgagtgttttcaggctggcgttggatgctccctcagttgtagatgtgaaggttgtaaaaatagttttggtcggaaagatggaggttgtgaatctgaatctgatggggacaacttagaggcgtgcgaaaaaaatgcatcagagaaaagctcacacgacactgtaatcagtaaaggtcaagagcatccaaacctttcagtgccttctcctgatatttcaaggctgccatttgcatacactgggaagcttgcagcattttttccccattccattaagtcatctcctcagttgtgcagtactcaagaacaaggttcatcagatacttcgtcatgtaagcccaagttggagtctaatcttgatggaattccagaaaatggaactcctgagattcccaaacataaatgcttcacacttgtttcaaatccaacatctcccaactgtaaaagagttttt

SEQ ID NO: 237438 - DNA, 379 bp, Gossypium hirsutum
ttcattcgtccgaggaatccagccaaaagaatgagccagaatgggaagaagaccaggcagatgctacagatattacagtggaaagccttacatcaagtcaagatattgcagaggtgttcctgatgctaagctcaaaatttacgatttgggaaagaagaaggctcatgttgatgaattcccagcttgtgttcatctcatctctcttgaaagagaacaactctccagtgaatctcttgaagcagctcgtatctgcgccaacaagtacatcaccaagacttctggaaaggatggtttccacatgagaatgagagttcacccatggcacgttattagaatcaacaaaatgctttcctgtgccggagctgatagacttcaaact

SEQ ID NO: 237439 - DNA, 441 bp, Gossypium hirsutum
ttttataataggaatgatattaacaggattttgggggctaaagcttcttgcatttgattcaaggattccgcttgtcgttgctttggttatatggtgtctaagaagaagtatattttcaccattgatgatgactgttttgttgctaatgacccatctggtaaagcaatcaatgcacttgagcaacacatcaagaacctattatccccatccacacccttcttcttcaacaccttatacgatcccttcagagacggtgctgattttgttcgtggctaccctttcagtctccgcgagggtgttcccactgccgtctctcatggcctatggctaaacatcccagattacgacgcaccaactcaacttgtcaagcctctcgagaggaacactaggtttgttgacgcagtcttgacaattccaaagggtactttgttccctatgtgc

SEQ ID NO: 237440 - DNA, 471 bp, Gossypium hirsutum
tgtgttttttctcttaaaccaaaggaacctgagggcttattgcttgattacccaagtcatcaacgacgactcttgcctctccttgcaaagacgtttgctatgagttttggagcaaattacttgaaaatgctgtatgtgaagaggacaccccagtcaaacaaaatcattcatgtagtttcaagttcattcaaggctacttttacatggagtaacatgcaaatacttcaggaatgtcgcgaagcttgtggaggacaaggactaaagacagagaatcgtgttggtcatctaaaagctgaacatgatgtgcaatccacttttgagggggacaataatattttaatgctgcaggtcagcaaagctctgtttgctgaatacatggcagctcagaagccaaacaaggctttcaagggtctgggtttagaacacatgaataaaccctgccctgtcattccatcacagcttactacgact

SEQ ID NO: 237441 - DNA, 504 bp, Gossypium hirsutum
cccacgcgtccggaaatttcgttaaacgctacgctccaaaaaatatcaccgccgcgccatggcggcgactgcatcatctccgtgggggaaacccggcgcatggtctgttgacgccgaagaaaatgaagcggaagtcgagcgacaacaaagcggcgccggttcctcaaccgaaaagctcggggatttcccttccttagccaccgctgtcaccaccaccaaggcgaataaaaagaagggtcaaaccctatctctctccgagtttgcttctaagcccagtgagccagcccgactcactcgcgaggatctcctcgcactccccactggccctcgacaacgttccgctgaggaactcgatcgcaaccgattaggtggtggttttaaatcttatggttcgaataggtatggttcggatggcgatgattcttcgagtaatagtagatggggattgaataaagatagagaaactgcttcctcacgcgccgatgagattgacgattgggcttc

SEQ ID NO: 237442 - DNA, 427 bp, Gossypium hirsutum
cccactcgtccggaaaagtacaagtgggatgcatggaaggctgttgaagggaaatcaaacgaggtcttcctatagttctgaatgatttcattgctgggcaggaagtcggcaatgttccatttgtggtggaaaatggatgtgggaaattttcaaagtcaccaaaagaaatagccaatatcataagccagtggtttggtcccaaagcagatgaactcaagtccatgtctgaaaatgctttaaggctggctaggcctgaggcagtattcaagattgtccacgatctccatcagctggtcagacagagaaattttgtaccccaattttcttgtacaacttaggtccactagaaaaactaaacaaagaaatagattttctaacgattttcccctttttgatttcattatcaattaccttgttttcttatttc

SEQ ID NO: 237443 - DNA, 504 bp, Gossypium hirsutum
catttatcggggagcaatttgatgaggcagatgagatttgtggtgtagttgccagtgttcgccaaaggcaggacaaacttgcattgtggaccaagactgcaacgaatgaggctgctcagatgggtattggaaggaagtggaaggagatcattgacatcaatgataaaattacatatagcttccatgacgactctcgaagggaaagatcagcaaaaggtcgatacaatgtttgaaccatttgcaggtttctttgttcagcagtgtactctttatttgttacctattttgcatgtgagtttatgttatgtgataccaccaacaatcaagttccatgttagagacagttttgatattttaacacattgagaattttaccctattccttggatacttaatttgctgaatctcatagcatatgatgattctgggggccattagaattatgtacttggcaatgtttttggtgcttaacttggaaggttgaactagtttcagtttgagtcc

SEQ ID NO: 237444 - DNA, 468 bp, Gossypium hirsutum
cccactcgttcggctaccttaacacaacttaccaactcaaaaaccccaagttttcactttcaaaaaacttcccacattcaccatgtctggcacgtgcggcaactgtgactgcgctgaccgcagccaatgcacgaagaagggaaacagcaacaccatgatcgttgagactgagaagagctacatcaacaatgttgagatggatgctccagctgagaacgatggcaagtgcaattgcggtactggctgcagctgcacagactgcacctgtggccactaagccaacatacaatggtcatgcttcagatcatggcatatatagggatctaaataatgaatttaaggttgaataatttgtgtctgttgtagtttgtgtggtgacttatatctgtcagttaacctttctctcctttactatgatgtaatggctatgcttatggccttatctggttaatgaagtatccttactat

SEQ ID NO: 237445 - DNA, 541 bp, Gossypium hirsutum
ccaattggacatggaactcgcctggcacaggcacacggaatccgttttgagtttcacagaggtgctgctgaccatacatatatgaggatcgatggggaaccgtggaagcaaccactgccaaaagatgatgacgcagttgtagttgaaatttcccaccttggacaagtcaacatgctcgcaacccaaaattgccgatcgaaaagtgtgagcgatgtttcctcatcaactagtcatcataatggtgaagaagatgatgattttagtgatgaagatgactctagagctgagccagagttcaggaaatttggtgcagcagacacgttcagaatcccagatgagattgatatttctcaacttagttaaacatctgataattccatttcttgtgttcattacttattcactgtaataatgtttggtgttcatttggtttaaatattgccgtaaaaggttataactcatagttaaattgccgcttttaaaccagaaaccaaatgatcccatcttaatgacgccattagcttcccagtaatttgatttt

SEQ ID NO: 237446 - DNA, 454 bp, Gossypium hirsutum
ttgttcccagctaatattagaatcatgggtgttgtcacttatgactatgagaatacctccccagtcgcccctgccaggcttttcaaggcctttactgttgaagctccgaaagtttggcccacggctgcaccaaatgcagtcaagagcattgaggttgaagctaatcctagctctggaagtatagtaaaaatcaactttgttgaaggccttccattccaatatatgaagcaccagatcggaggacatgatgaaagtaatttttcatacagttacgatttaatcgaaggtgggcctttgggggataagcttgaaaaaattagctatgagaacaagtttgaggcatttgctttcttccccattgtggacattaattaaatttcatattagctcttcatcatttaaactttaaagattatcaaatttaacttaaacaagttaaggatgtttctttgag

SEQ ID NO: 237447 - DNA, 482 bp, Gossypium hirsutum
ttttccacgcgtccgtgggattaactgggcatgtgggcaaggccaggccaattgcagtgctatacaatcagggcagccgtgctatctcccgaataacatcaagaaccacgcatcttatgcttacaatgattattatcaaaaaatgcatactgttggtgggacatgtgattttgatggtacagccacaactactacaatcgacccaagttatggatcctgcatatttactggaagttctaattcgagcacgggtagagagtctttgcctcctacagcacttggtccaataagtcccggagggagtacaaagcttccgctgtacaagattcaatttctaatctcagcaacttgtcttcttgtagtcttgctatgacactcgatttacgcctcggtggtggactcaaactgcgatgaatcattccatttgataggcaagattaagtgtgatagagaatgtaatgaaatccacttaagttcaataa

SEQ ID NO: 237448 - DNA, 460 bp, Gossypium hirsutum
ttctccacgcgtccgcccacgcgtccgcttcaactctcttcttcttcttcttcttcttcttcttcaaatctcatgttctagattctcattggcattgcaagagaactcatcagccacggttcgctcgggtcagatcaattccaactcagtcctggtggctttgttagactcacattacactgagcttgccgagttggtggagaaagctttgttgttgcagacccttgaggaaactgtcggcaaacacaatatcaccattttcgctcctaaaaatgaagctcttgagcgggatctcgaccctgagttcaagcggtttttgcttgaacctggtaatctcaagtccctccaaactctcttgctataccacattgtccctgctaggatcgatcgtcattcatggcccaaatcgacttcggcgttaacccatcattttactttatcaaatgaacgagttgaactc

SEQ ID NO: 237449 - DNA, 237 bp, Gossypium hirsutum
tgcccacgcgtccggacgattacacccactgtcctgcttctgaccggagtcggcttcttttccttgatattattcggagatccattcgcacccactcttgcaaagtttgggatgactactgttgttgcagctgcatatgtaggcgccttgcaaaacattttcagtaagagtgcaaagtacagtttatttgatccttgcaaagaaatggcctatatttcattggacgaggacaccaag

SEQ ID NO: 237450 - DNA, 487 bp, Gossypium hirsutum
tcgggctatccttgtacttgattcacatctatataaccgagcttaaacgcacccttcaagcgttttgggtcctcggtgttgttggatcattggcaacctacttagtccttgctcaaccagccggagagaacttggttcagtatgttatcgagaaccccatggcagtctggtttgttggccctctgtttgccgcattgattggactcgttttcaaagaaggcctttgctatggaaaattggaagctggtattcttacattcattatacctacacttcttcttgggcacctgaccggtttgatggacgatggaacgaaacttactttactcggttcatggatggctctctttgttatttttgccggaaggaagtttactcagccgattaaggatgatatcggtgacaatccgtgttcgtgttcaattctctacccaaggacaaaaaggaagctttgattgagaaacttgagaagcaaaaattacaatca

SEQ ID NO: 237451 - DNA, 189 bp, Gossypium hirsutum
ttttccaagtccaagatcacccaccttgtcttttgcaccactagcggtgtggacatgcctggggctgactaccagctcaccaagcttttaggcctccgcccctccgttaagcgcctcatgatgtaccaacaaggttgcttcgcaggggggacggtgctccgagtggctaaggacttagctgagaacaac

SEQ ID NO: 237452 - DNA, 365 bp, Gossypium hirsutum
tctgcggtgcttctacgtcttctacctttaaatttcaaagaaacaagtgacattgaaatcgatttggcttaccttagcttcctttcccaaaatagattgacgatgggattaccaaatgcaagcggtgacttgtcaactgaagttgaggtggatgctttcagacgcctctttccccttcgtttctacgagaaacatcttttagagtctatacgtcctgatgctcgtccgcttggaagagcaagagaaaccaccattgcccttggggctgttgcatctgctaatggttcagcacttgcaaaaattggttcaactactatgttggctgctatcaaaatggaggtcatgaccccttcattggaaacacc

SEQ ID NO: 237453 - DNA, 392 bp, Gossypium hirsutum
ttttccacgcgtccgatcgaagcgacaaagggctgaatctcagtggatcgtgggttccatttgatgctgatccttatctaggcatcaatgaagactttcaagtgtttgtaaggcctcaagcggatgtcaaatgttatggattggtttctgataaccaactggcctcttctttgctatcggagttgcgggataaaatagatgaatccaacaacatcttgatggatatcttggttcgaaatttatcgaccattactgagctcgagatagatgatcttacgaagcagttgacagagccattcacacctgatgatgcgttcatgtttggtccacgatctattcttgacttggaccacaatcaaatgactccctactcaaaagagtctctttctttt

SEQ ID NO: 237454 - DNA, 134 bp, Gossypium hirsutum
ttttgcttctaattttcctgaaagacctgatcaaccagaatgtaggtattatatgaacaccggaacttgcaaatatggatctgattgcaagtaccatcacccgaaggaaaggattgctaactcagccatgagta

SEQ ID NO: 237455 - DNA, 187 bp, Gossypium hirsutum
agctcctgtaatatttgtgaatgaaataccatgggttgttgaaccaatttatttagcacagtggggtacgatgtggatcatgatgcggagagagaaaagagatcgtcgacatttcaagagaatgcggtttccaccatttgatgatgaggaacctccgttagactatgctgataatttgttagatgtc

SEQ ID NO: 237456 - DNA, 453 bp, Gossypium hirsutum
ttgttcacgcgtccgcccacgcgtccgagcgtcttgcccagacagctcaggagacctttggtgattttgaagaagcagttgaaaaagatgcaacaaaaactgctgtcctggatggaactgtccatcctttaaccagctatgtgatcaattatgtgaagtttttattcgactaccaatcaacactgacacaacttttccaggaatttgaaactggtgatggtacagtatctcagttagcttctgtaacaatgagaattatgcaggctcttcaaacaaatttggatggaaaatccaagcagtatagagatcctgctttgactcacttatttctcatgaataacattcactatatggtgagaatctgtgcgcaggtctgaagccaaagacctgttaggggatgattgggtccaaatacacaggaggattgtgcaacagcatgcaaatcaatataaa

SEQ ID NO: 237457 - DNA, 295 bp, Gossypium hirsutum
tcttattagagaagttgcaggacttattgacttcaatgtgctttacagtgtatgctacacaggatgatattgctgtgtggcagaaatcttcagatattggttgctatgagaagctcaccggtccagatgtctacccagccacgtgtgatgacagtatcgaacaggatgcatcatggtacactccgttacgcccatgtgttacatctccaagacaaaagcttatgaggtcatccgtgggttccctgccaaagtggccacagaggttaaacatcgcacctgagcgcatttcagatgt

SEQ ID NO: 237458 - DNA, 450 bp, Gossypium hirsutum
tgaacaggagaggaacatcgatagatagaaggagatggcggtgagaggtagagcagtagaaacgctgccaaagctgatgaggagcccgaggaaggactcggcttcttcaacagtgactcgaactccagccttgccctcccttagacgcgctttctctctctacgatcagattaatctcatcgacaatgttcccgatgaccagcttcgtttccaacgatatacggaaacaggattcactgtgaacggtgtcaactatgaaggcagcttgctttgtgtgggaaatttggttacttcttggggcccccgtaaattttctgaaattactccccaaagcttatccatctttcaaattatacgacctattccagaaattttgattcttggctgtggaaggtacattgaacctgtagatccggaactcagacgcttcatccgatctactggcatgaa

SEQ ID NO: 237459 - DNA, 402 bp, Gossypium hirsutum
tccacgcgtccgcccacgcgtccgcccacgcgtccgcccacgcgtccggcgagaatctggctctaccatggctgttgttgctgcacaaaccaaagcaattgctggaaaagtaacaaattgggacaatgttgttttggcttatgaacctgtttgggccattggaacagggaaagttgcaacccctgctcaggctcaggaagttcattgcgagttgaggaaatggcttcatgagaatgttggcggtgacattgctgcatcaactagaattatatatggaggttccgtaaatggagcaaactgcaaggaattggccgcacaacccgatgttgatggctttttggttggtggagcttccctaaagcccgagtttgttgatatcatcaaggccgcgatggtgaaaaa

SEQ ID NO: 237460 - DNA, 422 bp, Gossypium hirsutum
ttggttgaagtggtggaaggtgatgcaaggaatgttctctgtgacgctgtagaaaaacaccatgcctccgttctcgctgttggtagccatggttatggagctataaagagggctgttcttggcagtgtgagtgattattgttctcaccatgctcattgctctgtgatgattgtgaagaagccgaagatcaaacattaatctcagcaataaaattgaacaaacaactggggttgctgcatatttttagtcgcctaataacactatggtgttgcacactgggactgtaataccaatcatgctgaatattagatattggtgtaaataagcagagtttacacgattcttatgtcttaatgttttttaattagcttgtacaagtattattggaatattctatacttaaatctatcatgcgagtgttg

SEQ ID NO: 237461 - DNA, 459 bp, Gossypium hirsutum
ttcacgcgtccgcagagctctctccttctaggccttacatttcgtttggcgttctactatttccagcgtctctttgcggctgagtggtcttttgaattctttggtggaaacttttgaacaaaatcgaagttacagagacttaacgattaaaagagaaagaatggaaacacaaaagagccaggccgagaaacaagcgacgatggcttcatgtagaaagaaaaagaatgaagaagccaccttccttgaagacttgaaggatcacatcgatgagtttggtaatgcatcaatggatgagcataaaacttgctttaagaagaccatccaaaagatgtttggaatgtcaaaatttgtagctgaaaggaatgctgaatcaaaggaaacaacagtatcaaaataaagtatgttcatctttaatagcatgatatgtagtagcatgatttggtttacactatatttaaa

SEQ ID NO: 237462 - DNA, 437 bp, Gossypium hirsutum
aatcccactccaacataaagcatctctagtttccctctccaattctctaagcttagccgaaacaatgaagctaaaacatcactcgtccatcactctcctccccttgctctctttgatctttcttccctccttggtctcatctcaggcctgccagagaacctgtggcaatctccccatcaagttcccctttggaaccggccctggctgcggtgatccgcgctttcaacagtatgtaacttgcgaccaacaaaaactcaccttgacaacacacaccggaaactatcccataaccaacatagactacagcaaccaagtcatatacatctcggatccttcgatgtcgacttgcggttgctctcaaccgagcaaaggcttcggcctagattgggacgcacccttttctttcacggacgacaacgtattcactctccttgact

SEQ ID NO: 237463 - DNA, 428 bp, Gossypium hirsutum
  unsure (1)..(428): unsure at all n locations
ttcacgcgtccgctttttagttctcaactctctcaaattcaccatggctgacaagtgtggcaactgcgattgcgctgacaagagccagtgtgtgaagaaaggaaacagcttggtcattgagactgaggagagctacatcagcaccgtagtggtcgagcctctggcagagaacgatggcaagtgcaagtgcggaactagctgcagctgcacaaactgcacatgtggcagtcactaagcagacatatagaatgatgaagtttgggacctaaaaagaataaaagttgggttgaataatttgtgtcttttgttgtagtttgagtgtgttttcttgtctatctgtccgatgattggctatgtctctcattttatacaatgatggaatgaccatgtcaatggcctttgtctgattaatgaactattattagtnt

SEQ ID NO: 237464 - DNA, 403 bp, Gossypium hirsutum
cccactcgtccgcccacgcgtccgcccacgcgtccgcgctttatgttaatgttagctacaatagaatatctggtcagattccagctgaaatgagtaaaatttgcaaatctctcaaatttttggatgtgtctgggaatcaaattactgggtccattccgcctagcattggagacttggtttcacttgtttcgcttaatttgagctggaacctgttacgaggctggattccgagcaattttgggcggatcaagaatctccggtatctttctttgtctgataacaatctgaccggatctattccttccacctttggccggttgcaatctttagaaattttggagatgtcgtcaaattctctttctggtgaaattcctgaaggtctggttaatctgagaaacctgac

SEQ ID NO: 237465 - DNA, 400 bp, Gossypium hirsutum
tttgtgggaaaaaggaccctggtgtgattccgttggctcagaatctatctaatttgatgaggcttgttgtgttatacaagtacggaggtgtttacttggatacggatttcatagtgatgaggagttttaaagggttgaagaacacaattggagcacaaagcattgatgtggtatctaagaactggacaagattgaacaatgcagtactggtctttgatatgaaacatccacttgtactcaagtttattgaggaatttgctttaacttttgatgggaacaaatggggacataatgggccctatatggtttccagggtagttcgcagagtagaaggcagacctggttataattttacaatcttaccacctatggctttttatcctgttgattggattaaaat

SEQ ID NO: 237466 - DNA, 357 bp, Gossypium hirsutum
gttaagtttgctagctttggaactcctgaaggggtctgtggaagctaccgtgaaggaagctgtcatgctcaccactcatatgatgcttttaataggctttgcttaggacagaacttctgcacagtgaccgtagctcctgaaatgtttggaggagacccgtgtcctagtgtcatgaagaagctctcagtggaggtcatttgcagctgatggagctcatcagaaagtacatgaaataaacatggttcttcattgttctttctcaatccaacatgtcattctgcactttttcgggttattttggataaataagcccacaatccccagatcacaacaccaaccatttgttttggcattccc

SEQ ID NO: 237467 - DNA, 435 bp, Gossypium hirsutum
ctcactcgtccgaaatagcagtcatcaggttttgtggagttcaaaaacggctctactatttgtagtattgaatgtccaaagaaatgaaaggaggtttgtgttttacccgttgctcgttagagaggatttgaagcagcggtagcgctgcccaggtcctgtcaatggacacatactcttctggggaagaactcgttcttaagactaggaagccttatactattaccaaacaacgtgaaagatggactgaggaggagcataataggttcctagaggctttgaagctctatggacgagcttggcaacgcattgaagaacacataggaacgaagactgctgtgcagatcaggagtcatgctcaaaaattcttttcaaagttggagaaggaggcacttgctaaaggtgtaccaataggtcaagctcttgacatagatatac

SEQ ID NO: 237468 - DNA, 373 bp, Gossypium hirsutum
ggatgtcttgaaaaccatctttttagaaggacaatacctcttccatggtccaatagaattaagattgcacttggggcagcaaaaggtttggcctttctccatggtggtcccgaaccagtcatttatagagattttaaaacatccaacattttactcgattcggagtataatgcaaagttatcggattttggtttagcaaaagctggtcctcaaggagataaaacacatgtttctactagggttgttggaacctatggctatgctgcaccagagtatgttatgacaggacacttgacatctaagagcgatgtctacagctttggtgttgtgttacttgagattttgacaggccgaagatcaatggacaagaaac

SEQ ID NO: 237469 - DNA, 388 bp, Gossypium hirsutum
ttcgtttcacgcgtccgcccacgcgtccggttcaaggcttttgatttgggaggccatcagattgctcgaagagtttggaaagattactacgctaaggtggatgcggttgtgtacctagtggatgcttacgacaaggagaggtttgccgagtcaaaaagggagctggatgctcttctctcagatgaagctttggctaatgtcccgttcctcatcttgggcaacaagatcgatataccatatgctgcgtcagaagatgagttgcgttatcaccttgggctcaccaatttcaccacaggcaaggcaaacgcatttaacagacagagcttgcaccctttaagttctgatattggattcacatcatccgtccaagcatgtatctgcttaatgg

SEQ ID NO: 237470 - DNA, 387 bp, Gossypium hirsutum
ttttgcacttctaaaacctttagcttttctcagagatggctcagggaaggggcagtgcaagtcaagcgaccatgtccgcaattgcattgctattgtgcttaatggtttgcctggaaaccattgatgcagctacttacactgtcggtggctctaatggttggacttttaacacggctacttggccaaaagggaagcggttcagggccggcgacgtgctaggtaactccaaataactaaacaaaatgattaaaatatttcctagtttgtgtctgaagtaaaaaaaactttgtactgtgatgttgcagtgttcaactacaatgggactatccacaatgtggtagcagtgaacagaggagggtacactagttgtaccgcacctgcaggtgc

SEQ ID NO: 237471 - DNA, 351 bp, Gossypium hirsutum
ttgtttagcttgtttttgatgtgcagttagtattaaaaagtgcaatgcaattttatgggttttcacatgaggtcagatctgaagccaggatagtacatgatctgttttttgacttgttgaagattgtattttcagataacgatttccgcgaagctagaaatgctctttctttctctagcccagtatctacctcgacctctggtccttctgcaagacaggtagcagttatcaagaggcagaagccaataaatgaggtggaatctgatccagacctaactcaaaagacattgcaacgtggattccctcatgctggtgaggaaacaagggttagagtgcacatgccccaaaagg

SEQ ID NO: 237472 - DNA, 405 bp, Gossypium hirsutum
tggaattaccttcattatatcaagaaataccaaaggtatgagaagaggcattcgaacatacctgcacatatttctccatgcttccgtgtaaaggaaggggatcatgtcattattgggcaatgcaggccattgtcaaaaaccgtgaggttcaatgttttgaaagtgattcccgctggatcttccggtggtgggaagaaagctttcactggaatgtaagctgcgagtgttattctgtatttttgtctggggtcgtaggagcctacgtttcactgttagatttcttttgttattgtttttctttccatttacttcttatgtttggatgctgacatctggaattttgaagatatcacttgaatatgcttgaatttttgcattactagtataatcccattttcagatgat

SEQ ID NO: 237473 - DNA, 374 bp, Gossypium hirsutum
cttatttttccgattgatttggggccgtcaaaaagcgagtccttgtctgagaactcagaagtttggttggaagaattctttagccaagtatataaaaagatacatttcaagtcattcgatttcgatggacttgccaataaaattgtaaaggaaatcagctcacaatttcaaaggacagttggaagtgaagttctgttggagattaatgaagaagtgatggtacaaatacttgctgctgtctggttttcggacaaaaagggagctctagaagattgggttgcaaatgtgctgggaagaagctttgctgaggctgagcaaaaatacaacctcaatcctcaatcagttgtgaaactagttgcatgtgaaggtagtgt

SEQ ID NO: 237474 - DNA, 404 bp, Gossypium hirsutum
ccgcccacgcgtccgcccacgcgtccgcctggctcgagttccctgtcaaaatctactttcaaagaaatgtgcaagggctttagcattgcctttgaggaggtatacaaaaaccaaacaagttggtgcatcccagatccacagcttcgcgaagatttgcggatttcgacttcacttaaagtagtccatgcataccggacttttcttggaagaaatcctgctcatgttgatgataaatgcattaagcatactgttgaagatgtcgaaaaattgctctttggccttttcgaaggatcgccaagatcgttgcgcaattcacgaagaatgatgaagacataagctgtcaagttttagccatttttgggtattttcttctgaatcaagtctgtattttcgtagatataaaa

SEQ ID NO: 237475 - DNA, 389 bp, Gossypium hirsutum
cttacgtttccgctcatgtccttcatctctgccgttccagaatctcaacgttctggtatatatccgcgctcaactttccttttctctgtcatatatttctgagttttggtttgattttttttgtatgaaactttcgatcagctttgttccaatcactgttgttcgaagcttgtggtagaacagtgaatccagtgaacggagctgtcggacttttatggacagggaactggcatgtttgccaagcggcagttgaaactgtcttacgagaaggaactgtacgggcggtgcctgaacttatggctccctcaccagcatccggtgaaaaatcggaagctactaagattgcgtgcatgttgaagttgcaagaaacagaaacaaaatttaattca

SEQ ID NO: 237476 - DNA, 444 bp, Gossypium hirsutum
tcggtttcttccaatattcttctctctgacaacctggaacctctgatatccgatttcgggataagaaacattgggtgtagaaaagaaaaggataagaaggatgaaagcgacgctgaaattgatgtttattgtttcggtgttgttttgttggagcttttaacggggagcaagggacggaggagaatgtgaggcgggtgaggaggttagtgaaggaaaggaaaggagttgaggcgcttgactccaggttgagattcgccggtgaatcggaggctgaaatggtggagagcctccgagttggatacttgtgtacggcggagtcagctgagaaaaggcccacgatgcagcaagttctgggattactcaaagacatacatccgacagtagacgatttcaaccgatttcattggtaaaactataaagtaaaacgcacgctcatacagtttc

SEQ ID NO: 237477 - DNA, 408 bp, Gossypium hirsutum
gttaccttgaaaccgaaactgaaacctttgcattgggataaagttcgagcgagttcggatcgggctatggtgtgggatcaaataaaagcaagctcatttcagttgaatgaggaaatgatcgagacgttgtttacggcgaataatttgaattcggctactaaagaaagcggtcgtaggcagagtttgccgtctgttaatcaagaaaatcgtgttctcgatccgaagaagtctcaaaacattgcgattctattgagggcattgaatgttaccattgaagaagtctgtgaagctctcatggaaggtaattcagacactcttgggactgagctcctagaaagcttattaaagatgtctccaacaaacgaagaaaagcgtaagctgaaagatttcactgatgagtccccattc

SEQ ID NO: 237478 - DNA, 342 bp, Gossypium hirsutum
gttcttttacgatctccggcgggttaatcctaccatcgtcgtgtttgttgataacgaggtatggatggagtccggtacgccatcgttccggaagaatttcgttaacggactggaattctacgctatgatgtttgagtctttggatgcggcggtcgtggggaacggggaatgggtgaggaaagtagagacgttgcttctccggccaaggatattagcggcagtggaaacggcggcgaggagcacggctcccccgtggagggagaggttccgtggggcggggatgagggctgtgcatttgagccagttggcggagttccaagcggagtgcttactggggaaagt

SEQ ID NO: 237479 - DNA, 410 bp, Gossypium hirsutum
tcgctttaatttctgattttgggttgtctttactttgaaatcctgttcatgctatagctagattaggtggatatagagctcctgaacaagctgaagtgaaaagactgtctcaaatggctgatgtttatagcttcggggttttattgctagaagtgcttacaggtagagctccatcgcagtatccttcaccgactcggcctcgaatcgaagacgaagaaccggcagttgaccttccgaagtgggttcgatccgttgttaaagaagaatggacagccgaagtgtttgatcaagagcttttgaggtacaaaaacatcgaggaggaactcgtttccatgcttcatgtggggttagcatgtgtggttccccagtctgaaaaacggcccacgatgaccgaagtggctaaaatgatc

SEQ ID NO: 237480 - DNA, 295 bp, Gossypium hirsutum
cttatttgtccagacaagtcatatcttgagtttgtcgggaaaactagaactcgacaggatggaatggcggctctagctgcaggtgcggcgacagctgctcatgcagcaggaaccttaaccttggatactcggagaagacaaccagcactcagaccatcatctccggagttgcgccagtgaagatgacctttgagggaccagagatgagcactactgaatcaggacatggatgcaagtgtggatcaaactgctcttgcgatccatgcaactgttgaaaagcttgatgaaagcccta

SEQ ID NO: 237481 - DNA, 448 bp, Gossypium hirsutum
gttattttttacattgacgactatgatgaactcttcatcgtctatcgattgaaggaattgttaaaatacaaagggtttcaagttgcccctgccgagctcgaagcaatgctcattgctcaccctgaaatcatcgatgctgctgtcgtcgcaatgaaggatgaagcagctggggaagtacctgttgcatttgtggtgagatcagataaatctcagatcaatgaagatgaaatcaagcaatatatttcgaaacaggtggtgttctataagagaataagccgtgtgttcttcattgaaaccattccaaaggcaccatcagggaagatcttgagaaaagaattgagagctaaactggctactggaaactattgattattatatttgctctctgaaatcttccccaacttttccatgaaaaaacttgttgaaataatatacaaagagtgtatgg

SEQ ID NO: 237482 - DNA, 461 bp, Gossypium hirsutum
tttcttggatattcggagaagacaaccagcactcagaccatcatctccggagttgcgccagtgaagatgacctttgagggaccagagatgagcactactgaatcaggacatggatgcaagtgtggatcaaactgctcttgtgatccatgcaactgttgaaaagcttgatgaaagccatagattatgaaaaaaagaaagcagcaaaaataacaggcctctgtaatgatatattgtcaaggatggatgcctgcaaggtctataattatgtctctgtctgtgtcttgtgtaatagaagctttgtttgtggtgaaaataatgtataagccatttggttgggagcaaattgtccttttctccaaaggatttttgctgctcattcatggtgacttggtttatggctctatctgttgttgttaaaatcttataaaaatatatatcggttgctgctcttggtttgtatc

SEQ ID NO: 237483 - DNA, 271 bp, Gossypium hirsutum
gttattttcgccgccgtgattcaaaactcagcccactgtctccgatcgtgtcaactcgtaacccaatctctcaaatatggatcgacccagattcgtaatcgacgccgtcgaagccgagcaaatggccaaacaatcaggcaagacggtgctccaactccttccttctttggtcaaatcagcccagtccgttgcccgcccgccgatctcgaagtaccaagttggggcagtcgggatcgggtcatccggtcggatctttttcggagccaattta

SEQ ID NO: 237484 - DNA, 370 bp, Gossypium hirsutum
atcattacctgtgaaattctgttctcatttttctttcaagaactaagcgaaaatggcagcagaggaaggccaagtctatggctgccacactattgaatcatggaacgaacagcttcaaaaaggcaacgaatccgaaaaattggtggtggttgatttcactgcttcatggtgtggaccctgccgtttcattgcaccttttcttggctgaactagccaagaagttcccttctgttacctttcttaaggtggatgtggatgagttgaaggaagttgccactgccaaaatcattgaaatgcagtcggcgagtcagtggagagcccagctagaggcctccaagcaaagtaccaagttgctggtgatagatttctc

SEQ ID NO: 237485 - DNA, 391 bp, Gossypium hirsutum
  unsure (1)..(391): unsure at all n locations
tttgttcatttatacatagaaatgagagaaatggttcatattcaaggtggtcaatgcggtaaccaaatcggtgccaagttctgggaagtcatctctgatgaacacggtattgatcctaccggtacctatcacggagactctgatcttcaactcgaaagaatcaatgtttacttcaacgaagccactggtggaagatacgtccccagagctatcttgatggatcttgaacccggtacaatggattccgtcagagctggccccttcggtcaactcttcagacctgataacttcgttntcggtcaaactggtgctggtaacaactgggccaagggtcactacactgaangtgctgaacttattgactccgtcctcgatgttgtcagaaaggaag

SEQ ID NO: 237486 - DNA, 406 bp, Gossypium hirsutum
  unsure (1)..(406): unsure at all n locations
acatatatatagcaggatgatgctcggaaaacgctcacgtcagtcgatcaagaggacgacacgcatgacgggcatcaccgtcgatgtcgtcgaccaccaccaagacccaatcatatcccatcctccccctcaaatccaccctttgcatgaatcccccgacgctaactcccgttacgatcaacgcttcttggccatggtgtcgcccagaaacccagcttcttttactagccatgtcatcgacagcggcaccactgccgctgctccttttttgcgagcttgttggctttgtaatcgccgcttagctcctggtcgtgacatatatatgtataggggggatacagcgtttngtagtcaagagtgtagagaaaaacagatgaagcaagatgaaagaaaagaaaagctaaac

SEQ ID NO: 237487 - DNA, 480 bp, Gossypium hirsutum
  unsure (1)..(480): unsure at all n locations
gtttaatctgaagaaccttgttggcttggatttgtatggtaaccggttcgaaggagaaattcccaagtctttttccggactgaagtcactgagattccttcgtctgaacaacaataacttgacaggatccattccaagggagcttacttccctctctaaccttaaagtattcgatgtttctaacaatgatctctgtgggactatcccggttgatggccctttcgggatgttctcaatgccaagctatgcaaacaacatgcgcttgaatgggccagagctgaaaggacttgtgccgtataactttggctgctgaagaaaccaatctttgtcgaactcatgagcgcaaaagctctggtgacatccccatgctgattttatgtaggagtggatagtgagatgctctactctgtatctatataatctaaaaaataacatgatgctaggttttaagccttttgattnttttacatgtaaagcatg

SEQ ID NO: 237488 - DNA, 467 bp, Gossypium hirsutum
  unsure (1)..(467): unsure at all n locations
ctttcgcgtccggtcaatattcaccaattctttagagggtatacagatggtcgttttgatgcaaaatcatggcctcagatactgaagctaaaagattggcctccatctaatgaatttgagaagctccttccacgtcattatgctgagtttctttgttgtttgcctttcaaagaatatactaaccctagaagtgggcttcttaatattgctaccaaattgccgaaaaaatctctaaccccagatatggggccaaagtcatatattgcttatggagtttttcaagagctggggcgtggagactctgtaaccaggcttcattgtgatatgtctgatgcggtgaacgttttaacacacactgttgaggtgaagcttagtcatgaacaactggctagcatcaacaaggcaaaacaaaggcactctatccaagaccagcaggaactntatggaatgaattcaaaagttgacag

SEQ ID NO: 237489 - DNA, 421 bp, Gossypium hirsutum
aattatcaactattgcatttgttttgaaaatttggccacactacttgtttggtgaaaaatgtcacatattcaccggttagaaaagcttaaagtatttgatatcctagaaagatttgaatctgagacagcataagtggcttgaattattgaaagattatgatttggttatcgactattatctgggaaaagcaaatgtggttgtagatgctttaagtagaaagtctctgttttcttcgtaagtaatgaatacccgattaacattgtttgatgatggctcaatcttggctgaaataaaaggtaaactgacatttctttagcagatcagcaaagctcagaaaagtgatgatgagttacaagctagactggtacagtgtgaaactacttttgattcagaattccaaataggacccgatgatagtct

SEQ ID NO: 237490 - DNA, 297 bp, Gossypium hirsutum
  unsure (1)..(297): unsure at all n locations
tcggctgggatgaccattggattttctgggtgggtccattcattggagcagcactagcagcactctaccacgttgttgttatcagggccattcctttcaagtcaaaatgatcaaaatcgacggtccaaatgatcatatgatctcaaaaaaatgaaaaatttcacccatgcaccctttcagtttgtgtatttcccatttgatccttttgtttttgtatatgtaagaatgtgtgtaatatatattatttacttcaaanaaaaaaaaaaaaaaaaaaaaaaatttaaaacccaaattaag

SEQ ID NO: 237491 - DNA, 417 bp, Gossypium hirsutum
tttttagattatgaaaataaaagaccaatgagaaaagatcaaagatcaatgaaggaagagagccaaaaaatgcaatccccttgcctagaagaggtttcacaaggatgcctccatggctgctgtccctctcctttcctcaaccaacatgagcctcaaaccaaagcttcgaaaccccgaaactcttcggcagcttgccgccgtgaccttgcgtctaaaactacttcttctattttccccaacacccaattcaccaaccatgaatctcttccatctatgcaagactcatttgccgaattcaccaaggcttaccctcagtattcggatacctatcgagttgaccaaatacgatcacgagagtattaccatctctccttctccgaccatacttgccttgattatcttggcattggtctcttc

SEQ ID NO: 237492 - DNA, 483 bp, Gossypium hirsutum
tcgctgacgcgtgggttcaccgtagtccccgttttagtcactgcatatatctgccactacaatgtccacagcatagataacgaactggaagattcaacccagataagaccggttgtgcgaacagctctggctttatgctcaactgtttacataatgacaagctttttcggatttcttctatttggtgacgccacaatggatgatgtgcttgccaactttgataccaaccttggcatcccctatagttccctgcttaatgatgctgtccgtgtcagctatgctgctcacctcatgctcgtatttcccattgtcttctatccactgcgactcaacatggatggcctcctcttcccttattcaaggcctctagctcagtctaatacaaggtttgcttgtattactgccggactcgtagcagttatcttcttgggtgcgaatttcatacccagcatctgggatgctttccagttcactggagcaact

SEQ ID NO: 237493 - DNA, 473 bp, Gossypium hirsutum
tcggtttagatacctgaaattgtggcagtagaaccagtgactgatgaagaaactggccttgagatgaatgaagagaacattgagaaggtacttgaagagattaggccctatctggttggtgcagcgggtggatctcttgaattagttgccattgaggagccgatcgtgaaagttagaatcacaggtcctgcagcgggggtcatgactgttagagtagccgtaacgcaaaaattgcgagagaaaattccggccattgcagccgttcaacttttatgattccaatgcaatgttttaagatttaacaaaatagttaccaaatatagcatttattgttgttaggcttgtatgaatagtgaaaatcctgctgtatagttcatagtttccatacttttctctctttggatgccattgccagtcctaagtatattgttttttcttttctaaattcaattcaacaatggcgttccgatttt

SEQ ID NO: 237494 - DNA, 486 bp, Gossypium hirsutum
ttttctcgtgggcttccaattatcttaaagcctgccatataatcatataaccaggctccgtcgtggtactcttcggccaccacaatgccgaaaatcggcttgggaacaagccaagaggctgctcagcctgactgcatcaaagcccttgtggtcgagtttatcaccactttcctcttcgtattcgctggagtaggagctgccatggccgccgatgagtcgggggcaaatgcgctggtgggattgtttgctgtggcggtggctcatgcccttgtcgtcggcgttatgatatcggccggacacatatcaggcggccatcttaacccagccgtcacgcttgggttgctattcggtggtcacatcacggtggtccgtgcgatcctctactggatcgatcagttgttggcatcttcagctgcttgtatacttctcaagtatctcaccggaggattgaacactccggttcacacattagcaagtggaatgggg

SEQ ID NO: 237495 - DNA, 483 bp, Gossypium hirsutum
tcgtttacgcgtccgggacggaattgggaacctttctaaccttgttgaattgaatatctccttgaatgactttagtggaagtcttccagacgtttttgggagactgagaaagctagaatccttctctgccagctcaaatagattaactggattattgcctgcttctttggtgaattcggctccacttttgaggatcgatctgcacaacaacagtcttgacggtccaatcagaataaattgttctgcaatggcccaagtcacctcacttcatctcggttctaacaatttccaggggccagttcctgctagtctatcctcttgccagagcttgacagttctgcatcttgcacgcaacaaactcggtggtgtagttccatttgagtttagaaatctgcatgcactggaattcctctcgctcggaaacaccagcatcaataatatatccacagcactggatatactacaacactgcaaaaatttgac

SEQ ID NO: 237496 - DNA, 486 bp, Gossypium hirsutum
ttcacgcgtccgcttcggtcaacagagcaaggggagatggtgcaggcaaaatttggtttgccacagattgccactagacagctagaaatatatacaacggcagtgctgcttgcaactctgcggccccctcaaccacctcgagaacagaaatggtgtaatctgatggaggagatctcaaaaatcagttgccagaactaccgaagcacagtttacgagaacccggaattcctggcttatttccaagaggctacaccccaggctgaattggggtatcttaacatagggagccggccgacaagaagaaaagcaacgacaggaataggacatcttagagcaattccatggatatttgcatggacgcagaccagatttgtactaccagcatggcttggggtaggagcaggtttaaagggggtatgtgagaagggacatacggaagacttgaaagcgatgtacaaagagtggccgtttttccagtccacggtg

SEQ ID NO: 237497 - DNA, 459 bp, Gossypium hirsutum
tgtacgcgtgggcggacgcgtgggcggacgcgtgggcggacgcgtgggttcatagcattgttagcaagatgttggtaaatgaagaactccatgcaagctgggaccagccaactcgatgcatcatcttccatgatgttgagtactcaaggttgcaggccttggcattccagttgacagaaaagctttcaatacttgctgagagtaatgagagggcagtcgaggctagatttggtggtggtggattggatctgccactaaggcggcgagataaccaggaatatgctgctgggacagctggcggcggcggcggtaggtggccagacttgtcctacaatcagggtaggcaaggtagttctggacgtgccgcgtatactggtggtggcagaccattggcattaggacaggcttcaagggatcggtcaagtcaatcacgaggaacaggcggatactctgggagag

SEQ ID NO: 237498 - DNA, 407 bp, Gossypium hirsutum
gaagatgcataagacggtatggattgctgttggtgatataattcttgtcggccttcgcgactatcaagatgacaaggccgatgtgatccttaagtacatgcctgacgaagcaaggctattgaaggcctatggtgagcttccggagaacacccgtctcaatgaaggcattgatgatgaggaagacgaacgcggagtagatgattatgtcgagttcgaagatgaagatatagataaaatctaaggtaactataatggggtcatgcttgaagccttgtgtttaaactgttagaaacagagagatatactggatgctgtggagatatatgactacagtaagtgagatacctgccataagtcataagttagacattctataaatggcgaaggtgacattgttagatgtgtat

SEQ ID NO: 237499 - DNA, 284 bp, Gossypium hirsutum
cgcgtccgggtaactgcacggatttgaacgagagctgtgagagatgggctgctcttggtgagtgtaccaagaaccgagaatatatgatcggaactgcagaacttcctggctattgtaggagaagctgcaaagtatgttgaaggtaaactacaagcttcaatgatagtatatctgctgctgcattttctgttgtaagttttttattgctttttttttttagtttttggattcaaatttacattcttatgctacagttttcacaaacatagttgaaatccatgtat

SEQ ID NO: 237500 - DNA, 475 bp, Gossypium hirsutum
acgcgtccgaaaaaaaatcgaaccccccttctctctattgctttccatggcgaactcggtggctgattcacgtagcaacagggcagcggttcaagccaccaacgacgatgcttcagccagtaaactgtcatgcgttaaaaagggatacatgaaagatgactacatccatttgtttgttagaagacctgtgaggagatctcctattattaaccgtggttattttgcacgttgggctgctttcaggaagcttctatatcagtttcttgattgtgagggatctaatagtgaaaagggtaaaacaaggaggcagatactatcacttggtgctggatttgataccacctattttcagttgcaggatgagggaaaagcaccgtatctatacgtggaactggattttaaagaggtaaccagcaaaaaggcttcccttattgaatcctacagtcagttgagggacaaaattggtgcaacagca

SEQ ID NO: 237501 - DNA, 486 bp, Gossypium hirsutum
tcggtttgctctgtatattgaaattttctttctcgattttctctttagccaaaaaagatgcagatcttcgtcaagactctaaccggcaagacgatcactctcgaggtcgagagctccgacacgatcgacaacgtgaagaccaaaatccaagataaggaaggcatccctccagaccagcagcgtctgatcttcgccggaaaacagcttgaggacggccggaccttggccgattacaacatccaaaaggagtcaactctccacctcgtcctccgtttgcgcggtgggatgcaaatcttcgtgaaaaccttgaccggcaagacaatcactctcgaggtcgagagctccgacacgatcgacaacgttaaggcgaagatccaagacaaggaaggcatccccccagaccagcaacgtctcatcttcgccggaaagcaactcgaggacgggcggactttagccgattacaatatccagaaggaatcgactctt

SEQ ID NO: 237502 - DNA, 409 bp, Gossypium hirsutum
tttatcttcatcttcatcttcaaaggttatctttgttttcttgatggtcaattaatagtttgaagttggcttaggtgtcaattctcctttttgcttgtttgattgatgagagttgatgaattataagtcaaaattatgtttgtgggtttttgtgtttaggtaaagttgaagatttagttcagaaaaaaaaaaaaaaaaaaaaaaaaaaggggggccgctcgcgatcgagaaccggacgcgtggggcttgggatggcccctgtttatatggcattccttcgtttcatgggtgatgaggttgaatcccgcaactacagttatagcctagaagttgggggcaatggcaggaaactcatttgggaaggcactccaagaagcataagagatagccaccgaaaggtcagggatag

SEQ ID NO: 237503 - DNA, 469 bp, Gossypium hirsutum
cttacattgacaaacctgatgttcatggttggacacccagggagctagctgagcaacatggacacgaagaaataaagacaatgtttgaatcaagaaaagagatgaaaactcaatctatcatgtcaatcccagagaaggctgagacacggtacctcgggaggtttacaagtgagccggtgatccgtcctgtggcaccggatggtacagatggatcatggagccaatcccggcagagacgtaggacaagtaacttccacaactcactgttcgggataatgtcagccgcaaacatggagaaagatttgctattgtcagtacataaacctaagggtgtgaaggattgtgttgtcaactctgctagagttgtaataagttgtccagaaaaggggcaaaccattgggaagctagtttcacttccagggaactctgaggaattgcttgagatgggtgctaaaaaatttgggatcat

SEQ ID NO: 237504 - DNA, 424 bp, Gossypium hirsutum
ctttttggtcctttatcttcttgggtttgatcttcatcttcttctttcgatctccttcttcgaatcccatccctcaagacccatctcgccgttctctccgtacccacaactggggtggacccgcttgggaaaaacgggtgcgttcatctgcccgtatccgttcccgaaatggaatctccgttttggttaccggagccgccggtttcgtcggtacccatgtttcgaccgctttgaaaaggcgtggggatggcgttcttggacttgataatttcaatgactactatgacccttcattgaaaagagctcgtcaagcgctcctggaccgcactggggtcttcgttgtggaaggagacatcaatgattcgacccttttaaagaaactattcgaggttgttccatttacccacgttatgcatttggctgc

SEQ ID NO: 237505 - DNA, 273 bp, Gossypium hirsutum
tttcttacgcgtccgcccacgcgtccggggagctttaatgtgacagtcacgggcataacaattcaaaacagtccacaatgccatcttaagtttgataattgcataggagttgtggtacacgacatgtccgtctcatctccaggggacagtcctaacacagatggaatccacctacagaattccaaagatgtgctaattcatggcactactcttgcctgcggagatgactgcgtttcgatacaaacaggatgctcatatgtatacattcacaat

SEQ ID NO: 237506 - DNA, 267 bp, Gossypium hirsutum
gtttgatagtggcctactatggtggcgacgggtgacggagaattagggttcgattcctccgtaggacctcctctattttctccttactattgttggtgtcccctaggatcatcgacactacaatgctcagctacttccgaactccctgcctcttccatctgatcttttaagcttccaccgctttcatcaatgttgccaacaaatggttcttccagctcgttgaaaccgactctacctcttggtcttactgatgtaccatcactggat

SEQ ID NO: 237507 - DNA, 387 bp, Gossypium hirsutum
tctttacgcgtccgcccacgcgtccgacctaaagaagattgctgagaagatgaacggtgcttctggtgcggagcttaaggcggtttgcacagaagcagggatgtttgctttgagggaaaggagagtccacgtaacacaggaagattttgagatggcagtagcgaaggtgatgaagaaggagaccgagaaaaacatgtccttaagaaagctgtggaagtgattaagctttattttcattattgtgctttgctttctttgttacgggcaaaaaatggatggaacgtgtaaaactagacttatacagtgacattataataccgtacgcctgttttctttgacaaaagcctgtcctacaaaatttgcaggtaaaggacttagatttttatg

SEQ ID NO: 237508 - DNA, 283 bp, Gossypium hirsutum
tcgttcacgcgtccgcccacgcgtccgatcactgtctgctttgatatcgatgctaatggtatcttaaacgtatctgccgaagacaaaaccactggacaaaagaacaaaatcaccatcacaaacgacaagggccgactctccaaagaagaaattgaaaagatggttcaagaagcagagagacgaggtttgttttattgcattcgtagttataatttgttattggtgtagcatcaattttgtgagctgcgtgtttctccgattatatttattgctggttgtggac

SEQ ID NO: 237509 - DNA, 450 bp, Gossypium hirsutum
ttgaggtggacatgatgaagatgtggaaaagttgaggaaatttgcaaggaatattgggcttttatttcaagttgtggatgatattcttgatgtaacaaagtcatctaaagaattagggaagactgcagggaaagatttggtggctgataaagtgacttatcctaaatcgatggggataaacaaatcaaaggagtttgcagagaagttgaagagtgatgcattagagttgcttcaagggtttgatcctgagaaatctacccccttaattgctttagctaattatatagcttacaggcaaaattagcttcctcttgtgtttgataaaaagggcttcgagaaagaagcacgatagtagtaataatattgtgaatagtctactacaatgtttatgttctaaagctcccatcaatggtacgtggatgtaattgttaaattcagttcttcctcaat

SEQ ID NO: 237510 - DNA, 394 bp, Gossypium hirsutum
gttatgtttccattctgtcgtgggcactcagagactggcaccattgaccatgagccatggtcatttggtaaagagtgtgaagaagtatgtcgccttgcattaaaaaggcgctatcgcctcataccacatatatacactcttttctatatggctcatactagaggtactcctgtggcaactcctgcattttttgctgatccaaaagatcccaatttaaggacattggagagttgcttccttttgggcccacttttggtctattcaagcataatgccagatctggggtctgataaattacaacccttgttgcctaaaggaatttggttgagctttgactttgacgattcacatccggatttaccagctttatatttgcaaggtggatatattatac

SEQ ID NO: 237511 - DNA, 451 bp, Gossypium hirsutum
atctctacctctccttatctcatccaaaggtgtgttaactgggttagcaaaatgtcaaaccccaaagttttctttgatattttgattggaaaagcaaaagctggccgagttgtaatggagctatttgctgatgttgtaccaaaaactgctgaaaatttccgtgccctctgtactggggagaaaggtgttggacagtgtgggaagccgttgcactataaaggctcagcatttcaccgaatcatcccgagcttcatgtgtcaaggtggagatttcacaagggggaatggcacgggtggagaatctatctatggcatgaaatttgcggatgaaaacttcaacctcaaacacactggacctggttgtctatcaatggcaaatgctggaccaaacaccaacggttctcagttctttatatgcactgagaagaccccatggctggatggaaaacatg

SEQ ID NO: 237512 - DNA, 319 bp, Gossypium hirsutum
ttaaacttgatgatgccttctctttatatgagcaagccattgctattgaaaaaggaaaagagcattctcaaacgttaccaatggtgtatgcacagtactctagattttcattcttggtttctggaaatgcagagaaggctagggaaattctgactaggtcacttgaccatgtgcaactatgtaaacaattccttgaggccttaatacattttgaaacaattttgccacctctaagacagactgattacttagaatcattgattgacaagctcttggccccgagtttggatggcagtactgcagacaaggaagatctatc

SEQ ID NO: 237513 - DNA, 415 bp, Gossypium hirsutum
tttacgcgtccggtttcttctatcttgttcattggaccaaacaataaaagtatgggtggcttctgagaatggaaacctggaagtaacatacactcacaacgaagaacatggcctgcttaatcttcgtgggatgcacgacttagaatccaagccagtcttgttgtgtgcatgcaatgacaattatgtccggctttatgatctgccgtcgttctccgagaggggtagaatttttgctaagcaggagattcgagccatcgaagtagggcctaggggcctctttttcactggcgacggaactggttttaaagtgtggaaatgggcggagccagttgctacaacttgattgccttgcaccatttcataacacattcatcctcctgcaattttttggtggtaattattttatattttttca

SEQ ID NO: 237514 - DNA, 409 bp, Gossypium hirsutum
tttgtagatcaagtggaaaaagaaagcagaacaagaaaatggcaaatgcagacccaagccagaaggttgactacgttttcaaagtagtgttgatcggtgattcaggtgtgggtaagtctcaaattcttgctcgttttgctagaaacgacttcagcttagattccaagtctaccatcggagttgagtttcagactagaaccctcctcattgagcacaagagtgttaaggctcagatctgggacactgctggtcaagaacgatacagggctgttacgagtgcatactataggggtgctgccggggcaatgctggtttatgatgtaacgaaacgccagaccttcaatcacatcgcacgctggctagaagagttgcgtggtcatgctgacaagaacattgttataatgctggt

SEQ ID NO: 237515 - DNA, 331 bp, Gossypium hirsutum
tttatgggatgttcagtttagtcctgtaggacactattttgccagctcttcacatgatcgaacagcaaggatttggtcaatggatagaatacaacctttgagaataatggcaggacacttgtctgatgttgactgcgtgcaatggcatgccaactgcaactatattgctacaggctctagtgacagaacagtaagattgtgggatgtacaaagtggagaatgtgttcggattttcattggtcataggagtatgatattgtcactagcaatgtcacctgacggccgctatatggcttctggtgatgaagatggcacaatcatgatgtgggac

SEQ ID NO: 237516 - DNA, 275 bp, Gossypium hirsutum
ttcgttctgtcaactacaccttaatggtcacctttgtctccttccttcaagtccttctgttaatcagacaaatggaacatagcaacacacaatcgggagctgcaaaagtttcaattttaacgattggtcaacaggctatcatggatgcttatctttgcctcttacatctcactgcaggaatactggttgagtccttgtttaatgcttttgcaactgcggcattcttcaagtttgtagttttctccatttttgagatgaggtaccttcttgcaata

SEQ ID NO: 237517 - DNA, 393 bp, Gossypium hirsutum
ttctgccataaatttccttattgtctagctgttttactttagtttctctatttgtttggtcacttttatggccttgttttcttgtcaggcggatagggaattgcagccatggattgccaaaaatgatgatcaaggtcagaagatgtggagaatcaaccagcggattgtaaagttgatagtggaactaatgagaaatcatgatatcccggaatcattggtaattgtagcaagtgcctctgatttgcttctacgtgccactgatggaatgctcgtagatggggaagcttgcactttaccacaactcgagctgttggaagcaacagctagagcagttcagccagtactagagtggggggaatcaggactggctgttgtggatggactttcaaacct

SEQ ID NO: 237518 - DNA, 371 bp, Gossypium hirsutum
gtatatactcatgcagaggagtgcactaggtggagatagcttgtgggaactgacatggctgcatgtgaataacattgcgccatctttgcagtcggaggttttccctgatcagggtccagagctcaagcatggcgaaaccggttgtgcagtttctggtgaaacagtttctgttccttcaaatgaaacaaccacccttgaaggggctggtgcgggaagttaaatgttgtgtacagttgatgcttgaaaagggtttgtaattgccagcatatagagtcgcacacaatacattgctatttctcgaggatatccgcattgagacattaggacacattaggttatgctgccgctgatattccgcaaatcctagtatc

SEQ ID NO: 237519 - DNA, 441 bp, Gossypium hirsutum
  unsure (1)..(441): unsure at all n locations
cccactcgtccgcccacgcgtccggtggctactgggggtggagatgatcaggggttcctttggaagataggtcatgctgattgggcttctgagctccaaggccataccgattcagtctctactttagcctttagcagtgatggacaactacttgcatctggaggttttgacggacttgttaaagtttgggataccttcggaaatttcaaacgcacacttgagggtcctggaggtggcattgagtggattaggtggcacccaaaaggtcatctgatcttagccggatctgaggattgcactgcttggatgtggaatgctgataatgggaactgtcttaatgtattctcaggccatgatgccattgtgacctgtggtgattntacccctgatggcaaaacaatatgtactggttctgaagatgctacattgaggatctggaat

SEQ ID NO: 237520 - DNA, 368 bp, Gossypium hirsutum
ccagacagaatgcaagtactacctaagaactggtggatgtaagtttggttaggcctgtagatacaaccactcaagggcaaaatcttcaacagatccgattttagaacttaactttctggggctgccgatccgacagggagagaaagagtgcccctattacatgcgtaatgggtcctgcaagtatggagccaactgcaggtttaatcatcctgatcctacaactactggagcttgtgccccacctgctgcatatggtaatggtggatctgtttcatcacaagctgcatcacaagtgaatatggcttcctggtcatcgccaagggcgtttaatgagactgctactgctacttttatgccaattatgtttt

SEQ ID NO: 237521 - DNA, 333 bp, Gossypium hirsutum
ttcttctctccctctcttgttcatttaacatggccaacaacacacagatcctcaacctaatctccatggccttactcctttttgttagcaacagtgaagggtactcagcagctgaagaagaagctgacagaatctcagcacttccaggccaacccaaagtctcttttccacaattctctggctatgttactgttaacaaagcagctggtcgagccctcttttactggctcactgagtctcccaatttcccttcctctaagcctcttgtcatctggctcaatggaggtcctggttgctcctcagtggcatatggggcatcagaagagattgggc

SEQ ID NO: 237522 - DNA, 423 bp, Gossypium hirsutum
gttgctactgagcaagaaattctttgaaaccattgttactcatccaacatttgagcagatggacttccttttaatactaaacaagtttgatatattcgaggaaaaggtagaacgggtaccattgactcgatgcgagtggtttgatgattttcatcccctgatcagtcgtcatcgtacaaatacaaatagcaacagcattaataataaccctaccctgggacagttagctttccattatgttgctgtcaagttcaagagactttattcttcactcactggccggaagttgtatgtttcacacgtgaagggactggaacccaacagcgttgatgctgcacttaaatttgcaagggagattctaaaatgggatgaagagagaatcaacttcagcttaagtgaacactcattttacagcaccgaagc

SEQ ID NO: 237523 - DNA, 469 bp, Gossypium hirsutum
tttatgcggcagcatatgagaggattgtggagttgcagggagaagccctgaaggttcttaaagctcttgaagaagtggtggggcacctgagaaaatttttggttgatcacagtgttcttcctctttttgaaaaaatggatcttcaagcagagacgcaggctgaaaagtcgtctctgcttacggcttctcaaagtggaattggtatcgatcttcctgttacagcaagaggggattctttgttccttgaacatgaaacacagttggagtcacgaattccatcttctggaatttctttctatacacaggatcccacgctttcggcaatatattcttcttctggacttgttcgatctgttgttcctattgtcacacagattgctcaaacaatgcaaataccattttcttatgccgaggacatcattgggataggaggagctaatattgcacatattcgctgcactagtggagc

SEQ ID NO: 237524 - DNA, 436 bp, Gossypium hirsutum
tttcgaaaagatgatactgcagcagttctcaagtcaaggcttgatgcatttcacaagcaaacccaaccggtgattgattattattccgagaagggaatagtcgcaaagcttcatgcggaaaagcctcagaaagaggttacggacgaagttaagaaagtactttcatgacgaaaccctcattacggacgagattcgtataaggtgatttacacatgaacattggttcttttgcaaacagggaccccccaaaaaattgagaaatttcatggatttttactcgtgtttcgagtacatattcggattcattgttatgtcattgcttttttggcccaaatatcagctgttgtttgttcaagtattggtgatgattatgatacttgaaataatgatatacttatagattgacaactgattaatactttgtgtattataactg

SEQ ID NO: 237525 - DNA, 408 bp, Gossypium hirsutum
cgtagatgaagacttggtatcaactgactttgttggggacagcaggtcaagcatctttgatgccaaggctggcattgcattaaatgacaattttgttaagcttgtcgcgtggtacgataacgaatggggttacagttctcgtgtgatcgacttgatccggcacatggcttctgcctaagtgagtgattttggtgaaccaaactcatttcataatggactttttaataatagcctcgttcttcagctttagcaaaatatggaagagatgctatgggaataataatagaaattgctcgggattctgggagtttctaattttacactgtaattgtgttctgtctgaaacacttgtaatatatataattacaaggaaccaaacaaacaaggcaaggctaaggtaaacttggg

SEQ ID NO: 237526 - DNA, 446 bp, Gossypium hirsutum
cccacgcgtccgcccacgcgtccggtgaagataagtaaaatggggtcaaagaagcctttcctggtggcgcttctagtgcatgctctttcttctggcatgatcttactgtccaaggcagtattcaatatgggtatgaatatatctgtgtttgtcttctacagacaagttgctggaacaattttcatggtccctttcgccatggttttcgaaggaaaacacgccaagccactttcaatactgacctgtttgaagatttttatgcttgcttcgctggggattaccttaaccttgaatatttacggagtagcactcatttacacatctgcaagccttggtgctgccaccattaattgcattccagtcataacgtttgccttcgcagttttactcaggatggagaaggtgagagtgaagactgtacctggcattgcaaaagttgcaggtat

SEQ ID NO: 237527 - DNA, 464 bp, Gossypium hirsutum
ctggaattgggccaggtagcttcagcagtattcctccagcaggtggtgctgaagcttcagctgagttttcaatgaaaattttgtgcccagctgggaagattggtggtgtaattggcaagggtggctttaatgttaaacagttacagcaggaaacaggagcaggcattcatgttgaagatgcagcaacggagtcagatgagcgagtaatttgtgtctctggaattgaggctcttgggaaccctagatcgcatacaatagatgccattctacagcttcagaataaaactagtgaatcatctgagaaaggtacaattactactaggttgcttgttccatcaagcaaggtcgggtgcattcttgggcaaggaggtcatgtaatcaatgagatgaggaggagaacccaggcagatattcgtgtatgctcgaaggatgataagcctaagtgtgcatatgaagatgaagag

SEQ ID NO: 237528 - DNA, 502 bp, Gossypium hirsutum
gcggagttagcatccaagactggtggcgcaatgaacagttctgggtgatcggtggtgtctcggcacatctttttgctgtcttccaaggcctgctcaaagtccttgctggagttgacaccaacttcactgtaacagcaaaagccgctgaagatgccgagtttggagagctttacctctttaaatggaccaccctcctaatcccaccaacaactctaataatattgaacatggtgggagttgttgccggggtttctgatgcaattaataatggttacggttcatggggtcccttatttggcaagctattcttcgccttctgggtcattgttcacctctatcctttcctcaaaggtttgatgggaaggcaaaacaggactccaaccattgttgtgttgtggtctatacttcttgcatcaattttctcactggtctgggttcggatcgatcctttcttgcccaagcaacaggtccagtcctcaaacatgtggagtggagtgctgat

SEQ ID NO: 237529 - DNA, 517 bp, Gossypium hirsutum
tatgctggttatgactgttggaggagttactgcattagctactggtgtttatacaacaagagaaggagctagagtcacatggggttatattaataggatacttggacagccatcactgatacgagagtcatccattgctaaatttccatggtcgggcatgatgtctcaagcaaggaaccgaattttaaattatagtacagcagcaacagtggaaagcaaacagagtcttcagaatgttgttctccacccctcgctgaaaaggagaatagagcatcttgctagggctacagcaaacaccaaaacccatcaggccccattcagaaacatgctattttatggacctccaggtaccggtaaaacactggttgcaagggagatagcacaaaaatcgggattggattatgcaatgatgactggaggtgatgttgcaccactgggtgcgcaggctgtcaccaaaatacatgagatatttgattgggctaagaagtcaaagaaaggtttactgctttttattgat

SEQ ID NO: 237530 - DNA, 387 bp, Gossypium hirsutum
cccacgcgtccgggtggggttggtccttacaattgttgtcatgaactggtttcaagctgcacagcctgcacttttgtatattgtaccggctgttattggattcttggctgctcactgtatatggaacggagaagttggaccgttattggagtttgacgaatcaaagatggcggttgtagaaggaagtgaagacaaacctagcaagaaagtggaatgaggtatagaaggcaaggcagacagtgaaactacttttagcttgagaaggaattagtgtttacgttaaaaggtcaatctcttggctaacttgttttactgcaatacctttgtaacaacagactttggaattaagcaagaaataatctttagcttcctaagcagagatttttt

SEQ ID NO: 237531 - DNA, 398 bp, Gossypium hirsutum
  unsure (1)..(398): unsure at all n locations
gtttttgctttcaaaattgaaggaccttcaatttttcgtaggagagagcatgcatgatgatggatgcttggtgtttgcttactacaaggatggtgctgttgacccaacatttttgtactttgcatatgcattgaaggaggtcaagtgctgaggtttgaagcaaagaaaaaaaaaagtggttgctgaagaatttagtcctttttattattgcttttgtctcttgttttcagtactctgctaaagacataaattatttgtggtttttgatgtttttgttttaattgtttgttgttttatcatggaatggtttctatttttatgggttggctaaacaataatttaactctttgttctattactacttgattttattggaaggacttttttgggacananaa

SEQ ID NO: 237532 - DNA, 429 bp, Gossypium hirsutum
cccacgcgtccggtgacgggataaaaccatttgtttcgatttaaacgctttaaagattcttggttttctgatatagattttttttcttgggacttctttgttttccgcgattctgtgggaaagtgagaagttttttttctgggatagaagatgagtaacccatctgcaggagcctcttcaaaatcaaaagtcggttcttcacaaccttcagaaacatctttcaagcgcaaaagaggagtgtttcaaaaagatttgcagcatatgatgtatggttttggagatgatcctaatccacttccggagactgtggcccttgtggaggattttgtggtggaatatgtaacagatatggcacataaagctcaagatattggatcaaagagaggaaagctatcggtcgacgattttctatatctcattcgcaaggac

SEQ ID NO: 237533 - DNA, 435 bp, Gossypium hirsutum
tctagatcgcgagtggccggcctttttttttttttttaaacttcttttaaacacactcacatgccattgatgcgtgcccgcacgtctttgcaaaagctcgcataccctgagcgagcgagcgtttgcttcacagctgcatcgcgcgtgcacacgactatgggagagcacgcctgatgatggatgctatgggaggaggtagcagcctgctgggatgctattcgcttcttccaactatatgtgaataacagacggggtggataggctaagctggcgcagagagctgaaaataatggatataaagctattgtcctgactgtcgattctccaagactcggcataggggaggcagatgtgtagaacacactggttgtaccttcgctgaagaacctggagggtctattaccaacgaaatttgtttctgatgaaaaaggttca

SEQ ID NO: 237534 - DNA, 470 bp, Gossypium hirsutum
  unsure (1)..(470): unsure at all n locations
ctttcgacaagaagcagtttgtcgtgttcatcaagaagttcatcaagaacttgacaccaaaactggatgcggaaaagcaagagtccttcaagaaaaacattgagggagcaaccaagtttttgctttcaaaattgaaggaccttcaatttttcgtaggagagagcatgcatgatgatggatgcttggtgtttgcttactacaaggatggtgctgttgacccaacatttttgtactttgcatatgcattgaaggaggtcaagtgctgaggtttgaagcaaagaaaaaaaaaagtggttgctgaagaatttagtcctttttattattgcttttgtctcttgttttcagtactctgctaaagacataaattatttgtggtttttgaggntctttgttttaattgttgttgttttatatggaatggtttctattttatgggttggctaaacaataatttaactctttgttctatt

SEQ ID NO: 237535 - DNA, 459 bp, Gossypium hirsutum
tgctcaaatggagcaaacaagactctgtttgcaacgcttgggttggagtggcatgtaacaatgatcattccagggttataggtctgcatttaccaggaatggggtttcatggtcctatcccacgtaacactttgagtaggttatcagctcttgaggtgttgagccttagatccaatgttatttcaggttcattcccttctgattttgcccaactcaagaacttaaccacactttaccttcaattcaacaatttttctggtccattacctgatttttccatttggaataatcttacaattgtaaacctttcaaacaatggcttcaatggaagcattaatccttcagtgtcaaaatccagtcaccttacagctttgaatctttcttataactcactttcaggtgatattccggatatcaatatccctagcttacaacagcttgatttatccaataataatc

SEQ ID NO: 237536 - DNA, 381 bp, Gossypium hirsutum
caaataagtgtttaagttccatcaatttgattgggaggttataaaagatgccttggatggcaagttacctagcttgagtgtgattgaaccaaggtattttgatcttaaagggttacctgctaatgatgatcatccatcacatgatgtggctaatggtcaaaagttggtcaaagaagtgtatgagacattgagggcaagccctcaatggaacgaaacattgttggtgattacttatgatgaacatggtgggttttatgatcatgttaagacaccatttgttaatgttccaaaccctgatgggaacactggtcctgctccttctttcttcaagcttgatagacttggtgttcgtgttcctactattatggtctctccttggat

SEQ ID NO: 237537 - DNA, 256 bp, Gossypium hirsutum
  unsure (1)..(256): unsure at all n locations
actctttcccctttaagtggataaacaaaaaatgggagagagggtttttatgtcacctcgatgacaactgctggaagccgatggggcgttgttatgtctcgcaatgcaggcttcagtgatcaggttgtggaacttgattttctctatccaagtgaaggaatccacagacgttgggatagtggttatagaatcacatcgacagctgcaactntggatcaagctgctctaatcttgagcatccctaagcgcaaacccg

SEQ ID NO: 237538 - DNA, 357 bp, Gossypium hirsutum
gtcacaccaggatcagacacagctgctcgctgtaaacttaactcaacttgccatgtatgacatgaggaaaatggcgtgcataaagcagctggctctaggagaagcttcagcataaatctaccatgcaacattttcatgtgatagccagctagtgaacaccagtcacgcggatggaacagtgcgcatatttggcgcctcaaatcttcaattacaacgccagataaatcccgccgcttatctcccatccaatgccagctcaactgattatccgcttgtggttgctgcacatccccaagaacccaaccagtttgccataggcctaactgatggccgcgcttacgtgttggaaccacttga

SEQ ID NO: 237539 - DNA, 303 bp, Gossypium hirsutum
gcgtcgagaagaagaaatgcaggaactgaacaaagggacaacttccaaaatgttctggttgtcgcacctctcactgattctttgcctatcagcagcgggatgacaattttggcattggaaaactttctacgagaagaagaagcttatttaagtttgtaagaccataggtttctttacctgtactgttgcaaaatattctgacacaaataattttctaggtctcatagctggaataggtctctgtcatgtgaactgtgtaatatctgtggggctaccttctataatggatgaagcttggggaga

SEQ ID NO: 237540 - DNA, 391 bp, Gossypium hirsutum
tcgtcacgcgtccgagttgttctccctcttcctggggctccttttatccgtttgttggtctcaccgcaccatctttgcatcgtcgtctctgtcggtcgaccgtcggccttgcctctgtattctgaagaaaccctaaaacattagggtccacagtcgagaaaaattcatccctcgagagagttaaggcattgcatatttgggacatggatgttgtagctgagcccggaattggatggatggaacttaatgaatacttggagccatatggtttatttttccctcttgatccagggcctggtgcaacaataggaggcatgtgcgcaacacgctgctctggatctttagccatgatgtagttgctactctactactgtctttctttgcattccct

SEQ ID NO: 237541 - DNA, 370 bp, Gossypium hirsutum
tcacgcgtccgattgctttactccccctagggttaattttaaaggaatagcgtcgtttggatttttcatagtttttatcatttcatttccgagacaaaaaccgagtttctccttattcacagggttataacgagttgtatcgagttgcattgcctgagataaccgaggttctaagatccatctgtaagagatatgaactgcctttggctctaacatgggcaccatcccggcattccgataagaacttctattgttgcgtttcgacctcgggttcctcttgtttcgtagctgatgaaggccttacaggattcctagaagcgtgttccgaacaccagttgtttcgaggccaaggtattgttggtagagctta

SEQ ID NO: 237542 - DNA, 310 bp, Gossypium hirsutum
tccacgcgtacgcccacgcgaacgcccacgggtgcgcttatatccagggttgggcattctcaccggtgaacatgctgaggatcatggatatactgcctgagcttcctgcatcgatctctacactggtgactctctgcgtcttcgtcctgaagacgaagatacagtaaaacttaagctcaatgacattggattagacttttcatggacagtcggaagaatcaaggaagtgctatcccacttaggttctccattttcttcgacacccacataatgctctttggagaccattaaatctctcgccactattgtt

SEQ ID NO: 237543 - DNA, 396 bp, Gossypium hirsutum
  unsure (1)..(396): unsure at all n locations
gcaataactcatccaccaattgaatcaggttggggaggatttatggagaatattatgggttgcaaaccataattactgatgtctccgccgctgcttggcgtggaggaagaaagggattcagagcaatgttactttactcggttcttcaggctcaatggaaagtgtgtgccagaatagtgctgacttgaaggaacggaactacatgggcttgtctgattgttcttcagtggatagctctgttttttcccctccgtccgaggaaagaaaggctagtttgaatctaaaggcgactgagcttaggctcggacttcctggattgcagtcgcctgaaagaaatccagagctttgcttgttaagttcttctcagcttgatgagaagccgnttttccctttgca

SEQ ID NO: 237544 - DNA, 500 bp, Gossypium hirsutum
atcatgctcgtgcaatttcattgtctttgaagagggcatattaagagaaagctgtgcgtatgccgaaggatcattacgaacaaatgggaacttatgattcaaatgataaaactacggaaacgactaataacagctcgaagataggaaactcttcacttagacaacgaccagtgactcatgaatctgtccatgatactcaaaatcatcttctgagtaaagattccttgaattctaatgagtgggttgatatttcacagaaagagcttgatgaagcaattatgctggagacccaactttttagccagattcctgaaggcagttcgtatatcctttctcatgagcaaggtggtccgggtagaagcattaatcctggtctagaggctgtatctggtccacaaccatcctctataatggaccaatgtttactgcggcaacagcaggatgaggagtatctgatatctctattagctgacaaagaaaaggagatgaatgctcttaag

SEQ ID NO: 237545 - DNA, 382 bp, Gossypium hirsutum
gttttttatcaactttaagacactcaaattcaccatgtctaacacttgcggtaactgcgactgttctgacaagagccagtgcgtgaagaagggaagcagtaacaccatggtcattgagactgagaagagctacatcagcactgttgtggcagaggttccaactgagaatgattgcaagtgcggagataactgcagctgcaccaactgcacatgtggtcgttaaacagacataaagagcaatgacgttctacttcttggtaatattggggacctaagattaatgaaatttgggttgaataatttgtgtttgtgtgttttcatgtttaacagtaatgtaatggccttatctatggactttggttaatgaattactatttagcat

SEQ ID NO: 237546 - DNA, 351 bp, Gossypium hirsutum
ttctttcgcgtccgacactctctctcctatacggagagttctttcacttaaaagtctggtagctaactcgggttttgtgagccagagagatgggttcaaaaagaacggcatcactagccctcttctttgcactcaacatcctcttcttttccctggggagtgcttgtgggtcctgcccttgccccaaccccaaacctaaacctaaaccaaagccaaaccccactccctccccatcttcttctggcaagtgccctagagatgctcttaaactcggtgtatgtgctgatttgctcggtggcttgctcaacgtcaccattggtacgcctcctgttcaaccctgctgctctctca

SEQ ID NO: 237547 - DNA, 342 bp, Gossypium hirsutum
cactcatttctcactaaacttgttattaagaaactcgaatggggaaaccgagatgatatcgatgccattaaagccatgaataacgaaggctttgaagtcatcatcggaacagatgtcacctacattcccgatgctattttaccattgttttcaacagccagagagttgatttcatccaacaaaagtgctgagaaagatcaagcaccagctcttatcctgtgtcatatcttccgacgagtcgacgaaccgtctttactttcagctgcatctagatatggctttagattggtagataaatgggcgaaaggaagtccaaacaatgagtctcaaagcttaatcagc

SEQ ID NO: 237548 - DNA, 377 bp, Gossypium hirsutum
gtttatgggcgtcttgagacaacttgggctgtcttgaggaagtttggatataatgacgagttaaagctcagggatgatattcttccagttccaaccaagcatgcccctgatcagactgtggagctgacaaatgaagctatcgactttttgcgtgggatcttccgattgtatgacagtgataatgatggatctttgcaaccttctgagtttgatgatatctttgtaactgcaccagaaagtccatggactgtggatccttatgtggacgctgcagagagaacacctcaaggaaatttaactattaatgggtttttgtctgagtgggccttgatgacaactctggatccttcatattgtttggctaacttgatttgcat

SEQ ID NO: 237549 - DNA, 390 bp, Gossypium hirsutum
ttgttattcagcgtgttgggaacaaattattttgcgataatagagatgggtctcaattagatttgttatctgtccatgagacatctcaagaaccattgcctgaagctaaagatgatattaactctgcttattcattgagtgttgaagctgcatatataaatcagaatttttcacagcaagttttagttagggatgggaataaggttagtttcgatgagccgaatccgtttgccaatgaaggcgatgaagtggcttcagttgcttataggtatagaaggtggaaactcgataacgacatgcatttagttgctcggtgtgaggttcagagtgttgtcgatgttaataaccagaagtcgttccttactttgaatgcactcaacgagtttgatc

SEQ ID NO: 237550 - DNA, 336 bp, Gossypium hirsutum
taactcaatcccttgagtgattctcagaggggagaatttcatggccttgagagcgaaattatggcggatagagatcagaatgggatggttgatacttcattaggaggctctattcgaggagacattgcataagaagagaatgatccaattaaagctgttaaaaacttagtaccacgaggcttgattaattctggaaatttatgctttctgaattccactttacaggctctattgtcatgttttccttttgtccagctcttgcagcaacctaaacttggtcatataccaaaggttggctatccaatattaacttcgtttgcagagtttgtatctgac

SEQ ID NO: 237551 - DNA, 338 bp, Gossypium hirsutum
atacaaagcttcatattatctttttgagggccgtcttaagaatactttttgggtctaacaactacaatcgttttctttttgaagtcgggttttagtttttggggagaaaaaaatgttgggagtatctagcagtgcgatagtgtctccgtcggacgagctggtggcggccggttgccgaactccatcacctaagataacggcggatgctctggtgaaacggttccttgagacgaactcctacggcgtgtccatgcagatcggagaccatgtccaattcgcttattctcaccataaagagtctgctttacggaccagatcatttgctgtgaaagatgaaa

SEQ ID NO: 237552 - DNA, 432 bp, Gossypium hirsutum
tgatttttctgttgataatagttgtaggagtttgagtggtgattctttacaaggtgtggagttgctggtgctacggcggaggagggaatggagtgacagttgttgagatgagtgtggaaagcggagacggggaagaccatcgaggaatcaagtgagaaccacgtcgtcatcggcgctaccgccaccgcctcaaaggaaggatgaggatgatgaagaagatgtttgttttatatgcttcgatggcggcagtctcgtgctttgtgatcgacgatgagtttggaaattttttaacattcacaatggaatgctaaaacttacagaaggtggcacttcttgaggttgaatgcacatctttaaatcaagaattgcaagacgtggaagctcgttttcgtcgtggacaaaagaagtccccagaagaagcaaatcaaatgc

SEQ ID NO: 237553 - DNA, 432 bp, Gossypium hirsutum
ctttctcgtccgaaagatattaccccaattggtgggttccctcactatggtgttgtgaaaagtgattacctgatgatcaaaggaggtgtgttggacctaagaagagggtggttaccttcgtcagtctcttattaaccagacatctcgtgtggctctggaggaaatcaaactcaagttcatcgacacctcctcaaagtttgggcatggacgtttccagacaacacaggaaaaacagaagttctatggtcgactcaaggcataagtttgggaagtggtcaggaattttgggctattgtatgtttaggttttgctttacttcatgcttagtatgtcttattctctattcctttttgaaatggaacagtttgggtttcttttgttctgtcagtctggattggatgtttgaacttctgaggattctcaacagttttt

SEQ ID NO: 237554 - DNA, 385 bp, Gossypium hirsutum
ctttgtatgaaaatgttggtgctgaagattactttgggaggttctaatataaggccggcagcggtggtttcactccggaccgggtgcagtgtattgcaaatgtgagatgccatataacccggatgaaccttatggtgcaatgcgaaggatgcaaggattggtttcatccatcctgcatggagatgaccatcgaagaagcaaaaggattggatcactttttatgttctgattgtacttcagaggatgatgccaaaagatctatgaatacgttcccagtatcagcatcccttgagccaaaggtggaaccgaagcgtagaaagagataaccccatcatggtaatgcggaatgaggaggtaccgattttctagcacattagctcagata

SEQ ID NO: 237555 - DNA, 393 bp, Gossypium hirsutum
cccacttgttcgatttgattgtgcaacatatccgcactaaggtcggtcagcatgatctctgcagaatatatcccaatgtatatgtaattagtcaacatttcagattagaggaatgcatctctgattagagaccgggacatttctaaacatgattttgtcttctattctgatcggcttattcgtctggtgggagagcatggtcttggacatctgccgttcactgagaagcaagtagtaacaccgacagcaacggtatatactggggttgatttttgcaaaaagttgtgcggcgtttccattgtccgaagtggtgaaagcatggaaaacgcattacgtgcatgttgcaaaggaataaaaattggaaaaattttgattcatcgtgagggagatgat

SEQ ID NO: 237556 - DNA, 369 bp, Gossypium hirsutum
aattattgcaatgcacccactccaatcatgccttgtttaccagcctacaatgacaccaacactgtcacggccttcagccaaagcttagaagtcgagaaaaggccgaagtcccaaccatatagatgaaagcctgttcttcacaatcggcctcggactcaacaactgcccacctaatttccgaaaacgtcgttgccaggacccaacggtacacgtttcacagcgagcatgaacaatgtctcattcgtgctcccacggaacttctctctgttacaagctcatcagcaaggaattccaggtgttttcaccacagatttcccagcaaaccctccattgaaatttgactacaccggaaacctgagccgatcgctc

SEQ ID NO: 237557 - DNA, 381 bp, Gossypium hirsutum
cctatgtgtccgcccacgcgtccgcccacgcgtccgggttcttcttcttcaaacaagcggaaaaacaagaggaaaaaaatgggtggagaagaaaggtctacactttggctgaggtttccaacacaaccatgctaaagactgttggcttgtcattgagggcaaggtatttgatgtgactaaattcttggaggaccaccctggtggcgatgatgtcttgctgtcttccacagggaaggatgcaactgatgattttgaagatgttggtcatagtagcagtgctcgagcaatgatggatgagttttatgtgggtgacatcgatacatcgaccatcccctctaagaggaagtacactcctccaaagcagcctcactacgaacaaga

SEQ ID NO: 237558 - DNA, 497 bp, Gossypium hirsutum
ggctcttccaccgagaaaaaacaagcagctgctatgttgccggtagttcaaaaacagcatcagcttttggtgactttgcttctttgcatgctgctgctatggaggccctccctatatcttggataagcttttcaatcaatatgtggctatcatactttctgtgacttttgttctagcttttggtgaggttattccacaagcaatatgcactagatatggacttgctgtaggtgcaaaccttgcaggtcttgtgtggattttaatgattatttgctatccaatagcttatcccattggaaaggttctggattgggtactggggcataatgaagcactatttaggcgcgctcaactaaaagcccttgtctccatccatagccaggaggctggaaaaggaggtgagctcacacatgatgaaacaaccattattagtggagcactagatttgactgaaaagactgctgaggaggctatgacacctatagaatcaactttct

SEQ ID NO: 237559 - DNA, 222 bp, Gossypium hirsutum
ttcatgcgtccgcccacgcgtccgcgcagctggcattttcgtaagtctaccaccgctgctctcaatcccttccacttcgccatggcatcagagaagaagctttcgaacccaatgagggagatcaaagtccagaaacttgtcctcaacatctccgttggtgagagcggcgatcgtgttacacatgcggccaaggtcttggaacagctcagcggtcaaacccca

SEQ ID NO: 237560 - DNA, 425 bp, Gossypium hirsutum
ggctttctttacatacccaaggacgtatgatctcatgcatgcacatggtctattcaggtggtacaaggacaaatgtaatttggaagacattttattggagatggaccgaattctgcgtccagaaggtgcggttatattccgtgatgaagttgatgttctaattaaagtgaagaagataacagcaggaatgaggtgggacactaagatggtagaccatgaagacggtcccttggttcctgagaaagtattggttgctgttaagcaatattggaccgttgggggaaacacgacatctgcacagtaaacagcagacggcgacaagcttaaaccgtggcatgaactgagtttgtggattatattcaattgatgaatttccagcctgaaaatttttgccagcaggattgttttggtgggtcacaggatta

SEQ ID NO: 237561 - DNA, 371 bp, Gossypium hirsutum
ttttgtattttccctgagaaaaaagaaaaagtgggagtgtcaccctgaaagtcattggtggtgacatatcaactattccaggactttctgatgctattgagagcacaatacgggatgctatagaagataatatcatgtggcctgtaagaaaaattataccgattttgcctggtgattatagtgatttggagttaaagccagttggaatactagaggtgaagcttgtccaggctcgggacttaacaaacaaagatattattgggaaatcggatccctatgctgtattatatgtgcgccctttacctgacaaaacaaaaaaaagtaaaacaattaacaatgagctgaatcctatatggaatgaacactatgaa

SEQ ID NO: 237562 - DNA, 383 bp, Gossypium hirsutum
  unsure (1)..(383): unsure at all n locations
atatttcttccacgtattggtgaatatgcgtttggagtcatcacttcatctgtaattctgcagagctactctggtgatgaagagctatgttgcgtctatgttcccacaaatcatctntacattggtgatattttcctcatcaataccaaggatgttattagaccgaatctatcagtccgtgaaggaattgaaatcgttgtttccgggggaatgtccatgccccagatcctgtcaacagtagacacacgtttgcctctagaaagtagatccgacagaagctaagatagtcgtagagttgtattttctctgctttcagattcgaatcaccggatcaccccacataatcaatgtgtcggctatccaggattcaatatttagatttt

SEQ ID NO: 237563 - DNA, 355 bp, Gossypium hirsutum
gcattatttatgtgaatagagcttgtggcagtgatgggggtactgcccttcattgcgctgtggctggtggtgcagattcttcggttgagattgtcaagctgttgcttgatgcatctgccgatgtgaattgtgtagatgctaatgggaacaaacctgttgatctgattgtgccgggtttaaaatcttcgagcaattacagaagaaaggtgattgaattgttactgaatggcgatgatgttctttacggggaagaagaatctgataagacaacgatgcctcagttgccaaaagaggggtctgagaagagagaatatcctatggatgtatcactgcctgatatcaacaacaggatata

SEQ ID NO: 237564 - DNA, 407 bp, Gossypium hirsutum
ttttctcgtacgcccacgcgtccgcccacgcgtgcggccacgcttacgcccacgcgtgcggatgaatccactggcaccatcggcaagcgtctttcaagtattaatgtagagaatgttgaagacaacaggcgtgctctccgtgagctcctattcacaactcctggagctcttcagcacctcagtggtgttattctctttgaggaaaccctttatcaaaaaaccgcttcgggcaagcccttcgttgatgttttgaaggaaggtggtgtcctccctggcatcaaggttgacaagggtacggttgagcttaatggaacccatggcgaaactttcacccagggtctagatggccttgcacagcgatgccagaagtactatgaagctggtgcccgctttgctaaatggcgtgc

SEQ ID NO: 237565 - DNA, 406 bp, Gossypium hirsutum
cttagtcatagatataattatgatccatggctaaaaattaatatacaccaaattcttatacccagcttcgcctgggatttaacaataaattataaataaatttattttgtaattatataaaaatttcgttgtttaaatatttatattatatgttaatgaatttataattaaattagactaatcataaaaaattatgtaaaataagagttgcattaaaatacaataaaatgaaggaaaaagaataaacatgataaacacaacgagaaaaagaacatcctggcagtccaaacgcttcgaaacaccttatgggatcgaccctaatggccacaacatccatcctgctatgtgctgggttggcagccgtcatcagcagcacttacacagtcaaaaagccactcaatgactc

SEQ ID NO: 237566 - DNA, 394 bp, Gossypium hirsutum
tgtattttccgtgtcagaacgcacgatcggtgttgacaattgccttccagtttcccttcgataccaatcttcaggataatgttctgaccatggcacgccagtatgtccgtagcgtcatttcttctgtccagaggattgctatggccatatctccatgtggatcgagcccaactataggaccaaagccatctccaggttctcccgaagcgcttacgttggctcattggatctgccagagctacagtttccatttgggggaagagttgttgaaatccgaatcacttggtggcgactcagtattgaagaatctttggcaacatcaggatgcaatattgtgttgttcgttgaagtctgtaccggttttcatcttcgcaaatcaggccggtctagacat

SEQ ID NO: 237567 - DNA, 314 bp, Gossypium hirsutum
cttgtttattgttatatcttgtttaatagtgaaatgagatgaattcatcatggagatacgtgtgattatttatctggtaactataatctgtagaaaatcgaagtaacatatagaattagcgcacaaattctatgttgctgacttgttttcatccataatattgattattacaggcaggcttcgacggcaaaaattgcattgcagatgagcattacctgccaacctttttcaatatgattgatcctgggggtattgccaactggtcggtaacacatgttgactggtctgagagaaagtggcaccctaaatcatat

SEQ ID NO: 237568 - DNA, 211 bp, Gossypium hirsutum
ctcactgctttgaagggtttagatgcaaggttaaaagagatacgttcttaccttgaccttgttatcgatgagaagcttccactgaatcatgaaatactgtaccatttacaggatgtgttcaacttgctgccaaacctaaacgtaaatgacctaatcaaggcttttgcagtaaaaaccaatgatatgatgttggttatatatctgtcatctc

SEQ ID NO: 237569 - DNA, 541 bp, Gossypium hirsutum
  unsure (1)..(541): unsure at all n locations
atgattagttaagtcaatactttgccttcttatactggaggagatcagggttttctgaattcttactactctgatttctcaaatgcacatgtttttgaccctaatatacccgaggaggtgctgaaatcccgtcctgctcctgagatggaacgactttctactctatacaatgcagatgttggtctttacatgcttgccaacaagtggatggtagatgagagtgaacttcgtgtaattcactatacacttggcccccttaaaccttgggattggtggacatcttggctcttgaaaccagtcgatgtctggcagaatgttagggaacagcttaaagagtcccttcctggaactgggggaggcaaaaatccaaatgatgagcttctaatcaaattccttttcctcttacctttctgtgctttacttttttggttctatcgntctttcgttcagacagggggttcagtttgcagaacttcattatgcaatcaggtcagacacttctaccacataattaggtcgagtgggacagttgcttacacta

SEQ ID NO: 237570 - DNA, 433 bp, Gossypium hirsutum
agcactcataccatcatctccggagttgcgccagtgaagatgacctttgagggaccagagatgagcactactgaatcaggacatggatgcaagtgtggatcaaactgctcttgtgatccatgcaactgttgaaaagcttgatgaaagccatagattatgaaaaaaagaaagcagcaaaaataacaggcctctgtaatgatatattgtcaaggatggatgcctgcaaggtctataattatgtctctgtctgtgtcttgtgtaatagaagctttgtttgtggtgaaaataatgtataagccatttggttgggagcaaattgtccttttctccaaaggatttttgctgctcattcatggtgacttggtttatggttttatctggtgttggtaaaatcttataaaaatatatatcggttgctgctcttggtttgatc

SEQ ID NO: 237571 - DNA, 260 bp, Gossypium hirsutum
ttggatatacatgcagacgcaggcatattaacagtgcttctacagaaccatatgggcggcctccaagtccttcacgacagtcaatggttcgacgtccaccccactcgaggtggtttggtcataaacgtcggcgatcttcttcaagttagcttcaattcacataaactctatatgaaactgtcctaatagactagctactgactctttttatgttgtttatggtaggttttatcaaatgataagttcaagagtgtgaaaca

SEQ ID NO: 237572 - DNA, 425 bp, Gossypium hirsutum
gtcgttatgagggtgaaggagcaattggacaggtcaaggcaaaggctttaccatgagcgaacgcagataattgctgctcgactgggcttaccagcttcctcctctagagcaatgccgccaccaaatgctgcaaatagagttgcaacaaactttgcaaactcggttgcaaggcctccaatgagcatgaaagccccaagaccaccattgtcgagacccatgggttctatgacccctaccccttccaacccatatgtatccaatacagttgcagggagttcaattcgacctggtagccaagacaatctttcctccgttggaaccaagtagtctctattcatattacttgtgaatagaatttttcaatccattcttatacaagggtcatccatcttgagatgcatctggttagtaccccctttttttat

SEQ ID NO: 237573 - DNA, 521 bp, Gossypium hirsutum
  unsure (1)..(521): unsure at all n locations
cccacgcgtccgatatcgctagctgtctcacaccgtctcctacccttttcccttcctctctgctactcgatctccacactgcaacacaatttctctttcaaagagaagacaaagaaaggaagaaaagtatcagcccggattatggacggcggtgttccgtacaacccacgtacagtcgaagaaatctttcgagatttcaagggtcgtcgagctggaatgattaaagcccttactaccgatgtggaggagttttaccagcagtgtgatccagaaaaggagaatctttgcctttatggattccctagtgagcagtgggaggtgaatttacctgccgaagaggtacctccggagcttccagagcccgcattgggtattaactttgccagagatggaatgcaagaaaaggattggttgtctttggttgctgtacacagtgactcgtggttactctctgtggctntctattttggtgctaggtttggatttgataaagctgataggaaacggcttttcaatatgat

SEQ ID NO: 237574 - DNA, 396 bp, Gossypium hirsutum
tggactcgtgggctccaggcaaattcttcgggtctcaatacaacacctctatggttccttcttttgggggaggtgtactatgtgccaaggcctcaatgctgcttcagagtgtccctcctgcattgcttgttcggtttttgagggagcatcggtccgagtgggctgattatggaatcgacacctactccgcatcttgtttgaaacctaatccttacactgtcccgtgtgctcggcctagtggtttccctagtagtcaggtcattctacctcttgcgcatacagtagaacatgaagagttccttgaagttgttcgtctagaaggccaggcattcacgcccgaagatgtagctttggcacgggatatgtacttattgcagctttgcagcggaattgatg

SEQ ID NO: 237575 - DNA, 484 bp, Gossypium hirsutum
ttaagttttaaagagtggaatggttacaagtgattcaggacatcaatacaaacttcaaagtgatgcaaaatgtgatacaatgggaaccttgtggcgcattctaggagtaaataatggtgctcagagagtctttggtgaagccactggattttctcttctgctaaccaccctccatagttttcagggtgatggtcactcagaagaaccttatttattagtttacatcaaagtcttcacatatttattacgccttatgacagcaggggtgtgtggtaatactattaataggacaaaactgcatgctatcatatcatcacacacattttatgatcttctatccgagtctggcttgctgtgtgtggattatgagaagcaagtgatacgtctattgttggaacctgctcaaaagtttttctctaaggcttattgctttgagttcattacaagatttccttgattaagtaaatgtatgatatcttttatt

SEQ ID NO: 237576 - DNA, 144 bp, Gossypium hirsutum
ccctcgcgtccgatcaccgttggctctttaatcctgcgcgatacacccaatttcatgatcgaacgtggccaaaccgaggaagccaaggccaagctcaagaggatccgtggtgttgacgatgtccacgaagaatccagggacctt

SEQ ID NO: 237577 - DNA, 314 bp, Gossypium hirsutum
ctaatcattcttggcgggcttatattatccgggaccatcttcctatataaagttgagaatttaggcctagttgattcgttctactgcgtttgttctaccattacaaccttgggatatggcgataaaagcttctcaaccgaaggaggtcgtatttttgctgtgttttggatattagctagcactatctgcttggctcagttttttctctatgttgctgaggtaaatacagagaacagacaaagagcactggtgaaatgggttcttggtcgaagaacaacaaatgtagatttggaggctgctgatattgatgataa

SEQ ID NO: 237578 - DNA, 388 bp, Gossypium hirsutum
gaacaaagtatgtggatttgaaaagaaaaggccatctccaccgtacattttgtggtgcaaagatcaatggaaagagataaagaaagagaatcccgaggctgatttcaaagaagtttcgaatattttgggtgcgaaatggaagacgatcacggccgaagaaaagaagccttacgaagaggtatatcgagccaaaaaggaagtgtatttacaggccattgcgaaagagaaacgcgagacggaagccatgaaactctttgaagatgaacataaacaaaagacagcaatggagttattggaacaatacttgcagttcaaggaagaagctgagaaagaaaccaagaaaaaaaccaagaaagaaagggatcccttaaagcctaagcaacccatg

SEQ ID NO: 237579 - DNA, 452 bp, Gossypium hirsutum
  unsure (1)..(452): unsure at all n locations
tcgcccacgcgttcgttcacgcgtccgtaactttgaatgagccccctgtggtcatgccgcaagtgcctcaagctgctgtaaccatcgatttgaatgcacctgtttccacagaaactggctcaacttgtgctatttcttacggtcgagcaggtagaataagtgagagtttacacagtatcataccgtctattccttctgaagctggcatcaacctctcttcaatgaccggngatagtttccggcgctacaatatggatggcattgcagaggtgttattagctcttgagaggatcgaacaagatgaagagttgacgtatgagcaattacttgttctagagaccagcttgttccttaatggcctgaatttttacgaccaacatagagacatgagattggatatagacaatatgtcatacgaggaattactagctctagaagagaggatgggtaat

SEQ ID NO: 237580 - DNA, 509 bp, Gossypium hirsutum
cccacgcgtttctctccgccccaccgatactctttcccttggccacgcttatcgccttatcacttctcaagaggtcatgaagttcatgagagccaagaaatatgcaaaaaccaaaagggaatccatgaaaaaattgcagcaccatggacaagacaacctaacttcaggaggaaagtttgacgcacacatcaccaaccaagaactaaagaatgaaagacaaatctcacggacatcatctgtgaacgctgcttcaatgaggtcaaaatcatggcggccatcattacagagcatctctgaggctgtaggctaatagttttgttttcaagtttcttttcttaagtgcagattggttttaggaatggcaatgaactgcctcttttgttcaatgaaacccgaaattagggaaaatggaaattcaccaatcgaatgaaggtgataaccaaagatttcaacttgcaatcaaagctcccaaattgaaatctgtttcaagaaaaataaacatatgtata

SEQ ID NO: 237581 - DNA, 442 bp, Gossypium hirsutum
ctgtacttgtgggcggacgcgtgggcggacgcgtgggcggactcttgggcggactcgtgggcggacgcgtgggcggacgcgtgggtgtttgtctattgaattctttccctcactttctcgaaaaaaaaaatgtcttcaggttgcaattgcggatctaactgcagctgcggtgacaactgctcatgcagcaggaaccttaaccttggatattcggagaagacaaccagcactcagaccatcatctccggagttgcgccagtgaagatgacctttgagggaccagagatgagcactactgaatcaggacatggatgcaagtgtggatcaaactgctcttgtgatccatgcaactgttgaaaagcttgatgaaagccatagattatgaaaaaaagaaagcagcaaaaataacaggcctctgtaatgatatattgtcaaggatgga

SEQ ID NO: 237582 - DNA, 409 bp, Gossypium hirsutum
cctactcgtccgggaaccattgctcgtggtacagcaccggttaatgatgaacggctcaagttacaattgcagtatagtgaaaaggatcaggctgaaaatttaatgattgtcgatcttctgaggaatgaccttggtcgtgtctgtgaaccgggcaccgttcatgtgccacatctcatggaggtggaatcttacgcaactgttcatactatggtgagtacaatccgggggaaaaagcagtcaaatgttagcgctgttgattgcgttaaggcagcatttcctggcggttcaatgacgggggccccgaagttgagatcaatggaacttttagattccatcgagagctgctcccgtggtatatactcaggctccattggattcttttcctataatcagacatttgatcttaata

SEQ ID NO: 237583 - DNA, 304 bp, Gossypium hirsutum
cttcgcgtccggaagaaagcacaagatgctttccttgttaggtgcaaggctaactcggaggccaccttgggtacatacaagggtgacgcaaagattagtgagggtgctgcagagagccttcatgttaaggactacaaatactaagaatttagtcttgtggtctgtgtatcagagaaattttctgtattgatgattttgggggttttccgtttcttctcatggaatttaggttgtgaaatcagaccgtttcttctcatggaatttaggttgtgaaatcagactcaaataagcttggggggcccca

SEQ ID NO: 237584 - DNA, 406 bp, Gossypium hirsutum
cctactcgtccgcccacgcgtccgcccacgcgtgcgaatggggtgggctatagcactccatggaggcgccggtgacatcccacattctctgccaccagatcgccgcctccctcgtgaagttggtctccgccactgccttgacgttggcatcgccgctctcaaagcccataagcaccctttggatgttgttgaacttgtggttcgtgaactggaaaactacccacatttcaatgctgggaaaggatcagtgttaacttcatcaggcacggttgagatggaagcttcgataatggatggaaagagcaagaaatgtggggctgcttcaggtctcagcaccgttgttaatgccgtatcactggcaaggttagtcatggagaaaactcctcatatatatctgggatttcat

SEQ ID NO: 237585 - DNA, 474 bp, Gossypium hirsutum
tgtggagttcaatctctctggtttctcaaactaaagcaatatttggtgggtttttctcctattgtttgccatcaacacaatctggagcatcaggttcattagttttgggaggcaattcatcagtttacaatacttcaagccccatttcttataccagaatgatcccaaatcccaagctatcaactttttatttcctcaaccttactggtatcagtgttggtggggtgacactgcaagatttaagctttggcaaaagctcgatgcttattgattccgggacggttatcacaaggcttcctccaacaatgtacagggccttgaaggcagagtttcagaaacaattctccagttttcctactgcaccggctttctcgatcttggatacttgctttaaccttagtgcataccaagaagtggatgttcctacaataaaattgcagtttgagggtaatgctgagatgaggtggatatcac

SEQ ID NO: 237586 - DNA, 403 bp, Gossypium hirsutum
ttttattctcccattcacttaggggtttcaaagagccacctcctccacaaaccattttcgaccatgataaaattatttggttaggagatctgaactaccggcttgctgccggttgcgccgatacgtacgaattactgaagaagaatgactggcaaactcttctagagaaggatcagctaagattggaacaaagggctggtcgggtgtttaaaggatgggaagagggcaggatatacttcgccccgacttacaaatacctaactgattccgacgactatgtcgtccaaacatcgaaatccaaagaaaaacggcgtaatcctgcctggtgcgataggatattgtggaaaggcgagggacttaagcaaatgtggtactcaaggggtgagtctaggttctcagatca

SEQ ID NO: 237587 - DNA, 301 bp, Gossypium hirsutum
ttttaagaaggttggacaatgcaggatggaacaccatggcctggaaacaatgtcagagaccatcctggaatgatccaggtttttcttggtcatgatggtgttcgagatattgaagggaatgaattacctcgtctaatttatgtttctcgtgaaaagagaccagggtttgatcaccacaagaaagctggggccaacagtagctactttctaaaaattgtggaattttatggatccacgcttggtatgtagccaagcccaagaaaaaaggaacgaggggaagaatcgacaaggaatccataac

SEQ ID NO: 237588 - DNA, 317 bp, Gossypium hirsutum
aatttatagcggacgtggagatgcttagccgattgcaccaccgcaatcttgtcaaacttgtcggtatatgtattgaaggacgcatacgctgcttggtgtatgaacttgttccaaatggaagtgtggaatcacacttgcatggtgttgacaaaaacaaaggacctctcgattgggatgcacggctgaagattgcccttggagctgctagaggattagcttatcttcatgaagattctaaccctcgagtgattcaccgagattttaaggctagtaatgttctattagaagatgactttaccccaaaggtctcagatttt

SEQ ID NO: 237589 - DNA, 362 bp, Gossypium hirsutum
tgttgtggctaggtcatcggagtatcctgaggggcagttgattacagataagttgttggagacattggaggaatttgtgagggatagagctaaaaagccaacgagtccagagagaaaggagcttcctcctccacctaaagaggaagagcttgaaccaaatatgaatgaaataaaggcgctacctgcacctgagaattatgctccaccaccgccaccatcagagccggagcctgttaaacctgcagaaccccaggaggatttagtgaatttgagggatgatgttgtcacagccgatgatcagggaaacaaatttgctttggctttgtttagtggtcctgcagcaaataatggtaatggatcat

SEQ ID NO: 237590 - DNA, 412 bp, Gossypium hirsutum
tgtctttctatcgcccccctcccatagctctagggaggattcctttctcaaaaattggcttcttctctcataatacatataaaaaatcctccttcttttatactcttctctttgtcttatataatctcagggtgatagagcaacaaaaatacgaccatatatcaaaggaaaaaaaataaagagagattcaagggataatacgatgaccaagttaccttctttgtttctggttttgactttggtttctgtttttgtttgtgggtttggaaaaaggataccaattctgtcatttgatgaagggtatagtcagttgtttggagatgataatctagctctccacagagatggtaaagctgttcacttgtcttcgaatgagagaacagggtctggatttgtgtctcaagacctttac

SEQ ID NO: 237591 - DNA, 333 bp, Gossypium hirsutum
ccttcttgtccgcgagaattggatcagcgctactcttgtccttactcctctcgttggaacctacgcatatgtccagaacttcaaagaaaaggagaaattggaacacaggtattaaaaacctcaggaagcatcccttttatcggagtaactctgagcttttatgttttagatgcaaatttattgtggttcgatccaatgatgaatcatgtcttttgtttgggatctgattagtatcttaccgtttgagttggtgttttgttattcatatggaataaatgaatttggaacagtgtctgcattttcggtaaaataaatttgttgattcgccctttc

SEQ ID NO: 237592 - DNA, 503 bp, Gossypium hirsutum
ttttcgcgtccgcccacgcgtccgattccgaagggggtttataaactatgccatgaagtggatataaaatgtattgatctttggactgcaatccagcaaagagacgactggaagacagtttgctttacggatggcatccatctatcctccgaggggagcaagttagtgggtgaagaaatattgaaagccctggcagaggaaccaagtttatgctggagatcattgccgactgaatttgatgaagattcagtctttgatcctgtcgatgaagaagggaagaacattaacatttcaaacctgtagttttccaccatgtgccaaatgggaataattccctcaagcccttatcaagtttggttgcctttttcgttttcctttaatgtttgacttctcctatagagaaacatatgattgcagagaggtcttcctagtatctattccatgcaatattaaactggaattgtaagtgggccacgggatggaaataaaatgaaattcctagc

SEQ ID NO: 237593 - DNA, 404 bp, Gossypium hirsutum
tctatcgcgtccggggatgtaatgtcaaatgaagaggccggtcaggtagctcgccgcctactaatacggcgacggcggagggcattgatgggcgaagttgatgatagagtttcaccggcacaagcggtagctgataatctcacggcaatagccataggaagaagcagttgtgataatatttcggtcatcgttgtggatttaaaacccaagaggaaatcgccatccaatgcggtgaaaaaaagataaaattaaaaaagttggttctgcaaaccatattaatccacacattcaagtggttccataaattgagctgatttaaaataaaacaaaaaaaaatcatcaaaacggtacacatctatttcttttgtttttccaaatattatttctttttcccgatttctcct

SEQ ID NO: 237594 - DNA, 354 bp, Gossypium hirsutum
ccctctcgtccgattttgtggtgttaaaatcttatgtgttcatagttttttgctgcaggcaacatgtcgctcacaattcctagccttctcagtggcccaagaaccgacatcttcgatccattttcagtatgggatctttcagatgaattcttcaactctgcattggcacacactatgacatcatcatcttcagtacgcgaagcttccgacattgccaacccaagggtagattggaaggaaacaccccaagctcgcgtgttcaaagcagaccttccagggctgaagaaagaggaggttcaagtggaggttgaagaagggagggttcttcagataagtggggagagaagcaaagag

SEQ ID NO: 237595 - DNA, 495 bp, Gossypium hirsutum
gtttctagcaagagaccagtcccagccccagcggtttgagtgcttgttttttgctttaaccatttgcggttcaattcctttgttcgattgttcctcttgcagcttggccatcagcagcagggtggatgtgggattttttacagtgaaacaacaaaaatggatatgtatcatccaagttcaaggctctcatcacaagaagaaatgcttaataatctcaatcgcaaaggtataggagagccttacctcgtcttgacttccgatcctaagcctcgtctccgttggactgctgacctccatgaccgattcgtcgacgccgtcacacaacttggtggccctaacaaagctacaccaaaggctatcatgcggacaatgaatgtgaaaggattgactctttttcacttaaagagtcacctgcagaaatacaggttaggtaagcagtcagggaaggatatgggtgagggaccaaacgatgggatatcagcttcatatctttta

SEQ ID NO: 237596 - DNA, 483 bp, Gossypium hirsutum
attatcaccaaatgaagcaactcatccgccgtctgtcccgcgtcgccgacgtttccgcccagtacaacctcctccgctccgactcttcctcctcttcttccggtagccgccatcgttcttccgccgctagggctgaatctttccgtgtggcggttaaaaagacggtgcctcaaggttacgttccggtttacgtaggggaagagatggagcggttcgttgtgagtgcggagttgctgaatcacccggttttcgtcggcttgcttaataaatcggctcaggaatacgggtatgaacaaaaaggggtacttcatattccgtgtcacgtactggtttttgaaagggttatggaagcgttaagacttggggttgagtcacgtgacttacaggatctactccggtcattctccgatgactggttaaatgatttttagaccggtgaaacgacaaaaaacgatgtccgcttttttcatgtaaatatattat

SEQ ID NO: 237597 - DNA, 389 bp, Gossypium hirsutum
tgttattataatcacgattgtggcgtcgtcagggggtcatcataacaacggtttgaatgaaaagacggaggagctgatgcagcagcagccgagatcgaagatcttggtggaaaagcggcctgatttggagtacgagatgaagagcagcttggatttcgatgcggtggaaacggtggtgtacgagcaaaaggagatagtacaagaggtgaaaacgacggtttttgaggcggagaccaatgtagcggttgtagatgatggagatggaggtgacgtgtttgctatctccaaatcggagtggaatcctcctaggagaatggatttgtcggagattccgttggatgttctgtttccggttgaaaaaccaccggcttcttctagattcggtcacc

SEQ ID NO: 237598 - DNA, 476 bp, Gossypium hirsutum
ttatttggtggcaaaatgttactttgctaagcgcaggcttttatgggaagtgcttgatggtggtctcaagaacaaaattgaaattcaatggtcagatattgtagctatcaaggcaaattatcctgatgatgttccagggaccttagatgtagtggtaataatcaaacttatgccataagctcttctctctacatacttggtaatataggaataagctgcttcaaattatacttcctggcaaatcgtgttcatataacttctgatgcgttaatgatttatcatgccatgatgtgctgcattgtcagctctacttaaatcttctcttctgatcactgtgaatattttgatgtaatatttattttagatgcaatttttgtttgctacagttggcaagacagccacttttctttaaggagacatatccacaacctaggaagcatactctgtggcaagcaacctcagattttaccggtgga

SEQ ID NO: 237599 - DNA, 326 bp, Gossypium hirsutum
gatttcatattgacatgcctgctggcccttcagaagttttggttattgctgacaaacttgccagtcctgtacatatagctgcagatttgctatcccaggctgagcatggacctgatagccaggttgttcttgtaatagctggtgagggtgtggatcttaaagctattgaggaggaaattagtaaacagtgcaatagccttccaaggggagattttgcttcaaaagcactaagccatagtttcactgtttttgctcgtgatatggttgaggcaatctccttctcaaatttatacgcgccagagcacctgatcataaatgtgaaggat

SEQ ID NO: 237600 - DNA, 368 bp, Gossypium hirsutum
cctacgcgtccgcccacgcgtccgggaaaatcggaactagcaaaggcactagctgcttactactttggctctgaagaagccatgatccgacttgatatgagtgagttcatggaaaggcacacggtgtccaagctgattggttcaccccctgggtatgttgggtacaccgagggtggtcagctaactgaggctgttaggaggcgaccatacaccgtagtactttttgatgagattgagaaagcccatcccgatgttttcaacatgatgcttcagatcctcgaggacggaaggctcacagatagtaaaggaagaactgtcgatttcaagaatacactcctgataatgacatcaaacgttggaagcagtgt

SEQ ID NO: 237601 - DNA, 440 bp, Gossypium hirsutum
cccacgcgtccgcccacgcgtccgaccaaattgggggcttgcaagtgctttatgaagatcaatggctcgatgttcctccggtgcctggtgccttggtggttaatgttggagatcttttacagcttataacaaatgacaagttcaaaagcgtggagcacagagttttggcaaaccgtgaaggaccaagagtatcagtggcaagttttttcaccacaggcttattaccaacttcaagggtttatggacccattaaagagctgctctctcaacacaatcctccactttacaggcaaaccacagttaaagactatgtttcctacatttatcaacatggtcttgacggaacttctccccttcatctctttaggctctgaaaaaattttcgcccctaaacttgtgagttgcagaagacataatggtgttcttagttacttatcatt

SEQ ID NO: 237602 - DNA, 299 bp, Gossypium hirsutum
tttctttttacagagccctcatagctgagttcatagccactctcctcttcctctatgtcactgttgctaccgtaattggtcacaagaaacaacaagatgcatgtgatggtgttggtctcttgggtattgcatgggctttcggtggcatgatctttatccttgtttactgcactgccggtatctcaggtggacacattaaccctgcggtgacttttgggttgattttggcccgtaaagtatctctcatcagggctgtggcttacatggtgtcacagtgcttgggtgctatatgtggagtt

SEQ ID NO: 237603 - DNA, 303 bp, Gossypium hirsutum
gttagtgctccgatacgatcgacaacgtgaaggccaaaatccaagataaggaaggcatccctccagaccagcagcgtctgatcttcgccggaaaacagctcgaagacggccggaccttggccgattacaacatccaaaaggagtcaactctccacctcgtcctccgtctgcgcggtgggatgcaaatcttcgtgaaaaccttgactggcaagacaatcactctcgaggtcgagagctccgacacgatcgacaacgttaaagcgaagatccaagacaaggaaggcattcccccagaccagcaac

SEQ ID NO: 237604 - DNA, 345 bp, Gossypium hirsutum
cccacgcgtccgaccgggacccgcaaattgtagcttcttaaacattttgaaactcgactataacagcttgacgggttcgattcctccagtactcagtttgctgaataggataaaaacatttagcgtgtctaataatctcttgtcggggcaaattccatattttaatgttacattaacggcagaggattttgcgcataatcctggattgtgtgggaagcctttggatccttgtcagttgacttcaaaaggccctaaaactggaattattgctggggctgctgtcgctgggttgacggttgctgcaataggtgtggctattggtatgttcttctattaccgtagagt

SEQ ID NO: 237605 - DNA, 324 bp, Gossypium hirsutum
caatcattgagttgttacacttagcactttttgtgggtctatgatacttggacttgtgtatatgtattggatatgggtatgttcatgtatttctggtgatatagttcttgcaacagcttatggacatgagctttctcgctatggacttgaagttggccttacaaattatgcagcagcttattgtgttggactccttttggctcgccgaacactgaagcaagctggagatggatgctgaatacgagggcaatgttggggtatgcatttgccctggtttctgaggtgtggagatggactcctattttttcatgctttttgattata

SEQ ID NO: 237606 - DNA, 356 bp, Gossypium hirsutum
tttttgaaaagtggaaaggagcattttctgttgatgctgaaggaaccacagagaacgaattgcaagatggaagtcaggatttgctttctaattttgtggaatacattaagaatcataaatgtattcctttggaagatcttgctggagaattcaaattgagaacccaggtatatgatcttaatagctaagtaaaaccctttcatatgtgtactttcggcctcttgatatattgtaaaacccatcaacggaatgtgtgttgctgtttttttttaaatcccatccccgtttgcttatatttttaaagtacattgattgtttgatgcaggaatgtatcaataggatcaccttccttgaaa

SEQ ID NO: 237607 - DNA, 423 bp, Gossypium hirsutum
ttttaattcactgagaaagtcatggaaggtttcaaggttgttcacctcattgcaatactatcaaccctttcgatggtttcggttaatggacagatttctacagcctgcactgcctcaatgatctccagtttcaccccatgcttaaattttattactgggagcagtgggaatggctcatcatcaccaacacaaggctgttgtggttcattgaagtcgcttatgagcactagcatggattgtgcttgtcttattattactgctagtgtaccttttcaattgcccataaatagaaccctggcactaagtctgcctcgagcttgtaacatggggtggtgtaccagttgcagtgtaaagcttttggcactcctctaccagctccaggccctgttccctttctacttccaccaactttggcaccagcag

SEQ ID NO: 237608 - DNA, 377 bp, Gossypium hirsutum
agatattagtgctccaaaggcagctggttcctgttaaccggaaatttgacgtcatgtctccgggagaaacggtctcccggtcacctctagacaagcctctgaaccagcttactgaggatgacatttctcaggtcactcgtgaagattgccgccgttacctcaaagaaaaagggatgcggagaccgtcttggaacaaatcgcaggcgattcagcaggtgatctcgttgaaaactcttctagaaacgacgtctgattccgacgccgttgaagctcggaagaaactttaccctccctgcccggaatatccgcctcgcgtgcgtgtcgtttctgattcaaacgttctaccgagggaaatgacaccgaataacgggatattg

SEQ ID NO: 237609 - DNA, 220 bp, Gossypium hirsutum
ccctctcgttcggccacgcgttcggtgcctttggggggggatttgggttacacaaagagatatgtacgatgtcttcagatatccgaagtcgttaatagtatgaaggacttgattgattacagtagagagacgaagactggacctatggagagtttggccaagttccctcgaagaacaagtacttcatttggtattcaagcacaacagcctgaggaacaac

SEQ ID NO: 237610 - DNA, 369 bp, Gossypium hirsutum
cccacgcgtccgccaaccctccgccgcccacgtcaacttgctgctccgccctctcccacgctgacatgcgttgcctttgctcatataagaactccaagctcttgccttcccttggtattgacccaaaccttgccatgaaattgcctagcttgtgcaagcttcctcatcctgcaaattgttagttcctggttctccatatttgatctcaaatgtgagggaaaatcatgcttattataagcctctacttcacataattgtactgaccttcgggttttctttttcctttatttctttttatgtgttgtgtttcgattggtatcttatagtcgtgtgatttctcaccaataatcatatattagtattgtttcc

SEQ ID NO: 237611 - DNA, 396 bp, Gossypium hirsutum
agcatctctagctgcttgttcattgaaggatgtgctgggtatgctgagatcattgtatgccttgaattgtctggaagatggtgcgtatctccgatatgggtacctgtcagttgagaatgctgctacagtgaggagagaaataacaaaaatatgcagtgaacttcgaccgcatgcacttgctttggtcagttcctttggcattcctgatgctttccttagccctattgtttttaactggattgatgccaactcttggtcttcggctcaatattgatagggtgttgttaatctaccaactgcacctaacccaaagctttacacttttctaagcagtttataccccaacatactcaataaaaataaattctgttcatataatacatttatatttgttat

SEQ ID NO: 237612 - DNA, 283 bp, Gossypium hirsutum
ttttgtttctggccaaaacaagaaaaaaaaattcccattttgccagaaacaaagagcttgtcaagaaagctccaagatatcaacaatggcagttgaaacaagctctgcaactccatctccagtcaaaacagtggttgttttggttcaagagaaccgttcctttgaccacatgttaggctggttcaaaactataaacccagaaatcgacggtgtcacaggctccgaatccaaccccattttcaccttcgaccccaacttcacccaaattaccttcaaggacacc

SEQ ID NO: 237613 - DNA, 343 bp, Gossypium hirsutum
cacagctttacgttgagaatgttttgacaagcgagagggagagaatgagatgctgtaatattgaattcaaatacctgatgcattcttcccaaactttcgtctatggaggaattcttcttgctgggttctttgtatatttcattgtcattttcttttcatcaccccccggtcaatgatctcaactccgaagattatcaggcatttgaaggtaagcttggtctctcatctttagggaacccatcttagtctgtacacatttcagaaagaagaaagttttgtaaaattagggtttctttgcttgcattaccacaacatggtataaacaaatagctgaatctttgct

SEQ ID NO: 237614 - DNA, 400 bp, Gossypium hirsutum
ccctctcgtccgcattaattggctgcaaagctctcatctctctttgaccatgtcgtcgattaaaaccattaaggtcagcaatgtttctttacaagctactgagcgagacatcaatgagttcttttccttttctggtgatatagaatatgtagaaatgcagagtgacaatgagcggtctctaattgcctatgttaccttcaaggattcacaaggagcagagactgctattcttctttcgggagcaacgatagtcaatctgtctgtcagcatttcgttagctccagactacaaattgcctactgctgcttttgcaccgccttctccaatacaaaaccaaactcctgctggtgctgattcggcaatgcgaaaggcagaggatgctgttactggcatgcttgct

SEQ ID NO: 237615 - DNA, 492 bp, Gossypium hirsutum
ctctttttaaagaaagatcgagcagtaggaaattgaggaaaaaaaaaatctttggcctttgtttaacaaatctagctcgtagaattgaacggcagccactaaaaaaatacgttcggtgattaatagattttttttactcaagaaatggcgggaagagctcaaattccgacaagtaattcagcactaattgccatgattgctgatgaggatacagcaactggatttttgatggctggagttggaaatgtggatttaaggagaaaaacaaactatctaatcgttgattcaagtatgaattttggattaaagtttttttttcttacaattttattgaattttctcaattgtttttttttatgatcccttgcaatgtttataattactctattagctgactagagttaagtaggagttagattttggtacttcacggtcgcagttgaatgatgaagggatctatgctgaatgctagataagggtttgttttatata

SEQ ID NO: 237616 - DNA, 470 bp, Gossypium hirsutum
cccacttcttccgaatcaattgaaagagagatcaactctgtgaatgataaccctttgatcgatgtttcaaggaacaaggcgctacatggtggcaacttccagggtaccccgattggagtgtcgatggacaatgctcgtttggctattgcagctattgggaaattaatgtttgcccaattctctgaacttgttaatgatttctacaacaatggtctcccatcaaacctctcgggtggtaggaacccaagtctggattatggtctcaaaggcgctgaaatagcaatggcttcctattgttctgatctccaataccttgctaatccggtcactagccacgttcaaagtgctgagcagcacaaccaagatgttaactccttgggactaatctcttcaaggaaaactgctgaggctgttgatattttaaagcttatgtcctctacatacttggtggcactttctcaagctattga

SEQ ID NO: 237617 - DNA, 392 bp, Gossypium hirsutum
cgtttacagttaaatccttttttcccttatattttcggaaaagatgcggaggttcattccggcgacggcagtattgtcggaaaaaactaaacactctcttccattgcggcgatggcgatggcggtgcttctctcaggtggctcaaaaggagtttgataacaaaggtggcgttgtggttcccaaaatgccttcctttgattatgctccgccgccttacaccggtccctccgccgctgagatcctctcaaaaaggaaggagtatcttagccccgccatgttctacttgtacaataaacccctgaatgtagtggatggaaagatgcagtatttgttcgatgaaaaggggagaagatacttggatgcatttggagggatagctacggtgtgttgtg

SEQ ID NO: 237618 - DNA, 461 bp, Gossypium hirsutum
gcacattcagcaaatggtttaatcatcacaaagaaataggaaccaacacagtgaagaagaaagacaaaatacgtgcagaaaacgctcggcttcactccgccgtttccatcgccggattagctgcaggtttggcctcagtagccgccgcagggaactccgacggcggcggcgcaggctcgaaaatgagcatggcattggcatccgctactgaacttctagcatcccattgcatcgagttagctgagctagctggggctgatcacgaccgagttgcctcagttgtgaaatcagcagtggatattcaaagtgcaggtgatttgattacactcactgcagctgctgcaacagcattgagaggagaagcagctttgaaggcaagaataccaaaagaagcaaagaaaaattcagcaataagtccatatgcagaaactcaatggtctgatgctttgcatactcaaatg

SEQ ID NO: 237619 - DNA, 320 bp, Gossypium hirsutum
ctctttcatcaatccagcaaggagctttggagctgctgtgatttacaaccaagaaaaagcttgggatgatcaatggatattctgggttggacccttcattggtgctttcgttgcagccttttaccaccaatacatcctaagagcagcagccattaaagcccttggatctttcaggagcaatgcttaaaaacatttcaccttcattacaataagaaaacaatgatgtaataacaaatgaggaatgagagcaagtttatgtcttgtgggaggggttcccttttgcagtttattttctataccattgagaaggggggccattg

SEQ ID NO: 237620 - DNA, 402 bp, Gossypium hirsutum
ccctcttttccgcccacgcgtccgcccacgcgtccgcggtgatgtaaagtctaaaattcaagacaaggaaggcatcccaccagaccagcagcgtctcatcttcgccggcaaacagctcgaagatggccgtaccctggccgattataatatccagaaggaatccaccctccacctcgtcctccgtcttcgcgggggaatgcagatcttcgtgaaaaccttgaccggcaagaccatcaccttggaggtggagagttcggacaccatcgacaatgtaaaggcgaagattcaggacaaggaagggatcccgccagaccaacaacgtttgatctttgcagggaagcagctcgaggatgggaggaccttggctgattataacatccagatggaatcgacccttcacct

SEQ ID NO: 237621 - DNA, 330 bp, Gossypium hirsutum
gtatttgatcgcgagcgccgccctctttccaaacacggggtttttttgaaaaaatgggctcatgagagaagaccatggccgatcaacttacggacgatcagatctctgagttcaaggaggctttcagcctctttgacaaggatggcgatggttgcattactaccaaggagctggggactgtgatgcggtcacttggtcagaaccctactgaggcagaacttcaagatatgatcaatgaagttgatgctgatggaaatgggaccattgattttcctgaattccttaacctaatggcaaggaagatgaaggatactgattccgaggaagaac

SEQ ID NO: 237622 - DNA, 394 bp, Gossypium hirsutum
gtttaaaccacctcgctgccatcattgttctgtttgtgggcggtgtgtgctaaagatggaccatcattgcgtgtgggttgtcaattgtgttggtgcattaaattacaagtatttccttcttttcttgttttacacattcctcgaaactagtcttgtgactttggccttattgcctcatttcatagcattctttagtgatgtagaaattccaggaacccctggaaccttggctaccactttcctttcctttggtatggacttcttggtctgttcttctgatctattttactttagtgactatgcagtatgtacaaatgtatgactatgttctgctgtggcagttttgaatctggcatttgcattaagtgtcttgtgctttttgatcatgcacata

SEQ ID NO: 237623 - DNA, 310 bp, Gossypium hirsutum
aatcccggatagtcctaatttgtgttgggatgtgaggtttcgggtggcggttggcactgcaaagggcatagcatatttgcacgaggaatgcagggattgcatcattcattgcgatatcaaacccgaaaacattctcttggatagtgattacattgcgaaagtatcggatttcggattagcaaagcttgttggaagggattttagtagggtattagctacaatgaggggtacttggggctatgttgctccggaatggatatccggtatggctattacaccaaaagctgacgtttatagctatgggatgaca

SEQ ID NO: 237624 - DNA, 400 bp, Gossypium hirsutum
ccttattcaaccaggtcaccatgagtggggctccgaccataacataatcgacaaatccaagatgtactcctacaagtaaagggagttcgaatagatattggttgtgttcgaaaggctctgaatcgatcgacaagcccaagcccaatatcttgatttcgaatggcaatgcaccgcggacccatatatatatcgtccgctaatacacgaccaattaatgtttggataaaaattctttccggaagcgtcctcttttgaggactcacagaaatccctcgggtggtgccacaatctgttctacgtacaacactgtgttgaactacttcaacaagtctgcgcgtaagatatccagcatctgatgttcgtacggcggtatccacaaccccttttcgggctccgtagc

SEQ ID NO: 237625 - DNA, 510 bp, Gossypium hirsutum
  unsure (1)..(510): unsure at all n locations
ggagcagaatgtggcacttgaccttgccagaagagaagcagagacggccatccgtgctcgaaatgatttcttggctgttatgaatcacgagatgagaaccccaatgcatgctattattgctctatcttctttactgcaggaaactgaattaacacctgaacaacgtctgatggttgaaacgattctcaagagtagtaaccttctttcaactctaataaatgatgtattggatctttcgaggctggaagatggcagccttcaactagaccttggaacttttaacctttttgccgtattcagagaggtccttaacttgatcaagcccattgcatctgttaaaaagcttcatgtttcattaaatttggctccggacttgcctgaatatgccattggtgatgagaagcacctgatgcanacaattttaaatgtcgttggtaatgctgtgaagttttcaaaggagggcagcatttcaatcactgctattggtgcaaaatcagaattactgagaga

SEQ ID NO: 237626 - DNA, 361 bp, Gossypium hirsutum
tacccagatagtcgtctcttcaccaaagtgctataccctggagatgtctttgttttcccactaggtctgattcacttccagttcaacatagggcataccaatgcggttgcctttgctgctctcagtagccaaaacccaggggtcgtcaccattgcaagtgcagtgtttggctcagacccggatatcaatcctgatgttcttgccaaggcctttcaactggacaagaaaattgttaaccaacttcaatcccggttttggtcggataacgacagtaggaattaatgttaacttctacagccccatcaaacttaactgtgtacccaattctctgctattgctaattttattttcaatttaattc

SEQ ID NO: 237627 - DNA, 300 bp, Gossypium hirsutum
aattcatgggattagcatacatgattgcaagagaggagggaatgcttatgtgagggactctcctagccattatggttggagaactatatcggacggtgatgcggtgtcgatatttggaggcagccatgtttgggtggaccactgctcgttgtcaaattgcaccgatgggctggtcgatgccatccaaggatccacagccatcaccatttctaacaattatatgacccatcataataaggtcatgctcctgggccatagcgattcttacaagcaggacaagaacatgcaagtcaccattgc

SEQ ID NO: 237628 - DNA, 470 bp, Gossypium hirsutum
tctatcgcgtccgcccacgcgtccgccattacagctccattaattcgtaaccaccagctagacacgttttattatattggtttaaccgggatcagtgtgggtggcgagttgctcccgattcctgagtcagcattccaaatggacgaatcaggtaatggtgggattatcgtcgactcgggaaccgccgtgacacggttgcagagcgacacctataatgttctccgtgatgcgttcgctaaagggacaaagaacttaccgtcagctgatagcgtggcgttgtttgacacgtgttacaatttgtctacgaagagtagcgtggatgtgccaacgttgtcattgcacttcccagagggtaaagttttaccgttaccggctaagaattacatgataccggttgattccgttgggaccttctggttcgcgtttgcgccaacgtcctcgtctttgtcaatcattgggaacgtgcaaca

SEQ ID NO: 237629 - DNA, 367 bp, Gossypium hirsutum
tttactggatcaaagatgggaaggtggttggagctttcttagaaggcggcactgccgaagaaaaccaagctattgcaaaggtcgctaagcttcagccttcagttcagagtttggaagctgtgaaacatgaaggtctttcttttgcctgtaagatctgatgattcacacacctgccatgctgttccaacacaactggcttttggtttcctttggattgagctcataactatactgtttgctttgttttcttttgaattgtgattgatatggatcatttatattctccatcatgaactttcaatcaggtcataaaattttaattttatcgcattacatttctattattaataaattagaaattagattt

SEQ ID NO: 237630 - DNA, 470 bp, Gossypium hirsutum
tgttaaccccaaggtcttggatcaccatctaaaagcagctggccgtggtggtcttgaagttgatgttagcaaattaatctggacaccatataaagaacaaagttaatgatgctactcatataaagaacaggttcgaattacactaacgagtttgtctacttagtagctgtttagttaggaatttgtagcttcttgtattttatgtataaagctgaggtcttaggttatgagattagaaagtcaaacttagatcaactcaagagctatttacattctagatgtacttattgccatcacaccatcacctgtgtcatctgagacatatcgggacaaactaacctgtatatattttattacaccgtgagttacaatataacgacttctctctctctctctctcttatgtttgacatttgatttgatttccacctgtgtttgatggaagttgttgctcgcaaccttattgcttct

SEQ ID NO: 237631 - DNA, 416 bp, Gossypium hirsutum
tccacgcgtccgcccacgcgtccgaacgaacaactatttccgagctgatggccagaattgtggcaactttcttacggagcgcaggacaactaaggttcacgcagcgcctggcggtgggtcttccttggattacctgtttggtggcagcgagaagtgatatgtgagatattaaatgttggaaccactgcttatggttgtcctaaaaggtttgggacagaaaatatttaagtataaacaatatgttggtttcccttccatcctggactttctggaaacttcaaattaagctttttcctatctaagcaactgcttaccattagttaaccatgcttatccaatcctttcatcaagtgttataagtatcttttatcatatattaaagtaatatattcaagaaaaaatggaaacttgcttaa

SEQ ID NO: 237632 - DNA, 395 bp, Gossypium hirsutum
  unsure (1)..(395): unsure at all n locations
ggttgtctcagtttcaggcgccgtttgctccatcaataatctctctagcgatgaccaccatcgttgcaacgatctcaacctcaactctgcttcttttcttcttcagaatgtgttgggaaaatcaagctcaaccctttatgccattgcacttcttgcctcagggcaaagctctaccattacaggcacttatgcaggacaatttatcatgcangggttttttgaatcttaaaatgaagaaatgggtgaggaatttgatgactaggtgtattgccattacacctagtcttattgtgtccatcatcggtggatctcaaggggccggtcgactaatcatcatttgcatccatgatcctttcatttgagctaccaattgctttaattccactacttaaatt

SEQ ID NO: 237633 - DNA, 173 bp, Gossypium hirsutum
cccactcgtacggagacggagaactatacataggaagaggaagtaatgatcactatcacagtgcccacgacagttccttcggtgtctgaagattgtgaacagctaagaaaagccttttcaggatggggaactaatgagggcttaatcatagatatattgggccacagaaatgc

SEQ ID NO: 237634 - DNA, 486 bp, Gossypium hirsutum
atcttttgaagttctcgaacaagttacagtcctcaaaacgattggcagccatgaaagttcatggataccctttgtcaacagttactcaaagggtccttgcttgcctttacgaaaaagatgttgagtttcagtttgttaacgtagacatggtcgctggcgagcataaatccccaaatttccttcccctcaacccatttggtcaagttccagcttttgaagaaggggacttgaagctctttgaatcaagggcaaccacccactatatcgcccatgaatacgccgacaaagggacccaactcttgttgccgggttctaacaagacgatggcagtctttcaattgtggaaggaagttgaagctcaccagttcgaccctccatcgacgaagctagtctttgagctgcgttacaagccccattttgggatgaccaccgacacggcggttgtggaagaatacgaagctaagtttgccaaagttttagatgtgt

SEQ ID NO: 237635 - DNA, 393 bp, Gossypium hirsutum
tccttaaggacttaaaaccgtatccacttgcttcttgtggacttccatggcacttggctactacctcagtaccattctggttcagatagtgaatcgtgcaacaaaacatattacaaacagtgggggttggttagctggcaacaatattaacaagaatcatctcaatctcttctacttgatacttgctttgctgagtttggtcaatttctgtgtgtatttgtttgtttcttcgcgttataagtacaggtctaagaactaagatggacccaagacagaagccaactagaccttcattttatttcatttccgctttatgtttatgccaaattaagttggtaacaagatgtagagatcgagttccaaatgtatttgaatttgtattttcatattatg

SEQ ID NO: 237636 - DNA, 418 bp, Gossypium hirsutum
cccatgcttccgatttgatgggcaggccaaataccctctgaaccttggtactacaaactcgggagctttaatttctgcaaaaggtgtacaatacttggagaggaaagtgtgtgtgatgaagccttcagtcagacttgatgatccacaagtggaaccaagtgtgagcttcgcatgtggtcttgccgactgcacttgccttggttacgggacatcttgcggaaatctcgatgcttgggggaacatatcttatgcctttaacagttactttcagaagaataaccagcgcgaagatgcctgcaaatttccaaatgtttcgatgatcacaaaagcagatccctccccaagagatggaaattgcaaatttaatataatgatccagccctattatggatctgcaggatggtacgcgcggaagcca

SEQ ID NO: 237637 - DNA, 412 bp, Gossypium hirsutum
cccacgcgtccgggtgaaacccgcaaatggaaggctgggacccgaatacgaagtcgacgctaacacagatcccgctactgacgacgaaggcgggtcccagagacggagcggcatggactcagcggctgaaggaggagtataaggctttgatcgcctacacgcagatgaataagtccaacgacaacgattggttccggatatccgcagccaatccggaagggactcgttggaccggcaagtgttggtacgtccataaccttctcaaatacgaattcgatctccagtttgatatccccgttacttatccggccactgctcccgagctcgagttgcccgaactcgatggcaagactcagaagatgtacagaggagggaagatttgtctgaccgtgcatttcaagccactttgggc

SEQ ID NO: 237638 - DNA, 477 bp, Gossypium hirsutum
aaccattctctctagcaaagtttattccctctttctttgttacaaccctctcactttccttgtcaactttgttcccaacaagcatcttgatgcagtcttgatttgttgagtagagttcaatttccttggcccagacttcagaaagattagtaaatgtctcccttcgtgttacatcataaactgtttaagatcaaagaaaacctcatattgtaattctccaaacaaattaagagcagaaatacatgcaaagtcataaaattgaccagaatgataaaagctaaatgttacattacagcacacttaaaagaggttagaattgaagaggcatctaatcttagtcatgtgaagatgttaaccacttatactgactacagcaaaaaaaaagctttagcagagtaaaacttttttacagataaaaaggaagtagaaaacatctaatcatttaatccaggccaaggcaatatgtaacacagtagc

SEQ ID NO: 237639 - DNA, 404 bp, Gossypium hirsutum
cccacgcgtccgcttttagtgtcggttgactcgtaatcttgttgttctcaaggctggaaccttttacacgaatgacaaaggtttttcccaacgctagttttaccatcggtgatgccatctcggagaaacagccaccgcagcataagctgttaccggcgggtgaagcaagtgaggagacgattctaaccgtctggaaaaagtcattgcttttcaactgtaatggcttcacggtgttcgattctaaaggtgacttggttttcagggtcgataattacatggatggcaataagggtgagatccttctcatggatgccagtggcaaccctctcctcactatccgccgcaagaaaatgagcctcggtgatagttggctggttttcgagggagaatccatggagaagccc

SEQ ID NO: 237640 - DNA, 547 bp, Gossypium hirsutum
ggattttctaatgcggcctaaatacagtggaaagtatctgaggaagacgatttgcatggtccttggggatcgaagacttcatgagactttaacctccgttgttataccgaccttcgacatcaagttgcttcaacctaccgttttcacaacctttgaggcaaagatggatccttcaaaagatgctttgctatctgatatttgtattgctacagcttcagctccaacttattttccagcttatgcatttcatacaaaatattctgaaggaactgatagggaatttcacctggttgatggagggatagctgcaaataacccagcactgctagcattgaagccaacaggggtagcctttccaagtgagcaagaacatgaagtttcgcagggacaagcccttaactacgagaatcatttgataatctcactaggcacaggaacctccaagatgggaaagaaatacgatgcgaaaacggcagagaagtggggaattcttggatggctttacagtgaaggaagctctccattagtggatgctttcacttatgct

SEQ ID NO: 237641 - DNA, 362 bp, Gossypium hirsutum
cccttgcgtccggtaagaccattactttagaaggggggagctcggatacgattgatggcgtgaaagcgaagattcaggacaaagaaggaattccaccagatcagcaaaggttgatttttgctgggaaacagctggaagatggaaggactttggctgattacaatattcaaaaggagtccactcttcaccttgttcttcgtcttcgtggtgggttctaagccttaaggtcttccttaatgtgggttttctggttttacgtgaaggattgtgccctttgatggccttttaaataatttctagtctttgtttaccggttgcatctatgtatggtttctctttgaatggaatttgcatatttacct

SEQ ID NO: 237642 - DNA, 406 bp, Gossypium hirsutum
gattttatggtgatcaccatcgacgaccccccagaaaactgtttagatttcagtgtgttatcagaggcaaatgagaatgagatccctcaagttaccattcaccccgatgaccctgttgctttgcccttctcttcgggaacaacagggttacccaaaggagtcgttttaacgcacaaaagcttgatcacaagcgtcgctcagcaagtggatggagagaacccaaatctttatttaacacatgaagatgttgtcttgtgtgtcttgcctttattccacatttactcactcaacagcgtgctcttgtgttccttgagggctggagctgcggttctgttaatgcagaagtttgagatagggacgttattggagctgatacagaggcataaagtttcggtggcagcggtgg

SEQ ID NO: 237643 - DNA, 380 bp, Gossypium hirsutum
ctcttattttccttcctctctttttcttttaatttttaggtctcatgttctgaaaaattgcaaatcttttttttggggattgatttctcaattcttttgaaggaaccttaagagggacatggaagctgttttacaaaccagagggctactttcattgccacctcatccgaccagagttagaagccttttgaacccatcacaaggcttaaagcacaggctttttgcctcaaaacccttaggccttaatgggttatctctgtcttataaaagagttccaagcgtcgtagcaaaaccaaatggtttatcccctaaagaaaagagctttatttgcaaggctgaggctgctgctgcagctgatgggcagcctttgttcggtgaaa

SEQ ID NO: 237644 - DNA, 270 bp, Gossypium hirsutum
cccatgtttccggttgaatatcgcaatgatggtggagccgtggtccctatacgtgttcacgctgttcttatttcaacccaacatgatgagaccgataccaatgagaagattgcagctgatttgaaagagcatgtcattaagcctgtcattccagcaaagtatctcgatgacaaaactattttccacctcaacccatccggtaggtatgttattggtggacctcatggagatgcaggactaactggtcgaaagattatcattgatacctat

SEQ ID NO: 237645 - DNA, 222 bp, Gossypium hirsutum
gtcttcttcgcggctgtttccggcggagccggagttcggaggtaaggtgtcggaagaaagggcggtggagggaagcagcgaggttgggctggagttgacgctggggtttaaaccggtggtgtcacgtgcttgtcaggtggtggtgcccgtaaagaaaaggagagtggaggcatacggcacgttcgaagatggtcaaacgtgtaaggttgagctgggtcttga

SEQ ID NO: 237646 - DNA, 302 bp, Gossypium hirsutum
cgttgttgtttattacgataaattgttgtctggggaaagtgggattggactcatcgaccggttcgatgcttccaagtttccgactcggttcgccggtcagatccgggggtttacttctgaagggtatattgatggaaagaacgataggcgactcgatgattgcttgaggtattgcattgttgctggtaagaaggcacttgaagatgctgatcttgggggtgataaattatctaagattgataaagagcgaaccggagtgcttgttggaactggtatgggcggtcttactgtgttctctgatg

SEQ ID NO: 237647 - DNA, 436 bp, Gossypium hirsutum
ccctcttgtccgcccacgcgtccgcccacgcgtccggtcaaagacggtcaatggttgagaatcccaccgtcgaaaaacaacaccatattcgtcaacaccggcgaccaaatcgaagtgattagcaatgggaagtacaagagtgtgttgcatcgtgtaatggctgagaaacaagggaataggctttccattgctacgttttataaccctggtaatgatgctgtgatttcgccggcaccggaattgttgtacccgggcaattaccagtttggggattacttgaaactatattcgactacaaagtttttggagaaaggaccaaggtttgaatcgatgaagacgacgatggttaatggtcaccatggttgaaaaaagcagtgatttgcatggcctcaaagtgggtttttttttttaaatacagttttatatatgtttttat

SEQ ID NO: 237648 - DNA, 495 bp, Gossypium hirsutum
gtttcaacttcttcttctacatctcaactcttgcaagattttcttccaaacttccattccagaaaattactgttacattacacacaatcaaaccaatcatcagctcctcctccttaccctcaaaattccagttttgatcacaatgttttgatggttctttcgatcatcctttttgggttaattttttcattggggataaacttaataatgatcagatgtgtgctaaggggctcaaacggggtggattccgactctattcgaaacccttctgctgcaatagtcaacagcggaatcgagacaaaggcaatcaagactttccctgtggtgaattactcggcgcagatgaatctgccagggcaggactccgaatgtctgatatgcctgtcggagtttacggctggcgagcgcctgcggtttctaccgaaatgcaaccatggatttcatgttcgttgtgttgataagtggcttaaatcgcacacatcatgccccaaatgc

SEQ ID NO: 237649 - DNA, 456 bp, Gossypium hirsutum
aaaaacaaactaccttccgggagagaggttggtggccctcctcagcctccaaagccaggtcaagacaagaacattcttgttccttctgcaaatgagcattccaatgctcctgcttcaaaggcacaggtggtaggatggccaccaatacggtcattccggaagaatacgatggcctcaaattcggcgaaaaacagtgaggatgccgctggttgcctctatgtaaaggtgagcatggatggtgcaccatacctgaggaaggttgatctcaagacctacaaaacctataaggaaatctcatcagctttggagaagatgttcacctgttttacacttgggcactgcagctccaatggacttgctgtacgagatggtctgagtgagagtcgtttgatggatcttctccacggatctgagtacgtgctgacttatgaagacaaggacggtgattggatgctg

SEQ ID NO: 237650 - DNA, 279 bp, Gossypium hirsutum
gtgatcattgccacaagagaacctactgctccacagggcagcaggcagcatcacatgtctggcgatggcaccggcaccagcgctgaatgtgatcgccaatatgcagcagcagaaccatagggtggttttcgatgtgccaaattcgagggtgggggtcgcccgtgagcgatgttcttaaaaagtgtggggtctttttcttctaacttttgggaaacagtgttggtgttgattaaaagcagaatatatctgattaataatgaaagtcaaatttttgtagtt

SEQ ID NO: 237651 - DNA, 371 bp, Gossypium hirsutum
  unsure (1)..(371): unsure at all n locations
cccacgcgtccggtcgtgctgttttgagcagggatggtgctgctgaagctctcacctctgatcaccgaccttcaagggaggatgaaagaaacagaattgagactttgggtggctatgtggacttatgccgcggtgtttggaggattcagagttgcctagccgtctccagagggattggagaccatcaccttaaacagtgggtaatagctgagccagagacaaagatcattactatcaaacctgaatacgagttcttaatattagcctctgacggcttgtgggataaggttagtaatcaagaagcagttgacattgctcgtccttcatgtgtnggcatcaataagcaaaatccattgtctgcatgtaaaaag

SEQ ID NO: 237652 - DNA, 200 bp, Gossypium hirsutum
  unsure (1)..(200): unsure at all n locations
acggactangccggtgaggatgtgacaatgaaggtgatatcattttctcaacaaggaccaagagctatttgcatcctatctgccaatggagtaatttcaaatgttacacttcgtcaacccaattcttctgggggcactcttacgtacgagggtcgctttgagatactttccttgtctggatccttcatgcctacagaaac

SEQ ID NO: 237653 - DNA, 188 bp, Gossypium hirsutum
tgatagtaagaacaggaggaaggtttaaaacccaagttaaaggcattacattgggataaagtacgagctagctctggtcgtgaaatggtgtgggatcaccttagatcaagctcattcaagttgaatgaagagatgatcgaaacactattcgtcgtaaatccgaactcgaaaccaaatcaaacgacacc

SEQ ID NO: 237654 - DNA, 268 bp, Gossypium hirsutum
ttttctaggttgaaattttaaattaaagttcagaggcgaactgcggttaattttgcccaagtgcttgttttcttgtaggtaatcgtccaccggccaagattccagttccattgccatcatctcgttcaatgaagagtgatgagttattaagtcggccactgcagcttactgaacagggccatattcttgaagtggctattgaggcagctgcaaatgccataatcaatatgagagatattttgaatgattgggatagcacagttggtga

SEQ ID NO: 237655 - DNA, 429 bp, Gossypium hirsutum
ttcttgcgtccgcccacgcgtccgggagaagtactgggacatccagagcttggaatacttgggtctaaacgccattggtttgaagggtcaaagtcctgcatttttagctcgtctaaagaatctgaaactcttgtatcttggatattacaactcctacgacggaggaattcctcacgagtttggatcattgagtcaactccaactcctcgacatggcagcctgcaacctcaccggcgagattcctgtgagcttgagcaatttgaaacacttgcacacgttgttccttcagcagaacaatctgacgggccgtattcctcctcaactctccggtttgatcagcttgaaatcgcttgatctttccataaacgagctgacaggggagatacccttgagtttctctgccttgcaaaacattacactcatcaactt

SEQ ID NO: 237656 - DNA, 422 bp, Gossypium hirsutum
gtcttctgctatgctgtcatgagagaccctgattggtggaaaatccctgatgaattcgatcctgaaaggttcttagacagctctgatgagaaaatcggagagcatcaaaatggaattcaagggtcaaaactttaggttccttccattcgggagtggtcgaagaggatgcccaggagcttcacttgccatgttggtgatgcatgcagcagtagggtcgttggttcagtgctttgattgggaagtgaagggtggtgagaaagttaatttaaacccagggccagggttcggttcagaaatggctcaaccacttgtgtgctaccctattctacgttttaatcccttctaagcaacaccatatttgtgcttgaaatctgtagctgctgagcaaataaaataaatgtaaagcctgtagcttacatctt

SEQ ID NO: 237657 - DNA, 484 bp, Gossypium hirsutum
ctctagagtgcattccatagaatcaattattttgctacgatcacccttattgttgctcagaagcgacaccaaactcgtttctttcccgagggaaagtgggatgggggtccccactggtaatatttcacctggcacagttgttgacactaaaattgtgcatcctttcgagtttgacttctatctttgtagtcactatggaagccttggtactagcaagcctacacactaccatgtcttgtgggatgagcatgggttctcttctgatcagttgcaggagcttatctacaacatgtgctttacatttgcacggtgcacaaaaccggtatctctggttccacctgtgtactatgccgaccttgttgcatatagggggcggctgtactaccaggcaatgattaaaagacaatctcccatttcaacattatcctcatcttcatcaatgacatcgtcatcatcaatgtcatctgcagcttcattccatgac

SEQ ID NO: 237658 - DNA, 465 bp, Gossypium hirsutum
  unsure (1)..(465): unsure at all n locations
tgttgtaagaagataaagggggaaaaaccaatggggtttgcttcattcgccggtcgagttttctttgcttctattttcatcctctccgcttggcaaatgttcaatgaatttggggttgatggcgggcctgcagcaaaggagttgataccaaagcttgatcttgctaagaaacatatatcatctcaactccatgtaaatttgccagatatcgaagttagacaattagtcgcaactgccatcattttgaaaggactaggtgctattctgtttgtatttggccatggattcggagccttactcctgtttgtctacttgttggttagcacaccacttctctatgacttctacaactatcgtcccaatgaaccccaatactctgttctgcttggtgatttcttgcagtgtgttgcgcaatgtggtgcattaattttctttgtggngatgaagaactcgatgccaaagagg

SEQ ID NO: 237659 - DNA, 399 bp, Gossypium hirsutum
gttccctgcactaaccatttccaaggttctgctctcaatctgctcgttgctgaccgatccaaaccctgatgaccctcttgttccggagattgctcacatgtataagactgatcgggccaagtatgaagccactgctcgtagctggacccagaagtatgccatgggatgacagtggttggtgtgtaatacctatcagctttcttatgtgttttggggaaggaagggggtgttttttcttaaagtaacttgtcattgtgctttggatatgggaaagatatggaacattctttttatttatttcgtgctttataacttgtgtgaaacccttgtttcgttcaatgtcaaagttgctgtggaaccctttgtttcgttcaatgtaacaaaaaagtctttagttct

SEQ ID NO: 237660 - DNA, 507 bp, Gossypium hirsutum
ccctttttccgcggacgcgtgggcggaattctccgatttagttttgcatggctgcgcagttgatccaatcgagttttcatccaagaggtgtgacggcacgcaaagttttccactcacaaccagtatcaccccatcacaaagaagcaagatggatagctttaggaggaagcacatgacatactcttactgctatgaccaaaccagatacaaggttgctcctctggagtgtgtaatcaatcctcgagaagctgaaagactgaagaagttcgatcctgtcacatttggaggaggcaggcgccaccatgggaaacgacaccaccacatgcaagcaagccggtctgaggctgattccatctgatggaagacgtttgaccattgttttcctctcctttccattcagcttggggatcagttttgtgtatagagagagggggaagactgcagagcacagcacatatacatatatatattgagggtgatatgagtcattatatatgttcaatgatg

SEQ ID NO: 237661 - DNA, 525 bp, Gossypium hirsutum
catgttttgaggaacataaattcactggctttattttcaaatattgaagtgaatccacgacctgatgaaaagaacgagggaggcatagttgttgagataaagctcaaagagctggatcaaaaatcagctgaagttagtacggagtggaatattgtacctggacgcgggggacgtcccacattgacttcatttcaacctggtggaactgtctcttttgagcatcgaaatctcaaagggcttaacagatctattcttggttcactgaccaccagtaactatttgaatccacaggatgatcttgccttcaagctagaatatgtacatccatatttagatggtgtttataatccacgcaaccgaacttttcgtgcaagctgcttcaacagccggaaattgagcccagttttcactggtggaccaggagttgatgaagtcccaccaatatgggttgaccgagctggtgttaaagctaacattacagagaattttacccgtcaaagtaaattcacttatggactcgtgatg

SEQ ID NO: 237662 - DNA, 471 bp, Gossypium hirsutum
ttttagctgatatgtccttcccggaagagggtttccctgtgaatctcacatcacttgaaatctcaaatggacccaaaatgtatgcatcacttgttgaatggggattaaaatagactcacctctcttcaagagctcaatatcggcggtgagggatgctcacatgtggtgtcatttccagaagaagggacaggaagaatgctgcctcctcctctcacatctatctgcattgaaaattttgagaatttggaattcatgtgctccaagggctttcaacacctcacttcgcttcacgaattggaaatcagtaattgtccaaaactcacatctcttccagaaaaggatatgcttctttcacttgagcagctacatattttcaattgcccgttgctagaagaagggtgcagtaggggtaacggtcgagagtggtccaagattgcccacataccttatgtgcgttttcagtataaaaca

SEQ ID NO: 237663 - DNA, 467 bp, Gossypium hirsutum
  unsure (1)..(467): unsure at all n locations
gtctccctttttttttttttttaataaacagtaaaatatatgtactagtaacaaagaaaacagaaaagaattcaaccaaaaaaactagttacacggaagaatctataaacccaatccaaagaaataataagatgcaaaatctcgaaatctcaatgaacaatactgcatagctaacatgtcaacctaaggtcaagcagtaggtggagctggtggggctgatgtnagttttgttgttaccaccgccgccgccaccgccattgttttcccatggtctaacagtgaacaacaccacaaataagacgatcaccagcaacagtatgatagcataacaagtccatttccgggtgtttttctggtaattcctagctgtttgaagcntctcagttcctcctctcacaaatgaattagccctattcacatggctctcgatatcatccaattgctctccttgagcctgaaccagcacc

SEQ ID NO: 237664 - DNA, 466 bp, Gossypium hirsutum
  unsure (1)..(466): unsure at all n locations
ttttcgcgtgggaaattgtataagaaatggggcggtgagttgtactcgaagcttagaaggctccagctggtgaatcagttgtggagcaataacaaggatatgagccattgtaaaggacagtgctgccattgttgcaaagttaattaggttcgtagagcaaggaaaggccctgaaggaaatgttcgggcttagctttacacctccacacccaaggcgaagaagctatggttggaaaaacagcatggcatcacttttttgaaagctttttgttcatgcctacgttacaacacaggtttagaggtaatttctggaaaattgtaggccatttaacattgtttttgtgatttatttttttgcggggttaaataacagattgtgatgacctttcataaggtggtgtaaaaatatgtatgtaaaatcttaaccggagtggattagagattntaaatataaattgttggatgta

SEQ ID NO: 237665 - DNA, 512 bp, Gossypium hirsutum
  unsure (1)..(512): unsure at all n locations
tgcttggctangagttcaatgaatttggcgtcgatggtggtccattggcgaaggttctgaggccaaagttcaacgtcttctcaaagactgtgtcgtctcacacagggttgcaagtgcctgaatttgatatcaagtatgtagttgctgctgctgtagcctttaaaggtgttgggagtattctctttacctttggcagcaccgtcggagcttatcttctggttttgcaccaactcgttcttactcccattgtttatgacttctacaatagcgacacggtacagaatgaatgtggtcccgagctcacaaggatgctcataacgcccgttgcgtacagtacaggcagaaaactaaaaggaggctagaggagcttgaacaggtgaagaccaagtactatgaaatgcttccaatcttcaagcagatgcaaactgaaaaccagcagatgaaaatggagttgaagcaaaacgagtctataattcaatatatgcaaaattgtattcaacagtttaagacta

SEQ ID NO: 237666 - DNA, 490 bp, Gossypium hirsutum
gatgatgcttgtttatgagtatttgccaaataaaaggggtgattactatctctttgacgagagcaagtctccttccttggattggactacaagatttaagataatcacaggcattgcaggaggtctcctctacctgcatgaagaggcgcctcaaaggatcattcatatagacatcaaagccagtaacatattgttggatcaacaattaaacccaaaaatctctgattttggtttggcaaggctctttcctggggatgatactcatgtaaatacttttaggatttctggcacccatggttacatggcccctgaatatgccatgcatgggtatttgtctgtgaagacagatgttttcagctatggagttgtggtcttggagatagtaagtggcagaaaaaaccatgatagccgtcttggttcagagaaggcagatctcttgaactattcatggctgctatttcaaagcggaaagatgttggatttagttgat

SEQ ID NO: 237667 - DNA, 431 bp, Gossypium hirsutum
gtgattgcgggaaacaagtatatttgggtggatttgacactgcttatgctgctgctagagcctatgatcgagcggctattaagtttcgaggtgttgatgctgatatcaatttcagtctctgtgattatgaggatgatatgaaacagacgaaggatctgagtaaggaagaattcgtgcatgttcttcgtcggcagagtactggtttttcgaggggaagctcgaaatatcgaggagtaacgttgcacaaatgcggcaggtgggaagcacggatggggcagttcctaggcaaaaggtatatttatcttgggctattcgacagtgaagtagaagcagcaagggcttatgacaaggcagctatcaaaagtaatggacgggaggcagtcaccaactttgagctgagtacatatgaaggggagatggtctttgatacc

SEQ ID NO: 237668 - DNA, 429 bp, Gossypium hirsutum
ccactcgtccgcccacgcgtccgcccacgcgtccggggtaacttgccaataggaatcttccctcgtgatgccacaaattatgaattcaatgaagagactgggaagctcactgtttttattccagcaatatgtgaagtgggatacaaggactcatctgttctgcgcttcttcaccactgtgactgggtatctggagaaaggaaagctggctgatatagagggtatgaagacaaaggtgatgatatgggtaaaagtaaccagtatcacttgtgaaggatcgaagatctatgtcacagccggaatgaagaaaagcaggaatagagaggcgtacgaggtttccagggatggagtaagtgtagataagttttaaagtggttaggatgccttggagatcctatttcttttaactattaactctgaaccttcatac

SEQ ID NO: 237669 - DNA, 492 bp, Gossypium hirsutum
  unsure (1)..(492): unsure at all n locations
ctgtcttgtgggctctgggttggcaaacaagaaaacagtcaccattcaaagtgggggcaaagaccagtctgtgctgctagcaaccaccaagactaagaagcagaacaagccttcggccttgcttcacgagtcctttatgaaaaaggagttccccaggatggccaaggcggtcaaaaaccaggtgacagacaactactacaggccagatttaacaaaagcagcccttgctaggttgagtgctgtgcacaggagtctaaaggtagccaagtctggtgttaagaagaggaacaggcaagcattgaaggttcgtggctggaagtgagctagacctttcaggttgtatgagctctgctattttcattgccccagacatttttttactccttttttgaatttgtcttatttttcatggtttgaactgagttgttgaaactttatatctagatagattntgaaacaacagagatttggagctatttagccctttaattt

SEQ ID NO: 237670 - DNA, 462 bp, Gossypium hirsutum
tttctctgagatgaaaagaaagataataggcaaagaatttatctgcatctttgatgcttttgctcatgaattggagcaaaaattaggaaagaagccggcttttctggttcaaggaaccttgtatccagacgtgattgaatcatgtcctccaccaggaagtggaagaacccattcacacacaatcaaaagtcatcataatgttggaggacttcccaaagacatgaagttaaagctcattgagccacttaaacttctcttcaaggatgaggttcgccaactcgggaggatattgaaggttcctgaaccatttttgaagcgtcatccatttcctgggcctggccttgcagttcgagtcttgggtgatgtaactgaaggcaatgccttggacattgtgcgccaggttgatgaaattttcattcaatccatcaaagatgctggtatttatgattcaatttggcaagc

SEQ ID NO: 237671 - DNA, 411 bp, Gossypium hirsutum
tctatcgcgtccgatcgatacttacgatgatcaccgaatggccatggcattctctctagccgcatgtgctgaggttccagttaccatcaaggatcctggttgtacccggaaaaccttccctgattactttgaagttctcgctagagttacgaagcattgaatgacttactttagagaaagcaagaaaagcacgagagagagaggtttgtaccaccgtccttaaaaatcataggacgaaaggcaatcaaacctcgtcttcgatgttccatctcgtaatctaataattccgcaatcggcagctcgggtttattaccgtttcttcctagataatttatttttctacttgtaatgagtgagtagttggtctttggtcgctgtcatgaagactgttatgttaaacaatatttgctc

SEQ ID NO: 237672 - DNA, 369 bp, Gossypium hirsutum
caaagctcaaagccgctcggatggtgctattcttgaggagaggaggtccaaattaccagaggggcctcgcgaaaatgcgggcacttggagaggaaatcggaatccctatcgaggtttatggtcccgaagctacgatgaccggtatttgccagcaagctatccaatatatcagtgcagctgcctaagtagtcggttcgggttcatgttcggtctctgttttttttttctccgtttcaagtgggtcattttcattagatttcccttttgccatgttactgaaacatttggaatttatttgctgaaaagtgaacatgaaatcttaggcataaatggcatttgtcagcaataaagatcttaaaaattttctac

SEQ ID NO: 237673 - DNA, 495 bp, Gossypium hirsutum
ttgtacaagactctattcatcaggcctcccaagaacacctactcatttaacgagctcatcgccctgtgggagaagttgattggcaaaacccttgagaaaacatatgttcctgaggaccaacttctcaaacagatccaagagtctccaatcccaatcaatattatgttggccatcagtcactcaatctttgtcaatggtgattgcaccaacttcgagatcgatccatcattcggatacgaagcttctgagctctaccctcaagtgaaatacaccactgtggaagaaggcctcagtcgttttgtttgagaaagctagaaatcaaatcagatcattgttgttattaaactgataccagtaataattcaaaaactgtcactgagagatttgtgcagaggacttggggattctgtgtgtatgcatgtgtgtgtttatgtcataaatttctcgttactatcattcaacataatgccaaacatgctattcttcttgtgtcgt

SEQ ID NO: 237674 - DNA, 377 bp, Gossypium hirsutum
ccttagtgtccgctcctgttcaaccctgctgctctctcatccaaggtattgctgatcttgaagctgccggttgcctttgcacggcaatcaaagctaatattttgggcatcaaccttaatgtcccactttccctcagcttgcttcttaatgtctgctcaaagaaagtaccctctggcttccaatgtcgctaaatcagttctctaaattctttctctgcttagtgctgcgtggttttgatgttcttaaggtctagtttgcagtgatcaatgttttcttggtaactggttgtttaatttacgttgttgtagtgttgtttccttttggattgatactgaataaatgtaacactatatgaaaaagaagtttaatttctttgg

SEQ ID NO: 237675 - DNA, 394 bp, Gossypium hirsutum
ctctcaagaatatggactctgttttttatcctatcctctgtttttctgttaacaggatttgagacagtgacctacatgttacagggggcagttaagcatgaagactttgatgggcatagagggaccattggagctggtgatctacaatggatgactgctgggagaggcattgtgcactcagagatgcctgcagcacaaggaacccaaaagggtctacagttatggatcaatctctcgtccaaatataagatgattgagccaaggtatcaagaaatatcaagtaaggacattgcagaagctacaaaagatgggatcaaagttagagttatagctggtgaggctttaggaactaagtcagcagtttataccagaaccccaacaatgtacttggact

SEQ ID NO: 237676 - DNA, 243 bp, Gossypium hirsutum
cctactcgtccgccaaaacttagctgttagagttggagaatcaagccaaaaaccaaagtatttggcaattaaattgctgtaccagggaggccaaacagagattgtagccattgatgtagctcaggttggttcttcaaattggaatttcatgaaaagaaaccatggggcagtgtgggatacaagtagggctccaaatggtgcattgcagtttagatttgtggtaacatctggatatgatgggaa

SEQ ID NO: 237677 - DNA, 328 bp, Gossypium hirsutum
gtatcttttacgagctcagatggcttgcagacactctcctccaccaacataaaagcttctgcttctgatgtttcaaactggacaaagatggaggttctgttggaagccaaggaaacaaatcgcaattcaaggctgcaactaacaacatcgaaaaatggtgtggtatggtttgatcaagtttcagctatgcctttggacacttacaaggggcatggtttccgaaatgagcttgttgaaatgcttgcagatatcaaacctcgctttattagatttccaggtggctgttttgtggaaggtgaatggttaagaaatgcttttcgcttggaaa

SEQ ID NO: 237678 - DNA, 369 bp, Gossypium hirsutum
gaaaatttggatgcctctgaactatttcccacttcagatgaaaagaatgaagatgaatatggtgaagcatcatggatcaaggttaatattggacaaagtggtttctacagggtaaaatatggagatgaactcgatgcacgactcaggaaagctataaagaaaggcttcttgtcagtaactgataaatacggcatcctcgatgacagatatgctctttgtgtggcatgtgaacaatcattatcatctttgcttttgttaatggatgtatacagaaaagagagcgattacatcattttatcgaaagttttcgatgtttgctataatgttctggaggtcttgagagatgctatcccagaattaacaaatgca

SEQ ID NO: 237679 - DNA, 435 bp, Gossypium hirsutum
cttaattaaacgagcaaaacgaaagcttcgtttttcttccaaaacccatattgaaccaagtgctgagtctagaatggagtgggttcgaggggatagggttgggtgtggcagttttggcactgttaatttggtggcatctaaggagttttcaaaatctccttcaatggcggtaaaatcttgtgaagctatgggttccgtttccctcaagaaggagaagcaagtgcttgatcaacttgggatttgcccgcaagttattcgctgttttggcgatgattatacggttgagaagggtgagaagttgtataatttgttcttggagtatgctaataaaggaagcctggctgatcatgttaagaaaagcggcggaaacttgattgaatccgatgttagaagatatgcgagatcgatacttaaagggctaagctttgttcatgc

SEQ ID NO: 237680 - DNA, 471 bp, Gossypium hirsutum
cttactcgtccgcagatagtagcaggggctggggctggagttgctgtttcattcctagcttgccccaccgagttgatcaaatgcagattacaggcccagagtgcattggcacattctggctcagctagtgtggcagtgaagtatggagggccaatggatgtagctaggcatgttctcagatcagagggtggcgtaagggggctcttcaagggattggttcccaccttagctcgcgaggttccaggaaatgctgctatgtttggtgtgtatgaagcactgaagcagtacatggctgaaggaccagacactagtaaattaggaagagggtctttgatcgtggcaggaggcttggccggagcttcattctggatctttgtttacccagttgatgtcatcaagagtgtggtccaggtggatgactacagaaaccccaagtacactggcttcatgaatgcatttaataggatatta

SEQ ID NO: 237681 - DNA, 422 bp, Gossypium hirsutum
ttttgaatatggcacttgaagctctgaattcacctaccatgcctacacctttcaccaacaaatacgacgacatcgacaattggaagaaaggcaaacgttcaaagcgactacggaccgactcccctactacccccaccaccgaagaagagtatcttgctctctgcctcatcatgctagctcgtggctccccccaaggcgctgctcatcatcatcctcactcttcctcctcatctgctcatcctcttcatttgaacttgtcatataagtgcagcgtctgcgacaaggctttcccttcttatcaagctctgggtgggcacaaagccagccaccgtaaaccctccaccgcccaaaacccatctataaccactgaaaccaacgccgccggcagtagcgggaggggtaggtcccataagtgtaccatt

SEQ ID NO: 237682 - DNA, 485 bp, Gossypium hirsutum
tttttcattttcaatgcatctgtggcacttggagtgcctgttaacaggcttgtacaagctgcagactcggtctcggtatgcttatcaaaaggtttaggtgctccagttggatccgtcattgttgggtccaaaagctttattagcaaggctagaagacttaggaaaactttaggtggtgggatgaggcagcttggtttcatttgtgctgctgcttttgttgctttaaaagaaaatgttgcaaagctcgagggtgatcacaagaaggctaaggtgttagcagaggggctaaatcaaattaaaggtctaagagtcaatgttgctgcagtggaaacaaatatcatattttttgacatagtggagggatctaaaatcacagcagagaagctatacaagaagttagaggaacatggtgtgcttgtgatgctggaaggcccactcaggatgagaattgtcctccaccaccaaatatcatcaagcgatgtgct

SEQ ID NO: 237683 - DNA, 381 bp, Gossypium hirsutum
ttgttgttatagcttaccgacggttaaagatcaagactatctggtaaggggttcgttccctgttgttgaaacagagggagctgctgagtttgaatcttcatttactgtttcaattggtagcacgccactaagcgtggtgaactcatcggcggacttggtggttgaggggattttccgagctgctaatagctatactgacttctgcttagtgcatggaaaaggagatccctacatatcgagtcttgaactaaggccttttaatgattcagggtatttgaatgataaatcatccaatattttgaaagtggttaatagaactgatctaggaggctttggagagaccaggtacccagaagacagatatgacagaatttggaaacc

SEQ ID NO: 237684 - DNA, 438 bp, Gossypium hirsutum
ctgtacgcgtgggcggacgcgtgggctagcacaagaagcaaaatccgtctcctctgtttcttcccctttttttcaatgttatgttaattttcctgttacataaaagttagcaatcatggctgagaataatggaaatcatggagtagttttgaatgtgaacgcggaagccaatcagaatccgcctccatcaacctccaaaaccaaagattccgacgtcggtttcactgttcccttcatgcagaagctgatggctgaggtgttgggcacatatttcttgatatttgctggttgtgcatcagtggtggtgaatgtaaacaatgagaaagttgtatcactgactgggatttccatagtttggggattggccgtcatggtgttggtttattcagtgggtcatatctccggtgctcatttcaatcctgcagtcaccattgcttt

SEQ ID NO: 237685 - DNA, 477 bp, Gossypium hirsutum
tgatgggaaagatcttcacatatctgtgactatgccttccattgaggtcggaaccatagggggcggaactcaacttgcatcacagtctgcatgcctggatttgcttggagtaaagggcgctagtaaagaactagcaggcgcaaactcaaggctcttggcaaagatcgtggccggctccgtcctggcgggggaactttccttaatggctgcaatagccagtggtcagcttgtccagagtcacatgaaatacaaccggtccaccaaagatgtatccaaagttggatcataacaaggtataaagattatgttggagttgtaagtagcattaatcggcatggttggagggtacgaatcttttagccatatggcagaatcaccctccaagatatttggtccttttattgtgtccacactgtgaattcttaattgcccctttcttttagtttctgcatgtgtgtgtagttttgctttatgaac

SEQ ID NO: 237686 - DNA, 461 bp, Gossypium hirsutum
cccacgcgtccggtttgcattttcattgtttgtagtgtagttttcttgtggtgcaagaaacaaaatgcaagagaagggaacccaatccagaatagagaaatagcaacaccagtaacatcacaaggggtgtcgccatggttttctggtgcagaactcgaaagccttcctcatcagtccctcgtccaagctaccaaggttcattttggttcaagacctgatttcaagaaaacactactagacttaaaagaatcagatgttggagttcttggcgtgtggaccgaggaagatgcggcacgatgttgcgaaaatttgtgcgtctggattggcacagaacctgcactttgagtccattagcttcactttataatgaacatgtatatgttatttgccgaatgcaagacatgattatttactatagtaatgtgtaattccatcattgtataaacacaagcactgcgatc

SEQ ID NO: 237687 - DNA, 267 bp, Gossypium hirsutum
tccttcgcgtccgcccacgcgtccgacggtcaagggaagcatcatgagcttaaggtgaaggactcaaagacccttctctttggtgaaaagcctgtcacagttttcggtatcagaaaccctgaggaaatcccatgggctgaggctggagctgagtatgttgttgagtctactggtgtttttactgacaaggacaatgctgctgctcacttgaagggtggcgcgaagaaggttatcatttctgctcccagtaaggatgctcccatgttt

SEQ ID NO: 237688 - DNA, 272 bp, Gossypium hirsutum
  unsure (1)..(272): unsure at all n locations
atcntgggttgtaccgtcattgagatgtttaatggtagacctccttggggtgaacttgaagggcctcaagctttgttcaaagttctgaacaaaaccccgcctgtaccagaagcattatctccagaaggaaaggattttctacgttgttgctttcaaagaaatcccgccgggcggccatccgcaactacgctacttgagcatccttttgtacgaaattcggctgatcaaaatggacaagccctcatgcaggccttttctagaatggatctaac

SEQ ID NO: 237689 - DNA, 396 bp, Gossypium hirsutum
  unsure (1)..(396): unsure at all n locations
atttttaccagactgcaaactctgatattgcgccaagagaatccacagctcgaggacaatgctgtcgagagtatttcaaagttttgtcacgatctgcaggacctggacctcagcaaaagtttcaagcttagtgatcgctccttgtatgcattggctcgcggttgtcctaaccttaaaaagcttaacatcagtggctgcacatcattcagcgatgaagctctcgcgtatttgactaatttttgtcgaaaactaaaaatattaaatctgtgcggatgtgttaaagctgcaactgaccatgcactgcaggctattggacgaaactgcaatatgttgcaatctttgaatctgggatggtgtgacaatgttnggtgatctcggagtcatgagtttagcata

SEQ ID NO: 237690 - DNA, 409 bp, Gossypium hirsutum
attcagggatcttccacaagaagaagtgtgagaagaggcgcattcgagtttacatggaggggtgctttgatctcatgcattatggccatgccaatgcgttgaggcaagctaaggctttgggagatgaattggtggttggggttgtaagtgatgaggagattattgccaataaaggtcctcctgttctgcctatggaagagaggctggcacttgttagtggattaaagtgggtggatcaagtaatagcaaatgccccctatgcaattactgagcaattcatgaacagtctgttcaatgagcataagattgactatataatacacggtgatgatccttgccttctccctgatggatctgatgcttatgccttggcaaagaaagccggccgctacaagcagattaaacgcac

SEQ ID NO: 237691 - DNA, 361 bp, Gossypium hirsutum
tgcttaatcatgaactgcactgttggagtggtcagaactcgcctcgaggggccgaaacagtgttctattcatgtattgccatcagaaatgggtcagaaccttaaagctttgttagaatctgaagttggttgtgatataacttttcaggttggggatgaggcatttaaagcacataagttgatccttgctgctcgctcacctgtttttagagcacagttttttgggcttgttggggatcctaacattgataaagtagttgtgaaagatgttgagccttctgtcttcaaggcaatgctcttgtttatttactctgacaagtttccagatatacaagagattacaggctctgggtctacgtgta

SEQ ID NO: 237692 - DNA, 381 bp, Gossypium hirsutum
gatttattcaaaactcatccaatgaatctactaagtgagaggacccttaagggtgctttttatggcaactataaaccacgcactgatattcccatggttgtcgacaaatatttgaacaaggagctggggctggatatggacaagttcatcacacactctgtgccttttgccgatattaacaaggcattcgactacatgctccagggtataggtctgagatgcatgattcatttggatgcttaaggaaatgttgctgctgtatatttgcccatccaaggatcaaaactctaatgttttgtcctactatgtgttatattatgtgcctacttaagctacctttcccggttatcaagagtgcctatatagaactctctctctctc

SEQ ID NO: 237693 - DNA, 338 bp, Gossypium hirsutum
ctttctcgtccgtggatgggagccatgatagtggcttgcactcttccagtgacattggtgcatttccctcaatggggcagcatgttcttcccaccatccaaagatgtcgtcaaatccaccgaagaacattactactcttcggagtggaatgaggacgaaaagaaaaagggtatgcactcggctagtctcaagttcgccgagaacagccggtcggaacgtggaaagcgcgtggcctcagcaccaaccccgcctaatacaaccccttcccatgtttaagtaaatcatattaagtgttttcctttttcttgttgaataataagaaggttttcacttttttt

SEQ ID NO: 237694 - DNA, 513 bp, Gossypium hirsutum
  unsure (1)..(513): unsure at all n locations
tttacgcgtccgcaaaattcacacgctgccttgaaaccatttcatactctcgaatgacatctcaaaccacgcgagctccctcataaggagcgtctccaaaaagaatacaatcatctacaaaaacaaataatttattgaaaaacgttccctaccaattgtcacacccctcatcaacccattctgatttgcttctttgataagagtagaaaatccctcagcacagatgagaaaaagataaggactgagagggtctctctgtctgccttttgaaggcaaaaaccactctctatttgacccattaagattcaccgaatatgatatggaacaaacacatctcataatcagtactatccaatcagcatgaaaacccagtttagttatcattcccgctaaaaaatctcattcaacccgatcatacgctntacttttatcgagtttaagcgcanaattccctttcttgccacttttcttcatcttaagagaatgaaggacctcataagcaaaaagcacatg

SEQ ID NO: 237695 - DNA, 354 bp, Gossypium hirsutum
tttttattcagggtcatacaatgaagttagttgaggttgaaggatctcatgtggttcagaacttatatgattctcttgatgttcatgtcggccaatctttagctgtcttagtaacgttgaatcagccaccaaaggattactacattgctgcatcaacaagattttcgaggaccgttctcactgcaactgcaatgttgcactacgcaaactcacaaaccccggtttctggacccctgcctgcagctcctgcattccaatttcattggtcaatgcagcaggcaaggacatataggtggaatttgacatctaatgcagccaggcctaatccccagggttcattccattatgggaaga

SEQ ID NO: 237696 - DNA, 391 bp, Gossypium hirsutum
ctgtctcgtgggggaaactttgtttacgagattgggcttctctttcttccttctttatttcttggtctcttgcgatctctctttatctttctctccggtggacaattatctcgtcaattgtggcgccttgctggatgccaccgtagataatcgtcgcttcgtctccgactcgtccgattcttctcactcgcatctctcttcacctcaattgttctcactctgtgctggaactttgctgccgggtctgcctccgatctatcataccgccagggttttcaaggcaccgtctaaatatgttttcgatgtcaaggatccagggacacacatgttacgtctccattttcaccgattcagttcaccacaattgaatcttgctgactctaaatttcac

SEQ ID NO: 237697 - DNA, 417 bp, Gossypium hirsutum
ccttgttgtatttcactctgggattgaagtatatggagcggagtatggctttggagcacacgagtaccctacaactggggtgttcgaagtagaaccaagaagttgtcctggtttcatattcagacgatcggtattgttgggcagcaccgacatgtctcgttcagaatttcggttatttatggaagaactttcgcaaaaataccgtggggacacgtatcatttggttgctaggaattgcaaccatttcaccgatgacgtgtgcatgcagctcactggaaaacatattcctgggtgggtaaataggttggctcgattaggttcgttttgcaattgtttacttccagaaagcattcagattccagcagtttggcatgttcctgatcgtccagcattttccgacgatgagagatcgaattc

SEQ ID NO: 237698 - DNA, 435 bp, Gossypium hirsutum
tatgtctcaaccaccacggaattcccatattgggattttaaacaaacaaaactgagagagcttctcccctgccaattcttcatttcttcatttatacacttgctctaatctctcaaacaatggattcttcatcatcatcatcatcttcaggtccctcacctctcgatctcatgtcggctttagtcaaggccaaaatggacccttccaacgcttcctccgactctgctgctcaagtaaccaccgtccttttcgagaacagagagttcgttatgattttaactacctccattgctgtgctcatcggctgcgtcgtcattttgatctggcgtagatccgcttctcaaaagcctaaacaaatccagcttcctcttaagccttcgatcattaaagaaccagaacttgaagttgacgatggaaagaaaaaaaagtcaccat

SEQ ID NO: 237699 - DNA, 473 bp, Gossypium hirsutum
gtttttctcacactatttgcattcaagtgcatgtgtgcatcagctatttaccttgctagagggaatcatgagagtaagagcatgaacaaaatctacggttttgagggcgaggtcaggtccaagctgagtgagacatttgtggaactctttgcggaagtattctgttatttgcctttggctcatgtaataaatcaaaaggtctttgtcgttcatggaggccttttcagtgttgatggggtgaaactctctgacattagagcaatagatcgattttgtgagcctcctgaggaagggttgatgtgtgaattgctttggagtgatccacaaccttacccaggacgagggcctagcaagaggggagtaggtctttcttttggtgcagatgtgacaaggagatttttgcaggataacaatctagatttagtagtgcgatctcatgaagtaaaagatgaaggttatgagattgagcatga

SEQ ID NO: 237700 - DNA, 424 bp, Gossypium hirsutum
gctgttcattactggagtagctctcagcaggcttaaactcaatcctgcaacaaagggtcatccagtctggtatgatggaagacgagaggttcatatacacccttcttctatcaacagtagcttgaaatcctttcaacatctctttcttgtcttccttgaaaaggttgaaaccaacaaagtatttctgcgagatactaccatcatatctcccttctctattttgctgtttggtggcttaataaacattcaacaccagtctggattggttgttatagatggatggctgaagctgacagcgcctgctcaaactgcagtattgtgcaaggaacttagatctgctcttcattcaattttgaaggagctaattagaaagccagagaatgctacgatcgtagataatgaggtagtcaagtctatgatacat

SEQ ID NO: 237701 - DNA, 377 bp, Gossypium hirsutum
ttatttgtgaagaatcccggggttttagtagggaagtttaagagattagccattttgaaggagtttggtgatgaatcgcctgatcttggaatcggagaccgtgaatctgatcatgatttcatgtcaatttgcaaggaggggtacatggtgcaccctagcaaatcagcatcaccagtaccgcttgatcgcctaaagagccgcattatcttccacgatggtcgctttgtccaacgtccggatccactcaatgcctggctaacctacctttggctgccatttggcttcatcctatccattattcgtgtctacttcaatctacctttacccgagcgtatcgtacgctacacttacgagatgctcggcattcacctcgtgat

SEQ ID NO: 237702 - DNA, 408 bp, Gossypium hirsutum
ttctctcgtccgcccacgcgtccgcccacgcgtccggttttcaccatggattccatccaaggccttccttcaggtggtgccgcaactgtagctacctccgttatgccagcttctctccatgattttcttgaagtcgtctttcaggacaacgaaaacaccctgcaatcctggcatcttgatggttatgatttttgggttgttggtttcggctccggacggtggaatccacataaacgaaaaacttacaatctagtcgatgctcttacgagacacactacccaggtttatccaaattcttggacagccgtattgatctccatggacaaccaaggtatgtggaacctgaggtctgcagcatggggaagacaatatcttgggcaacaattttacttgagagtctttgatcct

SEQ ID NO: 237703 - DNA, 410 bp, Gossypium hirsutum
cgtttagtttcttcaatgaatggcaaccgtagcagcgccagagcaccaccatcaccaccaccatccggcgtcgctagaggaagtccgtacgctttggataggagacctccagttttgggtcgacgagtcctaccttaactcttgctttgctcatacctgcgagctagtctcgataaaaattatacgcaacaagatcactggacttcccgagggttatggatttgtggagtttgtttctcatgcagcagcggaaaggatattgcagacatacaatgggacaccaatgcctggaactgaacaaatgttcaggttaaattgggcttcatttggtgcaggagaaagacataatgaccctggccccgatcattctatttttgtaggggatttggcgcctgatgttacagattatc

SEQ ID NO: 237704 - DNA, 454 bp, Gossypium hirsutum
tcctctcgtccgatctgtacgaagaggttgacatcatcagcaaaggcggaaactacggttggcgtgtttacgagggtccatatcgttttaatccaacatcatcacctggagggaacacatctgcaaattccattaaccccattttcccggttatgggatacaatcactccgaagtaaacaagaaaataggatcagcctcaattataggaggctacttttaccggtccaacattgatccttgtatgtatggaaggtacctgtatgcagacttgtattcaggtgcaatatgggcagcaactgaagacccggaaaacagtggcaacttttcaacgagcacaattcgttttggttgtgcaagagactctcctttacaatgcagcagtgtgccaggaagtgaccttccagcattgggttatattttctcatttggtcaggacaatagcaaagacatcta

SEQ ID NO: 237705 - DNA, 380 bp, Gossypium hirsutum
tgtgatgccaccttcaccgggaacaccgtgtcctccaccaccacctccggcacaacaaacatgccccatagacactctcaagctaggtgcatgtgtggacgtgttgggtggcttagtacacatcggcataggtagcagcgccaaagacacttgctgccctgtactacaagggctgttggatttagacgctgccatttgtctctgtactacgatcaaagccaaccttttgaatatcaatattataatccccatagctcttcaggtcctcatcgactgtggcaaaactccacctccagggttccaatgtccagcacaatgatgaaaaacataaaaaccccatgtttttttttctttcgaagtaacaaatattttcatgtctt

SEQ ID NO: 237706 - DNA, 333 bp, Gossypium hirsutum
gcttgtggtgtcgaaagatcgtattcgtattcggaatcggtgtcggagccgatgaagaaactcacgaaactgccagtgtagctgtgaatcctacgaatgcgcaatcagttaccgccactttaaaaatctttattgtttactactccatgtatggtcacgtggagaaactggccaagcggatgaagaaaggggtcgacggcgtggaaggggtagaagcggttctttatcgggttcccgagacgctcccggctgatgtgctggaccatatgaaggtgccgtcgaaaaaccccgaggttccagagattaaagcggcggaattggcgcaggcggatg

SEQ ID NO: 237707 - DNA, 427 bp, Gossypium hirsutum
cccacgcgtccgccttcaccactgaaccttcaactgctcccttcactcctcctccggagtcggtacacttgaccacaccatcctcgcccgaggtgccatttgctcagttccttggccctaacctccattatggagaggctggacagagattcccaatataccagtatgaatttcagtcctatcaacttcatcctgggagccccattgggcaactgatctcaccaagctcaggaatctcaggttctggcacctcatctcctttccctgatggtgattttgcttctggtttacgttttcctgagttccgaatgggtgaccctcccaagctcttgaaccttgataagctttccaaccgtgaatggggatcaagtcatggttctggaactttaaccccagatgctacaacgtccaccccccgcaatggtct

SEQ ID NO: 237708 - DNA, 368 bp, Gossypium hirsutum
cccacgtttattgtattttgttgaaaagattattaaagccaaacttgtcatgaactttgctataattatgcaaggggcaagcattctgtatgaaggtggtgaagatcttgaagaggatatggtagtgatttatgctgcagaccttgagaaagcattatctgagcttacttctccaggtactagcggtagtgtgcataccgaagaggatctgctacaggagttctcatgcagtatcaatatcaagcatagggaagactttgacgaagagaaggaacctgatggaatgcttctctccggatgggtagaagctcctgttgatacggacaataataagcctattggaaatgacgaaagtacatccaatgctt

SEQ ID NO: 237709 - DNA, 403 bp, Gossypium hirsutum
cccacgtttccttccacgcgtccgctgctttgggagctgagattattggaactttcgtacttgtctacactgttctctcagccaccgaccccaagagaagtgctcgtgactcccacgtccctgtattggctccccttccaatagggatcgcagtgttcatggttcacttggctaccatccccatcaccggtactggtattaaccctgcaaggagttccggtgctgctgtaatctacaacaactacaaagcctgggatgaccactgcattttctgggttggtccatttgttggagcacttgcagcagctatatatcatcagtacatccttagagcagcagctatcaaagctttgggatccttccgcagcaaccccaccaactaaaaaaaaaatcaacccaaata

SEQ ID NO: 237710 - DNA, 440 bp, Gossypium hirsutum
cgcagattcttttgtcctgttatccttacctgaacaacgccacggccaaacctgaagacgactgctgtaacccgatcagacaaaccgtcgccaaagatcttccttgcctttgcaacctctataacgaccctaatacacttgcttccttcaacgtcactgtcccggaagctctcaggatctctcgtgaatgcggggtcagtactgatctcagcgcttgcaacgccacttctcccacctctgctccatccccgccaggacaatctggaggtgctgacaggatagcattgactggagttatcaccttattcttagtattggtctctatagcaccgtattaaaagtgatatttctttatttggaatagtcccgtcagagtgaataatacagagatgcttcagactaggcaccccagtttgaatatctctagagattttaactgt

SEQ ID NO: 237711 - DNA, 485 bp, Gossypium hirsutum
gaactgtttactacggacattgagacaaagagattttaggagcaaagttttcgattgccgtgaagcaccggacatgacggttcaatgctacctagagagaattttccggtataccaaggccggaccgtcggtttatgttgtggcatatgtatatatcgatcggttttgtgaggcaaatcctgggtttcggattactgctcggaatgtgcataggcttctcattacgaccatgatggtggcttctaagtatgttgaagacatgaattataggaattcatactttgcacgagtgggtggattgacaacaaaagaattgaacaaattggaggttgaattattgttttggatgggttacaagttgcatgtaaatgtgagtgtgtttgagagttattgtagtcacttggagagggaagtgagcattggaggaggataccacattgaaaggaccataagatgtgctgaggaaatcaaatcaagacaaagag

SEQ ID NO: 237712 - DNA, 397 bp, Gossypium hirsutum
tttacgtttccgcccacgcgtccgcaaggatttttggtggcaaagaaacttctgcaaacacaaatagagtagttggaacttatggatatatgtcgcctgagtatgcactagacggccttttctcattcaaatcagatgtatttagcttcggtgttgtcgtaatagagatcatcagcgggaagaggaacaccggattttatcagcctgaacagtcattgagccttctaggttatgcatggcatatgtggaaaacaggcaaggcaatggatttactggaccaggcactgcgtgagagttgcaaagcagacgagctgctaaagtgtctaaacgtaggactgctgtgcgtacaagaagaccccggtgatcgtcccaccatgtcacaggtagttttcatgct

SEQ ID NO: 237713 - DNA, 462 bp, Gossypium hirsutum
gtgttgttactcgaagggtgtttcgttaaatatgataacacgactttcctgggggtggaggacaagacggtggtggtgaaaaaatgtgggccgtcgatttcgtcttactcggaagcattgggtcggcgtgatgcggtgttgggttacttgggagcaagtgatggtacctacaagccgtttcgggtaagcggttcaggggatgtacaaggtgtagctcagtgtgtaggggatttgagtccgagcgagtgccaagattgcttatcagacgcgatcggaaggctcaaaaccgactgtggggctgccaaatggggtgacatgtacttagccaagtgctacgcgcggtactcagaaggtggagaccactcccacggccaaaaagatacaaataacaatgatgaagagattgacaagactctggcaattctaattggactcattgctgcagttgctttgatcatactc

SEQ ID NO: 237714 - DNA, 443 bp, Gossypium hirsutum
gtttgcttgtgtgtagtgaaagattctgctaactacttggatcacatcaatgggaagaaacatcaaagagctttaggcatgtccatgcgagtagaacgggcatcccttaaacaggttcaagagcgatttgagcaattaaaaaagcgaaaacctcctggaagcttcacagagcaagatcttgatgaacggatcatcaaacagcaggaagaagaggaagagcgaaagcgccaacgacgagaaagaaagaaagagaaaaagaaagagaaggccgcagaagaggaacctgaaattgatcctgatgtggcagctatgatggggtttggtgggttcggatcatctaaaaaatgatcgcatttgtttatgtatgattacatattgttttatttgactctagttattcaggcttttggtggttgactgacttgtaaggtttcccggctcag

SEQ ID NO: 237715 - DNA, 401 bp, Gossypium hirsutum
acaacatgaggccaatcggttgctttccacaaattctaactagttttccatcagctaaaaaggactccgtcggttgtgcaaagccgtataatcgattagctcaacgtttcaacgccgagttgaagaatgcattggctcgacttaggattgagtttcctttagctacaattgtttatgtagacctctactctgctctatactctttatacactcacccgaccaaaaatggatttgaacgtcctcttgttgcttgttgtggttatggaggtaagtacaactatggcagagatgcagcatgtggagaaacaattaatgttaatggaaaaaacattatggtgggatcatgtaaagacccatcagttcgagtgagttgggatggagttcatttcactgaagctgca

SEQ ID NO: 237716 - DNA, 352 bp, Gossypium hirsutum
ttatcttgagcggctgcccttttttttttttttttagaagaaacacaaaataatgagtgatattaatttgtagataaagatagtattacatagtcgcaaaaagcgacctagtacacaacgcacaactctaaaattaggataactcctctgctatccctacggatggattttaaacatccatttttattctgtagctatcattattttggcttccactagctgatgaacattccatgccaaaatttcacttgacgctgctgcagtcagtgctagggctgatcttgtaagggatgttgacaccgcacttgcctggtagtccgcttgcaaggccaaagttgatgccaggaatgcc

SEQ ID NO: 237717 - DNA, 472 bp, Gossypium hirsutum
ctcatttttttgctttaagcacgacacttgcatctgcagacaacaatctctctgctgctgtagtgggatcccaaacgttaccacttcagaaagataaccaaccgaatcttccacacatatcagttggtcgggagaattggggagattccaatatggcagatggcagccctaggactgatacgtcaacagacgacactgaagagaagaatcaaaggtttggaagaggtcaaacaaatgctatcgtggcttccgattctagtgacagatcaaaagataaaacagaccagaagacattgcgtaggctagctcaaaatcgggaggctgcaagaaaaagccggttaaggaagaaggcgtatgtgcaacagctagagagtagccgactgaaactgactcaactcgagcaggaactgcagcgagctcgtcagcagggtatattcatttcaagcacgggagatcaatctcattcgatgag

SEQ ID NO: 237718 - DNA, 406 bp, Gossypium hirsutum
ctctggcaggttgaagttccacaaaatcgaggaaacaaaagaatgcaacgatggcatttcgtgtcaacatctgtaatgatagtccggttatggtcttcttggcttgttcgtgaaaccactgaaaaaatcgactttgctcccgagggtgttaccaagcttcatcttgatgctcctgatgataaattaatggagttcatcccaaaatttgatgtgattgttatttcttccggccactggtttgccaaacaatctgtctatgtcttgaacaacgagattgtgggaggacaattatggtggccaaatggatctcctcccatgaaagtcaacaatgtcgacgcatttggaatatctgtagggacaattttcttcgcaatttttacacaccctaattacaccggtctgacta

SEQ ID NO: 237719 - DNA, 421 bp, Gossypium hirsutum
tctgtctcaattggcttcaatctcattgagcatgttctttgccacatagtgaggaaagagaggcctggtgctgttttggttttcatgactggttgggatgacataaattctctaaaaggtcagcttcaggctcatcctctcctaggtgaccctagcaaggtgttgttgcttgcatgccatggttccatgcctagctctgagcagaggttaatatttgaaaagccagaagatggagtgaggaaaatagttctagctactaatatggctgagactagcatcaccatcaatgatgtggtttttgtggttgattgtggaaaggcaaaagaaacatcctatgatgcattaaataatactccttgtttgcttccatcttggatatcaaaggctgctgcccggcaaagaaggggaagagctggtcgtg

SEQ ID NO: 237720 - DNA, 348 bp, Gossypium hirsutum
gtcttttctgtctctgccttttcatttcctttctctcaatcttacctccgttgattgctttttgccaatcggcgtgagatcttgctgatctgtcgccggaactttcatttagattccggcgatcgcatcgatcttttttttttcttttaatctttatgctacaatgaatcccgaatatgactacctgttcaagcttctgcttattggagattctggtgttggaaaatcttgtcttcttttgagatttgctgatgattcatatgtagaaagctacataagcaccattggggttgatttttgggatactgctggacaagaacggtttaagacaatcactagtagctacta

SEQ ID NO: 237721 - DNA, 212 bp, Gossypium hirsutum
ctttttggtgtgaatggtaatgatccaatttttgatgcttttggtggacaagggatgcatgttgcagctccattttcttcagatgttgcacctccgccagtattgatgccagttcctggtgctggtccattggggccctttgttccagcttcacctgaacttgcaatgcaagtgttcagagagcgaggtgctcctccttttgaaggcaatgg

SEQ ID NO: 237722 - DNA, 477 bp, Gossypium hirsutum
ccctctcgtccgcaaccccactttgtcatcaaccacttttggatttccatggcgttactctattctttatgttgtgtctcattttcggcactggtgatagtcgcattgtacgtctccccggtcgtttcgacgtcgaggcgagtgttaggagattacggtaagctcgaaaacgggttcagggtcacgctcaagcatgttgattcaagcaagaatttaaccaaatgggagcggatccaacgtgggataaagcgtgggaatcacaggctgcagaggttgaacgccatggttttagcagccagcggtgattcggctgaggttcaagcgcctatcgttgctgggaacggcgagtttctaatggacttatcgatagggactccaccgaatagttactctgcgatcttggacaccggaagtgatttaatatggactcaatgcaagccttgtacccaatgtttcgatcaatctacccccatcttc

SEQ ID NO: 237723 - DNA, 475 bp, Gossypium hirsutum
atttttcactatgtcatctatctgaccaggtcttgggcctcactcctcactcagatgctactctcataaccattttgcttcagctcaatgatgtccatggtcttcaagtaaggaaagatgggaattgggttcccgttaaaccactcccaaatgccttcattctcaacgttggagacatcttagagattttaacgaacgggacgtaccgtagcattgaacatcgtgcgacagtgaacccaaaaaaaggaaaggctctcgtttgcgacattcatcggagtgggggctgggggagaaatagggcctgcacccagcttggtgtcaaaacaaaagtctgccatgtttaggagggtgaaagttgaagaatactacaaagggatgttctctcgtaagcttcaggggaaatcttatcttgattacatgaaaatagaacaggattaaggacgatgtgttgtggtagttatatataataagggaa

SEQ ID NO: 237724 - DNA, 462 bp, Gossypium hirsutum
cccattcttccggtggattcttataagtggagcactggggggtatctgcatttttggtccctttatttcttttcaagcatatggctactacaatatgtgtctaggacgttcttccgatgaaatgaggccttggtgtaaagcacgaataccattgctatacaattacattcaaagtcattattggggagtgggattcttgagatacttcagatttaaacaactgccaaactttctattggcatctccaatactgtctttggcagtttgttcaatcatctattatgcgaagtcaagacctgaaatagttcgatcattgggttttcaagcttcagttgaggagaaacgtatcatggcagtaattttttcttctcagaaaccacaaagatcaaacgacacccaattgtcagagaaatattcttctaggaagcaacgaaatcataatcttaaatcgaggaagaaaat

SEQ ID NO: 237725 - DNA, 439 bp, Gossypium hirsutum
ctaaaaaaactcaaaaaaaagtaaacccagtgttagagagaggaagtgttaattgaatgctctctaaaacttcacctgatatggcctcctttccttgttccagggtgaggagtgggctttgtgtctggccaggtaataggcaactttgcattagaaagggtcttgtgtatggctttatgcacttactatcaattccctttaaaaccttgtgtggagcgagtcgatctcttagggttgcagagttttgcagtgtttccaatatgtcttcctcattacaaattgaattggtgtcatgtcttggagacaactatgcatatcttttacatgatgtggacacaggcacagttggagttgttgatccttcagaagctgtgccaattattgatgctttaagtcgaagaaactggaacttgacttatatattgaatacccaccacca

SEQ ID NO: 237726 - DNA, 328 bp, Gossypium hirsutum
gtattgctttcaaaattgaaggaccttcaattgttggtattatagagcatgcatgatgatggatgcttggtgtttgcttactacaaggatggtgctgttgacccaacatttttgtactttgcatatgcattgaaggaggtcaagtgctgaggtttgaagcaaagaaaaaaaaagtggttgctgaagaatttagtcctttttattattgcttttgtctcttgttttcagtactctgctaaagacataaattatttgtggtttttgatgtttttgttttaattgtttgttgttttatcatggaatggtttctattttttatgggttggct

SEQ ID NO: 237727 - DNA, 445 bp, Gossypium hirsutum
gggttttccaagctgagtttcccaaaccattggaaaggaaagaatggtttgtactgcgtcggtctgtcgagaagggggctatatggggcggctagcgatgcactcaacatagccgatgatatcaactcaacttagtaactaaatggttcctttgatccaccaatattacatattctataccaagcagaacacacatattagttcacttgtgactatgtacttatgcatgcatgcatctatgcacggatgtatgtgttgaaagatggatgcatgatatagccaaaccgaggtggtttagggtttaagctatctgtatgaataatcatttccttagtaaatccaagagagttatagtactgtagtgctattgtatggaatatatcacatacaggagaactgtagaaagctccagacccatggggtggcatcgactttcaaatgaata

SEQ ID NO: 237728 - DNA, 373 bp, Gossypium hirsutum
cttattttttactttgtgttataatgcactcaaatgacaacagtgatcttttatcatcaatgtcacggttatctgctgaagcaaagaaggatcaagctgttcagcatgcacttgcagttcggtcagcagtgacttcaggaaattatgtcttgttctttagattatacaaaacggcacctaacttgaactcctgccttatggacctttatgttgagaaaatgagatataaggctgtaagctgtatgtctcgttcttatcgtcctcaagtacctgtttcgtacattgctcaggtgctgggcttcagcagtggtgtgcttacaaatgaaagaagtgacgagaaagagtcggatggattggaggactgtgttgactg

SEQ ID NO: 237729 - DNA, 506 bp, Gossypium hirsutum
cccacgtttccgcccacgcgtccgcccacgcgtccggccacgctttcgctctcttcttaggtctgctgtatcttagttcttgattaattagccaatcacagcagccatgtctctcctcaatgatctcatcaacctcaacctcagcgacaccactgaaaagatcatagccgaatacatatggatcggtggatctggtatggatctgagaagcaaagcaaggactttgcctggaccagtgacggacccttcaaaactcccgaagtggaactacgatggttccagtaccaatcaagcacctggagatgacagtgaggtcattctttatcctcaagctatattcaaggatccatttagaaaaggaaacaacatcttggtgatgtgcgatgcttacacaccagccggcgaacccattcctaccaacaagagatttaatgcggccaagatctttagccaccctgatgttgttgctgaggagccttggtatggtattgagcaagagtacactc

SEQ ID NO: 237730 - DNA, 415 bp, Gossypium hirsutum
cccttgtttccgcccacgcgtccggtggggtttacggtggaattctccgagcaaagggtttagcaaaaagaattgctgttttctcttttcatttcacaacttcctttcctataaacactgcaaattttcaccagttttaatatggattccaatgtcaaagaactagccaccgaagttctcccttatatccgagtttacaaagacggctcagttgaccgattagtcgattcacccatcgtcccaccttgtaatgaagaccctgaaactggggtctcatctaaagacatcgttgtttcaaaaagcccaccgatttcagctagaatttacttacctaaacacgtcgaacaatccccaaaagttcctctgttagtctattttcatggcggaggcttttgctttgaatcagcgttctctt

SEQ ID NO: 237731 - DNA, 405 bp, Gossypium hirsutum
gagtttttatgtacaaatgtgatggctgcaatgactacggtaaggtatggaagcgccttaccatacgatgggctcctaacattcttacaattgccttgaaaagatttcagagcggccgatttggaaaactcaacaaaagagtcagctttcctgagacgttagatcttagcccgtacatgagtgagagtgaagatggggatgattccaatatttacaaactttatgcggttgttgtccatgtggatatgttgaatgcatccttttttggtcattacatctgctataccaaagatttctctggaaactggtacagaattgatgactgtaaggttgcgagggctgaattggaagaggtactttctcagggagcatatatgcttttatatagcagggtctctgcacgcc

SEQ ID NO: 237732 - DNA, 481 bp, Gossypium hirsutum
ttattcgcccgcccacgcgtccggacactcgggggggatttttaaacaaaagagcgcctttagttcctccctcttctcgaacaagatgagtaccatgaaattttgccgtgaatgcaacaacattctctacccaaaagaagacagggaacagaagattctcctctatgcctgccgtaactgcgatcatcaggaggtggctgaaaacaactgtgtgtatagaaacgaagtgcatcactctgctggtgaacgcactcaaatattgcaggatgtggctgccgatccaactcttcctcggactaaagctgtaatttgcgcaaattgcaaacatggagaagctgtcttcttccaggcaactgctagaggggaggaaggtatgacactgttttttgtttgctgtaatcctaactgcggacatcggtggagagattgagatccgagatatcaaagcttgcttgatttaatgtctccttttttctttttt

SEQ ID NO: 237733 - DNA, 447 bp, Gossypium hirsutum
cccatgcttccgcccacgcgtccgggtaagaccacgctgtggcactttgtcgtccaagagggtatacgtacagaaggtttaagagctgcccgtgctacaagagaaaacaaaagttctcttcttgaggatgtttcccccgatatggaagagcactaccataaccttggtcttgaggtggtttcacatctaagtagtgaactcgaaaatgtcaagaaagcagcatctatcgatgcagaaaccttaacaggaacggttgctaaacttggccatggactcctaaaagcacgagatttcttgaagtcggagatgaaaaatacgaacgaacaaagtggtttccatgaagcattaaagagttttgtgcagaatgcagaagttgatgtcacgtcattgctcgaggaagagaagagaataatggcattagtaaagagcactggtgattattttcat

SEQ ID NO: 237734 - DNA, 411 bp, Gossypium hirsutum
tgtttctttcttcaattcagagaacaaaattgttggccgattttattgaagccttcaggctgcattgaggcgctgcttctggaagggtcaaattgcgggaagtggatttggtgtagctcagttttcactatatgcttcttatgctcttggtctttgggatgcttcctggcttgtgaagcatgggatctctgatttttcaaagacaatccgagtctttatggttctcatggtttccgccaatggtgcagctgaaacattaaccctggctcctgacttcatcaagggaggtcgagccatgcggtcggtctttgatcttcttgaccgtaaaactgagatagagcctgatgaccctgatgccacacaagttccagaccgccttcggggagaagttgaactaaagcatattgactt

SEQ ID NO: 237735 - DNA, 456 bp, Gossypium hirsutum
ttccctctctggagtctgacgaatggcggatcgggagtggttgtgacccaaagagtaccccatggtcgtatcacaatggtggatcgtggccaacactattgtggcagttcacattggcctgtataaaaatggggaagccagaattggcacaaaaagcagttgctttggtagaggaaaggctagcagtggatcagtggcctgaatactatgacacaagaagtggaaggttcataggcaaacaatcccggctctaccagacatggacagttgccagtttccttacctcaaagatgctattgcagaatccggagaaggcatcccttttattctgggaggaggactacgagcttctggagacgtgtgtttgtgggcttagcaaaaatggtcgaaggaagtgttcacgccttggtcctagatcgtaatgacggttcattaattactttgggtgggtaggat

SEQ ID NO: 237736 - DNA, 290 bp, Gossypium hirsutum
tttcccatctgcatcaatggttaagtattcccaggagcccatttacccagccaagtcggccaaggctaggggaaacaacttgcgtgttcacttcaagaacacccatgagactgcctccgccatcaggggcatgaagctcaagagggccaaggtgttcctcgagcacgtccttgcgcacactgaggctgttcccttccgtcgcttcaatggcggagttggtcgcactgctcaggccaaggcctacaacacttgcacccaagcccgctggcccaagaagtccgtggagttcc

SEQ ID NO: 237737 - DNA, 447 bp, Gossypium hirsutum
ttgtgaaaatgaaggagaaaaaaaaggtgatcctgggattcctttttttgtgacgagatttcaaaagcgtgtagggatagggttttaattaattaagcttgtaataaaacatgttagaatagttagcgtgttagcatggtgtgcttgtgttgtgttaacatatcctatccaaggatgtaaaccagtggatcgtatggacataatgggaggttctgcatcagctagtccatgctcatcatatcacccaagccctggttcatcttccttcccaagtccagcctcatcccattacacggccaatgccaatggcaatgctgatgccaattccctaatcccttggctcaaaaacctttcttctggttcatcttcagcttcatccaagctcgctcaccatctcttcatcgcaggtggttccataagtgctcctgtcactccaccacttagctc

SEQ ID NO: 237738 - DNA, 380 bp, Gossypium hirsutum
gtggttcaaggctgctgggcaagacacgatagtctgagctggagcagagtatggaagtggcagctcaagagattgggctgccaagggcccaatgttactgggcgtgaaagcagttatcgccaagagctttgagagaatccatcgaagtaatctggttggtatgggaatcattcctctttgtttcaagcctggtgaggacgctgattttttaggattaactggccatgaacgttattcaattgaccttccaaataaaatcagtgagataaggcccagccaagatgttacagtcacaactgacactggcaagtcgttcacgtgtactgttcgcttcgatactgaggtggaattggcatactttgatcacggtggcattcttc

SEQ ID NO: 237739 - DNA, 406 bp, Gossypium hirsutum
ctctttcgtccggaataaaatggatgaaatactggggcatcttgagaagctgaaggagatcatcagtgcatcaggatatcaagaaaaagttccatctcacattcaagaagagaatgcaacaaagctggcaaaacttctccaagaatttgagtttttcaagaaagaaagcgatcgtttagaatctgaatcgcagcatcaaaagtaaggttaacccctcccttttgagtttctcgattcgaatgataatttgaatggcattacactatctcttcttttttatgattgttttgttactgtctaaacctcaccaatacttttgtttatttttaacatttgatgcttgccatgtttgtcatacaagagtttacccagctagttaatcgtatgaaaatttcccactttgctt

SEQ ID NO: 237740 - DNA, 444 bp, Gossypium hirsutum
tttgttgtctccttgacaaccttcttctacctggggggtttatgtttcggatatgcggccttcgggaacaacacgccaggaaacctcttgacaggattcggattttacgagccatattggctggttgatttagccaatgcttgcattgttcttcaccttgtgggaggatatcagatttttggtcaaccagtgtttgcatttgcggagagatggtttatcaacaggttcccaaacagttggtttgtgaataactattatacgaacaaacaccgatggtttccttcgtttcagattaatcccctcaagatatgctttcggacagcctatgtcgcaacaacaacagccattgcaatgatgttcccatactttaaccaggttttgggagtgctgggggctttgaacttttggcctttggctatttatttttcagtggaaatgtgcatt

SEQ ID NO: 237741 - DNA, 549 bp, Gossypium hirsutum
actaacaagccctctttttacaaccatcacttccatgttgtgacagagaagaaaataaaacaatccatttctccaatgggtttgcctagaaaatccccttctttgctctctgtatctttggtttcaatcacaatctttttggggtcctttccttttgttgctacagctgcagattatactaacctggtgtttaagggctgtgctgaccagaaatttcaagacccatctgggctttacttacagaacctcaaaaatctaatgcaagatttggtttcacaatcatcacagagaactttctccaccgcagcctctggtgaagaccctaatgcaatcaatggactttatcaatgcagaggggacctatcgacaagccagtgttacagctgtgtgagcaagatcccgaaaataagtgataaagtttgtgggaaagcagtagcagccagggtccagctgagtggatgttacttaaggtacgagatatctgggttcaaacaggttccagaaacagagtttttgtacaaggtatgtgggtcgtcatcaagtggaaga

SEQ ID NO: 237742 - DNA, 437 bp, Gossypium hirsutum
tgtaatttgtctttgtacacagcactcggaggggttcgtttttcagcgtgtttaccggtgaccatcgatgtgggcacaaataatgagcagttgttgaaagatgagttctacattggacttagacaaaggagggcaaccggacaggaatatgctgacttgctacacgagttcatgagtgctgtcaagcagaactatggggaaaaagttcttatacagtttgaagattttgcaaatcataatgcttttacattgcttgcgaaatacggcacaacccaccttgtcttcaatgatgatatacaggggacggcatccgttgttcttgctggggttgtcgctgcattgaagttgattggtggtaccctagctgaccacaaattcttgttccttggtgccggggaagctgggactggtatagcagagcttatagctctcgagat

SEQ ID NO: 237743 - DNA, 415 bp, Gossypium hirsutum
aaataattcaatgttatatgaacgaaagtggagcatctgaagaagaagctcgtgaccacataaggaaactaattgatgcagcatggaagaagatgaataaagatcaaatggctaaatctcctttctcttatacgtttattgaggttgctatgaaccttgcaagaatatctttattgatgtaccaaaatggtgatggtcatgctattgaagataaagaaaccaaggatagagtgttatcattattcggtaacccaatttctttacccaaataattaagaacattggaattattttccaaactgggcgaataaaatgttagtttttggtttagtgtgccaaatcattttatgatattttaatatggtgtacaataaacttatggtagagtaaggactaccctaatacatgttttctt

SEQ ID NO: 237744 - DNA, 430 bp, Gossypium hirsutum
  unsure (1)..(430): unsure at all n locations
ttttatggctacccttaaccttaatgccatgaacaagctccagaccaagaaaccatggtcactctcattctcatttggacgtgcccttcagcagagcactctcaaggcctgngctggaaaggaggaaaacgtgaagaaagcacaagatgctttccttgttaggtgcaaggctaactcggaggccaccttgggtacatacaagggtgacgcaaagattagtgagggtgctgcagagagccttcatgttaaggactacaaatactaagaatttagtcttgtggtctgtgtatcagagaaattttctgtattgatgattttgggggttttccgtttcttctcatggaatttaggttgtgaaatcagaccgtttcttctcatggaatttaggttgtgaaatcagactcaaataagcttggggggccttagttct

SEQ ID NO: 237745 - DNA, 480 bp, Gossypium hirsutum
catatatctattgttttcaaatatatttgggttttcaacccttctctgttcaattgtttcttccattttgtttgacgatggtttgcttggtttctcgtacgggaaggcacttgcagcgatacaatgccctcggccgccgccaagttgtcggatgcattccgtacagatacaaacgtaatagtgatggaactctgagcactgacttggaggttcttgtcatctcctcacaaaaatgtcaaaaaatgatgttccctaagggcggttgggaacttgatgaatctaaagaacaagctgctttaagagagtcagttgaagaagctggagttagaggcaacgttgagtgcgaattaggcaaatgggactttatgagcaaacgctatggcacgttttatgaaggttacatgttccctttgcttgtgaaggaggaacttgccctctggcctgagcaaaatgtgcgacaacggacatggatgagtgtga

SEQ ID NO: 237746 - DNA, 340 bp, Gossypium hirsutum
ctttcttgtccgcccacgcgtccgaactgtgtctacttccaatactgttaatagcagtatggaaacccttccatttgtcttcagcttagctgctgcaatatttgcttatgcactttggttccatatcatagccaggaggttaaccggtccgagagtgtggcctctagtcggtagcctaccgtctcttttcgagaaccggaggcggatccatgattggatggctagtaaccttcgagcaactggtggcttagccacgtatcaaacatgtactattgctcttcctttcttggcttggaagcaagggctctatactgtcacttgtcaccctaaaaacattgag

SEQ ID NO: 237747 - DNA, 531 bp, Gossypium hirsutum
gtaaccggtttctttaggtccgatcccggcgttgcatagtttgatgatgagtgttgtttcggctatcatattcgccggaatcctcctttccaccgccgcagaaataaaagaaaccagatggttttggcggagaacaaaaaccccatttcaatggcttctttgtttcccactcggaacccgtccctctggccgtgtatttttctggtcatatatcttttacctttctcggttcctccatatgttccgtacaatcttctccatttttaaaaccaggaaactcaccttcttccaccttttcaacaactccattttaaccattatgtctttcatttggcttgaattctcacaatcgtttcaagtattggctattttattcaccaccctcgtttactccgccgtgtacggctaccggttctggacggcgatcgggctgagaagtgcttgtttcccttttgtccttaattgtcaaattgtgttattaagctgcaatttggtgtgtcatattggagttttaacgttacattttatgaa

SEQ ID NO: 237748 - DNA, 402 bp, Gossypium hirsutum
gtattctaactctgctatccgaaaatgtgctcgtgttcagttgatcaagaatggaaagaaaattgctgcttttgtacccaatgacggttgcttaaactacattgaggaaaatgatgaggtattgattgctggatttggacgaaaggggcatgctgtgggagatattcccggagttcggttcaaggttgttaaggtttcgggtgtgtctcttctagctcttttcaaagagaagaaggagaagccaaggtcttaaaagaatatgacttttaatggttcacttaatatttgttatttatataaaaacctagtgtttgggattttgtaatgaaggattttagatatccaaatcaaactgtgttctgtttttggtttcaaatctaaaattttgtttggtcgatcatt

SEQ ID NO: 237749 - DNA, 487 bp, Gossypium hirsutum
ttttggtgacacccaaaaaccttagctatctaaatccttttcttgctttacactctcccaacgttaaacccctcgtcttccctttcccttctcacccttccctccctcatggagtcgaacaaatgcaagatctccccatttcctttcttccccacattgttaacgccttgggaaaactctaccaccctttggttcaatggtttcgagcccaacaatcaccatccgtcgcgattctatctgatatagtgctcagttcttggactgttaacctcgcctcgcatctcaatatcccaaatatctgcttcgttcctttcaatgttgctgcagtttacttctggattagtacaccgagcttcctgttacccttttatagggaagcttttacgatgagtatgcaaagccaggggcttgttttcaactcgtttaaagagttggaaggtacaaaattgggtttaatcaaggagaaattcgctaaacattatagggt

SEQ ID NO: 237750 - DNA, 459 bp, Gossypium hirsutum
aatatatattactactctttttctacaaattcacttccacattttctgaaacttaaaaaagaaagatgggattacaaagccagctgaacgacgtgtcctcagattcgatcccgcttcttctcgtagcaataatcgctaactgcgtcggttatctccgaagactcctctttgcttccctccatttgattggccttctcccttgcccagaccagcccactaccatcgacgatgttggagtccttggctccggtctcgccagtctcatcgtactcgccgagcagctcaacttaaacaaggctttctcctacaaatactgtggcggcggggtaggaaagggctctgattgtgttgtgtgcttgtgcagcctaagagatggggagcaggtgaggaaactcgattgctgccatgtatttcataaggattgctttgatggttggcttgatcaactaaaatttaact

SEQ ID NO: 237751 - DNA, 441 bp, Gossypium hirsutum
ttattatcgcttgaaagtgcgcttaatggaaagaaattctttggtggagaaaccattggaatggtagatattgttgctagctctgttgggtatttcattagggtcactcaagaaattatggggctaaatctgctgtcagctgacaaatttccccaattattccaatggtctgaagatttcgcaaattgcagcattgttaaggaaagtttacctccaagagacaaactacttccctttgtcaaaggtctcattgccaaatatcagcaagataatgctaaggcctaagccctcccaatgaacgcctgtcacaatgattgtcgcatgcaatttgccttttttgtatttgctgcttttgtgtgtaatgagctacttgctcttattttcgagtgaaaaaataaattaactcattgtacccttaaataaaattgattattaagttat

SEQ ID NO: 237752 - DNA, 363 bp, Gossypium hirsutum
cgaaaaggcaaagcccctcttataaatcattccatattccccccccccccgccggcgatttccttaaaatattatttatttactttatcaaaaagaacccaaatcaatggcgcccgattccaagtcgagcaacgatcttttaattcacaattcctccggtctatctcctacaaacgtggatcccttcagctactcgaccagagaaaactccctttggaaacagtgtacttagatattcaagatgctacagattgatggaatgcaatccgggatatggtggttcgtggggtgcctgctatcgccattgcagcagctttttcgcttgctgtagaagtggccaactttaaggactttaatgggaca

SEQ ID NO: 237753 - DNA, 457 bp, Gossypium hirsutum
actacgcgtccgcccacgcgtccgcccacgcgtgcgatcgatgtgatgattttgaggaactagtttatctccgatggataaatgcttgtttgcggtatgagctgaggaattatcaatccccggccggtgaaacagttgctagagatttaagtagaagcttaagtccgaaatcggaggcaaaagctaaaaaactgatactcgaatatgcacataccgaaggaatgggtagcattgattttgattgcgatcaatggtcttcttcccaagcttccgaaactcaagaacttgatgatcctttgatcgagaattcatctgctacaaaaccgaccaattcgggtaaaaataagttcttcaagaatttacggagactaatacggagaaaagacggtcatcacgcggaccatgcttcatcaatgggcagacctgatcatgttgacgatcctccaacttggagttc

SEQ ID NO: 237754 - DNA, 392 bp, Gossypium hirsutum
ctaatccttaagaccaaacttaataaacaaatatgaggcaaaccttgtcttcttcctttgtcacccctctctttctctgcattttcttcttctttgtttccatttcaacctcccatggcttaaccgccaccaatgacagtctcatacgcaagacctgcaagaaatgcgcccaaagcgacccaaacctcagctacaatttctgcgtcacctctcttcaagcagctccccacagccactacgccaacgaccttcgccaactcggcaagatttccatcaccctacttggccgcaacgtaaccaacacaaggtctcacattaaggaactgttgaagaaccaaaagaagatggaccctttcgtcagatcatgcttgcacgattgctttgatctttat

SEQ ID NO: 237755 - DNA, 520 bp, Gossypium hirsutum
atttttgctacttcaataactatagcctgacacagccacgtcacttttgcaagacttgtcggcggtattggactagaggaggagctcttaggaatgtcccagtaggcggaggatgccgaagaaacaagaagaagaaaagcagtagtagctcaaaaccctcgggttctgctgagaggcaaagtggttcaaattcaatcaatactgttattccttctgaaatcactgctcacctgccacatcaaacacctcatttaccttttatggcttctttgcaaaatttttctcagtatggtataggaaatattggcttaaactttggtggaattcatggtcagataggagcaacaagtggcggtagtgagcgatctgatatggggtttcagataggaacaaactcagacatgagcaatgccattttatcagtaaggtcaggctctcatcagcagttcccattcattgagccaactaatggtttatatccattacaaagtgagtatataggggcatcaccttcaatggt

SEQ ID NO: 237756 - DNA, 433 bp, Gossypium hirsutum
ccggttgttctgctaaaggtccaagacctcggtatcctcgggtatggaaatcaaggaatagaattgggactgtctcaaaatcagcaaagcttgttagttgtgttaagcaactgtcaaatgtcaaggaggaagtttacggggctctcgactcctttattgcatgggaactaaagttccctctaattacagttaagaaagcattgaagatcctacaaaacgaacaagaatggaagagaataattcaggtgataaagtggatgttaagcaaaggtcaaggaagaagcttaaaacttttctcttctgctgtggtaaacttcattggccaggagattatgggggccctatgtttctacttcctggtttggttattacattatatgctactggagccttgaatactgtcctatcaaaggatcatcaatatgagatatgc

SEQ ID NO: 237757 - DNA, 457 bp, Gossypium hirsutum
cccattcgtccgctttcatctcttcttctcttgttttcaagctttagaaatggagacgaaacacccaaaacttgaaaaaccagaccaaatagtttggtccttagaagaagaagatgtctcagttcattcaaagtcttacacatgttctttctgcaaaaaagggttctcgaatgctcaagctcttggtggtcatatgaacatccataggaaagatagggctaaacttagggaatctttcgaagaaaacgtactttcttcagatataacactcgatcgagttcaagttcaagttcaagatcgttatctaatttcggaaatcatattagaatctagtggagagaaaaaagtttctagggatgacaatggttctggtgccagccctaaaggaaaagatggggtcggagagaattcgggatcgagtcatggttcgtcgtctcaggtagaattggatcttgag

SEQ ID NO: 237758 - DNA, 416 bp, Gossypium hirsutum
atgattatttagaaaaaccagataaatcttgtttcttacacagtgcactatatcctggagactatggaatcccaaaagaggagataattgaatattggatagaaggacttccagatgaaatggagagcagagaagaaatgaatagcagagaagaaacgaagagtaagggcaatgcttgtttggaaaggattttagacagtagcttgctacaagggaccaatggcaagaacattgtaatgatgcgcgaaattgtgagaggtatggcactgtctttgataccaaaagatcgtaggttttttgtgaaagctggtatgaaattgaatgagctaccaaatgaactagaactagaagaggctgtagatatggagaaggtttccctgatggaaaatttcatatcaaaaatacctccaaaaatg

SEQ ID NO: 237759 - DNA, 475 bp, Gossypium hirsutum
gtagttccatcccctctttcagttcttttattttgactcagtggagtcacttcctacagagcctctggaccctagtgatttaaaaccattaaatacccgttatgatgcacaaatttcagtgtttgggtccaagctccaaaagaaactggaggatgcaaaagtattcatcgtgggatctggtgctctaggttgtgagttcttaaaaaatattgctctgatgggagtttcatgtggtgaccaaggaaagctaactgtcactgatgatgatgtaattgagaagagcaacttgagcaggcagtttctcttccgggattggaatattgggcaggccaaatccacagttgctgcttctgctgctgcatcaataaattctcgtttaaacattgaagctttgcaaaaccgcgtgggtcctgaaactgaaaatgtgttcgatgacaccttctgggagaatttaaccgtgattatcaatgcattg

SEQ ID NO: 237760 - DNA, 497 bp, Gossypium hirsutum
tagtgtccgcaaagtaatttaaagccaagatcttcaaatcatcggggctgttggattttccggcaacgaggcgagtacgttgctccatgcgaaccgcttctagctcgttgccagctgattcaccttggcttcgtgtttagtgatccattccttactgagtaagtgatgaagattggatttatggattctggagattacgtattggagattgttggctaagaataagtatgaaacaacgtctttgtaatacttggctttgctattgatattgcagagaggacgagaataagccgcgaaatgcggtcagagatgggcagtgttggagattcattggaaacatgactgtaaaagcaaatttctggcaaagatgatttcgccagcggtggccaatctgaggtaatgtcagtgaggatgttaccgtaatcggctaggatcatggactcaaaatctaataacaacaaccacactgactaagtcgagccatcgagttaaaagct

SEQ ID NO: 237761 - DNA, 155 bp, Gossypium hirsutum
acggcgacttcggaaagtgtcgcgatcaaagtgattgataaggagaaggttatgaaggctggtctcattgatcaaatccagcgagaaatctctgtgatgaagcttgttaggcatccaaacatcggacagctctatgaggtcatggccaccaaaac

SEQ ID NO: 237762 - DNA, 310 bp, Gossypium hirsutum
cccactcgtccgcccacgcgtccgcccacgcgtccgcgcgcctgccgtgtttgtggaaatccccatgccatcatcaggaagtacggcctcatgtgttgcaggcagtgcttccgtagcaatgccaaggaaatcggattcatcaagtaccgttgaagaattttgtatggtgtaaagtaggaaggactttgtccctctttgagccttttgtactatgttcttatttttattttttttgaatttgaaagaacaagatgctgttttgttttggtgaattactaaagtgattgttgaactaagaatactttggggt

SEQ ID NO: 237763 - DNA, 322 bp, Gossypium hirsutum
ctactcagaccggttttccggtcagctcgtagcgacgtttggaatctggtgttagccttggttcaggcgagtatttcattgatgtgtttattggtacacctcctaaacatttctctttaatacttgatactggtagtgatcttaattggattcaatgtgttccttgttatgattgtttcgaacaaaccggcccgtattatgatccgaacgaatcgagttcgtatcggaatataagttgtcaagatcctaggtgcaatttggtttcaccccctgatcctcctctgccttgtaaaacagagaatcaaacttgtccttattatta

SEQ ID NO: 237764 - DNA, 370 bp, Gossypium hirsutum
aacgatgctcctgctttaaagttggcagacattggtatcgctggccctgatgccaccgatgccgctcgaagtgcttcagatatcgtacttactgaacctgggcttagtgtcattatcagtgcagtgctgaccagtagggctattttccaaaggatgaagaactacacgatctatgctgtttcaatcaccatccgtattgtgtttggtttcttgttcatagccttaatatggaagtttgatttcgcaccgttcatggttttaatcattgccattctaaatgatggtacaatcatgacaatttccaaggacagagtaaagccatctccacaaccagatagctggaaactcaaagagattttctctactggca

SEQ ID NO: 237765 - DNA, 369 bp, Gossypium hirsutum
cattctggttctgtgaatgtaactgctggaccttcgaacaagagcatggcatacgcggtggatgctatcctaaatggagtggagatcatgaagataagtaactggatgggtagtttcgacggtacgttgcctgcagagtcagttttgaagtgtttgccaaggaaaagaagagttggttttctgcttcctttgattgctcttgtgtgtttattgctgagcttatcagcaatcatacgtaggaggaatgaaaaggtggagtcagtgctatggtcaaaattgccaatggaggtccatgaaatttctccaaagcaaggtaaacaacaattatcaagtaaagtataaatacatggttatggatccactgggttt

SEQ ID NO: 237766 - DNA, 310 bp, Gossypium hirsutum
ggaaaataccttccaccattcaagtgtttgactcacgagcaagagaaagatgttgataaactcataactcgtttggttaccaaggaagaagcacatgttgcactgatggagctcatgaaatggagatcagaagggttagaaccactctatgctcaagcctaacacctttggcaacagaatccacaggatgctgaaactcggcttgagcattgatgaggatgctgatgccgaaggcagcaagatggaggaagttgattaagcctaacatgtttttataagatcagtagatttatcttacttttgaagcatc

SEQ ID NO: 237767 - DNA, 279 bp, Gossypium hirsutum
aacgggaatactgatgatgaatttcggagattaaaacgcaggttcgagacatggaagaaagagtacaagttgcgattgaaggaaaccaaggcaagactacataagcgtggatatgagtcagacaaaactcgaagaaaatggtgggagaagctaggttcaagatcctgattgaatcccagtttgaaatgatcatctccgttgattggagaattgttgccaaaattacctgtatcagttctcgggtacggttagctaacatttatggcaacgaacataaat

SEQ ID NO: 237768 - DNA, 406 bp, Gossypium hirsutum
ccctcgctgtccgcacaaagctctcagttcttaacgtcttctgcgtttaatataaaaatggcggcttcaactttgtgttgctcatcttctccattggtatcagacagagctaagccttcttgttccattaaagctgtaacgccattctctgtatcttttccatccaagaatccctgcatcagccgactctctcttgtaagggcacaggctgctggggataataacaaagatacgtcagtggacgtgcatgtcaacaaagacaaccaaggcacagctgttgagaagaggcctagagggctggctgtcgatgtctctccttttggtttgctggaccccttgtctcctttgagatcaatgcgtcaaatgctggacacaatggaccggatattcgaggatgccatgatat

SEQ ID NO: 237769 - DNA, 436 bp, Gossypium hirsutum
agtgcttgggtaccaaaacaattcacccataccacctaaccatatggcagttttgggtccagggaatggtctaagtgtgtggaacagatcatcaaagccattgagatttgtgctcattgcaggtcaaccgttgaatgaaccagcggttcagcatggtccttttgtgatgaacacacaagctgagattgatcaaaccattgaagactatcactacagcaaaaatgggtttgaaatggctaagcactggagatcacattgagtgatgatacgatttgaaaagccctttaccaacaatgacagcatctccaaagaataaaaaaagggcaccccatatatatatatatatgtatgtatatggcattcactatctccatccatgatagagagaggtgagataggagagctgaaaaggagagatttcctactcattggagcc

SEQ ID NO: 237770 - DNA, 392 bp, Gossypium hirsutum
ccctctcgtccgaataaataataaataattaaataaaccaccacctttttctctgatcttctttattttctctttattttttctttttttttgccttttaatttctcaggttaccctgctttgtacgaatcggctgaaactcgaaggttaatatcttctttggtactttgaatgaaggatgtctactggagatgttaaaagggtttcgcgccaggatatacagttggttcaaaaccttatagaacgatgtcttcaactctacatgacgcagaaggaagttgtggaaactctgctggctcaagccaaaattgagcctggttttactgaacttgttctgcaaaagcttgaagaagagaatagagaattcttccaggcttattatctgagactga

SEQ ID NO: 237771 - DNA, 328 bp, Gossypium hirsutum
tcccacgcgtccggatgttaccatatgcttaacatgtctcatttcaaggatgattccagtccaaacgcttgggattactctgcctgggttcgcacttatgccttattcttggaggagaggctggaatgttttcgtgtcttgaagtaccttgtcacctttaccatatattaagagtattaatgttgttacaactggtactaaaaaaaataagagtaatttgatacgtaatccaaaatacttaaaaatatcgtatgaaacttatagaatccaaatagatgatgttaaaagttatatcatatgataatattgaaatgaatctatcattttc

SEQ ID NO: 237772 - DNA, 435 bp, Gossypium hirsutum
  unsure (1)..(435): unsure at all n locations
tcggacgcgtgtgctttcgcgtgggctgggataagatctcccaaggaggcttgaaacgtatcgaggagaagtatacatggaagatttactcggagagactattgaccctgaccggagtgtatggattctggaagcatgtttccaaccttgaacgccgtgagagtcgtcgttaccttgagatgttttatgctcttaagtaccgcaagctggctgaatcagttccattggcagaggagtaaatttaagctgttaaataacattgggccggtttttcttggagaataatattctgctttgtaatttcaattggagaagctcttttgtatttcatcttgtcttttccttttccttttttcgccggcattgtttgaacatggggttgtgcgcccgtcaattccagttaaatatggtgacttttgtttttcaaannaaaaa

SEQ ID NO: 237773 - DNA, 521 bp, Gossypium hirsutum
cctttctctcgtgaagctctatggatgtacctcgagacgtagtctagagcttctccttgtttatgagtacattcctaatggaaccgtggctgatcatttgcatggaaagcgatccaactctggtttgcttacctggcatgttcggttgagaatcgccttcgagacagcgaccgcattggctttcctccatggaaaggaagtcatacaccgcgatgttaaatccaacaacattctcctggacaagaatttccatgtaaaagtggctgattttggactctcacgactttttcctaatgatgtcacgcatgtctcgactgctccgcaaggcaccccgggttatgtcgacccggagtatcaccaatgctaccacctcactgagaaaagtgatgtttacagcttcggggtcgtgttggtcgagctaatttcggcgaagaaagcagtggacatcagcaggcaccgacacgacataaatttggctaacatggcaatcagcagaatccagaatcaagcattgcatgaac

SEQ ID NO: 237774 - DNA, 534 bp, Gossypium hirsutum
gtttcttgtgttattccccttcctcctcaggaggagagggaactaaaggagaccttgcaggaaataattggacaggggaagcaggttaagctggaacagaagatcgatcctagtattcttggtgggcttgtcgtagagtttgagcaaaaggtatttgacatgtccattaagactagggcacgacagatggagaggttcttgcgtgagcctatcaactttggttccctctgaaggatgttataaccgccaagtgaccatttcagtttccttgtgcaccaattgggttattccgagaactgcaaagaataattaatggtctttttgttttgcctctgttttcttctactcttgacattatatgatggaatgcatccattcacaataaaagaaactttctcggcatttattattttttatctgggaaaattactaaaataccgtttgtatggctttttgtgtatggttgctttgacttatatgatggaatgcatccattcacaataaaagaaactttctcggcatttatttttttta

SEQ ID NO: 237775 - DNA, 277 bp, Gossypium hirsutum
tctcttcgcgtccggttgaaggcatggatgtggttaaagcgattgagaaggtggggtctagcggtgggaggacttccaagcctgttgttattgctgactgtggacagctttgaaaaagggcttattgaattgtgtttccttcataatatctggtctttttaggctccttttttttatgctatgctgcttctatggctactgggttttggtgttttttaagaagttgcttgatgtagctttttcattaactgccataaataagataggctttattttc

SEQ ID NO: 237776 - DNA, 420 bp, Gossypium hirsutum
gctagattatgttaaactggtcaaggccctctgcgctgatcataatgttaaaatgctacgtgctcctagtgccaaagctctcggcgagtgggctggtttatgcaagatagattccgaggggaaagcaaggaaggtagttggctgctcttgtgtagttgtcaaggattacggtgaacaacacgaggctgtcgaggttgttcagcagcacaaggattaagcaaattagagggatggttccctttatttattattattttttttgtagaagcagttttttgttttgtgttttatggatttgatagtgaacaacagaccaatgatgttgagattttgtttctttgagaaatgttgcaatgctgagttgctgccttgctggtgtggttgattgaaatatatataaattcatgggattgtggtttt

SEQ ID NO: 237777 - DNA, 413 bp, Gossypium hirsutum
ctttctttggaggagggaagtcaactggttttgggggtatttatgactcagttgagaaggcaaagaagtatgagcctaagtaccgcttgatcaggaacggacttgataccaaggttgaaaagtctagaaagcagatgaaggaaaggaaaaacagggctaaaaaagtcagaggtgttaaaaagaccaaggctggagaggctgccaagaagaagtgagatccccatagatatgaactaagtttcatgcagcaatacaatcaagcccctacttatttacctacatttatattgattgccattgaacttcaaacgtgtaatgctgagttcattgttcttttgaatatccatttggatttttgtattatggacctactttacctgttcctgtggagattttaacttgaaatgaatttt

SEQ ID NO: 237778 - DNA, 470 bp, Gossypium hirsutum
ctttatcgtatggcgtggggcatagacatgaggcggggaatctacaactcttctggatgacaatgattgacacactatggcaaagccttgttctgttctatatacctctattcacatataaggagagcacaattgatatatggagcatgggcagtttgtggactatagcagttgttattcttgttaatatacacttggcaatggacattcggcgctgggtattcattactcatgctgcagtgtggggatcaataattatcacatatgcctgtatggtagtactggattctatacctgtcttcccaaattactggacaatctaccatctggtgaagtcacccacctattggctcaccattttgcttataataattgtggctttacttcctcgttttcttttcaaagttatacatcagattttttggccttcagatatccaaatagccagagaagccgagatattaagaaaa

SEQ ID NO: 237779 - DNA, 532 bp, Gossypium hirsutum
tttctttcgattccacttaacgcaaatagttcgagtggcgtaatcaatggctttgccgaaccaacagactgttgattatccgagcttcaagctcgttatcgtcggcgatggaggcactggaaagaccacatttgtgaagaggcatctgactggagagtttgaaaagaaatacgagccaacgatcggtgtggaggttcaccctttggacttcttcactaactgtgggaaaattcgattctactgctgggatactgccggtcaggaaaagtttggtggtcttcgagatggttactacatccatgggcaatgtgctataattatgtttgacgttactgcccgtttgacatacaagaatgttcctacctggcatcgtgatctttgcagggtgtgcgagaatattcctattgttctatgtggtaacaaggttgatgttaagaacaggcaggttaaggcaaagcaggttacattccacaggaagaagaatctgcaatactacgaaatctcagccaagagcaactaccattttgagaag

SEQ ID NO: 237780 - DNA, 482 bp, Gossypium hirsutum
gtttttccttgttggtttcatccaaaacaaaggagcggattggaacacttaagatgaacggaacagtccgctctctagcttttgctgataatgggaaccaattattgagctctggcggggatggagaagtctaccattgggacttgagaactagaacatgcatccataaggccgctgatgaaggctgcattaatggtacggctctttgtacatcaccgaatggaagaatgtttgcagctggttctgatagcgggatagtgaacatttacaatagggatgaatttttgggaggtaaaaggaaaccaatcaagactgtcgagaatctaaccaccaaagtcgattttatgaagtttaatagtgatgctcaaatactagctatctgttctaccatgaagaaaaacagtttaaaactgatgcatgtcccatcatttacagtctactctaattggcctccactgaataagaacttacagtatccccgc

SEQ ID NO: 237781 - DNA, 504 bp, Gossypium hirsutum
tttttgcgtccgtttttaaagggattcgtgctttagctcaggtaatcatggcagctgagtctcccagttcagcacgaaaagttgttgtccatttgagagcaactggggatgcccccatactaaaacaagccaaattcaagatacttggaactgacaaatttgctaaagtaattgattttttgcgtcggcaattgcaccgtgatacactgtttgtgtatgtaaacagtgccttctcaccaaacccagatgaattggtgattgatctgtatgataattttggttttgatggcaaactggtggttaattatgcctgttctatggcatggggctaactcttgatgatggatcttcagagagatgagataaaaactgtcaactctgtaactgtttcctacaattctccattatgcatattcctcatagaaccatcttctataattttcccccctttttctctgagaaacgggtgatcctgtagcagatactaacgtcttgcttctactc

SEQ ID NO: 237782 - DNA, 519 bp, Gossypium hirsutum
gatctctttgaggcaattcctggagttcccaaaagtaaggaaatgtataatccagctacatggatgttagaagtgagctctatagcagctgaagttaggctcggaattgattttgctgaacagtacaaatcatcttccttgtatcagagaaacaaggcgttagtaaatgagttaagcacaccacctccaggagctaaagacctctattttgccactcagtactcacaaaatacattgggtcaattcaaatcatgcttttggaaacaatggtggacttactggagaagtccagattacaaccttgtcagatacttcttcactttgatcactgctctcttggttggttctattttctggcaggtcggcactgaaaggagtagcgcatctgatcttacaatgatcatcggtgcaatgtatgctgcagtcgtgtttgttggaatcaataactgctcaacagttcaaccagtcatagccattgaaagaacagtgttctatcgtgaaagagctgctgggatgtac

SEQ ID NO: 237783 - DNA, 521 bp, Gossypium hirsutum
  unsure (1)..(521): unsure at all n locations
tataatttcttgctgagggaactgcaattcaagatctttttaatcctgatcgtgttcttatcggaggccgggaaaccccagaaggcaataaggctgtccaagcattgaaggaggtttatgctcattgggttcctgaggagagaattcttaccaccaatctttggtctgcagagctttccaagcttgctgccaatgctttcttggctcagaggatctcatccgtgaatgccatgtctgctctttgtgaggcaaccggggctgatgttacgcaggtctcttatgctgttggtaaggacacaaggattggacccaaatttttgaatgctagtgtcggttttggtggatcctgcttccagaaggatattctaaatcttgtttacatctgcgagtgcaatggccttcctgaggtggcagagtattggaagcaagtcattaagatcaatgactatcagaaaaaccgatttgttaaccgtgttgtttnctcgatgtttaacaccgtttcaaacaaaaagattgctatc

SEQ ID NO: 237784 - DNA, 526 bp, Gossypium hirsutum
ctttgctggaggcatgctttctgttccatatgatatgggtggcatgccaatgcgtgatgcgtcaatttctcagccaattccgataggagccttggcctcagccctagcaaatgctacaccagatcagcagagaacgatgctgggagagaatctttatcccctagttgaacagctggagcctgatgcagcagctaaagttacagggatgcttctggagatggatcagaccgaggttttgcatttgctcgagtcaccagaagctctaaaagcaaaggttgctgaagcaatggaggttcttagaactgtggctcagcagcagcaaactggtggtgctgccgctgatcaactggcttcattgtcattaagtgacaaccttgtctcctgagttttaactgcctgctagagttttctccttgaacaccatcgtagcgtggcctttgtttagattgaatcagttgcttcgtttgaagctggttatgactctatacttctacagagtgttttggaacttcataccgtctgacac

SEQ ID NO: 237785 - DNA, 528 bp, Gossypium hirsutum
  unsure (1)..(528): unsure at all n locations
ttttcgcgtccgcccacgcgtccgcttcattggcgtcccttgttcctcctacgataccgacctctatttctaccattcctggacttccaggtggtcttcaactccctacgaatggcatccctgctattgacacaattggaagtccaagcgaatgcctgttgttaaagaatatgtttgatccaaccctggagacggaaccagaatttgatttggatatcaaagaggatgttcaggaagaatgtagcaagtttggaaaattgaagcatatacacgtggacagggacagtgctggttttgtgtacttacgatttgaagatgcacaaggtgcaatcaatgcacagcggaacctacatgggagatggttcgctggaaaaatgatcaccgcaacatacatggtgccacaaacttacgaggcaaagtttccaagcagcaagagatagttggatgatgttttgttcaaccttaaaatcaaaatctcctcgcaactntaaacatctatagttaaaattagatggcattattgctact

SEQ ID NO: 237786 - DNA, 305 bp, Gossypium hirsutum
gcttctataaataaccagaactggagtggaacatgttacattacactcatagattggtgcgtttctagctgattcttatctaggaagatattggacaattgcttgtttctcgatcatctatatcattggaatgacacttttggcaatgtctgcatcggtcgatggcatgaagccattttgttattcgaaagataattgcaacccgaccgatacgcaaagcgccatgacttttctagcgctgtacctaatagcgctaggaacaggtgggattaaaccatgtgtttcgtcatacggagccgatcagt

SEQ ID NO: 237787 - DNA, 470 bp, Gossypium hirsutum
ttctcgcgtccgcgttagtccctaaatctccgagataactctcaaaatttgcccccaaatttcccatttccagcaacattctgtctctgcatctttaggttcttcgaccgtttctccttcgtagattgaaatcagatgttgagaacggtttgccttctaaaaaggaaactatcctgaaagtaggaatgtcccagatgcagaaacagtactatagggctttgctgcaaaaagatcttgaggttgtaaatgctggtggagagcgtaagcgtcttctgaacattgcaatgcagctgcgcaaatgttgtagtcacccataccttttccaaggtgctgaacctggacctccatatacaacaggagaccatcttgttaccagtgctggtaaaatggttctcttggacaaattacttccaaagctgaaggagcgtgattctagagttctgatattttcacagatgacaaggctactg

SEQ ID NO: 237788 - DNA, 259 bp, Gossypium hirsutum
ctcacgcgtccggataccattgtcggtgatggaattcatgttctacgatgtggatagagtgttgagaggtggtgggtatttgtgggtggatcgattctttagcaaagcaatggatcttgagaaaatttatgggccattgattggtaagcttggatacaagaaagtgaaatgggcagtggctaacaagacagatcctagtggtttgaaacatggtgaagtttatttgtctgctttgttacaaaagcctgtttcaaaatca

SEQ ID NO: 237789 - DNA, 497 bp, Gossypium hirsutum
  unsure (1)..(497): unsure at all n locations
ttgttggctaaaggcaaggctggtgagtctaatccggatactggtttaggattaggcgagtctggtaattggcttcctggtagtcctagagttctatctcttctatcttctgttctcgaaagatcggtacgagggaacgaaaagttattggcgggatcgaaaattaaggatgttattaccatattccatggttcaagagcaccttccttgaaccttagacagtatgtcgaacgcatcttcaagtactgtaaatgcagcaattcttgctttgtcgttgctgttatatatattgacaggttcctgcaacgaatcgacgcttaccttacttcactcagcgtgcatcgtctcttgattacgagtgtcatggtagctgcaaagtttatggatgaccagcattataacaatgcgtattacgccaaagtggggggaattagcagagaagaaatgaacagattggagatgaggtttttattcgatttggattntcaacttaatgt

SEQ ID NO: 237790 - DNA, 475 bp, Gossypium hirsutum
cccatcttccgcccacgcgtccgacggaacagtggtggcttttgctgacatgatgaggaagaaaatctccatgccagcacacttgatgtatgatggccaagatgacaatctttttgataatttctcagctgttgcacagagacttggggtttacactgccagagactatgctgatatactagagttcctggtgaacaaatggaaggtgacggagttaactggactttcagccgacgggcgtaaagctcaggattatgtgtgcggacttccaccaagaattcgaaggctggaagagagagctcaaggaagggccaaggaagcacccagggttccattcagctggatatttgatagagaagtccagctctaaggcttttttaaattttctgaagatgaaaaatggtgatttcaatttcctgcaacagaggtagaagttttcaacatgcaatttctcttttaaaattccccatgtaat

SEQ ID NO: 237791 - DNA, 474 bp, Gossypium hirsutum
agtcccgcaacagagaagacaccagcgacgccgtctgcagtggcaccatcgccggagccaaagaaagcatcttggtgtgttccaaagaaagatgttacagattccgaattgcaggcaagtttggattatgcttgtgcacatggcatagattgtagtccaatccaaccgggagggtcttgtttcgagccaaatacactatcagcacatgcagcatatgcgatgaatctctattatcaaagttctggccgggatccatcgagctgtgatttctcacaagcagccatgctttcttctagcaacccaagctataatggttgcactttccctggtgggagtacatgaaaaaggagagtagtaagtcgggcagatgaatgaagggcagtggggggcaacttttgttgttctttattttcatcaactttcagtaatggtattgagtgattggcacttcttcaagtgcgaaaaagatgaaag

SEQ ID NO: 237792 - DNA, 430 bp, Gossypium hirsutum
aagtctttcagcactcagaccatcatctccggaggggggccagtgaagatgacctttgagggaccagagatgagcactactgaatcaggacatggatgcaagtgtggatcaaactgctcttgtgatccatgcaactgttgaaaagcttgatgaaagccatagattatgaaaaaaagaaagcagcaaaaataacaggcctctgtaatgatatattgtcaaggatggatgcctgcacgggctataattatgtctctgtctgtgtcttgtgtaatagaagctttgtttgtggtgaaaataatgtataagccatttggttgggagcaaattgtccttttctccaaaggatttttgctgctcattcatggtgacttggtttatggttttatctgttgttgttaaaatcttataaaaatatatatcggttgctgct

SEQ ID NO: 237793 - DNA, 460 bp, Gossypium hirsutum
attcctcatagctttaatcaagttccttgagtgattacttgtgggtgcctgtgagtatacagcatatgctgaattctcagggaatcaaaggacctccttacagattcatccatggcaacaacaaggaaattatcaaaatgagaaaggaagctatgagcaaacctaaggccttgacgcatgatatgtttatcaaattgcagccacatacgcactcctggatcaaagaatatggtaagatggatgcatgtttctcactatgctgttaataacttgtagctttaagtaaaaaagggtcaaccctttttgttgttttctacgtgattagggaagaattttgtgtattggaacggtgttcgagctgaactggtgatttcagacgctgaattagtcaagaggttatgaaaaatagtttaaatgtttttccaaaagcgaagccatcagtttatgttagcaacctact

SEQ ID NO: 237794 - DNA, 532 bp, Gossypium hirsutum
tggttaagagaaaaacaatgatttctatgctgttggggggttgaaaaggaatgcactcaaacagagctcaggactgcttataagaaacttgccctgagatggcaccctgatcgttgctctgcctcggcaaattccaagtttgtggaacaagccaagaagaaattccaggccattcaacaagcctattctgttctgtctgacgcaaacaaaaggttcctgtacgacgtaggagtttatgacagtgatgacgacgaaaatggcatgggagactttttgaacgaaatgactgccatgatgtccagtgaaaacggagaagaaagctttgaggaattacaggaattgtttgaaaaaatgttccaggctgacattgattcattagattgtagtggtcagtcaccaacatcttgctctgcttcatcttcgtttgcgtcgtacggtgacagttcgggctccaacaaccggagttcctccgaaatgagttcaggggagaccatgccggaaaacatcgatacacgacttaatcatatctttc

SEQ ID NO: 237795 - DNA, 422 bp, Gossypium hirsutum
tgtttccacgggatcatacttgtttatgatgtaacactgagagaaacattcacaaatttgtccgatctttgggccaaagaagtggagctctattctaccaatcaagactgtgtcaagatgcttgtcggaaataaagttgatcgtgtaagtctaatgttctctttccaattcatatctgcattttatttgacatatttatagattatatttgaaacccatatatcataattgcttcttctttttaaaattttagtcggactcgaatatcaatatcgaatataggtatatgttgaatatctaaatgttcaacaattagggttgatgtccgaagtattcataggccaatctttgttttttgatagaatgcctgtaactattcgtaatccctcttcaactcttaaataagaggataatacgcttca

SEQ ID NO: 237796 - DNA, 159 bp, Gossypium hirsutum
gtcttcgactttttctgcttgagacccgcacccgagccgacggggggggtagttcaccttggcgcgggtggccttgttgtaggcatcggcccacttcgcgtagaccggagccgggaaggtcgcgcctgcaccggtcacatcctgggccgaagccatgga

SEQ ID NO: 237797 - DNA, 380 bp, Gossypium hirsutum
ttcacgcgtccgatctggaggagaacgtgggggaagggcaactgtatgatctgtttggccaagttggaactgttctttccgttagagtttgtagggatcagaataagcgatcttctctaggttatgcttacgtcaattacagcaattaccaagacgctgcacatgccaaggaaatgtttaacttcactcccattaatggaaaacctatgagaattatgttttctcaacgcgatcctattattcgtaggactggatatgccaatgtctttatcaagaacctggacccagctattgataacaaggcattgtatgacattttcgctgccttcgggaatgtactttcttgcaaggttgctactgatagaaatgggcaagcaaaa

SEQ ID NO: 237798 - DNA, 203 bp, Gossypium hirsutum
tttaatttcaattcaaacatgggtttgatgggggcttcatggtctgagaaatgtttaccatccgaaaagcgggaaaaacggagtctttgtctaaagaaatgcgttgagaaagggtggatgtatagaacctttcaacgagatagtgctttttcaactctctcaaaacggaatctattccaaacatatatgccatggttccttac

SEQ ID NO: 237799 - DNA, 321 bp, Gossypium hirsutum
tttacgcgttcgaagaaacttaccaggatgggggtattaacggcgagcgaatgtttgctatattgttggagcactataagggcaaatggcctttctggcttagtccccgtcaagcaattgtttgccctgtgtcagaaaagtctcagcaatatgcaatgcaggtccgggattggattcatgaagctggttattatgtagatgttgacatgacagatcgaaagattcagaaaaagattcgagaagctcagttggcacagtacaactttatattagttgttggtgaagaggaaatgaacactaataaggtgagtgtgccggtga

SEQ ID NO: 237800 - DNA, 403 bp, Gossypium hirsutum
tttttactgcttcagtggcacaacgtgccttgcgttatattgctgtgaagttgaagaggctattcgattctcttacacatagtaagttgtatgtttgtatggttactggtttggagcctgattctgttgatgacgctttcagatacgccagagaaatccttaagtgggattacaacgacaatagcttcatcagcaccgagttctccactactacccatattgaggcaagcacaacttcatgacccacgttttgtgtgtgcgtgtgtgctctaaatcacagaactcaattctaaagcagggcaagcacttctttctttggatttactagattttcaatatgtaagtatgtattgtatgtattgttgtaactcgaaaatcaattagaaaacactcaagcattact

SEQ ID NO: 237801 - DNA, 323 bp, Gossypium hirsutum
tttactcgtccggggaaagaagaagaagggggggggtttatgaagagaagagggaagaaagaagaggacacctcagttccagtagagaagtgcgatgagccagtagtccagccagagacgccagagaagaaaggtttcctcgagaagatcaaggagaaacttcctggacaacacaagaaagctgaagaggccagtagcccggctccagccccagcagctgagccccatcacgaagaggtgtcaaaggaaaagaagggaattttggagaaaatcaaggagaagctttctggttaccactccaaatcagatgaagaaaaagaaaa

SEQ ID NO: 237802 - DNA, 320 bp, Gossypium hirsutum
gtccgcccacgcgtccgattcaggggtcatgtgtggctcctacagcatgtttttcacctcgtttcttttcatcaaaatccaaaaaggaccgaaaacccaagaatgaaatggggaaacaagtcagtccattgcctgagcttattgccgagccaaccaatgcgcggtccatgtcgtttgtgggaacccacgagtacttggcacctgaaattatcaaaggtgagggacatggcagtgcagttgattggtggacctttgggatcttcttgtacgaactattgtttggtaaaacttctttcaaagggtctgggaaccgggcaaca

SEQ ID NO: 237803 - DNA, 221 bp, Gossypium hirsutum
ttatagcatccccaacttctgtatcagtcggaggtgtacatgcttcttcaaggagggaccgaaattcctcatttaaaatggtttgcagttgagggagaatacaatgttatggttatcgatcttcttggaccaagcctagaagatttgttcaactattgcaatcggaagtctttctttaaaaacagttttgatgcttgcagatcagttattaatcagagttt

SEQ ID NO: 237804 - DNA, 314 bp, Gossypium hirsutum
aaccaccaggctttatcagagacgtgagcagctgctgcaaccaagggcattacttcaaacccaagcttttgttctgccttagctgctgctctcacttcctttgttggaaataatggaagtggtggtggtactgcaagtgaactaggctttgcatcaagctgctacctgcagggaaaaaaacccttatccatggttaatcctcaccagcaacaaaagcagggttgcatgagaagaaagaagaaggctgtccacaagacaaccaccaccgacgacaaacgattgctgagcacccttaaaagaataggagtgaatgc

SEQ ID NO: 237805 - DNA, 346 bp, Gossypium hirsutum
tgttttttttttcgaattttggagcgaaagggggtggtaaatgcaagaaatgcacttgatcgaaggtggccgtttgtttaacggcggcggcggcgacggagggggaggagacagaaagttacgagcacaccaccaagcacttaagtgtccccgctgcgactcttccaacacgaagttttgttactacaataactacaacctctctcagccacgttatttctgcaagaactgccgtcgttactggacaaaaggaggcgtcctccgtaacgtccccgttggcggtggttgccgcaaagccaaacgctccaaaaccaaacctttttccgaaaccaccgttttcgccacc

SEQ ID NO: 237806 - DNA, 351 bp, Gossypium hirsutum
tgtttttcatttgcgtccctctagcaagcattggggtgttcaaatggagagaaacggcatgcgtaggcagcttgcaatcatgaggcaatccctgtttgatcagggacatgttgatgaacaattcgtgcagttggaggaactccaagatgatgccaaccccaatttcgtagaagaagttgtcaccttatactaccgtgattcagccagaataatccttaatatagaacaggcactggagaggaagccttttgattttagaaaattggatgcctatatgcatcagttcaaaggaagcagttcaagcattggagccaagaaggtgaaagctgagagcacactgtttagggaata

SEQ ID NO: 237807 - DNA, 310 bp, Gossypium hirsutum
ttccacgcgtccgcagtgattcagtccctgggtgaggaagagattaacggggggttcttggttcagcttgataaattgattcgtttgcttgaaaccccgatctttgcttatctaagattgcagcttcttgaacccggaagatatgtatggttgctgaaagcattgtatggtcttttgatgctacttcctcagcaaagtgccgcattcaagatactgcaaactcgtttaaaaaccgtgccatcatactccttcaatggtgatcaactcaagcatgcattatcaggcaacccatactttcatcacggtgcac

SEQ ID NO: 237808 - DNA, 391 bp, Gossypium hirsutum
tcgttcttacaagaggtgcgaagaggagtgggcgagagcagatatatatagcagtgccctctcaccaaatttccaatggttggctgtttcgagtgataagggcactgttcatatatttcaccttcgagttagagtttttgggggccattcatcttctcaatcatcttctgtccaaggtccagcattattgcatcagaattcttcaacctcacttgatgcacttatccctccaagcactggtgccaaccctagttcatccttgtcttttatgagaggggttttaccaaagtattttagttcagaatggtcatttgctcggtttcacttacctgaagatacccaattcattgcagcatttggatctcaaaacactgttgttgtggttggcatg

SEQ ID NO: 237809 - DNA, 367 bp, Gossypium hirsutum
attgcttcagtcacttggtgggcggaaagggattaaccggtttggtgatttttcagctcctctcgatgaagcattgatacatgtttcactggatttatctggccgaccgcatttaagttatgatttaaacattcccactgcaagagttggaacatatgacactcagttagtggagcattttttccagtcattagtcaatacctctggcatgacactacacataaggcagcttgctggaaaaaattcgcatcatataatcgaggcaacctttaaggcttttgctagggctcttaggcaggcaacagagtatgatccacgtcgccttgggactataccgagctaaaaggagttctatcaagatcttgat

SEQ ID NO: 237810 - DNA, 386 bp, Gossypium hirsutum
tttcacgcgtccgatttttattttcattagcggaacaataaaaaaatgccgggttctcgcattgcagtaggatctgcagctgaggctggccaagctgatgccctcaaagcagctttagctgagtttatttcaatgctcatttttgtttttgctggtgaaggctcgggcatggcttttaacaagctcactgacaatggctctacaacaccggctggccttgtagctgcatcggtggcccatgctttcgctctttttgtggccgtttctgtcggtgctaacatctcgggtgggcacgtaaaccctgccgtcactttcggtgcctttgtcggtggccacattaccttggtccgaagtattttgtattggattgctcagttgctcggatc

SEQ ID NO: 237811 - DNA, 441 bp, Gossypium hirsutum
ttccacgcgtccggcctggtatttccaacatggccaccatcgacgaggctgagcgcatattgacttcagaatctaaagttgctttgggttacttgaactctttggtgggtcctgagagtgaggagattgctgccgcatcacgactccaagatgatgtcagcttctatcaaactgtgaatcccgatgttgcgaagcttttccacctagatcctcaagttaaacgccctgcattggtcttagttaaaaaggaggctgaaaaaataagctactttgatggccagtttgttaagactgtgatatccgagtttgtattttccaacaagctttctttgattacaatttttactagggaaagtgctccttcaatttttgaaagcgatattaagaaacagattttgatgtttgctgcatcaaacatttctgagaagtatttaccatcat

SEQ ID NO: 237812 - DNA, 245 bp, Gossypium hirsutum
tttataagcttgaagagttgggggctcaagtggaggtctttgaggagatcagggtgcttgtaaaaagacgctttctttgaaggatgcaaattttgtaggttatacttacaagaatgttgagatcgtcaaggaacatcatctttcaagcattgctgaggtgatgaataaaagcattgcacctaatagaccttctgtgaaatcattgttcgacacttctggacctcctgatcccccaacaaagggga

SEQ ID NO: 237813 - DNA, 348 bp, Gossypium hirsutum
  unsure (1)..(348): unsure at all n locations
tttacgcgtncgaaaaggggaaaaatatcagtgtgaaggaaaaactcanagtgtggcgacgatctgcacattgaaattcgcttgttctcggattgacgtcgctatggtttatataacatcgtgggacgaatttgtcgagagaactgtacagttgttccgtgccgatcctgaatctacgcggtattgcatgaagtaccgacattgtgatggcaaattggttttgaaggttactgataacaaagagtgcctcaagttcaagacagatcaagcacaggacgcaaggaagatggagaaactgaacaatatattcttcactttgatggctcggggaccagatgtggacatgtc

SEQ ID NO: 237814 - DNA, 240 bp, Gossypium hirsutum
tattggactccggaaaggaaccggattggtgcggcgtttaaggatggacgggggattgagtggaacgctctaactagccagaaaactcacgccataaagctgccttgtgcgtgggtaatgacgtgtgctttttctcccacgggtcaatcagctgcctgtggtggtctcgatagtatgtgttccattttcaacttgaattctccgactgacagggatggaaacctacctgtatcaaaaaca

SEQ ID NO: 237815 - DNA, 427 bp, Gossypium hirsutum
tcctcacgcgtccgcccactcgtccgcccacgcgtccggacaatattcctgcgcctgctggaaattcacaccgttctatccaacgagaagcagctctaaccaagtttcgattgaagcgtaaggatagatgctatgagaaaaaggtccgatacgagagcagaaagaaacttgcggagcagcgacccagagtaaaaggccaatttgttcgtcaagtacaggttgatcatcctacgcagacaattcactcgatggctagttacaacatagagaagtgcatggattgaagtttacaatggatctttagaattggtcgcacttgcaatttcagccaaacactaaagattcttttgttcatatctatactcaaaattacattagtaggttataacacagttaggttactatgtacttgtaaaaatcacatttt

SEQ ID NO: 237816 - DNA, 384 bp, Gossypium hirsutum
  unsure (1)..(384): unsure at all n locations
tcccacgcgtccgtgacttatctcatttccaatcatctgccatggcaaaacttcgaagccggtccttttggtctcatctctccgatgcctttcttttctttgctgctgcctttttagctcttgtgttagtatggtccttttggtcgtatttcactccaacccctaacttcctacccacctttacccatccatcctccaactccaaaaccaatctggtcgaaagtgggttcggagttaacttaaagtccgacccgaaagaccccactttttatgacgatccggagatgagttactccatagaaaagccggtgaaggattgggatggaaaacgacagagtggttaaagcatcaccnctacgttcgccgccggggcacgtgaaagaa

SEQ ID NO: 237817 - DNA, 320 bp, Gossypium hirsutum
tcttactcattcactcctacacagtagaaaaaccctttaattttaagaaggatattttggttttatactgagaaatccaacttcttttgtatctttatctttttggtacttcaattatcaaaagagagaaaagcaagaacaaaaaaaaaaaaacatacaactaagtgaaaaaccagacaagagagaaaacaagaaaaatgggtgttctggatcatgtttcagatctgtttgactgttctcacagttccaagcacaagaaacgtaagcagttgcagacggtggaaatcaaggtgaaaatggactgcgaaggatgcgaacgg

SEQ ID NO: 237818 - DNA, 459 bp, Gossypium hirsutum
tcccacgcgtccgcccacgcgtccgcccacgcgtccgcccacgcgtccgaggcaatggccggtgtgaagccatgtgcatcgatggtactaagcgcctttgccacatccgtgggaagatgcataagaaggtttggattgctgccggtgatataatccttgttgggcttcgcgactatcaggatgataaggctgatgtgatcctcaagtacatgccagatgaagcaaggctcttaaaagcctatggtgagctcccagagaatacacgtctcaatgaaggcattgtcgatgaggaggatgaaggaggtgcagatgattatgttgagttcgaagatgaagatatagacaagatctagggttttggatttggttatgtttgatacatgtgtttaaatgttagaaagggattgcttgatgttgattggatgctgctaagaagcctgcaaatcctgggatttatcc

SEQ ID NO: 237819 - DNA, 371 bp, Gossypium hirsutum
  unsure (1)..(371): unsure at all n locations
tcccacgcgtcctcccacgcgtccggctatgacaagattcaaggatgcgatttacatgaaggtgaatgggggaaagtcggtaccattgtccattggagttatgtgcatgatggaaaggctaaaaaggcaaaggaagtagtggaagcagtagaccctgataagaatttggtcactttcagagtgatcgaaggagatctaatggaagagtataagagctttgtaatcacgattcaagtttcgcccaagagcgagggtagtggcagcgtagtgcactggactttggaatacgagaagctgcacggtgnggattgagcatcctgagactctgctgcaattcgttcaagatgtctctaaagacattgacggccacc

SEQ ID NO: 237820 - DNA, 442 bp, Gossypium hirsutum
tctagcttatactataccgatccctctggcacattttggcaatgcaatgcaaaagctataggttcgggttccgaaggtgctgatagctctttgcaagagcaatacaacaaggacttaactcttcaagaagctgaaacaattgccctgtcgattttaaagcaagtaatggaagaaaaggtgactcccaacaatgtcgatatcgctcgagtagcaccgacataccatctatacaccccgtcagaggttgaagctgtcattactcgtctatgagaacacattgtaccatgttttctgctgtaacgatgctcaagtcgggatcaaggctcgtatttgtttttggggattcaagctgtgaaaccttatgttttggtttggcactacaaactcatccatcttacatttggattgtttgattacaaaaatagaacctttaattggattt

SEQ ID NO: 237821 - DNA, 417 bp, Gossypium hirsutum
tttaaatgaagggtctgcaggcacttatattggcaatggtaatggttatggcgatcgctacaactgatgctcaaagcatttgcaacatgccagcttcaggtttgatggcatgcaaaccagcagtgaccccccccaaccctccgtcgtccacgtcaacttgctgctccgccctctcccacgctgacatgcgttgcctttgctcatataagaactccaagctcttgccttcccttggtattgacccaaaccttgccatgaaattgcctagcttgtgcaagcttcctcatcctgcaaattgttagttcctggttctccatatttgatctcaaatgtgagggaaaatcatgcttattataagcctctacttcacataattgtactgactttcgggtttttctttttcctttatttctttta

SEQ ID NO: 237822 - DNA, 477 bp, Gossypium hirsutum
tgtttgctaatggttttgtttcgtcgagagttctcgttttgtgattcattgtatttatgggagatgatgtgggctctcgaatatgatccggacttgttctctctgtatgaagaacctggatcaaatattacgaaggctgttggttctaacaaagggaaaccaaaatcgagacgtccttgtgggaagtatgagagagaaaatatgaaaattaaaagctccgatgcctccctccccatttctgttttccttgttgcaagtgtcttaaaagataagagctcgaaactactgcatgaagctcggggcctcgatgatgtagttaagattctaaatgacatgactggtaatttggatgccaagaaagcctgcattggggcaatgaaacttcataagaaatatttaaaaaaggcaaagaggacgtaatatttggtaaaccagatgaaattttccagaactcaagtcaagagataattattatta

SEQ ID NO: 237823 - DNA, 323 bp, Gossypium hirsutum
ggttaataacactgatgcagaaggtaggcttacactagcagatgctttggtttatgcttgcaaccaaggtgttgagaagataaagccgaaaactagacatcgtaaatttgtgattagagttgtaaacttggtagtttcaattgcttattttgtatagataatcagatttccatttttcaagtctggttgacttattttgcagatagttgacctggcaacactaaccggggcttgtgttgttgctcttggcccctcaatggcaggtatatacttaacatatgaatttttaaacatagttggcacttcaatataacaattttttt

SEQ ID NO: 237824 - DNA, 355 bp, Gossypium hirsutum
gaccagggcaccttttccttgctggaatggccttcatggttgccccaacctttgttctggaaccccagtccacctaatggaaccttagaatggctggcgaaaagtggatgccgggatgtaatttcatcggtttaaatgcttaatcacccatataggggatggcaaccgatttgcttgcctcctggggttatgtggcattccaagatttcactatggagtagtattttcttccattttgccctcacgtatttctgttagtagcagtaatcatacaccaatgcaactcaaaacttgggagttcttttttttttttttgaaatgtttaccttcatgcaaatgcatgcatcttaccaaa

SEQ ID NO: 237825 - DNA, 136 bp, Gossypium hirsutum
ctctagtactagtggaaccccccggccggaaggaatccgccccgagcaaaatttcactcccttttcagacctcaaaccgcaggggcctttcgaaaccatctaaggcatgctagaattgcctaccccaaagctcggc

SEQ ID NO: 237826 - DNA, 412 bp, Gossypium hirsutum
tggaggattccggaacaacccgaattcgccaccggatttcgaataaagactggcgggtaattacatgagcgttaagtctaaaaactttactaaaataaaaatggattaaagttttgggttactgatgagtattatcctataattgaggcgcaatacttgagatgagaaaactcttaccaacaagaagcaaaactactaaatttaattgagaaagagtagaaaaaatatggaactgaatgattacagcatgccaacgacttcaaacaaacaacctctaatgatttccacttacttcttgacttttctatacaatttgttgacctaaattttcaaccgtcgacgaagaaatcctttcattcattgcctaattccaatgaaattctaaagggtttccaaacacaaagtgcttaat

SEQ ID NO: 237827 - DNA, 275 bp, Gossypium hirsutum
caacacagttaaacagaccaaaagattttttatggccggtggttcaagggcccattcaactatcttctctaaaaccttcctttttcaccgcataaatgggttcaaacgcttttctttttgcttacccttttcttcctctgccggtgcttctctttcttctaaaaaaaaatgggaaacaccccgtgctttctgcatgttagagcttggtggaaatcaaatttgccaaagatgatgtggtgagggatgacccgacaaacaatgttcccgacacaatt

SEQ ID NO: 237828 - DNA, 378 bp, Gossypium hirsutum
caaccacttatataaccaacccaaagaatttttaatgcccgtggtttataaacctaatgaagccttctctacttaaaacctccctttttaaccacttaaatggtttaaacgcttttcctttttcttaacccttttcttcctctgcacgtgcttctctatcttctaacaaaaaatggaaacaacccgtggcttactccatgttagagcttggacgaatcaaaattgccaaagatcatgtggtgaaggatgacccgacaaacaatgttccggacacaattttttcgaaactgggcttgcagcttcacagaatgaataaccatcctcttgggattctcaaaaatggaatatatgaatattttgatactaatttcccaaata

SEQ ID NO: 237829 - DNA, 166 bp, Gossypium hirsutum
ctggaaggattccggaccgaggcctttatttccgggccaaaggttgtcaaaactaagggctttcttggaaaaaaggctccaggtaaaaacccacccggcttgggggttcttccccttggccttcattaaacggtggttccttacaaaaagctgttttattaaattc

SEQ ID NO: 237830 - DNA, 396 bp, Gossypium hirsutum
catcccaattttttccctgtgacttattatttaaaactgagccgtttataaaagatggtaacccaatcctaccttatccaaataacgctccctagaaagcccaacaacctttaatacgccattcacaaaccaatcacctagaaccattaaccagatctctgacatggactctaataatgactatcaaacgttgaaatctgcttatcaatgcatggaaagagcaaggaatatcaaagaggcccatgtttactcatctcttgaatacaacaaggatcagtctctgtcatctcaagtggtgaatgagtctgttgaaactggaaggaaaccagaagctgctaatgcgtctgtagtggactgaaaacgaagcactcacagaacagttcaccaagttaaggt

SEQ ID NO: 237831 - DNA, 177 bp, Gossypium hirsutum
cggaccagaattccatttggttggaaaaaaaaaattaaccggttggggtccaaccaatcctgggccttccttggtttggaagggttccaaaggattcctttcttaaattagtgaccttttaagggcaactccttactgttgttaaaattgtgaaccttattcctgtcattaaagcct

SEQ ID NO: 237832 - DNA, 110 bp, Gossypium hirsutum
tggaccaggacatttatttcgtgccaaaagatgtcaagacttagggggttgcttaaaagaaaggctccagtaaaaaacccaacggtctttgtgcttcttcccctggccct

SEQ ID NO: 237833 - DNA, 328 bp, Gossypium hirsutum
gggagctttccctgccaaaatctaaagatttcttggggggtttcccaccaaaaggggggatgggacaatttccttggctgatttgtgggaactggacacaacccaaatattagcaccgcattcttacctagcaattgtagtgggcatgaaagatcccagtttgatgcaccagtggtaaaaaaactttatctattttgggtcatgatacacgcaagctggttcaattagccactctgatatctctcatgagaattggtttagtagatattgacaaaaatgtgagaagctgtaattgcatgtttcatagccaattaatgagtgggagaaa

SEQ ID NO: 237834 - DNA, 380 bp, Gossypium hirsutum
cggaccaacccccttttcccttggtttcttcgcccccaatggttcgttcctctcttttatattctccttcccactttctctttcttttttaccttccattttctctccctttccctttttccttcccattatgaaaaaaattgctacaggtttctcaactttcaaagtcccttgccaaccctttccttttaacacccctttttaaaaccacccttttaccattcccactattggcttaacctttcttggatccacccccaaacttattcgcctttggtcctctttccaattgaaacttccgccgtcaatctggtacccgtcgtcgccgtcttcgatttcctcaaggaaaacaaattcaagtctacccccaatctgttaat

SEQ ID NO: 237835 - DNA, 273 bp, Gossypium hirsutum
ccgatcaattcacccccaacaagggtgaaatttttaaaaaatgggagggccaccaaaaaatgagaaggcatgggcataaaacttgccttggcaagagttgaacatctgaagagtagataatatgtcaaaacattgaatcttccctcttaaggcaatttaaagagtcttctgtgttgtgtgaatatcttatcttataattcaatcataacataagtagcctcactattgtgtttcaacagcctacatttacatattggttcatatgaatacaac

SEQ ID NO: 237836 - DNA, 291 bp, Gossypium hirsutum
cagattctgacagatataatggatgatgacgcaatggacactcttacagcgcccacgacagctgcttcggtgacgcaagatagtgctcatcatactaacgacactacatgacggggaactaatcacggctaagtcatagatctatagggtcacatcaaatgcatgagcgacgaagctaggtcagatcaacctacgctgatacctacgggaaggatctgctatcggcactacataacgagctctatacacgacttttataggctgtattagctatgtgctcttgatcctgct

SEQ ID NO: 237837 - DNA, 222 bp, Gossypium hirsutum
tgtaaagaaagtaggcaattatattgcaactggttttagaccttattggtgatcttataaaactcgtcaatgaaaatggaatgctactgatgaaaagctgcaacaggtctaaatgctgcatttaagctcaattgataactttaaaaccttttcttgaataaaatcatttctggcacatgagcttatacattatctgtcaaaaatgtgctccaagacttatat

SEQ ID NO: 237838 - DNA, 356 bp, Gossypium hirsutum
cctagggtcgtcgaatcttagactacttcattaaaatcttcattttgagggcaaaaagagacacacaaatggacgtgctctcatcggcaacttcaatgagaaccaaaaaaaccgatgcagtacggatttccgtagttcatctttccatacataggtccaccgtctcggagctaaccgtcacagcttgtgaagcactatgggttctttaaggtgcatgaactatggcgtacctagtgatacactatcgagactttaacacaaaagcgttatgctgtctgacagggaaccaagggataagctatcgtgcaggacctgcaactgcattgagttattgattaaagagcatcttacttaat

SEQ ID NO: 237839 - DNA, 156 bp, Gossypium hirsutum
gtgaccctaagttgttcaatatatatactatttccggcatgagcggacttttgtccttacagcatacgaagagaaagtacagtatggggcgtttatatgatggctggctatctagggaacgatgcgtttacaagcacatgccaagataaattattt

SEQ ID NO: 237840 - DNA, 147 bp, Gossypium hirsutum
agaactagtggattcgcacgacttgcagaatacgacactttagtaacactaatggatgtcatgatatcagcgaaatgagaccaattccaaaagaaggtaagcctggatcatagcccaaaatgaaaaacaaatactgccatcaatggg

SEQ ID NO: 237841 - DNA, 354 bp, Gossypium hirsutum
ggagaaaatactccaggtcgtcatgcttggatcattgctagttggaacaaccaaacctggggagcatagctaccacattaagtctttgatccagtagaatcttgattggcgtgactagtgtaactaaattccaagagaacttagtcgatagctcttactctattgacatttgccaatattgtatgactttatggcatgactaggataactagatgccgaggaaacttaattgacaggctttactctatgcatatatctaatatagggggccatatctaaaaagggccttctttaaaaaccaattggaatgaaccatttccttggcttcatttggataaggtaaaaatttaaaaa

SEQ ID NO: 237842 - DNA, 410 bp, Gossypium hirsutum
attattacgagaagggaatgatcatttggttcgaagatgatggaggtcaacgctggatattcccgttcaaatgagaaacaactgccagagtgtcgaaaatctgttgataaagagaaaaagccagtagaaaaagatgcaagcgcttctgcatttgtaaaccatgctgcaaatctcttggcacgagaacagaagaaagtggacaggagataaatctcaaaaagcacgaaagatcagtaaggatcaagttataaggtaaaccagttaccccattcttcttctgtttattcaatgatggtctggtattgctctactggatactattttggtggggaagctaaacaatatatatgtatttggtaatggcctagttggaacctatgttacctggacttggtagtgaatgttggatc

SEQ ID NO: 237843 - DNA, 383 bp, Gossypium hirsutum
tgactgtaaaaatgtgagaaaaaagaaacagaggaagctgattgtgtaggttgctatggtcgttggtggtattgcgctatttgtcgtgttttgttgcggttacatttacagtcttctacggtggtggaagaggtggatgaccgaagagaagaagcggagtacgggtagtgctagttcgggagcagatcaaagtcatggaagttcaacttcttttcgttgaagttcaacttcgctgattcagtaaattttgagaatattagacctcctgtaatggaaggcttagatacatgaatcatgagaaagacacaatcttcaaagtccagtagccttgaaagcaatggtagttcttcaaatcaaacatcacctgcatctcaatggttctc

SEQ ID NO: 237844 - DNA, 387 bp, Gossypium hirsutum
  unsure (1)..(387): unsure at all n locations
tatcaaccttatccataccacgcaacttcttttttgggccggggcccaatttcgccatacaaaccttatttttcaaaaaaaccgaccgtccctgtacaacataatagcttgattatccctgacatttcccaagttatcgaacatcaagaattaattgtgaatgccatctggnatagctgcggaagatcacaatacccatctatgctttctatctcgagaacatgctaaatctctaattccaaaagtttagagagaatcttatacctaccatcacatttaatcttggttcaaataactcaatgcataacccactaggccaaattggcactgatcatattaaaccaagtgtatacaccgtctttaagcttattggtggtgcagcttgga

SEQ ID NO: 237845 - DNA, 377 bp, Gossypium hirsutum
gggaaaaaataattctggaaacattaataatgtaaagattcaaaaattgcggcaaaacaagttaacattcatgacatgcatatacacatgacgcctaagttgcaaaaaacacagtttcaactctctaaacatagacgtatagaatcaagccagcagctccttcgcttcaaatgtgtcacctgaaaggccccgatatacagaagcagttaaaaatagtctacgacccattcaagctttttgctaaaatattatctttggaaaggaacatctcaaataattatttgtcatcctcccactatctaaactatcttaaaagctttttgacatttcactatcggaacaacatagctggccagctactatgagcatactcgggc

SEQ ID NO: 237846 - DNA, 391 bp, Gossypium hirsutum
ggaagaccaagctaccttgcaatacaacaacttcagggggaactagctgcttttcggttcttttcattccaagtgtctttacattcatacaattgaaacatcacacctattggatccccttcttcatcggattgcaatttcagattaaaagaatcaggccacgtttggttggttccctctttattcttggaagaatatcaatgcttttgtttggttggttccctcaaatgcgtaatagggattcagtgctgaatgctttgaatggccattccgatcatggccgaatagaaataaagaacattcttcccaaaatctccttcacactttctctgcaaatgcgttcaaatttgcttcttttatcacagcgttacactttcaggtttggagatat

SEQ ID NO: 237847 - DNA, 201 bp, Gossypium hirsutum
ttcactttgaacccttgcagagaagaagagaataaaaagggggtattttcttggatacccaacctaccgatttggtttttcttggaaatcgcccaggaaaaatgccacacctgggggttgaacaaccgcaaccaggcctggttccacaagcttttcttcaaacaccagctttttattaaccttgcattttaacttcttcac

SEQ ID NO: 237848 - DNA, 405 bp, Gossypium hirsutum
cagaggggtttaaaattcttttcataagtggtcccgaaaaggtctcacgaaaaccttatctacgactacattttatcggcaccaaaattaaagccttgcagtactagatcttttatttcctcttaattagccactcaaaatagatatataatgaccccttttacaggctaagattaaaggtataatcatactaaaatatccctgaagtaattagagtttaattgggagaaagaactcaatttatgtggggaggacgttgccacgtcgcaatgtccccattcgcatcatcacgatgtcatccgtcattgcaatgtcaggaagcttctcgtcatggtgccgtcatctattcggttaaaaatacgaggcacaccctataaatatccatcttaactcatatttaccata

SEQ ID NO: 237849 - DNA, 341 bp, Gossypium hirsutum
ttaacctttttggttcgaaaccagccgaaagggttcccttgaaggttggttggaaatctggtattaatgccccaaagccttttgacagagctccttgaaggaccagtttttactaagcattttatttcaatcaattctaaaacaaatcctttttgtatcatagagtaggaaaatgccctgttttttcaattacatgcacatttcaatcttgaagagaaaattcatttccctaagaaaatattttccgcctcttggagaaggctggagaggaaaggattgtaccattgctaatgttatttgaggtcaggtttgagagaatgagagggcctcagtataccatt

SEQ ID NO: 237850 - DNA, 415 bp, Gossypium hirsutum
gcatgcagattgacacaagaaaacttagtccgacaccaaaacttcaactaaactatcccagaagtgcgaccaacaaacccaatcaatctagccattccaacattaggctcgactttaagccggtaaaaatagcggctccaaaaacccaaaaaatttcaactggttcttcaactggaatatggaaggtggaaagccaccaagaatttaccaaacctttttaaaaggaaaaactttcaaaagtctttcacccaaagaaaaatatcgccaagaaaaaaacaagaaactgtcgcacctactaacgcaaatagtatggcaagcttcagtgctcaacccaatactcctgctggtttctttggaaatatccctgtttcttcaaacttcaaaatgatcagcaaaaatgaagacatcactaaac

SEQ ID NO: 237851 - DNA, 220 bp, Gossypium hirsutum
atcatgcagttcatgagacactatgatcgggatctggtccgcattatatagcttgtgaggaaaactatggatgaaatacgttagctacctcacttaagttgcacataacaaataactgatcctattgatatggaaattcttccccagttgctaactttacgcaacctggacattcattatctaggaccgattatggaattcgctgttaccactttgctga

SEQ ID NO: 237852 - DNA, 411 bp, Gossypium hirsutum
caggtgtgatccggtatttcatttcttttgctttgaatggggccgctcttgattttatgacttcaattcttttctttcctattactggtgacctttctaggtcgtctcattcgtttcattgtatgactgattactggtagatcttttaagggcaagcgtaacccggctaggtgtcattttatgtggtgatttgctttataatttatggttgagatttggattatgaattactgattttaatttaatttttaattaatcatgattaatatcgcatttcctttggtcgaagttttaatcgattagtgaaagctcccatgggatttggatgacattcccctcgattaaaccagcattcttaacctataatgaaatataggatcattattactgttttttttactggatttgcgt

SEQ ID NO: 237853 - DNA, 234 bp, Gossypium hirsutum
caggccatggttgcaagggtttgtccggccttaaatcgggaggtgctttactcggggaatatgatggatcaaaacagcgaagccatttcatcgtcctttaagaaaacggtaaagaaaaagaaacgttcatgaaaagttacatgcttcctgtagcatactgcgttctttatatcggttgtagctaaaatgttactatttactatatagacgtgcatccaaagatcaaggagtcta

SEQ ID NO: 237854 - DNA, 214 bp, Gossypium hirsutum
cgcatacgaaaccaaaggtagctcatgctgtgatagaccgccatttctaatcatacatgacgatcaatgcctaatgtgtaccgacagatggacatagagctggacagatgtatgcgcaggacacgggcggactggccactgctgctaagcactctgatggtgcattcgctaaccatccttagacagaagacagtgatcctcgtctgggcatgct

SEQ ID NO: 237855 - DNA, 250 bp, Gossypium hirsutum
ccctttactcggctaccgacatgcctcgacttatggagcgcactatctctagatctgaccctttctaagcccgatttcatacttacaagatctgattccagcatctaaacgctaccgatgccggaactcatctcgccgattcaaacttaaagggtgtcgaatttggatcagcttgtcaattatttggtctactggaaatgtcgatgttgcccaaaggtgatgcatttcagatccgataagtttggaacga

SEQ ID NO: 237856 - DNA, 203 bp, Gossypium hirsutum
ctcttacatagccataataaaaagtgcctaaacaggaattgttttaagccaagggacaattttcaaacacactaccatatgacattgcctgaaccaaccgtaatggctaagctaggtttggggtgttacaaaaggcctttgctaaagagtttgacgattgatgcattagattgagacactgattggaattccattgcccgtaa

SEQ ID NO: 237857 - DNA, 170 bp, Gossypium hirsutum
ttccaaccagagagtttaagatattgaaggttgtggtggaaatgtttatggaactattgctttttatctcggtccaaaagcttatgagtcgcaatcacctaagtggactgtttaccagccttgggcaaccaatgaagaacctggagcccctgtaaaacatggtggatttc

SEQ ID NO: 237858 - DNA, 246 bp, Gossypium hirsutum
gtagagtggtttcaaaatcaaaggtctgttcccaggctttgcagggaaccaagatgaaatgggttccagatgaagatgtatcatctggtgtctatatggtggacttgcacagtgccggaaccttgaatgctgatattgtactgaaagcctgttatataaacgaggtgacaataatgttagaaaaggctttacctattacaaggttgtaagctagacctaatatagtatcgagattcatgctactaa

SEQ ID NO: 237859 - DNA, 328 bp, Gossypium hirsutum
  unsure (1)..(328): unsure at all n locations
cagggttattggttcccgttgattaaaaattgttaaccggccggatccagccattagattccttaaccagccaaccagtttcaggaattgcagacgtcagtgtttctccttggcaaaatgcttcctgttttcagtcgttttctggcccatttggtgaccacctatttggatctgagtccatacgaacagtcaacttggctgataggaacattgcttctgctgaaactggaaatttgaatatgggaagaaaggatcttgaggatcactatggtaatggttcatctgctgatttgtctatgtaccataccattgcagatgcctnttcatg

SEQ ID NO: 237860 - DNA, 334 bp, Gossypium hirsutum
gcttacaacagagattgtcatgtcatctgtgctacgaagggctatatgacactgtctgcagacagcttatgcacctccatcataaagcgaccgtagtattgcgacagctgcaatggtcagaattgtgggcggagcaatgcttgctgctgagctgattctaggcatactatggtggaagggctgtataagacagaagagaacttgtgaacaaggtatttacgcatgatatcattgtactctgttgcatacactagtcgcgcaacgtctatattctacgagataccactctttagaatattgatatccgtcacaattgatatgtcatgcgactaaa

SEQ ID NO: 237861 - DNA, 332 bp, Gossypium hirsutum
gagatctagtctccagtttttttttttttttttggggtctttttattttttttttttttttttttctcttttcatttccatctctgaattttctttctgctctccaggcttttttttttcacttcaaacatgcatttttggttcttctaaaccttctaaagaatttcaagttcaaagggactatacagttaaggacgattaaaattttcatctaatgcatggtattcgaccctttttttttgctctgcatcaacctctgttttggttccggggattcttaattgccggatctttgctggcaatcaaattgcaatttgaaagagcaaatccta

SEQ ID NO: 237862 - DNA, 442 bp, Gossypium hirsutum
  unsure (1)..(442): unsure at all n locations
cgagggattttctagaagccccaaaggggtcaaagtaccgtaaagatgcgagaggggcttcnntttctactggaaaccaagctnnntcatcatcagctcnnctctccaaagttcctgggttcttcacttttctccatgtcgcttttccgtaccaaannaccttctcttctcgtcgcccagctttatacccctccaataacccactttatannagctctgcattctcgaaccaattggcggatcgaagcccttgttttactgggggaaactcagggttttctctcatacgccaaattttccaaaagcgtttnttggttttatnttctcaaatacccatcnagaagtttttcaagccaaaagtctttttgggttgcaagaagttcggnttttcagaccctcagattcccaaaagcagatttggttttggtccgaatcgtggtct

SEQ ID NO: 237863 - DNA, 330 bp, Gossypium hirsutum
atctatcatgatgctaaagcctggactaaggggggagcacatatgtatggctgactgaatcaacattcatggccttagatgtaccaagagcattatgatccatgtggatctgatcttaaatgtacatatatatgggctgatactgacttcagaactaaatcttcatataagatataatataatttcttctacggaattgactatcgtcaagcgaaaacatgacatgtatattccttagtgaacgtatgtatagacatttcattgtctatatatgaattcttacgcttttacactattccaaatactttagatagctaatttatgttgtac

SEQ ID NO: 237864 - DNA, 406 bp, Gossypium hirsutum
  unsure (1)..(406): unsure at all n locations
gtttaacctttttcctcaataactttcaaatggaccgttggaaccacttttaataagtttgcctttaacccttaatagtcggatcctgtacatgtaaatggtgcttgtgtgttgaaaattagtggacaaataagtaatgaaagggagtcccacccctggatatgtgcttgctgcataaagaaactactgcactttggggcactttggagccaggttttttctttttttcatttttgtcatcaagatggcctggtgttgctgtaattggccttttgaaggctgcttttgtgcatgcttgatgggatgagaatttattttttctcaaagctgatcttgggccaattttgaaagaggcatgcacggtttttcaataatattntgggttgtctttctgccatagcatgat

SEQ ID NO: 237865 - DNA, 168 bp, Gossypium hirsutum
atactttatagacatatcataatatttccccgtcgtattaaaatatttgttctcaactccttaattttctctcattagctaattattctttggaaaaaacatcatccacacctgttcataattcataatcaaatctcccaaatatcattcattatccaccaaatttaa

SEQ ID NO: 237866 - DNA, 384 bp, Gossypium hirsutum
  unsure (1)..(384): unsure at all n locations
gccaattcggaggtttttccctttccggtcttcctagaggggaatcctaatcccaatccaagggggtcgccaacgggttggggacctaagtttttctggcaatcttcttctcttcaattctagaaagaattaactttctatactattacttgcagggtttttcagtgcttcattttccacgattcagcctcaaatttgggcagcaacaacttgactccatatggataactggaacaacgctgttgaggaaagcactgatcttggaatttggagactntgttattgacaatgttgctcgtatactaaatgaaccgatctctntatgtatctggaagagggttttaactgggagtcccataaatatgactggtgggaaaacttaga

SEQ ID NO: 237867 - DNA, 320 bp, Gossypium hirsutum
ccggtagtgaggattgcgactgtagctgccggtgggcgccatactctagcattatcagatactgggcaggtctggggttggggctatggaggtgagggacagcttggtttgggttccaggatacgtatggtatcctcgcctgatcccataccttgtattgagccctcttctttggggaaagatagagcttctgcactatctcgaggtagcttgagttcatataggcagaattttagagttcctggaagttatgtgaaggggattgtctgtggagggcgacacagtgcagtaatcacagatgctggagcattgcttacatt

SEQ ID NO: 237868 - DNA, 316 bp, Gossypium hirsutum
gaagatagagccccacacattttttaggattgtcaatcatcctccccgattccaagtcttgaaattcacaatgagttgggaagaaattagtaacgcaattcaaatcttgggtgagttttctaatggacatcaagttacaagtcaagttgaaatgaatagcacagaatttaaaatcagtctgtcggtgataattactgatcctatccctgccactttggacagtgttccatcggcaatccataccatgagatttcagagcttggtttgcaggtattaagtaatgtagtcatatgatatgatgcacccaagtctacca

SEQ ID NO: 237869 - DNA, 348 bp, Gossypium hirsutum
cgagctagttttaaaatctgtcaattctattaaagattgaggcgagcctataaatatggagtggaatcacatacacctgacattctaaactatatgcgttttaagctatgatatctatgtcatacgcttacgaaaacaatgcaaaacaggcttaattgctatacttcaaaaatctaatgtatatctatcacgttccaagaccgaatcaacgaatgatgatcaaaatcttctttgtctgacaggacatactaactctgattctgctccatatcttcaacaccacattctaatgctaaaggactaattttacagactgctacaagacaaatgatcagctgttctcagatc

SEQ ID NO: 237870 - DNA, 398 bp, Gossypium hirsutum
aaaccacactcatgatgtaccacatatggtgaatgcaggtgatcaaagccaaacgattccaactggaacatggggaactgcacatctagctgttttatccaggtttcggacatggccaaagtaatcgatgctcaagggaagctaaggaaagtgaagctccctgtgaaggcagcagagctcatgctcgacgaacctggtcacgtcatctcttccgtggaagagctgaaactaactcgccgcgtcgtccctatgcgagctgaggatgaactgctggcggctaaagcttacgttttggttcctatacaaagggtgaaccgcaaagttacggatgtggatgtggcgatcatagaagctgcttgtagcggaaagaaaagggcaaaaagtggtgctaaggtttt

SEQ ID NO: 237871 - DNA, 144 bp, Gossypium hirsutum
actagttgatccaaatgctgaaataattcttcacaagcccttttttaaataccactttaattcttttacatatttgtactctggtaaacttaggcaaacaatttcaactttaacatattaaactacacatttatctattttatc

SEQ ID NO: 237872 - DNA, 212 bp, Gossypium hirsutum
ttcactagactgatcattacaaaatccatcctatgggaacccgggtcattttccttacttttcatatatacctcacactctactttccatatctcaacaacaactacacttataataccacaccataacccatccaactcatcatcaatctcattcatctctcaccacctagctaattagctatacatcttacccacatctacactccctac

SEQ ID NO: 237873 - DNA, 362 bp, Gossypium hirsutum
ttagattatcactacttaaaccatcctattggttatttgttaattttgatgcctggcactacattccttttcttacacaatgccttcctcaatcctacctatccttctagatacattccttaactattacatttcactattcatttacatcttataaaaataactcattattcactaattcatctcatcaataacaaagttccccatttgatcattctagcataaactattcctattctcatttctctcactatatccaacctataaatccttgacgttcactccttcattcacaaatacttaaaaactttactcaacagaaatgttactacatctaaaccccactttacatacccatacct

SEQ ID NO: 237874 - DNA, 215 bp, Gossypium hirsutum
actaggaactttctactttatctaattattccagaccttcgcttacaggatcagttacattgacattgacatgattcaatatctgattatccacctataaactcactgttagcatacgcctaccaacacgataactaacatactgcctccacggaaacagccctcaaggttcaccaagatcctgctatatgaagttcgatcacacctctgcatcc

SEQ ID NO: 237875 - DNA, 407 bp, Gossypium hirsutum
  unsure (1)..(407): unsure at all n locations
tcactgagggaatactatatatgtggaatggatctggtgagtggggtacggatganntgctcctgggctcttaagaaaagtcatgactattgggtcatttagctgtgnnngctgatgctaactcgtacgtcagtctcgtagtgggcttccgatctattgtcttgactcgaatctctggtcttagtgggtcatcanntcagtgctgtacctaatctcagtcgagtccatttattccagnnaggatgaaaaatctacatcatatatatgtcatgtctccaattatcaatnctcgtattggtgctttcggtttcaatgttaaattggcattgatatnnggaagtttggaaatttcccttccatttcaaatggtccttaaattaattggctanntccttaatgggatggca

SEQ ID NO: 237876 - DNA, 336 bp, Gossypium hirsutum
  unsure (1)..(336): unsure at all n locations
gcggnggcggccgcncaagaacgagnnggacccccgggcggcaggaagacggcacgagcgacggcagagananacaagacaagggcgagnagggaagagcngggacgngccgaggagaaggcggannnaagcggggggcaaaccgnggagnangcaaggcannncngggcgngccgnaggcgaaggcgaggacaaacccangaagccaagagggggnacanaggagaggagnanaaaggaagaaccgnnagnancaaaanncgcccaaaggggaaacacaagggncagcnggagncgggggggagccggccagagaccgaagccaaggggacagag

SEQ ID NO: 237877 - DNA, 232 bp, Gossypium hirsutum
  unsure (1)..(232): unsure at all n locations
gcagctngaagaagggcgcaccggagcngaagacaaganccaaaaagagaccacccnccaccaaggacaacgacgncgaggaggcaggcaaagcnnnggcaaaacncgcacnggaaagacaaggaccnnggagggggagaggacgganaccagggaaaaggggaaagccaagaagcaggacaaagaaggagacccaccagaccaacaaagaaggannnangcnggaaaacaa

SEQ ID NO: 237878 - DNA, 254 bp, Gossypium hirsutum
  unsure (1)..(254): unsure at all n locations
aaaaaagaaaanccaggaagngagncaaagcnaaaggcagcaagggnnccgnccaaccaccagggagcggggcaaccgagggcgnaagcagaagnngaaaccaccacaacnncgaggcaaggggancngaacgaagccacaggggaagccagggaagaagagcaaaanggaggannngcagaagccaaagccagcaaggagagcnccgagaaacgncaagangancnncgaacgnngggaangaaaancaagca

SEQ ID NO: 237879 - DNA, 243 bp, Gossypium hirsutum
  unsure (1)..(243): unsure at all n locations
gcacagccgaagggagagggagagagggagagggaggggcagcgaagaagccgcggagaacggcaanncacgngaagggcngccagcggagcccacgaccacgagcggacgcgaagcgaacagacccaagggacncgaacaggcaggggccgaanaagaccagaanaagccgcnncaacagggagggagacaaanangcggccngagaggaaanngcnggnaggnggnnacacgcgggncaac

SEQ ID NO: 237880 - DNA, 270 bp, Gossypium hirsutum
  unsure (1)..(270): unsure at all n locations
gcggnggcggccgcncaagaacgagggggacccccgagccgcaggaaggcggcacgagcaaagaagcaanggaaacggcggcggggaagcaaaggccngacaggccacccagaggggagagcagagaaggcgcggcagcaaaacaggagcaccagnaacagngangcggccagagacaacggaagagaaggcagaaaaagacagccncaaggcaaaacgccacgggaggaaccgagaaaaaagggaaggaggcanggagggccgagggac

SEQ ID NO: 237881 - DNA, 298 bp, Gossypium hirsutum
  unsure (1)..(298): unsure at all n locations
ggcgcaacacaaacccggcagggaagggacnanaagccaaggacaagncagcgcagaaggggggcgaacaaacagacagaggcacngagcaanaagcccacagggggcangagggggaagacgagaccggaaggagagganncaccggagagaagggcnacgggcacaagcgaggggggggaagacgaggcaccgcacgggaaagagccaaaanggcaggcaaggaaggaacaacgggaagaaccggccgggagaccaagaccagacagggangcaccaagggagaaagaacccggcg

SEQ ID NO: 237882 - DNA, 264 bp, Gossypium hirsutum
  unsure (1)..(264): unsure at all n locations
ccaaaggncagngccgaaaagggaggggcaangangggncaagccannggnaagcnagaggaccnngaaaaagagcncaacacagangcaaggagggnacgngaangggaaggnnggcaanngccagagcgaacnaagancanacaagacaanaacagggangccaaggcagnaaaaccaangggngaccgngccaangcngcnaagcncgacnncncagaggnannaccagaagagnnngagacagaangaaaggaggcagca

SEQ ID NO: 237883 - DNA, 195 bp, Gossypium hirsutum
gcgatttctgttattcgatcatctctctctttctcgggaaaaaataaaaggaaaatttcttagatctagaatctgcgatcatagatattgagatgtttctacatcttagaaatcatgatactggactcaaccgctctgtgctaatactgaactattttaactatccttaccatatgtgtaactcgctattcaagc

SEQ ID NO: 237884 - DNA, 392 bp, Gossypium hirsutum
catttaacaatgactgaagaatatgatgatgttatcgtattgggaagctatttgtttaaaatttgatgtttgtttttagtcagatatgatgcaacagaggatcaattagtgacagatgtttcacaacagaaaaggatccttaagcgtcggtgtgcatttcaacttttcgtgcttctgctcactactttcgttaccccttctcaaagtttgctgtttctcttcccgattcagcaacacccttatcaatacggtattgtgttactcgttttgcactatgtgactgccgtttcttgcagatattatctagtggagagagcaaaagatgctaatatggttgggattttggtaggaactcttggtgtggctggctaccttcacatgattcatcagat

SEQ ID NO: 237885 - DNA, 340 bp, Gossypium hirsutum
  unsure (1)..(340): unsure at all n locations
gcggnggcggccgcncgagaaccaggggcacccccgggccgcaagaaagcggcacgagaagcggggaagcacacagagacgacgggcggaggagaagaccgagangcaagagccggcnggggcaacccaggcgagggaaccacgaacaaggcacccaaagagcgcacagaagagcaacacccgcagcnggacaaggacgagaagggcaaggacagacggcgaaaagccccacccgaccgcacaaagaacaacgaacccggccaacaacgccacgccggagccacgaccagaccaccaaccgccgaagaaaaacaagcccgcnnagacaagggaaagcccg

SEQ ID NO: 237886 - DNA, 350 bp, Gossypium hirsutum
  unsure (1)..(350): unsure at all n locations
ggcaaacgcactgagngcgctgcctgcaatagatagagcaacaatgggaaacgaatcttcgacgagttacatgtctcgtcatatgtacgaaattgctcgcgagattgccagtctaatcggcgactacctatggttgaagcctgggacgactgtttacgaggaatctgatagaattagtgatttagacatagtcactttcaacttgaacagccgtaatccaacgccgaatacaggtgggatcattcaaatggctgcaactttatcattttcgacatccaagccagttcactattatacagagataagcattgccgtaccagtaagaacgattcccatgcagtttcttaaca

SEQ ID NO: 237887 - DNA, 337 bp, Gossypium hirsutum
  unsure (1)..(337): unsure at all n locations
gacccccgggcggcaggaaagcggcacgagccgcacgaggaggccggaaggagcccagaacgaggaggcgacggagnaccagaccaaccaggncccanagcccaggagccacgggagcgggcngcgaagccccngacagngcagccgagaaggcggaccacgagcagccaacggaggcggagaaaaccaacagngcgnnngaacccncnncaagganggccaaangggacccacgacacgggaaggacanggcnngcagccnaaagcaccgaggagaaagcgggcccaaagangggaaagcggcagnggccaccannaagaccaaacgcacaaacca

SEQ ID NO: 237888 - DNA, 222 bp, Gossypium hirsutum
  unsure (1)..(222): unsure at all n locations
gncccccagaacagaagccgggcaccacagagnagagcgcagcaggggancangggagcggcggcngcgagcaagcagaacagcgccgcgggaaaccaaaccggcaaggacgaaccgaggaggaacaaccgcagaaacaggcaaagcacggcggcaccccacccgacgacgacgggaaaaaagccagacccgcgcacgcaacccaacgcaaaccacaacaac

SEQ ID NO: 237889 - DNA, 258 bp, Gossypium hirsutum
aggaactctaatggttgtgatgatatcagcgaaaagggaccagattctaaaagatggtaagcttggatcatagccaaaaatgtaaaacagattctcccattaatgggtacttgttttagcttacgctcttgtgatttcttttttttgcacgaaagtgtgaaaatgagaacttgggaatttgcagatgtggttgctaaactgggtactatccacctacagggactcaaactacatgcgataaagctcttttataaactt

SEQ ID NO: 237890 - DNA, 316 bp, Gossypium hirsutum
tgaagtttacaaatacttatacccaggaatcagaagggcatgttttctgaagagcaaggcttaatatggctaccacgacttttgttcctaaatatgccttgccttatcaacaccttaattcatgaattacaagttccaggcacaagaatgctaatgcactaacctggattcacaaaaaaagcatctgtgcctacaatctcagcttaactggacctgagattaggtctgtgatcacacacatagtttatcccaaaactctcaatcagagaccccatgctgtatccctcaagtcgaagggcttcaaggatacacttga

SEQ ID NO: 237891 - DNA, 335 bp, Gossypium hirsutum
ggaattttataggcattagctcatgtttctcatgcacaagcgtatggccttattgacttttaccatttaaagagtcgaaagggtatgagtcagctggaattggaggatgaggttcaagattatttataactagcatctgtagaagttctcctaggatccatgataatgcaaattcaccataaccgcgattactcatctgagcaagatttaagtgattccatatatgccggagcatatgccattgagcatgaccttgatagtggtctagttattactggatgctaccaaggattgctggcgatgtacgttgttgacaagcactcatttacaatacc

SEQ ID NO: 237892 - DNA, 451 bp, Gossypium hirsutum
  unsure (1)..(451): unsure at all n locations
tctaggaattctcccatannatcgtcacttgagagggaggatctcatgcggcgatatcctcagcgtttatacatcgctgcagtactctgtcaaagagcgtctctatctgtcgaaatgggnngatggaaccatnnttgtgtgcacgtatcagtctngttgttgcaaggganngtttccctgactcggctcatataaccatccagactccgtatgccgaattaaaaccttcttttatcaaaagttgtcgtcgaattgaatcgtcaccctaacaatagcctctcgttgactgtgacttctacccgtattcaaggtacattttctctccattaaaccttcgatttcagctatgtatgagtttgttcctcgagctccagatgaaccacagtccacaacaaaatattttacatgttcagaagtactcgtcttgaagactcaggtaatccactcccag

SEQ ID NO: 237893 - DNA, 366 bp, Gossypium hirsutum
gtctactctaatctaccccatctcaacccttgcgccgcgtcaagaagtcccgcgagagcgaacgacgtcgtagaaggcgcaagcagaagaagaataagagtaagaataccttccaccaagaaaatgacgccgcagacggtcccgtttccgaagccggtgacagcgacgctgccgaagatgaaaagaagaattcctatcagcagcaggtaatggaagaagttcaggtagagtacgttcctgaaaaagctgagttagatgatggcattgatgaggaatttaggaaggtttttgaaaaattcagcttctgggaagctgctggttctgaggagactgacaagaaggacgagtcttcccaagatgctgatg

SEQ ID NO: 237894 - DNA, 406 bp, Gossypium hirsutum
gaagatgttggaggagggatcatggttgcaaaaataggagaaaaaccaagcattaaaagcttgttaggaagaattttctgtgaacgccgaaaatgttcgtcccttccgtcaacaaaccaagattcggtgaaggatcggtgggacaataatgtggaagagcttggaaactatttccagcaattgttgtccttgaatttggatgaagagattgatatgttacaagctaatcccatggagtcagatacaccagaaagcatcaattctaacatgaatgatgaagaaaaaatggaagctgtgcaatgtaagatagacgaagcacatgaggctattattttgaagaagaaagaaactaaggctgatgttgaaagacatgcaaaagctaaatcggctatagatttatgcaatg

SEQ ID NO: 237895 - DNA, 141 bp, Gossypium hirsutum
cacgtgggttatttacatttcgattagcagagcagaagactgttaacaaagatgagttgcttcaaatggtgagatttggtgctgaaatggtctttagttccaaggatagcacaattacagatgaagacattgatagaatca

SEQ ID NO: 237896 - DNA, 321 bp, Gossypium hirsutum
ttctggatataacaattgatggctgcaaatgaggctaggctggttgacatactgtgttatctcttacatttaggccaagcacctgttaatgacactcaaacgtaccaataactttgatcgatcattactgaagcagtgcagatgctcgaagctgatatacgtgcagtaacatggatacctgctatgatatgtatatggatcttgaacaggctagcgtctggacctgaggaacgtaaactatcagatgttgaaatccaaatacaactgaaagtgcttgcagatgtgtattcacgctcatttgcaagtcctacctatccttct

SEQ ID NO: 237897 - DNA, 228 bp, Gossypium hirsutum
ggccgctctagatctagaggatccgatgggctgcacgtagattcagcacgagacaaggtcaaagatgccgcagatgactgggccctcacgccaggctagaatggaacggggcgcgatgcttgttatcaagggaggttcaatagctatcaaagctaaggtgacgatggaaacaacataccggtgtcagaatctgtctaagacggcttcaaatgcagcattcttacgacc

SEQ ID NO: 237898 - DNA, 391 bp, Gossypium hirsutum
  unsure (1)..(391): unsure at all n locations
cgaggctatcaactcgtnntctctgcaaactatgatctaaagaaggtggagcgatanntggcatccannagtctctggtatttctgattttggtgccctgctttaaatctccttcaaactgcctgagcctagcaatgcctagganntgatgaactaagaacctctagagttgattggggaaaagannaaatgttcgagccactctcaactatatttaccatttcacgttgggcccttctgaaatagtgatnngatgaagaaatggatctctaaccctgaggaannaagattaggaggaagtnntcgagtcttgagaaagtggaagagcccttgaaaagagaggagttngnngaagtagaaatagggtaccagtnnctgatcannaagaagc

SEQ ID NO: 237899 - DNA, 328 bp, Gossypium hirsutum
aaaagattacgctattcacaagaaaaaagttgaattgggttggttcagctaggagggccctgctgctatgttaatcttgtaagaagggattcaaagaccgacctctcttctgcttccaatagtggagtgattccatctcctaccgataaccttagtcaactcatcaacataattcaagcgctaggtttttctgccaaggacatggacgctgtatctgatataatagaccattcttttctgccctgcactgcactactttattatatctatacatctgtaataagctaaatttctttatggtgcccagccatgggttcacacaattgtg

SEQ ID NO: 237900 - DNA, 271 bp, Gossypium hirsutum
aaaccctcttatttcttaacagccattgcaaaaatctcgcgaatgcgtcttataaactaaatcaccatgcttttcttcaaaaaccccacttcaagattccttcttctcactctcatctctgtcctactattctttttttccgtaaacatcaatgcatctaatcccaccaactcttaagatgattcggataaccatgtacagcttaaatccttctatgaacaagaagaccaactaccataagaccaataccaataatctaccactatatttt

SEQ ID NO: 237901 - DNA, 293 bp, Gossypium hirsutum
ataacattcttgcttcaaccgctgctgatgatgaaaaggagaaaagcaatataagctctagtaattctggcaagtcaaagaatatgatagagcttgatttgcctcatggttcttcaaatcgacttgatcaacttcaacctgatccgcttactaagatcctttaacgtgataaccctttccaaaatgcacccaatggtccatgtgtcttagagaatgtattacccatgcagtttaattttaactccaatgcataggactccatgcaaccttatatttatccaatagctaaacct

SEQ ID NO: 237902 - DNA, 336 bp, Gossypium hirsutum
tccctcgcactactacaattccacaccagaacccattttcctctttctctgtccatccatagctccgtttctactacttgctcttcttttctatcctctcaaagaccttatctcgtatcataatctacttcttactagtttttcatactatcccaacatctaacatattctctaactaactaatacctatttttgaaacccttaaacttatatcaatactagcacattatatattctctcaagcttcacacatatttgagttcctatcttgatacactaatcatattagcccagatactaatttacagtgatataaatttcttaaactctccactc

SEQ ID NO: 237903 - DNA, 336 bp, Gossypium hirsutum
agatcacgatctgggtcctgcaatctcacattttttgagcggtttggttggaagttgccaatctgttgctgcaaaattgacttctagctcacagtccaaaaaccataagaaagagcaagcaagtcatcactcatcaagcaagacgtctaaaggacatgctagatggaaaggtaaaacatctgcgaggaagaatatttcctcttatatgaatgtcagctctgaaagtttatggtctgaaattcagaaatttgcaaagctgaaatatcagtttgagttaccagaggatgcaagattactgttgaagaaaatttctgtcttacgcaatatgtgtcaaaa

SEQ ID NO: 237904 - DNA, 416 bp, Gossypium hirsutum
ctgtatcggaacggatcgaaactctcatggacaggatgtacagacagaaaatgaccgaccaggaggcagatatgaaatctatattatggttatatcatagggtgaagacattacccctagtcaatacccaaaatatcaagactaacgatggcaagttcaaggatggccatttggcagaaaatgaaatgatgaaaaagttccttgaaacatatgagttaaagcaaaatttgctatgcgaaaaattagacctacaactatctgaggattcgggaaatgcgagtttaccaactgagcaaaatgagttttctttggcgtgtgctcctgctcaagatcgtggaagttgcaagtcttttgagtctaaatttgttcatttcataaaccaactttacgacaatgacaacaacgaagtggagtac

SEQ ID NO: 237905 - DNA, 223 bp, Gossypium hirsutum
  unsure (1)..(223): unsure at all n locations
cgagcctttactttgtggtgtaactactcatgaactctaatattcccagaatgggaaccctagtnttggtcactttcgatctgtgcttggacctatcatatcnnncttagttcagatcccctctagtagttgtggannattctgaccttcagtatcgggctcacaacatgaactggtgtcactcactatctatttatggaatggcattcatgccctcagaatg

SEQ ID NO: 237906 - DNA, 332 bp, Gossypium hirsutum
gcttactgagttcacactaggctgaagagatttcattgatgatagtggaaaagtacttcagctcacttcccgggctcataattaaacctgaatcttttgttattacttgaataacatacttgagtttaactactacattttttaattgccttgtttttttatttgttattacttgaataacatacttgagtttaactaatacaatgtttatgttaagattaagttggtaaaagacctattaaacttgtggttgggaagataaaagaagagtagatatgatgcacctaagccataaaccctataccttggatactcttaaacagaatttgaaa

SEQ ID NO: 237907 - DNA, 205 bp, Gossypium hirsutum
cactaggcttactgatgttacacttagctgtagagatttcattgatgagagtggtaaagtacttgagctcactatccgggctcataattaaacctgatatcttttgtagtacttgaataacatacgtgagtttaactactacattttttaattgccttgctcttttagttggcattacttgaatgacatacttgagtttaactaa

SEQ ID NO: 237908 - DNA, 133 bp, Gossypium hirsutum
cttgttttatcttcattatccacacatcaaacaaggtttttcagagttttagcaatctctatctgtttctaatgtcaagtcaatggcccaatcataacaacataatagctcgaaaaaccataacattactcaa

SEQ ID NO: 237909 - DNA, 255 bp, Gossypium hirsutum
cttacactatttaccttcggctcacttttaacgaggatctaagatgaccccaaactgagatgtggcactcactatcatcacctagaactatccctagatattgctgaatccactcttcaaaatgctttccgactactattcgcccatcatatctgcacaattcacggagtcaactcatttcaatgatctagtagctaaggacccatggcttttgtcgcataatctgattgtcaagcctgatatgaaggttccaaa

SEQ ID NO: 237910 - DNA, 264 bp, Gossypium hirsutum
ttttaaatccataccttttccttcacccttttctttaacaagtaatactaatattgaaaataagaaaaacatatttgttccctctatcaccaatcctagtccttaccatcattatcattatcaccaaccaacctcaacaacaacaacagctgccttttcctatcattttcatttgattctaacaacaatttcgattcatttcgttttgtcttctgtaatattatctctattaatttctgtttcatactactaatctataatatt

SEQ ID NO: 237911 - DNA, 259 bp, Gossypium hirsutum
cacatttacttctactacttctaactctagctttccatatccgggatcaagagtttcttttaatctactcaagaactacttatccatacttaaactgatcataaatatataccttacctaatttcaaatacagtgctcattactcacatgatcaatacaatttaacctagcatcactaacgatacaattatacccatttgaacaaaatcattaccatcaaagactctaatgtactacttcactataaaattgtcaatac

SEQ ID NO: 237912 - DNA, 390 bp, Gossypium hirsutum
tcgagctatttttatctttttactttttctacaccttcatctgggtataatgagtcacatatctcaatgcatttttattttcacataaaaatgagctaattaaaggcttagaattactaatgttctaattgctaattcatgtttaaaagaacatccttcttcaactattttcttgaaagtaatgaattttactggttcaactcatattcacttgactgctgtgcttcaattgaaaggttatgctatacgagtgcaagttccaacaaacaagctatataaccccattggaaacttttatactcaaaggatccaccattgatccacaaattttctggaaacatctacaggcttccagaaaagtaatccacagtttctagtgaatgccacttt

SEQ ID NO: 237913 - DNA, 384 bp, Gossypium hirsutum
ataacaccaaattttcttctttttcccgttaaccccccactaactggagcaatggctaggctagagagatgtcctctactgctacagtgacaagccgatcgactaaacagatggaaaccgttgatgacaaactattagtataaacgtacaatatttataatcccatattaaatttttatcatatagaactcaaataccatctttttcggcatatatgaaactgctggattctgataccaaaaacggttcatacccgggttgtatgggtccttttactggcagaaaccctaacttgaaaaatccggaatgtcttaagcataatgctcctcaagggcatatgttttaccaagttaaacaatctttttcgcgtttgaaacttaatac

SEQ ID NO: 237914 - DNA, 292 bp, Gossypium hirsutum
atttcaatctttatatgtccaccttgttttcaataggtactttgttgcatctcatgggcttggccacactatcacaccataatgtgcctactgcaacagcagtactcgctgtatacacgctacatccaacaatacttctctccaattacagcactgaatacgataatctccattggcaaaatcgttcatctcaaagctcttgtttcggaatatactgaaagaaagacccttccaacatagatatcttgtgaatatatcttagccaagatcaatatcaataggactatccata

SEQ ID NO: 237915 - DNA, 427 bp, Gossypium hirsutum
tagatcctttgttttgtttcaccaaggccttgtatcctggtgaaggtgttgaattccaataattgaactataggactttgaggctctttaaggatttaggtttcctatgaaagtgtaaggaactattcccctcactgctgaacatttaaatgacatgttacacgacattaagatattgcgtcatactagattaagcaaacctactttaaaattctgttttctactgctagagtaatgtcacttttagcttaaacaactttgaaatgaaaatatgcttgcagtcttatcttggggaccataccttcctatttctcctttcccatgggtacaggatacaatagcagtttatgtaataatgaattttgtttgcattttgataatcaaggcttgtagattatttcccagagtccgcagtgtggaaacctgt

SEQ ID NO: 237916 - DNA, 317 bp, Gossypium hirsutum
ggacgcaatggccacgagctatcatgtctaaagcctgcttgcttctgatgggtcgatggagtgttcgacgatatcatcactccatctttagattaccaacatcatgatattgagcttgccaaggggtatcctttcccactagataagcaagcacatcacaagccattccctgaacagcgaccgtcaatacacagctgacctgtcatgtaaggacaggaacctacacatgatgaaaaacctgcttatagaaacttattgagtgcggaaattgagggcacacataaacctacacgacattcacgtgtgaaacctacaga

SEQ ID NO: 237917 - DNA, 358 bp, Gossypium hirsutum
gcatcgcgtttttaccttcgatggatctcaactactagtgggtatgaggatatgcttgcaaacagctcacaaacctacctcagagaacgactgtgacattgcgaccactcgccacttcaaacattatattcgcatcaatgttcccttctaagctgatcatatgcctgcttcaactgaattactttttataacagatgaggactcatgaacaatgtatgttaagcctaatatcattgcactctgttgcatacactaagcgcgcaacgactttattttacggctttactgtccattttatatcgatacccgtatcaatcgatatgttctgcgactaaaatcacgtaatgaattgctattt

SEQ ID NO: 237918 - DNA, 413 bp, Gossypium hirsutum
agaaagtttagagagaaaaagaaaaaaagaacagaaaaagaagagagaattcatgtgatgttgggggtgctttgatttgagctttttattggttgttgattagattttgtttgtgttgcttgttttagtggtgttatcactatcaagcaagctatatcaacgtagaataaatccaaaaaaaaaaaaaactgagggaaagtgatcatcttggagatctgggtttttttttttcagcttttaatggaaaaaatgatgaggtttcagtataagccctgttagaagacaagaagccattgttgggttgtttgtgttggtttttcccagttcttttgccttgtttttttgctttattcagccatgctttcgcttaacattcttggaatgaatgttccaaacctggaatttacggttac

SEQ ID NO: 237919 - DNA, 333 bp, Gossypium hirsutum
cactagtgaatgttttcttatgtgtgaacacaacatattagggagtatgttatctcttaagaatgcattgacaaagttttgacactcacgctgaaagagaaaaataccttgaactgcttaattggtatgttgcaatctctctttggtatgacgaacatttgatagccacttagtcaagcacagccttctcaaatcaactgcacacacttctgataataatggtaatagatacaaacttctgaaatcttcactcatggaactgtttaaatatatcctcaaagaaaaactgaaattattgattaaccatatgctggattcattattaaatcattt

SEQ ID NO: 237920 - DNA, 417 bp, Gossypium hirsutum
  unsure (1)..(417): unsure at all n locations
gaaagcacacatgatgatataattggtaacgtggaggattgttcttcgaaggagcatgccttggaaaatacgcacgagtctgctttaccaacaaccgaggatgtttcttctgttgcaactgaaattgctgatgatgctggaagcaaaatatcacctgatgtagacaagaaagagaatgaagtgttatctgatatttctgagggaatttcgagggaagagttaagtcgcattgttgcttcccgttggactggggaaagtactaagaatcaaggtggtaataaagatcatgctgatgacagccatgaagagacacctaaggacacacatgatgagccatatgatcaccatgctactgatatntgtgtggacactggaaaagatgatnatgaaaaatatgattatgaaatagatgatgaa

SEQ ID NO: 237921 - DNA, 416 bp, Gossypium hirsutum
cttcattgagtgttgcaacatggccagaactttccgcgaaagcgttgaataactactatgttaaataaaaagagctacattaggtaaacaaggtgagacgttagattgaactaagaagtatgataacttagatgttgatgtttcctgtttctctaaagagcgagtatggaggacaaagctttatgttcctgcctgtaaggatggttgatttgccttgtatcatatgatgaaaggtatattatgttgttaatggcattgctgtgttttcaaactgaattcaccggttttaacctttgatgcgaacaaatacctcagtgcgagcacatttcgataaattatgcccaagtaaaaaaacatttcacattttatcacctatgagccaatgattgaagtatggttacatataacaaataaga

SEQ ID NO: 237922 - DNA, 363 bp, Gossypium hirsutum
ctttaggtcttgccgataccagtcaagcacaagctatatggggttgactattatgatgctaactgcttacaaaaatgtctacttatgatagattagaatgcgagtaatatagagtgtccaggcttgtgtccaaccatcgcatgtactgtctgttctatggctaggattcatgttgaattggagaaaattgcatcttatagacacatccatgttgcctgctctatcaaaagtatggcggtagatatttacagctataacgatgattggattctacgtggtggatactgcgcttgctgcagcagaaccaagttcgagccctaatcaagctacggagaacatctatgttaggaaagcattctgttc

SEQ ID NO: 237923 - DNA, 348 bp, Gossypium hirsutum
cttaactagtgccactcagttggtggaagaatctatggtgaagggggatagaggttggagacaagaaaatgtgatgttgatttttgctcgctcctacggtctaacatgtttaatccgtatcagtgtgaaagtcacatgttcttgacattgactatcttaccatggtgacatccatatctcactggtaaagcttagtctcaccaagatcaaatcttgaaaatcctttgaacttatataggcctagaggatacggatggttattgaatatattgcaagagtttagtatataggtaacactacacggaaatatctcgtaatgatgatcatgttttgcctgcggcatgaaca

SEQ ID NO: 237924 - DNA, 183 bp, Gossypium hirsutum
gtaaaaccctctgattctactgggactacttattcgagtcagcggagctactgccaaagcgttttaagaacaacattgattacactactggcatccttcagaaagttcaagctagcaatcagacttcttggttggcattctcaagttcattagaacgctctcattccctctagggaaatcaaa

SEQ ID NO: 237925 - DNA, 319 bp, Gossypium hirsutum
gttaacgattgtatgctttatcaagatgcttatcaatgcggctttgggtaaagtatatagtcttcgccgtcaataatttctagaaaccataagttatttatatattaaggccgctacgactgcatacgtccacaatcaattactcataaccatcttgattgtaacaaatactattgatttcgtcgcttacataaaacattgtgtatcatgctccacttgttgcaaagaacatgcaagacatgtcagaatttacagaacttttggttctacctaatgctaatgatttcttcccggcgtttgcctctcatgatttgcaagg

SEQ ID NO: 237926 - DNA, 149 bp, Gossypium hirsutum
gagaaattttggcaggaggtcaccttgggtatgaggaagtccgaggtgttctgaaagatgttcttgcattgaaatttgaagatggagaatctactggagtaagtgaatcattgcgttcagctttcttaattggtcagcgtatgaacagg

SEQ ID NO: 237927 - DNA, 316 bp, Gossypium hirsutum
tgaagaaatccggaccaaggccaacatactttgtgcgctttctgcaatagatgaagcggcactggtgaacgaatattctacgacttacaacttttgtcatatttaccacaatgctcgccagaatgacagtctaattaagtgactaactaccgatggaacctgcctcgaacgactactaacgatctgattgaattaatgagttaaacaaaacatactttctctcaaccagaccagatgtaatcccgcgtccaatacagatcattatcaattcatatggctgcaactttatcatcatcgacacccaatcactattatt

SEQ ID NO: 237928 - DNA, 170 bp, Gossypium hirsutum
tcggacgagcgacgccctgactcgccacctcaccaatacatgtccaggtgtatctctaggcaaaccatcgatctcattgtttataaagagatacgcagagcaaaaccgtcccgtttgttgcttcatcaacagccctttcattacttgtgcatctgatgttgctgtaagtc

SEQ ID NO: 237929 - DNA, 412 bp, Gossypium hirsutum
caggattcaaccaagccaattttggttgaatgcgcatgtattatactacctacaaaattcatgctttacttttttctttaagaagatcgcagtccgagataagagaaaggttgtgtatgctgagatttaaactctagatttgctggatgtcaatacatcaaatcccaagttccatgctttccatttcaaccctataagaagtgagatgccgttctctgctctacgaacctcgcaatcatcttcgacttagttttggccggtcacaagcaatgcaaattgcgctttgctgttttagaatccgggtaaaggaaattggagcaataaaattgagggaagcagctgcagcatccccacgagagttgggatgaacatttggcagcataacaaagtccacaggcggtggcaaatccat

SEQ ID NO: 237930 - DNA, 411 bp, Gossypium hirsutum
aaacaatggagttctaagttgttcaaacatgggggttgccttccctggttttccatgggggttttggggtaatagtggaaataaggaaaacacattggttacaaaggaaccttccttaaatcctctgaattggggtatatgtacaagagactgagactgtgaaaattcccacacaaatagcctctactctaggggaacccaatttgcaaagtgatgataaaaagggaaaaggggtgaaaaagaatatgaccttgtgatggcaccatcagatgtggagcattcatcaggatatgaatcagatgctcagaatgctccattgggtggaaagaaccacatggtcctggttttcatggtgaagatgatgatgatgggtttgctgtgttggttccatgttatagacctggttgcaaa

SEQ ID NO: 237931 - DNA, 143 bp, Gossypium hirsutum
gaaattcttgtttaaaacataataaaaaagtcatacgcgatgagcactgtcggtcaggttattcgatgcaaagttgtgatggcatgttaggcctggaagccactatctatagattaagtggaagtggctccaccctaaaaaca

SEQ ID NO: 237932 - DNA, 230 bp, Gossypium hirsutum
ccaaattcgaagtattttccttttccgttctccttagagcgtagtctcattccaattccacggtgttcgcgatcggatcgcgacctcagtttttcttgccatcttctttctcttcaattctagaaagaattagctttctatactattacttgcagggtttttcagtgcttcattttccacgattcaggctcaaatttgggcagcaacaacttgacttcatatggataact

SEQ ID NO: 237933 - DNA, 152 bp, Gossypium hirsutum
ctctcttacactctcctcattgatgatctttgggacagtataaacccttttcactccgttctatacacccactgaacttttatctatattatcgttaatatatccatgccttagctcacttactattactactctactatcattctttctat

SEQ ID NO: 237934 - DNA, 376 bp, Gossypium hirsutum
ctttcatactactatctgactacctgtctattagactggccaacctctcctcacttctctatattcacctacttaacatctaaattatctgcacgttacctacccacctctttattacaactagtctgcaaacctccttacattcatgtaattactaatactcacctattcattcaccaatcagaaactcttaacaacctacaaacctttcatgtctcacggaatttaattcaatgtctacgtacaataacttcatacttcaatgcagaatactaactacactccttctctaactacattatattcaacatctcactcccctaggaattagattaacattcaacttaacctacatacactcaatctttcttacaac

SEQ ID NO: 237935 - DNA, 100 bp, Gossypium hirsutum
aacacactgacctcagaaagagcacccaaaataaacaacgctgatcaacgaaagatttctagggtgattgatcgtaatcatcaagcgatggcaatggctg

SEQ ID NO: 237936 - DNA, 312 bp, Gossypium hirsutum
tgctacaatcctaatggcttccccttggttacacgctacaatcgcgggccatcctgctctggctggtggttcatctagcacactaacgatgaacagctttgcattgctatcacgagcttataccaagaacactattgccacgagcgcaggctcatgaaggactcattcaagtggctattaggcataagaaagactgattacaccacgatgtgctatacacaaatgacagtgctactcatagatcatacggtagcattgtgagccttactgcttgccacactagtacaggtacggctagtgatccaatgacta

SEQ ID NO: 237937 - DNA, 341 bp, Gossypium hirsutum
gcctgctgttgccgttgccattgccattgccattgccattgccggcactctctctttcttgccttttagcagagtctttgctttgcttattaacatatattctctttcttcttcttcttctccggctctcattctttcttcttctgttaaacaaacccatatactaagtcttttttgggatttggtggaaatttctatcatttcttctggtttttcttcaaaactggtaccaacccttttttttcctctttcattctccttggttttggttgggtatttgaaattagaaaagaaccaaaaaaatgaattaagaaaagtttattaagatcccaacttgtgtc

SEQ ID NO: 237938 - DNA, 146 bp, Gossypium hirsutum
taaccaagacatcgaagttacttgaggttatggcaccagctaggttctcgaaaactgatacgctttcactctgaccctcaactaattctctagctttggcattcaatccttgaacctgtatttgacttggaagatcgctatgaaca

SEQ ID NO: 237939 - DNA, 180 bp, Gossypium hirsutum
gttcaataaattatgcgttatcaagatgcttagcattgcgacgggggataaactatatagtcttcgccgacaataagtacgataaaccattggctatttatatagttaggccagttcgtctgtaaacgtgccaaagcagatgctcttaactatcttgaatgtggtgaccaatatgatata

SEQ ID NO: 237940 - DNA, 341 bp, Gossypium hirsutum
tatccattatatttattttaatcatttaaaaaataatacaccttatgatagtctctaaacttagggaagtcgaacttttaaacttttcttataagctataaattatttttatccctaagaacacttcattctactaaaatttgtcaccatcatttactcgatctcctttattcgctattcaaattctctcaaccttcttttacaaatcattatgcttcaagtgattctactttttaagcttcaatcctaagttcaaattttcaaccaattacattatctttctcattcctttaccatcttaaactttccaaattctatccttcaaattcctttaaatccaa

SEQ ID NO: 237941 - DNA, 330 bp, Gossypium hirsutum
tcttcctaaattctattccttcacagttgccagcttgcgttacgcccactctattgagactgttgcatgagtccaatcctaccctaaatgtaatcgtagctaaagacactttctgccatttcacgtcaattaaccaagctgttcaatttgaatgaactaatacccaaccaggattcacgatccatgtgaaagtaggcaatgatttttaaaacgtgaatcttaataaacacaagccaaatgtcatgatttacgttcctggctaaacttataaccttattctcatcaatctcaactttccttatggaacttccacctttatttcaccaacta

SEQ ID NO: 237942 - DNA, 329 bp, Gossypium hirsutum
ctagtcgcatccgctgcactaattcaatacgaggacaccgagttgtatcattagacttgaactttaccactttttatgacgcgaacaactgagacaggttcagtttcaccacctacattaactacttctgcaataacttcaggaaaaagcacgaatacattgccaataattattgcaatcattgctccaattgctagctctgctctactctagctatagagttgtagcttactaaaacggatagcacggatgaaatacaaaactttataagaataaaatgcacaagatgatgtatccacaatggaatccttgcaatatgattttagcac

SEQ ID NO: 237943 - DNA, 372 bp, Gossypium hirsutum
  unsure (1)..(372): unsure at all n locations
aagacatgttggcagggtgttctagctctacattgttgtcaccgagggatagattgaggagtgaaacatcagcagtacagttccaagcttgtcatttccagacttcaatgagcacacaaagattggacctgccatgtaatttttctcgtaaggaaacatcgaaatcacagaccattagaccagcagttgaatccaaggccaagaccagcagttgttctatcaagcagaacactaggctgccaccattgacgacgactagtgcgcanaatccattcgaagggaggatagagatcaaaggtaaaaagtttgaagaggtttgctgaacagggtctangtgatgatgagacggtcattaatagggcaaagaggaaa

SEQ ID NO: 237944 - DNA, 384 bp, Gossypium hirsutum
aagggcctaggttgccgacagtgtccgaggctcccgcccatcagagcagcgaggtgccgatggtgcccgaggctcccgcacgaccaagggcctaggttgccgatggtgcccgaggctcccgcacatcgaagcaccgaggtgccgatggcgcccgaggctcctgcaataccaagggcttagtttgccgatggtgtccggggctcctgcacatcctaacaccaaggtgccgatggtgcccgaagcttccggacgaccaaaggcctatgctaccggaaccgttcaacggaacaccgacgggaccgttcgacggagcaccgtcgggaccgatcggccgagcaccaccgggaacctaaccggcagttggggggcaccgacgtccgggca

SEQ ID NO: 237945 - DNA, 386 bp, Gossypium hirsutum
tattttagaagtacaaattgagtgttgctaatggtgagttttcgttagactcgttttgttattttcatgcttaatatatatattaaattagaattgatgtttcggttttgatttaatggctgaaaatgttctataaattttcaaggctacttactatctggcattagctagattcgtttattgtaagtttaaatgttgctcggaaatagtgtaaatattactgctatccaattttgtgcccttattttgctgtccaaaatttgaacaaattaatggatctattttcatgtcgattgaaggctgtaaatacagtcccatttgttgcattatgctattcagttttgggatcaaataattaagtattgctggattaaaaatcatggatt

SEQ ID NO: 237946 - DNA, 122 bp, Gossypium hirsutum
cattggccaagcttgattgccaatggccaattgtgagccgtaattatttggttaaaattgggttaaaattttggtaaatcaagttaatttttaacccattagcccaaattgggaaaattcct

SEQ ID NO: 237947 - DNA, 400 bp, Gossypium hirsutum
  unsure (1)..(400): unsure at all n locations
gttgtccgaaaaagtcagtcatgtttttgctatcagctcagatgctcgttttcaccacgtcgatgacgaccgattggctcgcttcaaagggcatgttcttttgtatcagtggttggaggaaagcttggcagctggtgaaaaggtttctgaggatttctacattctgaaagtggatcctgaagggttcgatatatttgacaagagtttgaaggctaaactagccaacaagaattcttccagctatgatgaacattcacattgcaaaagaatcaaatcctcacatgaggagaaaaaacanactaatgaagaaaagaaaggggatatagaaactaactctgtatcttgggcatcaaatactgagccccactttcccagttccctaactaacagtcctgaaatc

SEQ ID NO: 237948 - DNA, 279 bp, Gossypium hirsutum
ggaacataatgaagatgagaagaaacacagtctcctggacaaggttgacctatccaatagcagctccagctctgtaattacttttttttacttccttgcttactattcatagttcaaacagtcaaatctttttcatatatattataacatgcgttgtatgaatgttcagtctaagtacgaagaaaaaagtgaaagccgaaagaagaagaagtagaagaaaaaggagaagggtaagaaagaacatgacagtgcattcccattggagaaattccatttggc

SEQ ID NO: 237949 - DNA, 306 bp, Gossypium hirsutum
  unsure (1)..(306): unsure at all n locations
actccataattttaggagcttaagagattgtttccagatctagggctgcgctatactcattggaaaaaagcacctncaaccttaaaattcataacctgatggtcttagaagaagcaaatctttgtaggcctaccaactgttcgatgatttgccactgaaagcttcttcattcttgccaaattcggtccttttctgccaacagcgacaaaccccatattctaaatggcgttgcatttgcttagaaagaccgttgcatacccatcgattaggaattctgggttccttactaggctgcgtagtttcagc

SEQ ID NO: 237950 - DNA, 374 bp, Gossypium hirsutum
gtctcgagttttttttttctttttatgagcaaatagtagaattggtagtgattattctgtaaattctggcggtgttacaggggatttctccgttaggagtgcttataaactattacaagagactagcttggatcctaatacttttatttcacatgtcaaaattaaaaatttctataggaaactatggaaattatacattcccttaaaaattctaattcaatatggaaaatcttatggaactttatttcgtcccttgttaaactcaaacttaaagaaaatttttgtggaaactcaattccctaagggtcgtcaaaatgtttaagacaacaaccatattttccaacaatgccctgcgtcttcgatcaaaggactta

SEQ ID NO: 237951 - DNA, 234 bp, Gossypium hirsutum
cgatggtacttatttcacgagttattcattcttcgcacatgtggctggggcctttgaagacctataccccgctctataagtttcgtcaattttattatgttcaaactaattccgttaacgaagatccatatgtagacaaatatgtatccaaacttttctgaacttactcctccactagcatcaatttaacttgttacagattatttgatgatcattggtcttatgtggatgatc

SEQ ID NO: 237952 - DNA, 360 bp, Gossypium hirsutum
ccggagttccgtcgtcggcggtgacgacgatggtcgagtctcccgtgggctgattaatagaaatcgtatatgttctaaattcgatcgattaatcaatctctttttcttttatccccgaaaggaaatgatagatccctgtgctgtaattaacgttcgatccagaacctggtttcgcaagagaaaaaaatcccggtcataattttcaattggaccgtggtgtttggcttttctctaattggataagttccaaggtaaatccctgaattttttttggatataattcccaacctaccttttttagttgatctattggttcttccttttaaaaatttttgggtatttttaagggtaagggttttt

SEQ ID NO: 237953 - DNA, 340 bp, Gossypium hirsutum
acgagcagagagcgtactattctcgagtttttttttttattttttggggtgggaatttgtactatattaacaagaaggatagttacattgagttgaaacaaattaagaaaaaaaagtacaaaggaaaagagctacctaaagatcacacaaacctttttgatactacaaactttttcctaatcctatttcttatttgaagtataaaaaaaatctactcaaaagtgaaaaataaaaaagagattaagaaaccacaattttttcaaaatggatgaacctattatcttccaatctggaattattagcaaaatttttgtactcgaaccaagttaattctttatat

SEQ ID NO: 237954 - DNA, 302 bp, Gossypium hirsutum
ggggccccggctggggaattcgcacgagaccccatttatatcttgctttgattccccttttctctctgtgttataaccctaaccctacctcaccaaccacgtattttccgtcggcttcctccattttttatctcaattttccacgatttctctcgctctttccactgatctgcgattttaatttgcaggatttaacatggaaggacggaaaatctaaccaaaatcctaaaatgcccaactaagttttcgtcccctttttccaattcatttttctcttgccttttaaaaatcgggtttcttag

SEQ ID NO: 237955 - DNA, 380 bp, Gossypium hirsutum
cggagatgatgtctttgaatcaacagaaaagaattgaggagctcgaagcacaactaggggaagctgaggatatagttagagatcttagagcagagttgagagaagtacaagatgagttggagaagctgactaaaaactcaatgcagtgttcgagcgaacaaaaatcaagacacgatggtgcttgttctgaagaaatgtccaatggaaaaaccatcaacgatttccggtctggtaaatcttctctggtcgatgcacaaactgacattgggacagtttctgacatcaagaattcatgtccgagtggaacaaatgtgggtattaagtgttcttgtaaggataattgctacgtttgtaaccctgattttgcttccatagtgatg

SEQ ID NO: 237956 - DNA, 156 bp, Gossypium hirsutum
aaactacatcaattctacaccataccaatttcattcactaatccctccatacatttctaattgtatgatatttttaatttattatccccccacaatacttactaccataaccaactatccattcacaatcccacttctcttattcaccacaacttt

SEQ ID NO: 237957 - DNA, 253 bp, Gossypium hirsutum
gctgcttagcaatgattttctcagggaatgtgtggaggagttctcggttccatcaaggggatttgaagctaattcacgcatcttccctcaaaagcatctaaatatagtagatcctctaagagaaaacaataatcttggtcgcagtgtgagcaaagggaacttttaccgaataagaagcgctttcacttacggggctcggaagctagggcaaattctttaccagtctgaagaaactctatgagatgaacttcat

SEQ ID NO: 237958 - DNA, 167 bp, Gossypium hirsutum
ttcccattacgcacatcacgttttgatggtcagtaggccaattgcttatggaaccatcgctaagtatcttcgtcgaaaagctcgagagtcgccatctcgttacatggactaagattaccctgaaaacaacgtgccgaccttgtaacataatggcaaaggcatttggg

SEQ ID NO: 237959 - DNA, 200 bp, Gossypium hirsutum
atcgtcttatcgttcccgttagccccccacgaactggggcagagcatatgctagagagatgtctgcggcagcagcggcgactagccgcacgaatcgacagatggcagccggggatgataatcttgtggtcaacacaactgacaggaatctaacctgtatatgatcttgatcatactggactaaaagacgatctactacat

SEQ ID NO: 237960 - DNA, 226 bp, Gossypium hirsutum
tatttttttttattacataaaaaataatacactctagagtgagggcttttctaacggtaacctcactgttaaacttttcttttaagctataaatcattttcaccccaatgaacgctactttctactaaaatttgtatccagcttatacctagctccattattgacgttcaaatacttacacactgctttcaaaattcataatctttcaattaattctccttcttta

SEQ ID NO: 237961 - DNA, 123 bp, Gossypium hirsutum
tatccaaaatctttctcttgacaaataaaacatataactggggcaagctattttacaaacgtgcatgagtccaatacccaccccaaattcatatgtttcttaaaacaattccacccatttcaa

SEQ ID NO: 237962 - DNA, 279 bp, Gossypium hirsutum
ctacaactaatagctactgcatcctgcaggctttaggaattaggcacgagcacaaatgtcgattacgcaagaaactatgtgcaaaggttcatttgttactgtactccctaactggcctgaccatcaagattgaagaagttagttctgacacgatcgtcaacgagtataatattcttcaagacacggaaatcatactacctgaccaactgcttatgataatagaccgtttcagctctatgactatcgtaccttggcctattacatcatacataatgaatc

SEQ ID NO: 237963 - DNA, 119 bp, Gossypium hirsutum
tgaccacattcctttgtatgcccttttattcatccacagagaacttacctattcaactattctcaaccacttaacattttatattgcctaaatcgatacaacacttaaactaatcatta

SEQ ID NO: 237964 - DNA, 330 bp, Gossypium hirsutum
agacgataggatcacgttatagtattagaggaagctaatgcgacatactcatagctacagtcattgcatgaaactttaacaagggattcagaacttaaactccgagaagtaatggaaaatttcaacatcgaagatactgaaacaaattctacgctccagaaattgaaaacattttaaaatcaaattaaagtatttcaaaaaccatcttcctaaacaacttgtcaagcttcgttttcaaaaaaaggaattgatcaaaacctaccgaaatttgcttcttttaaaagcaccaattaaccacttaaaagccagatattcgaattccaaaattaa

SEQ ID NO: 237965 - DNA, 208 bp, Gossypium hirsutum
acagattgcaaaaatggaatgaccatgatttacagcggaccggattataaagatcactaaatttaacatacccagtctgattacaatgaacctattgaaagtcattattacaaccacactattcatagtcatacttatactactagtacgggtgaccagcatcgcatccaatatcatttgaatgctattactgctaatatggtgatac

SEQ ID NO: 237966 - DNA, 124 bp, Gossypium hirsutum
cattctttcaaggttgtaggaaagttaagaagaggtgaagatttgttgtattggagctggatatgttggatgtgcaacagagtcagtgaatgtagtgaagtgagttatatatagaaattaaagt

SEQ ID NO: 237967 - DNA, 234 bp, Gossypium hirsutum
ctacatttcaaatgatgcatgacattatctacgagagagtctttgaaactggactcgagaatacatatgaccctcaagatctaggaaattacttctgacacgataatcgagaagaacaatattctttggttcttcgagattccactgcctcaaacactcattatgtgaatagaccgtttcagctctctttaatattccagtcttgctcatccatcagaaaatatgaaccaaatg

SEQ ID NO: 237968 - DNA, 362 bp, Gossypium hirsutum
cgccatcaccagcccctcttcaagtcagcaggccgggggtcgatgccccttttcaactctcctctgttcgacggtcgacgctcgagcttgacgtctcacacacgtgcaccagtcaccatcatcgttggcagattcattcatctcattgcacgatcataaagttagtgtgattccaatttggctggaggaattcctgctcagcttttaaatttggtagctttcatacactaaagcaatacacagaatgcctagataaccagaagctgaaagtgatgggacgcgcagaggtcgaggacatacgctatttaaagatatatacgagttaaatcttgtcgagtgtgtcaaagtatctagaaacaatc

SEQ ID NO: 237969 - DNA, 176 bp, Gossypium hirsutum
ctctcatctgctcattaaacggcatatctattgaacctgggcagtaaagctggatatcagcatgtatgaagagattccaacagctatccaagatatatagatgacactatgcacactattattcaagagcaggcaaatgtggattcatcaaatgccaaaactatcgagaataaact

SEQ ID NO: 237970 - DNA, 407 bp, Gossypium hirsutum
  unsure (1)..(407): unsure at all n locations
ccgaggaagnnagttcaaagaagcaccccaaatttaccagcaaggnagtgggcaggcgtatnngttagatgnngtttagatgtaagaagacacgctttagaagaaggggtggtcaagcaaccacgagaagaaaagggcgtttattctatgtcatttcaagttaaggcgtttttggagaagaaatttcngnnatgtgggaaacacagttatgaatccagnnnagagaaaaagtgannagttagcttgannagaatttggggttaccagcccaagggcaaagtgggctatttttggttcccaaaaccccgacgttgctcgtttggaaagaccaaangtgttgtgagaaaagattattgtcaatgcttaaaagctannattatgatgctcttaaagctttgatcattgac

SEQ ID NO: 237971 - DNA, 349 bp, Gossypium hirsutum
gaactattctcgagttttttttttttttttttttttgttttattttattttttttttatataatattggaacatataattacatttttattgcataacattgtttaaaaaaagtaaatagcttaatgctcccatatcatatcttttaacatttcaatatcaaaagctaaggatgctattaaaccctgcaaattaaattaaaaaagatcacaaagtaaaacaccaatcccatattataaaacctttaatactttactctcattttactaattaattagcatatacctatggtttgatggatcaaactctttatgcaactactcttgatcatgatagtactttcccatatt

SEQ ID NO: 237972 - DNA, 164 bp, Gossypium hirsutum
cctttttagttccgacaaaagaaaacgaaaaaaatagaagaattacaatcgttttctttttgaagtcatattttaatatttggggataaaataatgctgatagaatacaacattgctatacaagttacattctaatagctactaaatggcttattaaagaattc

SEQ ID NO: 237973 - DNA, 344 bp, Gossypium hirsutum
  unsure (1)..(344): unsure at all n locations
tgagccatgtctctagaaatttagaatttacctaactagagtggtccgagttnngaggtcccaaatcatgaacccagttggagccttaaacatgtattaactctgcnttttgatatgagcctctncagtaaatnntcagtgaaccagaaattgagaaaaaggtcagcttggacccttcaattaagtgaaaggcccatctaaacataacaataagtactgaaggcctgctttaatcatacctggaacctacannntctaagaactactntngatcttaaagaatnnggaaattgcatgaagaaatgaaggatttcaaaacatggccctttccaaagaagtccctg

SEQ ID NO: 237974 - DNA, 275 bp, Gossypium hirsutum
tgctccaccctgccctttaacgagtaatcgcgaatacgtaaaatagaaaaaacatctttatcccatgtatcaccaatcctagtccttaccatcatcatcattatcaccaaccaacctcaacaacaacaacagctgcctcttcctatcagttacatttgattataacaacatatttgttccatttgtttttgatttctgtagttgggttcttttagtttctggggcatattattaatttataatattattatgtgaaaaaagaagaataatatttt

SEQ ID NO: 237975 - DNA, 289 bp, Gossypium hirsutum
actataggacccccacatctgcatgaattctgaactagccacgatttccattttgaacaccatatattccccaacagtctttgacatatttcaagaccactaaaaataactaacattctatattactaccctacaaaattgacaatcaactctaacacccaaaaacactctactctaaattacaataattatgcaaaaactcatttaacaatctccatacattaacttttatttttttattacactcatatcccataaaaacctctaaaaatccttgttacccacatta

SEQ ID NO: 237976 - DNA, 176 bp, Gossypium hirsutum
cttaaaccattcaagcttgtatcatgctcaacgaaatgccaaggggcccggtaaatcatattctgggttgtatatcggctcaacaataaacaagataatgctatgaatccacttgactcaatacattcaaagttatagggaaaatgccgagcactaactccgtggtgcgctctaca

SEQ ID NO: 237977 - DNA, 174 bp, Gossypium hirsutum
gaatcttccttttcccttttatatctcaaaattcaaagcgctcgcttaatcatctcatggctgctactattgtctccgtcaaagctaggcatatcttccacatccgttgaaatcctactgttgaagttgatgtgaaaatatccaaccctataaatgctaaggccgcatttccta

SEQ ID NO: 237978 - DNA, 175 bp, Gossypium hirsutum
ctaaacttgctgagatggtgactcaaaccggtctagacatcctgtttacacccgtcatgaaatgccttaagcaatactggtcttcagattcatattaaggactcatactcatatctactaaacgtccacaggtttaccttgaggcaccactttgtaagctctgcgttctcgaacc

SEQ ID NO: 237979 - DNA, 371 bp, Gossypium hirsutum
ccacaagaaaattatccattagctatcatcacagatcacaaaacggattcggttatgcacacatgcttggcactaaaccctgtatacacagcaataattaaattcaaagggcttcaccagtttcattggttaacaagaaagaatcttcccgttcttctaactttataaaaccatcatggcatttgaaattattatcattgcaatcatattacctgagcaaatattttcaatactactaacttaacattcgctttcaaatttcatgcttaaaatccaaacctcatatttttactcaaccatcttcggatatatttaccatatcttttttcaaaccttgacaaaaaagtctttttataccactacattgtaat

SEQ ID NO: 237980 - DNA, 378 bp, Gossypium hirsutum
gttagaggaagaagtgcctctgagaagcttacagaagggggaggtgtcaagttttctgctagagtggcaatccaggtggaagttgtgaaaacttttaatgacgctgatggaccacagtggagacattcactttttggaaatccaaatgatcaagaaacctttaggaggaggtgtgagattgcagaaactcttgttgaaaggaactttgatttggcaatccaagttatttaataatttaatctttcaacttgtgaactataatcttgttgtggttgattgatttcttaaagggaaaagggcatcctggttacggaatttttcagaaacctttaaggaacaattgatgatgattattgggaccaagtattgggggcttgt

SEQ ID NO: 237981 - DNA, 402 bp, Gossypium hirsutum
gctggatttggtgatgatggtgtgtttgggggtgtgggtgggtctggtggggttgcatttggtggaatgggtctcgcagatggtctaatggaaggcttatttggtggagttatgcaaccaaacaacggtttcatcaatgttggtggtgaattaagccagatgtttgccggtgaatctgagtgtagcaatgtggctggtaatggtattcacgggtttcttgatgaaacccttgttgctggtctgggaaatgaaggcaagcaggctaatggtaagcgttgtatgccaaaaggttcaaagaaaaacatcatctacatgaagaaaactattggtcgtgaacatattatcgaatggttaagtgataacaaggctgaaatggaagatccccttaagcctaaacgtggt

SEQ ID NO: 237982 - DNA, 338 bp, Gossypium hirsutum
tgttgctattctgttttatgagatcagaattcatcagatgttgttctgtcttcttctgtaagtttgtagcagtttgttgaatcatgcttcttccgttgatttaactttgtaaattgcgtgaacaagtctaaacctttactgctttttatacgactgcaagttaactctcgcggaatcgatccataagggaaaagctagttaaatgggaatttgaatgccaccagaacttgatgaattaaattgaaccctgttggttggtcctcctgagcgctgtgttccaagccttaatccgggaatgtaatttgccacaattatttccggtccccttaatttttttt

SEQ ID NO: 237983 - DNA, 240 bp, Gossypium hirsutum
acatgctgatattgatataactaaaaaggcggtgatgaggtaaccaaatctctaaatcttgaccatctacttgaagtttctagcaaacagtgccctcgctacaatacaatgggagaagctgacattgacaacaataacctaatgaaagcagcttatctacaagatgccactgacgactatttatacttggcagaagctaatgatatatagatccgagatttgaaacatgatcaaaagcac

SEQ ID NO: 237984 - DNA, 447 bp, Gossypium hirsutum
  unsure (1)..(447): unsure at all n locations
tcgagggtgtacctctagagttgttcaatatttatacctatgttccggcgaggaacttgactgttaagtccttatcagcaataggaagaagaaagtaccatgtttggggccgttatcttctgatgagttggttattcttgggtattgaatggttttacaaagcatcattccatagatataattaatttaaaaggataccgatattggaaataccatcaatcaaatatttctacaacgacatcaatgttccttgtatttctcaagcttgacagtgccttctattacaggggcctttacatttcagcaataagattttggtttattcgccccacagtgattgttttctntgatatntgtnattactttctaactgtatgccactacgtcagtcaaattcttcatattcttacacggatatcgtacaatttgggtgcccattgcattttg

SEQ ID NO: 237985 - DNA, 245 bp, Gossypium hirsutum
taggagttacgagagttacgtggtggatattagagtgggcgcgccaatcgagactcatcgttcaatgaaactttccagaattgacatttgtacctggtggtatttaagcctgtgtgcgaacagacagcaaatcgtgtaacattcctggctatttataaggttcatgctttgttatgttattaacctaaatttcatttctccattccaaaaatccttggatcaggtaactttttcaataaagatca

SEQ ID NO: 237986 - DNA, 188 bp, Gossypium hirsutum
tgcatttactggttgcagtcatagtttgacagcagaagaagatgatgaggtacgtaggatgcgtgatgaaatcagccattgtaaggagaaagagattaatgtgacagaaagaatgttgcttggtagatgtccactaacgctgacgtagactttccgcggacttatagcatttggattccctacaagta

SEQ ID NO: 237987 - DNA, 367 bp, Gossypium hirsutum
aatgagacagatcaaagagtcccacaggcgagatggagttgaggttggaaacgctgataaaatctttgagagcacatccaaagagcagcttacaaggagagcttgatgggggtgcgtagctacatctttaccaagaccatgtcaattcaaggaaaactctaagcagaagttgcttaataagttagtcttcttttcaaacatcttaatggtaatatataacgtcatcattggtggaagtggaaaaataactggattgagtacaattaattaagaggtaatttgaggtggtaaattttaggaattaatatctggtcaactctaattttgccttcggccttaatggtctaatcttaactggttactttat

SEQ ID NO: 237988 - DNA, 306 bp, Gossypium hirsutum
ctctctctctctctctctctcttatcttgttttcgctgtctccgttttcagttattcccgcgaccaaaccctaagctcacttcccttcttttatatcttctctatatcctttccccatcagccttctcccgagatccacctttctctggtggctaagatctgtagcatggtggcatcttgtgtttgctaacaatgaactttggattccctagctttccctgggttggaagtgatccccaaagggattccgatttggcctttggtttcaccagggccttccttgagccctaaccggaagccaggttt

SEQ ID NO: 237989 - DNA, 292 bp, Gossypium hirsutum
cagcctaagctagcttgtaaaccaagcaacaacagctcagagactagctcccttaacgaaatttcctgctcaacgaccatgcttcaactcagcctgctaaccttgttggtactattgggatccgggctaacccgactagtcacctcgcacgaggaatctggatagtggagttgcgagtcaaactctgagatccaagtcctggccgacttcgcccctggagtcatcaccctcgattgtcacaccgatgactggaaagacattgatggcttcaacttctctctacttcctgctc

SEQ ID NO: 237990 - DNA, 223 bp, Gossypium hirsutum
cacaactcactctcaattccatcgctagggttttctcggtgggggttttaaatacgtttagttgcagacaatatattatcataagcctaaaggctatcaggtttatcttgaagacactcttatatcaacatactataatcatgcttgtgaccatagaaagtactgatgaaaacgtaatattttactttatccatctattacatgtatctttcttattgtttcc

SEQ ID NO: 237991 - DNA, 271 bp, Gossypium hirsutum
aatgattattagtcaaaaatcaaaaccatacacatttcaggggggttttctttcactgtctgaagttcacctaaaactatcactatattattctaatatctacttttctaagcttggctactcttcctaacgtaaaatctctcaacagcgacgctctagaatagcattgtttagactatggccctagatactgatgctctatttaagaactacttcatatagaatccctaaattacatctcttaaaaatgcttttgataagattttctctc

SEQ ID NO: 237992 - DNA, 329 bp, Gossypium hirsutum
gctcactatttcccttacaattaatgtattgacatggaccgatggcacactatatggagtggatttacaattgacaaaccatcggtacacaacgtagtatctgatagacccctgacgctacccagcttaagcgcatagcaacacatacggcattacccaatttgctcattatcgtatatgccctctcatattaccatatgctacaggtcctcatacctaatggctaatggctattagcaagcgtatatacaatgttaaaactcacagtaacacttatctaaatagactcattcattaaccaatactcccaaaagattcaaaacgtctta

SEQ ID NO: 237993 - DNA, 394 bp, Gossypium hirsutum
tcttcccctcccttaaaatcctctcaagccttttctgctctggtgaaatcccggtcactgggccaccgccgttggtcgcgccgccaccgtcgccggccaccgcacatggtggccggaagttcaaaaggtaacttttttattttttttaataatatatatatgtatatgtatatagaaagaagggaaaaaaaacaaagaaaaaaaattcgaaagaagagagaaaaagaaaaaaaaatgcaaacttttttattgattttttcctttgtattcgaagttcggagggatttttgtgtttgtctctttttcaatcttttaaaatccccccctttttacactagtttccatggcttttatagcccctacactttcattttctattagtttctatctcttc

SEQ ID NO: 237994 - DNA, 437 bp, Gossypium hirsutum
cttgagttgtagcattcaattaggattaatgggagatatcgtgataggtactatatgctttcaacccttgatatggtatatcaagtcctaaatcaaataaacatttagatttgtctacccctagaggtaatgtatactgccagcccttgcgtgatattgtagtaagccttgacagcgtcaaaatatttagatatttggtggttttgagtgcatattcatcttttaccgcttattgtctattcaagtagcatttatgtgttatttcttaaatgagtacataatgattattccttatggttgtctgtaaagtttctgtatgttcttgttttgtctgctaatacacaagcatgcatttatgctgagttatttctgcttaatttgttgctccttctcttgcctgcactcagtataaaacctaccccgcaggttttatgggt

SEQ ID NO: 237995 - DNA, 355 bp, Gossypium hirsutum
gccatccccttttctctactgaatcctgtaacttatcctgaggcgtgtccacacgaagatcgggaagataaccatgttcagatgattgaatatttcttcgatctgactcctgcttctaaaatttccataaacctcaagccgaaaccgatgtacactgcgatacagatttcacgcatgaactgaatactcttgctgcatcacatacaaccaatgtttttgcacccgaattgtatatcgtggaatcagaagtagcttaaaaagctactgccctatacgatgatttcgctaaaacgcgagaggctattgagtaccatgtattccctcatgactcttttacctctgtgaaataacatga

SEQ ID NO: 237996 - DNA, 280 bp, Gossypium hirsutum
tagctcaatttatataaaatgtatagatcaccacattcggagcgtcatttttatcaagacagccagtcttctacgatttccctcatctctcaaatcacccatatattgagtcattaacgttacacctacattttttaacgacaccttatgtatcatctataacacatgtacaatttaaatatatcataactcgtactatacttactttacatatccaacaacatatgaccttatttatgctaatcgtgtctttatcttgaatcaatataaattatacttt

SEQ ID NO: 237997 - DNA, 381 bp, Gossypium hirsutum
catccgctgcactaattcaatacgagccacaccccaagggaatggccaacaccatgacatttacgcggcggggactcttcgacaagcgcaacagcatcggtaccgctgacaattgcgcttcacatatcacattcactgtgaaactgcttttctttgatggcctaacattctcgtatttgataactccactaatcagcagcttcaacacgtcttgagacatctatgcttacttacaggaaattgctagtatgtgtgcacactcatgtcaacatcatagccttttgtttgcaatacaatggctacactactttcactctgtctcagactccaggtaacttgctctaacggttacagatccctgcaatgatatgtactaatctc

SEQ ID NO: 237998 - DNA, 405 bp, Gossypium hirsutum
gcacagccgaagggagagggagagagggagagggagaggcagcgaagaagctgcggagatcgtcgattctcgtttaggtctttcttcggagcttctttcttctttctttctctttgctttctttcctttttgtctctaacattcaggtgtcgaataataccagattaagccgcttcaacaggtattgagacaaatatgcttccttagaggaaattgctggtaggtggttacacgcgtgtcaacgtatagccttttgtttgcaatacaaggtctggtattctctcaaacggtggttgaattaagggaacttgatataagggttaaagatgccagcagttgtgttttctaagctaaaacctgttgtatatactggttttcaaaggtctcttacaagaaaacaagttc

SEQ ID NO: 237999 - DNA, 408 bp, Gossypium hirsutum
ttaactacatgactactatcatcatcaaccctgaactcttccgcgcgcgcctattttaactactcaggagccggtccttaatctaatctttaaaaccataacctcttaagatgctaaccctatttttcttctctatcgatccttcattactctggcttcatgtttcaaatcctaaaaacctaatttctaacacatcatctgcatctatcatcaaccattgcggcacccatctgtgtattggctttttacatagccctaactctatttccttccgttttgcgaaactcaaaaagcgatactctttatactttgataaaaagcctatcggatccttataaacagctccatagcttggatcccacccttggtaacccttttactttgattcaaatcactttcaatcctgat

SEQ ID NO: 238000 - DNA, 211 bp, Gossypium hirsutum
ataaaacccttcattacaaaccatgcatccaactctcccagtccgaactatcaccatacgtaggccaatccatatgatcataactcaaatccactctccaagtacacccatataaccaactgactacgaaactcttacatcttaattacgattttaacacctacatccacattctgaacaacttatctacaaatcacaacattcacactac

SEQ ID NO: 238001 - DNA, 399 bp, Gossypium hirsutum
  unsure (1)..(399): unsure at all n locations
cgtaggcaggtgattggttcttgttgaaatgggagaaggctgtggatcttgggtttcctcagcagcaatgtgtcatatgtgcaatcactccaacttgaatgtcctttggcttgctttcccaatccgttcgggacctgcaaaagtactannatccctagattcatgtaacattgggtacctganntatggtctctgttacctgggaccttctgcagttttatgccaaatccagaattaatctcactttgtgggttaagccaacgaaatgatnacctcgtggctggttttaactggtttgccctgtttcagacatggtcttttgcacccgcttcaaacctctttgttgaaaagagcaacancctggctgaccgatatgagaatcttaaggaaagtggtacc

SEQ ID NO: 238002 - DNA, 271 bp, Gossypium hirsutum
actgtaaattatataatatacatatgagtgatctacagttgctttcttcaacacatgagccaggtgtttctgatcacatgcatcagatcatatatatgatccctcacattatatacagcgactactaatagtagattcatgaacatctgtactcatatggtgatctattactaagacatcgcaggtttatgcagctccagaattatatcactatgaggttatgacaacgaaattaaccacttagctgatcttactgtttgccctgtttcat

SEQ ID NO: 238003 - DNA, 443 bp, Gossypium hirsutum
  unsure (1)..(443): unsure at all n locations
gtccttcctattgagattgttttgattttgtcatgtgggagacagccttgcaatattgagagcagagttaaagagtcaaaataagcatgtgaaaaatttgaagaaaaaatctctttggtctagaattttggaagaggtactagtaaagctctatgaaattttcttttttgttaaatcaattttcgtatacttatgatgaactccaaaaaaaaatgtggtgttctttttatcttttgcggtgaactccaagtctaaacgtatgcgagcttttgtacgtaatgttacaagtgtcttttgctgcttgattntgaagttagtcgatatatatcagtggaagttttatgccttgtattcataggtcatggagaagcttgtagatatcgttcatttcttgcacttggagattcatgaggcatttggcgctgctggtaagaatttaaatc

SEQ ID NO: 238004 - DNA, 232 bp, Gossypium hirsutum
gctatttgaatttagctccaaatatctaatattgtttccccaaatattcaaaaaaggaacctggttctttttacagggtgctttaaaaaagattattgcctactaaaactattaaaatgttttattcaaaaccatggtattcatacctttattctttatatatactaatggaaccactttttcttttctaactttcacaatgaaaaaattttattaacactcatccttttat

SEQ ID NO: 238005 - DNA, 375 bp, Gossypium hirsutum
attccatcaatggatggtatatggaacgtggtctttttggcttggtttctggagttgatattttttctggaggtattataaggttacaagttgcagaagctgaggtcaacaatatatccatacgcttccttgatcgaaagactggtgaaccaactaaagggaagacaaagcctgaaacaatacttaggcaactcactaccaagaagggacaggtgtatagtatgcttcaaggaaaaagagatgtggatacagtgtcaactatgggtcttatggcagatgtcagtatcatacctcaaccggctggaggtgagtgagtatatcttttaaagaagcttgcacaaaattgtatgttgtgttcctgaaaatgtttaatct

SEQ ID NO: 238006 - DNA, 422 bp, Gossypium hirsutum
gaaaatcggtcctcatgaatgtgaataatattttggatcaggcaagaggtttattagtgcaaaaagattgatggcaatatcttgctatactatgaggccttgtttgtgaggttggcaacttggtttaatggcccacacttttccaactttcatcagtagatgagagcacctatacaagtttcatcagtagaggagagcacctatacaagtatctatctttctttctatataaaataatgtataaacatcaaatattatatcaatagctattatcacagcattcattaagggatcataataatgatgacctatatatcatataaaaggggggggccactgtctaatgttggtggaggcatgctttctgtccatactacatgggtggcatgtccttgcaagatgctgctatcggacagcctatg

SEQ ID NO: 238007 - DNA, 299 bp, Gossypium hirsutum
cgtgcgctccgctacaggactagccgatgcgctgcactaattcagtacgagccgcggtgtatggataccaatgaaactaccaagatcgtcgccaaggcacatggcttccctgcctgaaccatggatcgtggagaacggtttgaaagggtctagcaaggacattccccatggctggactgcacacaacatgtcgtgttccatgttgcgaccaactatggacctgacacttgataccaacggtcggcatgcaatgcttaagcatttcctctgcaatctctaggaggtcataatatgggacc

SEQ ID NO: 238008 - DNA, 420 bp, Gossypium hirsutum
agccgaggtgtatggatgccgatgcatctgccttgatcagcggcaaggagcatgccatagaatgcctgtaacaagcgatcgggttcaagaattgcaaacgttatagcttgtacatggcacaaggcttgacggtacacatcatgttctggcccatttggcgaccacctatttggatctgactcgataccaacagtcaacttgcttgataagaacatttcttctgaagaaactggaaattagaatatgggacgaacggattgtgaggatcaatatggtagcagttcatatgcgggtttgtctatgtcccataccattgaagatgcctcttgatgtctcagtactggtggattcacgaaagtctaggccaatcaagtttgggattccaacaactacttgctaaccttgatcgggcacccgaat

SEQ ID NO: 238009 - DNA, 287 bp, Gossypium hirsutum
gaaggaaggggacaaaatgtcaaaccttgagaaccctagggactggcggttcacatgggaagcgcaatctcattcttcaaatctccgttcgttcctcttccattctcaagcaaagccttccgttcaatgcagaaacctcttagctcaactcaatctctctcaatctcatcttctcgttacgtggctaaaagagggggctaaggaagaagtgtcgattatggttccgattccaagagttctgatagattctgaagctccggtgaattttatagctttcgatgatcaca

SEQ ID NO: 238010 - DNA, 441 bp, Gossypium hirsutum
ccccccccttttttttttttttttttttttttttgggtttggcttttaaagtctttggtgaattctcattacatgacaatgagcaaagaggggcagctgtaataggcccaatttgcccgggcttataataaatgaaaaaaacaaaaaaaccaaaaaatatatgtatcaaataaaaataagtaaattaaagtgtttatgaggccaatgtccgtttacaaattctgggcctaaattaaacccaaacctatttacaaattacctatggcccagcacttacacccaaaatcctaacccaataaacccacatcccaacccagtttacaaacagcccaaattcgaggcccaacaggacctaaaaagaagctcagcaactgaatagtaccagaagcttctggaatacagtggaatggcatcaaagagtgggctccttacccccgcgtg

SEQ ID NO: 238011 - DNA, 256 bp, Gossypium hirsutum
  unsure (1)..(256): unsure at all n locations
tagatatacaagcttgaaatagagcagaagagattagaaggggaggccgaggacaaataaagggtgcaaaagcaacttacactatcaccagcatacaagaaggtagagtacaaacctatacactaagagcaaagtaaagcttatagaaaaatanagagaattccggagtcggattagttttcaaggaaggataactgaacataattgcccaaattattgcaaagcaaagcttatatggctaccatcactcttcttt

SEQ ID NO: 238012 - DNA, 148 bp, Gossypium hirsutum
aacaccttcaatcctatggatcttaatacacctcggcatggtgcttatgtgggtctacataatatctctaatttcataaacagaggcacctacggtatagcaaatgctagatggggccattgctgcctaaagaaactaatgatggatc

SEQ ID NO: 238013 - DNA, 424 bp, Gossypium hirsutum
catgaacaagactgtgtgagaagaagagttatgaaatcggtgatggctaaccctttctgctgcgaaacagccgcataggatgccatggaggctgtgtgggatatctagtataatgacacatagccctttgacagagctccttgaaagaccagtttttacttagcattttatttcaatcaattctcaaacgaatcctgtttgtatcatagagtaggaaaatgccctgttttttcaattacatgcacatttcaatcttgaagagaaaattcatttccctaagaaaatattttgcgcctcttggaaaaagctggacaggaaaggattcgaccattgctaatgatatttgaagtcatgtttgagagaatgagagggccttattataccatttcaacctagttgagtcaatacgatgctgggttcagat

SEQ ID NO: 238014 - DNA, 343 bp, Gossypium hirsutum
aactttcttaccgacatggtgctgaaactgattcaggtcgggcaaaactgattgtacgcaagattcgttctgctaatttggattgtgcctctgttcaagcgacctctgaatttgctaagcccaaacgtaacctgaagaaagttttcagtacgacaactgatatggccttaccagcaaacccacactatgacctcgaatatgttacacgctactggagaaaggttcataatcctgtagtagaaaattcagagtagtcacacgatgactctgatcagctacagcaaagttagcagaagtttccatgcgctgctaatctcaatattgaggaacagagattgaatag

SEQ ID NO: 238015 - DNA, 207 bp, Gossypium hirsutum
ctcaacagattagctagaagaaatattacgagtcattgccgctacgtttaaatcattgtgcaaagcttgccaaatatctcacccattttacctcatgattcaaacgttgcaactgcgctttgattcataatctatgtcatattttatatcacattttttcttatccacagaaatcacactaaatattaccatgacatcttcaaaatt

SEQ ID NO: 238016 - DNA, 299 bp, Gossypium hirsutum
taattcatcactatctcaactattttatatacctatatccctctttctctacagcgcagactctaataacttggttgttacacaaaatcattcctttactctcttataatcaaccatttttaacacccttctctttttacccattcatataccattatcctctaacctcttaacacaaatcttttcataccctttacattctccataataactagaatatacttactaacaaatctgctacttatgctcacactaccaatgcttttcccacatctataaacaacatagcgtctatacaa

SEQ ID NO: 238017 - DNA, 335 bp, Gossypium hirsutum
ctgactctatcaaataatcacattcgttattacctagccaggctactcttgacggcactggcgctaaccgtactaaatctgagctccaatgacttatcagcccctccaacaaggctaattgactaggcaactgacaaatcatgccttttactaatcgacctctatcacaaccacatatatattcccttaccattatcgatcatcctactgataatctagcaaacattgacactttatcataaaactctcacaggaataaatcaaacatggattctaattacacttaatcttcacacagaccatctcatacatcacatcaatatcactttcaattc

SEQ ID NO: 238018 - DNA, 417 bp, Gossypium hirsutum
  unsure (1)..(417): unsure at all n locations
aattcttcactattaaacctgttttcttatcttacctttcattaaactccaaagctcgttttataaattactcacacatacctattattacatagtatcaaatctattaaactcttcttctccttcataatcacaatttcatctaaaaaacacagtctatcatattctctactttaactctacatctcttcacattctcctttacctctcctttctccatccaccagtccttccacctcactcaagacctcctctatccaatattaccatatttcataccaacttccttccatttccaccctcaattatagataacacatcaccttaaatacaaatatcttttaatcttatttccttaaccataataatgtcatttcaaacactccctttcctacaacattatnccatcttatatat

SEQ ID NO: 238019 - DNA, 335 bp, Gossypium hirsutum
atcacttgtttcataatctaatgtgtatccccaaccggttgaaggatccaaatggaacggagttccagaagaagatctaccatctgattcctatatgctccacttacacaatcttcgaacacttaattctgatacgtgcttcagatgccagttatttaaccctgtcacaatatatgttatacacgacttttcctactacaatgttctatactagaccttgtatcaactctacaattatgttacttctcagaactcagccattcgcttatcctatacttaatcgccattacagtcgcgcttttacttcagatcagcctatgcagctctactgctac

SEQ ID NO: 238020 - DNA, 252 bp, Gossypium hirsutum
atcacttctttcaaaatctactactaattcataaactgactgcataattaaaaaggattgacttccaaaaaaatatctacatcatgaaccttatttctacacacttacacactcatcgaacactataatcttatcctacattcaaatctcattatataacccaatcacaatatctataataaaaccctctacctactactatcttctactctaaacattctatcaactcttcatttatataacatctaataa

SEQ ID NO: 238021 - DNA, 385 bp, Gossypium hirsutum
tctacaactagtccatccccataactacactaattcatcactagccactcaccttttattctgcctccacttttatatctcacttgtcgtttcccaaaattcagaactctatatattacacatttacttctactacaccaccatttcatcatcttattctgctactacacttcacataaaccatcatcatactattaccatcaatgattcttctatcacttatatccttaattaaagctccataacacacttcactcaaaattccaaacatatttatcaataacaacacttctataacctatacatctattatactaatcatcttctcatacatatacctttcactcaactaattacacttcattacatcttatacatcatatct

SEQ ID NO: 238022 - DNA, 308 bp, Gossypium hirsutum
aattcatcactagatactttcaattcttcttaagaatactttttacatttactggaggtttcataacacatggtgcctcatataacttcaatttcatcatactaccttgtcatttctatatccaactatgttatttatcttaccaatctccatcactctatatcatctcttgacaaaacagcttccaatgataacaataacaactatctcccatacaatctatcaacatatcacaatcttatatttcattaaataaccaaacatgtttatgctcttcatccttattattcacatttcttactttacac

SEQ ID NO: 238023 - DNA, 323 bp, Gossypium hirsutum
ctaaaaacttttcatcaatactactacttcactacaggacgtgttatttacacaatcggtcatcatatctaccacttacaaaaactacaaattcccacaaatcggtactacattcaaatacaccaaaccaaccaaacaatcaaacttttacaaaaaaatctaattctatctcctaataacatctataacaccttacaaataattcctctcatcataaatataatcactttctgattaccaacatcccaaaatcaacctatagatctactgatctcacacacaacattactaaactgctcacatacattcatattacaaataat

SEQ ID NO: 238024 - DNA, 295 bp, Gossypium hirsutum
aaagctgcataattctcactagctcaaaccgttattctactgcactacttcactgcagaatgttttatttacatacgtaagaccctacctaaatattctctaaaccaatttttaaacatctattactaccacatttccttaatttattatttcaacatccacactgtttttataccaactaataccactttccacaacattctcttcacttataacatcaacatacatttccctaatcaattaataacttcataatagtacaataacccatacacttattttaataccaatcaat

SEQ ID NO: 238025 - DNA, 369 bp, Gossypium hirsutum
ttcactagcttcactctttctatcttccatatattttcccttcatgttgtccttattatacactaatctctgccttcttctttatttcttcctacatttccttaatctttgcttttcaaaaaaaaaaaataaaaaaaaccatactactctgtaaattcctctgcttctaattttaaactctctcctcttacattaacattaacaaccaatcacttgttgtatttttatattttcttttaattaccttaatttccaaaaattatcaatttcattgaacaaataccaaacaacatctccgccgttcaaaacattttctatgatccaaaatcatcacataaaccacctgcaccacctgatttcatatccatt

SEQ ID NO: 238026 - DNA, 396 bp, Gossypium hirsutum
atttacttcttggtaccattgccttaaatagtattaaacaaaaaggctaccaacatgactggggccgccaatattgatcttgccacctcattctcatccgtacatctgatatgaatcgacgaaccaatggccgtcaccaattgatcaataaagttctaaagacttttgagactttcatacgttttgatgagttatataacacgatatcaacctaaattctagaagacatgcttaggccgattaaataactggtcaaggtcccagtggagaaaaaacaaacgaacgttcttaccccgcctagcccacgctagactgtacctaactaacacgtctcttccatgtataaacgctttttacttgcagatgtctccaattatgattctgctaataactttg

SEQ ID NO: 238027 - DNA, 260 bp, Gossypium hirsutum
tagataaaccttatgtttcatatctctatctcctacattatcagtcggtcttccatcatcccatgctccattcacaaaatctttccactcttcctcaagaatatttcaatgacaatcatattctacgctctcatgatctcaataattcacaccataataattcatctcaaaaccttctaactccacattaatctaataaataaataaataaacttacttctcaactccaaaactacctaatcattataccatcatctctc

SEQ ID NO: 238028 - DNA, 257 bp, Gossypium hirsutum
ctgttatgttttcttaaacttcttaattatcatttaccatggatgttttcttatcatgagaaagctgctcatacaaaacaatctatcaacttatactacacatgcttaataaattgtacacactacctttaataatgaaattttactacaatcttctataactattaacaaacccactcaattacttctaatctaccacaccataacattgactatcactatatcaatacatcctatctcaccctataaacatactt

SEQ ID NO: 238029 - DNA, 367 bp, Gossypium hirsutum
ctattatcttataaattcattgatacctgcaaaattggaagagacatttcacttggaatccaacttttttacaaattgtttacccaatgttcaatttgctttcctacatacatataacacaataatcaatataccactgaacatactagattccttaatttacataaattaaatttttctcataacattcattatatatatatactatcttttttgtctaacatgataaatgcacttgcttctaatatatatacaaaacttgtatatgctctagaatcacttttacatgcacagctgttacataatattataactgatgattacactcattaacaattctcttctaatgatatatcaacatcttcat

SEQ ID NO: 238030 - DNA, 196 bp, Gossypium hirsutum
acatctttcataattctacactagctaatttcttttaaaaacaatattacctacaaattctgatgattcttattcaaaattaaatcatctcctttaccaatcctctacccacttctctctacacttttcaatatattatatctaacatcctatataccattattcactttaattctcttcattcacatattctaca

SEQ ID NO: 238031 - DNA, 401 bp, Gossypium hirsutum
gctctcacttttccattatctaaacaacaatatcctctacggtatgatacattcaaacttccgtccttatctcaactattatacaaatcactaaccaaccgaattattctgtaatgcaaaattagcctcaaacttcactgattcttaatcccataaaaccctattcaacaccatcttgaatatgctagctcatttttatattgattcatcttacatattaatttatcttatctacctgagaacattcacttcactgattacccaccatcttatctcagcaaaattgccaaatgaaataacctgtcaatttaaaccaattttgcatcatcttcttctagctattatgagactactgtataattatatcatacactttcattgaataaccaattgtagaacta

SEQ ID NO: 238032 - DNA, 146 bp, Gossypium hirsutum
ttctaactttaatatatcatgactagttccaatttttctctacgtatccaataacatatgaccttattcatgctaataatatctttatcttgtatcaagataaatctatcttttaagacatccttctggaaattcatctcatttta

SEQ ID NO: 238033 - DNA, 238 bp, Gossypium hirsutum
tcactagctacttctattctcatcatcaccttaaactcgtacgggtttttataacgcttggcatgctaactttatatccacaacattattctacatattttctatacacatcatttcaatacattaattcatatctcctattacaacatcactacttatgctcatcaaacattacttcccatcataactactaattcaaatactacttcactatataatacttattcacatttcatta

SEQ ID NO: 238034 - DNA, 162 bp, Gossypium hirsutum
ctggattttcttcatttaccttcatcttataacacggggcgcgccattcataacgcatggcgtgctgaaacttgcctcgactaatttagttacctcattgtatattaacatcagttcaatctatttacacatatctaaactgacaatctcattcattatctc

SEQ ID NO: 238035 - DNA, 412 bp, Gossypium hirsutum
ttcactatcacactctttttacaactgcgcctgtaatctcacctgtccgattaaataacaatggctggccgtctatatcatctatgctctactcttttttctattatccccttctctatgttctactactaatgataccactacaactatgtatttttattactattattttttaaagctattaatgcatttctccaatttcccttttatccatttgattttaatttcacgattcttattaaacttataaatatctcttttctattattttcgacaactacaattgtttctactctctttcttgcaattctctatatcttatctcaaaatctttattttactgttagtcacttttcttctctcactactaatttcccaattaatttttacttctctaattatcatcctttta

SEQ ID NO: 238036 - DNA, 432 bp, Gossypium hirsutum
ctcaaacccctcctcttattatatatgtatacacatatatgtattaacaatcccaagaatcaactttcagaacccccaatttagcttcttctagtaaaatacacatatcctttttgcctataatattcccaaattttatacaaacagtagaccatacatacctttctcttgtataccttgccttttaagcacccctttccttcatttctcctttttcttccgtctcttctcttctcttctcttcctttcacccctgagaaaatttgtgttctccatttttgagaacatgctttaatgtccagggaaagggagagattttatgagataggcaaaaagatcaagagagaagcagatgttgtttcatttggaggtcatcatcatcaaatgggaagaaggcacataatgggttctcatggaaccctaaataccatt

SEQ ID NO: 238037 - DNA, 360 bp, Gossypium hirsutum
ctctattttcttacacaacgtctcatcattcttctccgtctgcttcatcttctacaccagatctttctcaaaccacatattacaccaaatggtcaaaatctctctattcaatattctcttacatcatcccatcactaaactattctacctctaaattacataatcatctacgtcaactaaatccgattccttctatacctcttaaactcaaaaataaattctatacaccacatgaactcctgtataaccttaaacaatacactactatcccaacttaataattaaaaaagtctactcaagataataatatacatcgcactcatactcacactaaacaaattgcatgaattagacttctta

SEQ ID NO: 238038 - DNA, 361 bp, Gossypium hirsutum
attctacactagcaattttattttctgcaattgatcaaagattaacggggctgcatattttaacagaatcacagggccatgcatctaaactatatagttttaagcatgattctatgtcatctcttatcaaaacaattaatacatcagaattctttgattcataaactaatggagatctttcacgttccaagtccaaatcaattaatgatgatcaaaatcttctttgtctgacaagatatgctaaatctgattctgttccacatcttcaacagcattttttatcattaaaggtctaattgtgcattttgctcgaatataaaagatcatcttttctcacatcttattaactgaacacatcatt

SEQ ID NO: 238039 - DNA, 294 bp, Gossypium hirsutum
gtcgcatcttcttcctcagtccaaatcgaaccatctggagggtccttactaacagacaggcgagatatttttagaatacggcactgaatttacattctctgaattaactgatagggatttggcttctgctttgaccgaatatgactcgccctacttgaagttaaacaactgctactgcgatgatagaaacttattcgatgttgctacttcaactgacttgaactcaaacgcatgctgggtttctaatgttttcgatggaagatggaattattgtattaaacgtattacgccacc

SEQ ID NO: 238040 - DNA, 333 bp, Gossypium hirsutum
ccactccagaaaataaaataaaaaattgagagttttcagaggttgcaacactgttcgagcattttcagatttcttcttaatcccccccttttctgtaactccccgcttctctgaatccctttctgtaatcgtctgtctttcaagccgaaaaagtttctgtcaagaacaaacctaaactatcatagcacgtgtttatggtttttctgaaagccaggtgatcccagaatagagatccagattttgttcttgttttgtttttcattatttattatcatcagctaagagggtttatttttggtccctcaaggttgaactctattaatcacactagta

SEQ ID NO: 238041 - DNA, 358 bp, Gossypium hirsutum
catatccacttttatattgcatccaaataccacaatctggtagattgtttttataatgcttggtctcctctttctgtattgctccttaaaaaatctaaacgcacccaacttgctctatatgttcttccactaaccacacaatcgttgccctctattacattcaatcgtcaccttcttccttatgttaaaaattctgacatgcccttatttcattcatgcattataggaatcatgtactacctacaatataaaccatatagcatatcaccattccttaattctcttatccactcattcctatctaccataataatctacctctgcatctcattcgatctcacatcttcctacacctact

SEQ ID NO: 238042 - DNA, 363 bp, Gossypium hirsutum
ctcaaatttaaaataccatatccctaaactccctatcatggctgtttccaacattgatatacctctatacaacatatactattccactccatcttcagataatcacctctctatcactaaccacacatctagctatacataatcttttaattactgcatattcctttaccatctatacattattttatttctacactatccatatcatcccaaccaactacgctccatatccaactcacagccaccattcttaatacaaatatcatcattaatacatatataccataccaaaatacatgacaactactataaaactttaacataactacctatcttcaatagcatattacctatttctaccta

SEQ ID NO: 238043 - DNA, 252 bp, Gossypium hirsutum
ccatgctgttaaatcctgactatctaaagcagtcgctttggtgcgagctctctagctggcacattttctatgttaatattgagcatttggctattgaaaacttgcattacacggagaataaatttgctatccttgctgaatattagcattgcacttttgggagaccgttcaccttttaaaataggcccatgttcaatctcatttgagagcttccagatactgcagctcgaaaactaatgtcctaaatgcgag

SEQ ID NO: 238044 - DNA, 149 bp, Gossypium hirsutum
ctacatcattctaatcgctttaacgtattaaaagtgggagtgaacaacaatctacgggcgactaacatacatgttgatccacttacctcacatattaaatcttgctactcctactacattaacaatctcacacattataatactactat

SEQ ID NO: 238045 - DNA, 430 bp, Gossypium hirsutum
attccttctgtccctttattgcctcatgatgcttcttaatgtaatgtttataaatctagtttggtcccctccaatggctcacatttcattaacaaaccctagaatttctacaatgcatcaatgataaatggttaccccaattgctccccttattgctaacgtattaatggttctgttattccaagtttcattgataaataccctccatttaactatatgacttcttcagaatggcttcagagatacataaaaagtcacaatcctgatcattccaacatccattttcaacctctcaactattactctccctttaaccccattcccacacatgatggttcccctgtttgtcttttcaatcaatacctagttccatctttttcaaatccaacaatttacacatagagttcagtatttcattaatgatttcccc

SEQ ID NO: 238046 - DNA, 366 bp, Gossypium hirsutum
tctccactctacacgagttgatccaccatgctgcaataattcaccaccacatctctttttccatttcatctaccatcaattatctcccagaatcattcaaaatattattcacaacacatttgctaatccacctattcagctgaataacccatctcctcataaatctaccaacaatcctaaacactctataaatacactccatgatttcatatcctatcacactcacaacaatttctccattacccttccccacgctactttcattacttatatacaccattatcaacctcctatacatcatctcaaattcattccctaatttgatcacctatactcactcttcacatataccttaaacaatctatc

SEQ ID NO: 238047 - DNA, 326 bp, Gossypium hirsutum
ggatccccccatctgcaataattcaccacgaacttaccatttctgatacctatctcataaatcctactccagattcttactaaaaaaagccgaactccttaccaacctccatctctcttccactattttattccctcaacttcattggtcagattagaatgcaaaacattattctctactttgattatattatgcataaccaattggaaaatctattttacacacaacataactttataccaacatatcataacacaatatcctacaactctctttcatacactattcatacctcgtatttatatacctctatctacttctttttt

SEQ ID NO: 238048 - DNA, 210 bp, Gossypium hirsutum
ccactctcttccctttctaacgtacctcactttactactagatctactttccattttatgcaaagcatcactacctcctgacctttatgacacaatctcacaaccctatcttcatacccaatggatcacaaatcattcatgcttaactacacactttctcaacacaccaacaccaaccattagcgaatctacaatctcactctttcaaac

SEQ ID NO: 238049 - DNA, 434 bp, Gossypium hirsutum
cttattactattgatacctgacataaaaatttatatccaagtaacacttttaaattatggcctaagaatcccaatgatatccatataccaagatttactacacttaaaactcttagaaaaattacataaactatcaagattcttgaccgcaattatatatctgagaaaccaataggataatataatttgactattacaagacacatataccaaccagctataataaattaacctacaatgctacttcaattgactttcattccttctattattacacaaaccattaacaatgacattctccatatctacaaataatgaagaatcgactctgcaactaaagaggcttacctttccatttaatcaacacaaatgctatatgatagaaatgtgaacatcatcttacttttaaaactaatcatacgctacctcatttt

SEQ ID NO: 238050 - DNA, 230 bp, Gossypium hirsutum
ccatttaccatatctcctgcgtcctattctatagcgtcctgttcatttcctctcatggggcgcgctttgaaatccgcaatgactgctcctacaccgtctgtccagcaacctctcctgatggtgtccttctcctaaaccttcagcaaatttggaccatcaatgtcctctctggacaaagatttgatcaaatttttggccaaccacatttcattcaccaggcaccaaataag

SEQ ID NO: 238051 - DNA, 424 bp, Gossypium hirsutum
atgaagatgactcaacaattgaagttgatcacaacactggggcttcaagtcacaaggtatcaccatcttcttcacttgccccaactcctaaggcttctgcaagggtactagttccaggtagagcaaaagaaccagacactggtggtgttacagaaaaatctagttcaagctcccctggaaatgttctgggccttgcaaattatgcctctgatgatgaagatgatgaaattcaaagtgccaagataccagattcaaggagtaatgatgctgttctgcagtccagcattaggaagctttcacaaggcattgatgtaacagagaatggcagttcacaggtcgtacttgatgagcacaggcgagttgaaaagaattttggaagtgatatgaagtctgaaagcagaagagacactactgatgacagtgc

SEQ ID NO: 238052 - DNA, 416 bp, Gossypium hirsutum
actaccactagatgctcccccctgcttcaataattcaccaccatcccatcttttccatgacttgcctatttcactacacaactgccaatttatctacaatattcacatcataaatatcttttgtcaattatcatataaactacattgacaatctatatcctcactaaatcacacactgcttattatttcctccatactgcctaaacagactaaccttaaattttaccatttaaaccctatctatccttcttcccttacatctctactaactacaaatcttaacttttcgctacatcaaaacaacatattctaatccttaactacaccttttatactcacacttcaataacacatatactttacacaataataccttcctaaatcctatttacaacaccgactctatttaccatact

SEQ ID NO: 238053 - DNA, 453 bp, Gossypium hirsutum
tcctcttcccttctaccactggatgatccccccttcttcaataattcaccactaacttccacttttacatataagatatacttcacataatctagtacactttttaaacatcttaactctattcgactactactaacttaaactctaaatttccattctaaattacaccaacttaattcataaaactcatttcataattacccactttcataataattctatataccatttccatctaactcaaaatctattaacacatcaacaacacttcatacttaacaactctttataccacttaaaacaatcacccatatctttcttcttccaattcacttaaaccattactcaaaatttatacacacattaccttgcctatcatactcttttcatcaatctaacttctacatataagaaatctatcctaattcttaatctatattacatcattcttac

SEQ ID NO: 238054 - DNA, 323 bp, Gossypium hirsutum
ccttcttcttcacatatcaaatctacttcacataccctttgtctcctttatcaaaacaggacactatttttttactccttacccaaactctccattcctaattttaactactccatctctatttctaaaacacatctttcaaattctaactttagtaatacttctatatccaattaccacctccctcaaaatctattaatgacatcaacctatcttccaaccttaccaaccttttaatcaactctaaacaatcttccaaaactttattctagaagctcactaaaatcattcttcaaaatctatcaatcactccctactctatc

SEQ ID NO: 238055 - DNA, 287 bp, Gossypium hirsutum
cagttgtaaaagctgcagttgatgaaagattaaggtgtcggcagatctggagggaatcacagggtcgggcatataagctatatggctttaagcatgattctatgtcatctgttatgaaaacatgatagacatgccattagcatgatatcagaactaatgatagatctcacacgttccaggaccgtatcaatgaatgatgatgaaaatcctctatgactgacaggacatgctaagctggattatgtaccaaagatatgacatcaccgatgatggataaacgtctagtt

SEQ ID NO: 238056 - DNA, 326 bp, Gossypium hirsutum
cagataccatacctgcccttgctgacaaaacaactcctctgtaaatttaaatggaatcgcagggccaatcatctaagctatatcatagtactcattatactatctcatcctttactaaaactttctttacacttacatttaatgaaacaaaatctaaagaatatccttcacgttccaagaccgaatcaatgaatcttgtatacaatattcttcctatcacatcagatactaaggcgaatctctgttccaaatatttaacaacactttttactgataaaagtcgatttaatcaacttgttataaaaaaaaagattagctcttctcaa

SEQ ID NO: 238057 - DNA, 361 bp, Gossypium hirsutum
catctttcttcaatttcgattttgtctccatcttcctgctgtagtattttcattataggtcaacctctcccccacacgatccaacaaatctacatttgaactaactacagctaaatataaatcaaaatgatccattcaccttgagataaattcatatatttagtctaaactatcgactattaaatttcaactgaaataatgtcttattctatatatattcgctatttaatcatgactttattcacctacaacattacattcaatcatcaatcatcacaaatgcaacctcaatcacattcctactacacctcatgatcaatttatagaaaagaccatacttgtaccatttcaattattacac

SEQ ID NO: 238058 - DNA, 418 bp, Gossypium hirsutum
cacacttcatctctgtctccagatctctgtctcccccttctgtttctatctgaaaccaagtaggaataaattcgtgaacaccatgtcagtctgctcgtcttcttcttcaacaggtaaagcttgcatagttcacagtattttagctggcacatcaattgccatatccattgatacccattcctatctggatcaatctacgaagtttctcacacatgtcaactgaattatacccatcacatatgcatcttctcggttcgaaagcaagcctttcgatcatatccttgagaaacccatgatccataggacatgatagagctcaaaactggctaccacactcaaccatctagttgaggcaacatatgatgaaaagatagcacaatgctttcaaggatatggcgctgatgccatcattacatca

SEQ ID NO: 238059 - DNA, 302 bp, Gossypium hirsutum
  unsure (1)..(302): unsure at all n locations
cttccgctctacaactagatgatcccccctgctgcaataattcaccaccacctcaactttatcattctcactcattcactcattcacaggtganacaccctttaattttaaaaactatattatccctctatactgaccaatccaacttctttcacatcttcatccttactatactccaattatctattatactaacaccataccctacatcccttaatatcccatacacttactttaaaaaccatactttatataatactacaaaaatttgcactctttatcatatttcacatctactttac

SEQ ID NO: 238060 - DNA, 303 bp, Gossypium hirsutum
gctaacagccgcatcatatcaaactgcatagaccaactccgtgagggaacatcggctggtatggatgaagctcagtgtagaaacatttgcatgtttgacagaattttgatgaatggcaatggttccttcaatcatataccataactacagagtgaatcacctaggcagtccttgcgttcacaatggagtctccattgataccattgctacacaagaattcttctattggatattgaaccaagcggataccactatgctaagaatgagctactactctataggtgtgatccttgatgctcataa

SEQ ID NO: 238061 - DNA, 394 bp, Gossypium hirsutum
tccccactgctgcaatacttcaccaccaccacactttacatcatactccacatctctcacttccacttcgctctctatccgaacccatgtccacctaacttcgtaaacaccatcttaatctcctacccttcttcttcaacatctaaaactctattataccacatactttaatatcgcacaccaatcgccgcttccattaccacccattcctatctctctcaagctagtaaatttccatcacttctcatctaaattatacccaccagatattcatcatgcatttaccaaagctagcctttctaccatatccttatcaaacccatcatccatagtacatttcacaaatcaaatctatcgaccacactcaaccatctacttacgaccacacataatt

SEQ ID NO: 238062 - DNA, 376 bp, Gossypium hirsutum
  unsure (1)..(376): unsure at all n locations
cttcccttctacaactggatgatccccactgctgcaataattcaccacaactctctatcccaactctcctattattaaagaacacacaccgacacttcctatncaacattgatgcaatcctaaaccactccactataaatatcctataaacacattcacaaaattcccattcctattataattcctaaaaacatacacataatttaccatacattcgtctacataatatacttaccacctataatgcatattctgacatgatactccatattgtatccatcattatctactaatacatatccttttatcaactaaaaaattaacactaccattttcatcaacatatctaaatgatctaacatattcttaataatat

SEQ ID NO: 238063 - DNA, 414 bp, Gossypium hirsutum
tcccccctgcgtgcaaaattcaccaccatccatactttcttacttaataacaacaacctccagattatgatcacattataaacacacggctgcttccatataattctacgattgacctgaccttaatcactcaaatattacatcaatcaaatgctatctatcacttaacaaccacatctattgcatacactctcacatgatcttcatttctcacttcaatcgctacaatacttgaaacactatactaaccatcatctactcccaacattacttctaccttataacatcatgctctcaacttattttatcatataataatcacccattctaaaaaatgccctacatccatagaataatactcatatatctatcatacactcaacatactttcaccataagcactcacattctata

SEQ ID NO: 238064 - DNA, 423 bp, Gossypium hirsutum
tgctgcaataattcaccacaagtctcttttctaattctaggattttcaaagaatatcagctgcagatttcatctaatttgtgcacacttcacaattccactagatatgattaaaaacacttgaaaaaaattaccctttgtcgtataaattggacaaacaaacaaatctcaatccttatatttgagcacataattagtttgatcctctaatgcatatccggaaatgatacttctgcttatatttgctgttattgagacgcactttcactcttataaattaaattaataacactattatgttcatgaaattattgataagatttaatatgacttattgtaacattagacatataattataatgaatattatggcatctgcttatgtacatactacacttctcctatatcttttactaccctttac

SEQ ID NO: 238065 - DNA, 199 bp, Gossypium hirsutum
tagatctattttttaacataattactacttataaatcattgttgcaataacaaaatatattggggatccacattataaccactaactaatactcactttacatcaataatttaccatactaatcttaacttatactatttaaaatttaccctcacctaaagtttcccacctataatatcttataccacactcttcattc

SEQ ID NO: 238066 - DNA, 448 bp, Gossypium hirsutum
tgctccaaccctcttcaataattcaccaccatccatgttttctcactcaattacaccaacttccaaattctgtctcttattatcaacccctaggttcttcccatttattgtatgcttgatcttccctttcttactcaaatatttcatcaatttaaacgttgatgtttctccgctttacatttatttaatccattcatgcatgcccttcttttttcaacttaattcgataaacccttaaacttatcattaaccaacaacaaattcctcccgttattgtaaccaatttcaaccaactcttcacttaatttacccgatgataattacccattccaaaaagtcccccccacccttaaaattccaccttactatcttccatactcttaccattcttttactgtaagcactcaaattctatatcaaagtgagaaacataataatcttatattat

SEQ ID NO: 238067 - DNA, 239 bp, Gossypium hirsutum
cgaacagaggctggattatgcctgactttggtaaagcagacgaatttagtgcgtgctgtcaatgctcgcacatggtgaatgagtaaaattcagcatagggctatggataacttgaatgacacggagaagaaattggctactcgaagctgaatgttagcagcgcacttataggatcgcgtcgaccctgaaaaatatgcacatgagcatatctcatttgagagcttacagatactgcagct

SEQ ID NO: 238068 - DNA, 355 bp, Gossypium hirsutum
ctctgcaataattcaccaccagaatactttatacttttcattaaaacgtcctaaagataaagaggatttcaatacatactccgagatcaaaacagtatttaccggaccttacattttcgataaaaatggcttatcatctagctttatctatcgaccctcttataacaccttaaagtttacaatcaatcccagaaacttaagcttctctatcttccctagaaatttcttctcaattctttaacccaaatgcttttactatttgtcttaatcaatttgaagaacatggtttctatcatcaaaaataaccacttataccgacatcttaataccctatctttcaacaagacgacttcat

SEQ ID NO: 238069 - DNA, 331 bp, Gossypium hirsutum
  unsure (1)..(331): unsure at all n locations
tgagattcgtattatgctgttagcgctgtcagatcggtagcactaacgctctatgatccattaagcaacaacggaaactcactagcactcgtacctgaacacagtattacccgtaatgttcactggacacatacgtctcagatcgttgaactgagcaacgcctagttttcacntaaggaatactaacactaacgagattttcattcgcagcatgccactacaacaatatatccatgatcgtcttctttctcgcattcaatataatcgccagatacttacacaactatacttctagcaattttcttcattcatctctcaatacgatttaccg

SEQ ID NO: 238070 - DNA, 285 bp, Gossypium hirsutum
cctatatttcaacacataaactaatccatctagggttagccaacttacaatcgggtcaaggctttaatattcaaacactctacatatatatcccaatctaaaactttatgccctaactaatctctaccattacaagcctttttcaataacccctctatccactaactttagatattcaaaaacctcttattcaactcctaaataacattcttcccctaaatataattgcctaccaaacattaatgcatctcactaatcagatcattttgcactttaataatttta

SEQ ID NO: 238071 - DNA, 214 bp, Gossypium hirsutum
atcatctttcataaattacctatctgcaactcgggtacgtaaactaaccaaagggaaaaagctttattctccataatctaaacatacatatccttatctcaaaaacattactataactcatatctactatttacagcctttaccttactaacattatccccttactttagattttcataaccccttatctaaactccatatcaatctcattcac

SEQ ID NO: 238072 - DNA, 315 bp, Gossypium hirsutum
cattgattattgtttcaacctcaaaagcacaagcaatagagagaagtggacgtgcaaggcgtgaaggacctgggaagtgtttccgtctctatcctgagagctagtccgacacgcttgaggattcaaccaagcctgagattaagcgttgcagccttctagaatggcattctgcagctcaagggcctgagagttgaagatatatttgggaatgactatactacagaaaccctcatggacagctatatctacgatctcggatgagcagctccagctaggcactgtcactgactaaatgactcatggagattcagatta

SEQ ID NO: 238073 - DNA, 154 bp, Gossypium hirsutum
ctttagcttttcttttgctatatctcatctctattattggtatgtgcaaaatgacggccatgctcgatatcaatatctaaatacccttctgtgccttacactctgcctacccacatcacctttcactctaaacttcaatctccccatccttctt

SEQ ID NO: 238074 - DNA, 432 bp, Gossypium hirsutum
aagcacccatctaaaagtgaagttacatggtgttcctaaaaactctttgtctcccacttgtgattacattcctttctttgtcctcctattgctttggccttggcaggtacagagaggaggacccatttcacgttgattttcgtcgaggccgtgcttatcaccacccgacatcgtatcgccatccttattttcgcaccttcggtgttcgcggtcagcgaaactatcataatccctactataataacgaaatccagtcgaggcttgatagaccaagtggtgcagcgactccgaaggtagtcaatgtacatgatttcggagctaaatctaatggaagagatgattctcatgcatttaagaaagctcggaattatgcttgatcttcatctcaaggagctattatggtggtctccaagaagaagatttatcgtctta

SEQ ID NO: 238075 - DNA, 144 bp, Gossypium hirsutum
cagttgtataagcttcagctgatgaaagattaacgtgtgttcaagtttataggtcatcacatgtccgggcatctaatctatatagttctaatcatgatactactacatctcttactaatacacgtattacttgtgctattcaaa

SEQ ID NO: 238076 - DNA, 347 bp, Gossypium hirsutum
atcaccttttaagatcaacagcaacatacacatatcaacgcatttgtgcactctctacctcaatctaatcacaactctcacaactactagcagcttacaacacatgacaacaataccatctccaacaccacaaatattccaactatacactattatacaaaaattctaagcactgctaagatcatcattatcataaacagacaactcagcacacccaaacattcatcagtcaatacaaactcactatgatatgctcctaaaatatcttaaacaactaaccaatccattacaagaagcttccaattaaatccctaggatctaatcttaaattaacatactctcctatc

SEQ ID NO: 238077 - DNA, 391 bp, Gossypium hirsutum
gcacaattccacctctgacctcaagtaattgctcaagggcctggggccatttttctaactcaaccacctattcactaacctgctacatacaacgaactgtactctgaaaatttatacggtactactcttcatcgcaatacctctcatgcttcatactacaattctcacaataacatacatgcacttactcatcgtacgaatatacatatgaacttcctctaatctcaaaagcaacatatattcattacatctccaccaccataccttttatataaataaccactcaattaatttaatgacctatacgccataataccattattcctcaatcattaataatattctacctcaataattgctcgaattgatgctgtaagttactttaatcaat

SEQ ID NO: 238078 - DNA, 320 bp, Gossypium hirsutum
gaggctgaaatgcttctggtagagaaccttggatcatgtgatcgagatcacgagttcatcgagatatttctcaactataatgaattgctacctgctgatgtgattgatattgtttctcaaagtctatattacataaagctaacagagttgcgctgctgatatgtgaacttcagctatgctagtgtagctaattatgacccataagtttgagttggcctaaatagctcctacacggttggaggcaagtggcaaggtcagcaaggtgccaaagttagctcaactggtttatgatgcaacgtattcagcctccgtatcatgat

SEQ ID NO: 238079 - DNA, 379 bp, Gossypium hirsutum
tttctttctcacgtctggagctttcttctatccgtcatgcttcttctcgattcctttcaacctcttcccaagttccaatgaaggatttttcaattaggattctatctaataacagcttataattggttatctgtctgagttcctgttccttttattctcttttgtctgtgtttattcttttcatcaattaactataaagaatgtgtggatatggatgacacggaaagtctacctccatttctcgacaaagaaaactcataaaccctaaaaatacataaccccgaaacccataataaaagcttaagcttgaagaaatttaggaactttaatggtcgctggatcaagatccggtcatagttaatagcatttcaatggtttt

SEQ ID NO: 238080 - DNA, 438 bp, Gossypium hirsutum
ctgaatctgtggtaccatcaatttatattggtcagtttgctcggctgcttgagcaaggggatgatccggctatgcagtccattactgatgatgaatacactcgttatgcaattgccgagggaaaaaggtttcaagactcctttgaaattattgctttgctcaaaaagtctaatgaaatatatagtaatcttaaagttcagaggatgggttctctttgtgcctttcagattgctagagaatatttttctttgggtgatttcaacaatgcaaaacagcagtttgatggtgttgcaaatctatataggcaagaaggatgggttactttgttgtgggaggttttgggttacttgagagagtgctcaaggaaacaaggtgctgtaaaagagtttgtagagttatctcttgaaatggctgcattgccagtatctattgtcgatg

SEQ ID NO: 238081 - DNA, 416 bp, Gossypium hirsutum
catttgacaaatgaattatcttacataattgagaaattaccgtatgatgttcttgatatggatttagtggcagagcagcgtgtacatctattccttgcttggtctttattgttatcccatttgtcatcattaccttcattatcaaatccaaggtagagactggtacaatatattcaaaattctggtaatccactgatactagattgcctgttccagcatctgctttccgacctatcattaatgcacgttctaaagaagaaagatggggagcctcctaatattatatcataaagctgaactgcatccaaatgctccatcacgtcagggtcagtattgatatctgcggaatcactttggcctattgatcctgtgaaaatggctgcatttgctggagcgatatatggccttatgcttcg

SEQ ID NO: 238082 - DNA, 232 bp, Gossypium hirsutum
tagaacacacccttcaatctcttaccaacaaaacagctcctcgtggtcttcagttccatactcactatcacaatcgaaatcaatctaccatgatctacatcctaatacatcatactactctacctaactctttaaccttacatattatgcaagccaatatatacagtcttttcctctacaacagacgttttcaacactctatctataccaaattcttattactcgttcttac

SEQ ID NO: 238083 - DNA, 169 bp, Gossypium hirsutum
gttgattggatgaaaaacaggcggaatatcatgctatccatgtacgtgatctatacgaggcaaggatgatcccatgtgccatatgattgtccgtggcatatcaatggctaggcgtgctgaagacctatttaatccgatgaataggagccttcaagaggtacagttgaca

SEQ ID NO: 238084 - DNA, 305 bp, Gossypium hirsutum
cgatttagcttcaagggatcctgatctcaacaagcttttaagtaatttgctcaccacttcacacaatggctgtactatatttaaccactaaacatacatgctgtgcaaaatctaaaatggtccaatcatatcagattgtctctctttgatgctgtttatatggtgcatgcttctttgctaaaacattacatattgagccatcaagtttactaaatgttcatcattgaatttgttctttgtccggttattcttaaatgctgtttcacgtttacgtaactttatatcaatcttgtagatatcactac

SEQ ID NO: 238085 - DNA, 177 bp, Gossypium hirsutum
ccccaatgctcgcacctgtgcctaatcttaagacgatcacgatccatgcgtagcccagcttttactacacacgctgtgctgcctacagaatggtcattgctgcatccagggctcataagcatgacgcaactgttgacctagcttagaagctgcttaccaagctatcgtctgatccaa

SEQ ID NO: 238086 - DNA, 428 bp, Gossypium hirsutum
cctcactagcattttctaccacctccgggtatcatgtacacgactctttttctcacatcgatcgctcccttgaagataccattctcgtacatactgcagcatattatatatatcccacaccactggagttgaaaagcttaaacaaatcttcttctgaaagtgtaagttcacctgaaggcaaccatcacgatgctccagctcctgaagaaaaccatgaccatacactgactccagtatcattcttggcggagaaaattactcatgatgaagtataggaacatacccatttagactctaaacttacggtaggatctgatccaatggaacaaatcgacatccaacaactttcacctgatttgtgtcgtgagagaaaaacttctgacaatagtgaggggcatgctcttagtgctagtgacattgtcactgat

SEQ ID NO: 238087 - DNA, 130 bp, Gossypium hirsutum
tagatatcttgcttaactataccgctaaccactactttcaatccgttcctggaatcctgcaatattaacgtcatcttacaatctacctatccatacaattacaacgtaccgactaacaaaaccaaccctc

SEQ ID NO: 238088 - DNA, 448 bp, Gossypium hirsutum
aagagacgagaataagaataggaataggaataggaacgatgagaatggatggaaacggcgacgcagtggacgaccaacacccaaatccctctctatttcctctctttcctgctgccgcttctacagttactagtactagcggcatctatcaatggctttccaatcctagcttcaccaccgacctttccctcatcaacgacgccgtttcctctcttccccgctccctcgacgacgtacaagaagaagaagatgcccaagaggaagaagaaaacgaagccaagcaacagcagcaggagaagctgccccattcttacgagctacttgaggaggatgaagaagaacaagaagaagaagaagattctgatggagacaagtacggcaagagaaaaaggaagaaaagaagtatgaggagaaacacgaagaaaaagatttcgaaagaaatcggtga

SEQ ID NO: 238089 - DNA, 407 bp, Gossypium hirsutum
aggcaatcagaagttcaagtcatcatatattgaaaaattcagcgggatgaaactaggaatgaggaaagaatgggaaaacagaagcagtatgggtatcattgtcacaagagggaaaaggaaaagtgcaaatctcctgagttggaaaagcaaaagagggtggttataaatacacaacccagtgagagagttccttcttctcattcacttcatttttttcaaccttcatcatctgcaaatgtccaaattgaaaacagttgctctcgtgtaaatgacctggggccatttgtgaaaattgcacaaagtagatgtcgagaatcatcatcaacggcaaacacggagggtggatcttgttcaactagtttgtttggttcagtgctaagaggatctatggattttttagatcccaa

SEQ ID NO: 238090 - DNA, 431 bp, Gossypium hirsutum
agtaaatatccaggtgaaccttttggatctcattggtttcgtttggatctttcttttgattttttacctgtcaattgttacctgcttaaggtgtaggcgataatacaaggttgtcaatgactcaattctgttttaattttactacgctttttaatatgtatttatgatctaaaatttaaataaccatttggatgaacaacttattatagtgcctgaaatgctgtcaagaggcatgcttcttttcttttctttttaatattaaattttgtccatttattctgtcagttagagcatattaaacaatatatatacatgcatatatgtgtgtgtgtcccttctgttaaattcttcgttatgtatttaataaagtcaactttgtgtctggctgcaggcattagtgatcttaggttatattttagctttatatttta

SEQ ID NO: 238091 - DNA, 268 bp, Gossypium hirsutum
acgaactacttcctattgagactgatgggattttgtcatgtacgagacagccttgcaatattgatagctgagttctataatcacaataagcgtgaggacgattttataacaagagctgtatgggcgacaagcaatcgtagaagaactcaataagctttattaaacaaagtcttttgataaatcaaggctcgtatacttatgacgaacttcacaaaaaaatgtggggtacgttttatcacttgcggctaactacaaatgtaaacgtatg

SEQ ID NO: 238092 - DNA, 288 bp, Gossypium hirsutum
aagcaaaccatccttagaaccgaatgcatgaagctgtggggatacagaacatgtgcttgtactaaagctcacgtgcaagtgaatggacttataggatcctgtgtacgcaattgcgatgatctagctgaaccgtatgtatgcttgtgaatggcccatgtgctaatggttctttacaagctggataatgccgcaacagcactggaagaagggggattcatcaagatactatcttctaactacatgacattgccttcctgtggatagaaatgtgctcctaaactcagagat

SEQ ID NO: 238093 - DNA, 431 bp, Gossypium hirsutum
gttgatatcatcagatatatcaagtcctttcgagaagttagaagcgtcttcaagtgcattgatgggcccactgaactctaaagattcaaatgctgttaacagtgttgaatcaaataagcttttagctttagatcatattgtgccactgttaagtattcagaatgaattcaaggtgcctggaataattccctctgagattttagaaagtgagagtgagaataggattagtgtgccactagttagccttagtgaattaccgtcaccactaagccaatctgtaagtgttgatcagcttgcagtaagggagagtgaactgtttggtttctattgccttaaagaggaattgcaagcttatcctgaatgtaatgcttacagagtgggagagtgcggagaaatcttagatgaagttatgaatccttaccctgctggat

SEQ ID NO: 238094 - DNA, 454 bp, Gossypium hirsutum
  unsure (1)..(454): unsure at all n locations
gcaaagtgacactatattatatattgtcgttgtttgtaaggggtctagatctttttctcttttcagtgggcaagtcaacgcaatcaagctcacctgtaagatccagagacatgagtcttctattgaacacactttttgatttttcttcttgactatatatataaggtttaggattttcataggaaaaactggtcaagggagtttaataaagcattagatgcctctcttagatttgctttcttaatttaccagaataagagatatggcattaatgagtgaatctaattgaacagctctcagtgtttgaccttctaaatagttgattgattcttccaaaaatgagtctggataatcatatntgaccttttataccagatgcaagagttgacaacactggtgctgtctactgcaatttttaacctgctaacttaaactattttaaaaccggagatta

SEQ ID NO: 238095 - DNA, 131 bp, Gossypium hirsutum
  unsure (1)..(131): unsure at all n locations
ctgctaggannattcggcatcgagggtagggcttgtaaaagggcaaccagctatgatgttcattgcggtatttgtggtagaanntaatggggtgaagtcgatgggtctctgagtgaacccttgannttcaa

SEQ ID NO: 238096 - DNA, 180 bp, Gossypium hirsutum
cagggttgctggctatgacagccttgtactctgtgtcgggatattcacgagattattcacgtgggcctccagtttgatgtccatgttgagactgcgtgcaagcttgtccatcgggattgtatcaagcctgcgatcactcgtgacttactgtgtgtgtatgtgatagcagatgttcaaagg

SEQ ID NO: 238097 - DNA, 139 bp, Gossypium hirsutum
ggaatctgttctacctttcgagcaacttcttcttatataggatcaggcttctaacgaagtgatgccggatcaaccttgattgcagatctgatatacggcaaaaacggcaatcttgcatccatactggaagtgctggatc

SEQ ID NO: 238098 - DNA, 103 bp, Gossypium hirsutum
cttaccaggacaactcgcttctttatactgtaccctaggggcggcactgtgctgtggctagctctagacgatgcttcagttttcaacggctgcctttgggcca

SEQ ID NO: 238099 - DNA, 430 bp, Gossypium hirsutum
gttgagttgtattgttttttggtgattgtccagcccatccgctgtggcatctatgggacatcatttaagctgagtgtaagtaaatggattgatagatgaagttcaactcttacactggagttttgctgtaggtctcatagactcgttggttttagatgatacgaactggttgcagcttgtagaagctgcatttgaggatgttgataattttctgggtgatactcaatcattcttataatgagaagtcggttcctgtcaacatcatacatttcatgctacagtttagctgcagtaaacaatgtatgcaagctagtgatcatgcctatgtcgatacagtcgacatctctatatggagggtggtagaagtacattgacaaattggtgattattatctgctacaactgcgataatggaaaggtataaaatttta

SEQ ID NO: 238100 - DNA, 334 bp, Gossypium hirsutum
ctagcttcatatttcatactctatcataatcttagacttggtttcctaataatcgcttgcacacttctatatcgcctcaaaaatactcttatcatcagcatatctaccataatcttcaaactaatacatcaaaagatttttgaccactatatcacttcaatactaagcacctaccattaacaatcatacaaataatctcacatcctaccataatgaaataacagtaattgatccaaatatcaaattctataattatcccacacctaactacgtcagtaatacttcaaatatctacacagattataacatcccacttctagcaatctcaaccaaa

SEQ ID NO: 238101 - DNA, 349 bp, Gossypium hirsutum
aattacccttctttgtcatagtacataactatctacatctgaaggtatctcaagtccagcttgtctaacaactacttctctctttcttgtttctcaattgtaccttctctcctgtctaaacacagcataaaacacagagcatcattaatggcaaccaacagacttgctaccatgcaccataaaaacactaataggatcactctaatacctgtctacggattactaaaatcgattctgatcattctactacttcagaatccactgtcatcttacctgaccatgaagactactgactacttagctcttaaaaggccctgcctttggtgctcaatgcttgatcatatctttg

SEQ ID NO: 238102 - DNA, 291 bp, Gossypium hirsutum
ccccccctttttttttttttttttttttttattgtttttgggtttttttttttttttttatatatatacaaattgccatcttatttcttcattattaatcgaaaaaaaggaaaattgggaggaaaagggttaaaaatgacatatgccggttagtcttttatttcaaaattatgaactcaacttccaatcagacccttgcaaattttgctattattattattggtatttatacatcactgctagtgcctgctggtacatccctccattgttgagaaactgttttaatccggg

SEQ ID NO: 238103 - DNA, 121 bp, Gossypium hirsutum
gctagatctattgctcatttaattgatatctgatttctgagccatttgcaattttgtcataactgatatctaaaacttatcagattatactacattctttaccttcgagcttgaacttact

SEQ ID NO: 238104 - DNA, 322 bp, Gossypium hirsutum
tagcacgccctttaactttatatgctttcattccttattgtaagggcttctgtaaatggtactgctaaagctcatactcatggtgacatacttcatagactctgtatacttctgtcagaactcttccactatctttataggaatctacacactaactaattccctgtattcatccattatgattcctgatactgattatactacggtggttaaacccatcaccggtacaccatatgccattattactccactcaaatcactccatgcactatcaacaataggatcgttcactctccatagcattcaacttatgattcttact

SEQ ID NO: 238105 - DNA, 385 bp, Gossypium hirsutum
ggtctatatctagctagtccatcaccctgcctgaattaattacgaactagcaaggatcatgactatactcattcttcgtactctcaagctggatatcatacaccgtagccgacaccaaacccattacaattctcaggatactacatgccccaatctcgtacatgaagatgttatcaaagcctacatcactatattacttactctgtgtgtatgattgaacactccacccaactctttacctgattcttgctatcataaactttactactccttcacatatatgtccccctcaaatacacacacacttaatcacattcatgctcctactctgcatattcatagaccaaattgctccatattacttaactcgtatctataagcttct

SEQ ID NO: 238106 - DNA, 416 bp, Gossypium hirsutum
  unsure (1)..(416): unsure at all n locations
attatcttcctctcaatcttgcaaggataagattgcaatgggctaaactccacactctccactctgtaaagtgccccaaaccaaccaaataagctgaacaccccaaacgtctctcattagccaatctcattacatgacccatcaccattcacccccaacacctatattctccaatccacattccacactccacactactgcgtctttccttcttctgctgctgcttcttttgcttgacttttttaatacctttcaattattttggttattattgagttggtgaagattccaaaatactcttcccactctgattaaaccttacggaaggaagagactaagaggagacacccatgttgctaaagtgatctngagattccaatatgagagaagtgcctaacagacagtgatggctataa

SEQ ID NO: 238107 - DNA, 368 bp, Gossypium hirsutum
ctataactagggggtccatcacgctgcctgaattcattacgagctatcttctccttaactctcaagtccttatactttaacctaaggccgtgtatctatccagaggctaacatctagatcatgactcaaacttcaacatctcctatttgctcatatcttactattacctgcattgtcttactataaggactatttcgtcaaatccagaacaacacactactgcagcgctcactgcttatgacctccaagattatctcgctaataaggagaatctggaacaattgtcaatgatgccaatgaccccattcattacaggctctacaataatggaactgactcacgggcttcatactactttaatgccacta

SEQ ID NO: 238108 - DNA, 218 bp, Gossypium hirsutum
cataaatttatgaaagatcatcatctttatatgcaagtgatgcattatgatacatgcgtacgtaacacttactgacaagtcgagactctctctacatcacacgcatcaacgcaacagttcatcgtaaacatgctggcagtgcaattcatcatgcttcaactacccttacaattctttactttcacgttatgatcacgtttattaacttactgttacct

SEQ ID NO: 238109 - DNA, 343 bp, Gossypium hirsutum
ctcgagtgttttttttggagatatgacaatgaagaaaatggggggtgaggaatttttccaaggaatctgcaaaaatgcatagtatacttatcatcaggctaggacgatgattctacatcaggggcatgcttaccttatgtaccactatggaaacggggactaatgacccttcacttacatgtaaaaagatttctatgaaatccctactgcattaaagcacacaaattcacatctctagcggtctttaccatcatcgaaaacctaccggtgacattagtagatgcaatacctactatgactggcttatgcgaaatctcaaaatctggattaaatcgttataatc

SEQ ID NO: 238110 - DNA, 376 bp, Gossypium hirsutum
cagtcatcttatactcttcttttctctaatctttctcctgtaatcttcttcttcttcttctctctactactctgtttttctactgcctaaggggttgctccgtgacatattttctgctctatttagttatttattgcttcaattgtttccagatagaatgaatcaaatttgacgttaagcgaaatccaatagtggttctgattcaatactctgataaatacttcgataatgcttacaagtacagtttgaatagaaactgaattctggaaattatggtgctgaggtcagttgtcttcatcatatattggcatccttgaattagaattgaggtggatgtgaaagccgctaatattaggtgctcgccaaagtgttgatg

SEQ ID NO: 238111 - DNA, 280 bp, Gossypium hirsutum
cacagctactctccttgacataaactctacctctacacgcgggccttcaacagatatgtgtgctcaatgtcctccacaagctactacatactatctattactcatatcccataactacaagcatcactacatttcttattacatcatctacttacaacatcgatgacccattacatcatatcttatcaaatcactgcgtctactacatcacattagcatgcctactatactccatcgcactatatctcttctattaatttaacataacatcactccttat

SEQ ID NO: 238112 - DNA, 352 bp, Gossypium hirsutum
cccaaactcaattctgctttgacttcaaagagttgggtttctttttgggggttagaaaattttgcaagattcaagctttgggtcattctgttttcaatcagatctgattatgttgaagttccaatattgatttgacacctggaaaattttgcaataaaaatcatccctttgttttttttttgtttttgtttttagtaatggatttggatgatttcagatcggtacttgaaacagctggtgttgatgtttggactttcattgatacagcaatccttgtagcttctttggattatggtcaagagttgaagcaaaggagggatgggattgttgaaaggctttatgctacttccat

SEQ ID NO: 238113 - DNA, 208 bp, Gossypium hirsutum
ccaaattcaagaacgcaagccgcaagctaaaggatgtgcagggatcaccttaaagagaggagtaacactagaaccatcatctaataacaaaccttactggcatgataactcactgaacctgacacttacaaaccaatttcatattatgtgttcgctccctccgcatatcgctacacttcatatcatatcatttcctaacgaaaaacct

SEQ ID NO: 238114 - DNA, 236 bp, Gossypium hirsutum
ccccttccgttttttttatgtgttatttatccctgggttcggttaaacctacccagtataagagcatcgaccaatcttcatgaattccatctttaaaaccaaatttaaccatccaattttaccttacttcaattaaaataatcagctttcactaattaatatccacatctttactcattaaacacctttaaattattcacaaatgtaaaccacgaacctaaaactacatacatttg

SEQ ID NO: 238115 - DNA, 277 bp, Gossypium hirsutum
gtacatccgaaggtagagggagagagagagagggagagtcatcgtataagctccggagatcatctattctctattagtactttcttcgcatctataatctcatgcatatctctatgctcacgatccttatcagctctaacattcatgtatcgataaataccaacttaatccgtttcaacatgtattaagacaaatatgcttactcagatgaaattgcttctaggttgttacactcttgtcatcatacacgcattaaatgtccatacaaggtctatta

SEQ ID NO: 238116 - DNA, 333 bp, Gossypium hirsutum
tctcagatctagtgtattcgatgggctgcacgtaattcagttcgaggcaaggagcgaatcagaagcagatgagagacttcatgtgatggctgagattcttccatttgaacttgatattgattgctgattagataatctgagtattgctaggattagacacctgatgattatatagcagagcaacctaaagtaggaacagatgcactcgacgctgttgctgtcagggaataatagtatactgatatctgcatcaccaccagccaattctcactggaccaaattgtttggagtgaaaacagacgtatctgaaaacgcgaaggccttatacgatga

SEQ ID NO: 238117 - DNA, 311 bp, Gossypium hirsutum
cccccccttttttttttttttttttttttttttttgtttttggtttttttttttttttatatatatagaaattgcgatcttatttcttcattattaatcgaagaaaaggaaaatagggaggaaaagggttaaaaatgcgatatgctggttagtcttttatatcaaaattatgaactcaactacgaatcagacgcatgccaattttgctattattattattggtatttataccttactgctagtgcctgctgctacatccttccattgttgaaaaactgttttaatctgggtgtaaaattgaattcctgcct

SEQ ID NO: 238118 - DNA, 170 bp, Gossypium hirsutum
tgataaaggagcagatttgtaaagacaaaaactatatggcctgtcttattcttctttgtttcattgttcactgctctttgtcttccactttgcctatttgagttccttttgaaaaagaaaaaaaaaacaccttgtcatcatctctctgaaaatttttgtatcaaattcta

SEQ ID NO: 238119 - DNA, 325 bp, Gossypium hirsutum
ctctaacaactgcgcgggcttcagatgctgcatctggtgctggagaaccaatcctatgggttgatcctatcagctctacagtttcaaatgcacccactcctttctgtcatgcaccttcatatattttcgatcctaccatgttattgtatcaccccttgtaactactgcaccagcacatcactcctaaacatttgcatcgttaacgacgatctcaatcatcctctgaacataaccacactgatgttcaatcagaccaaccatctgatgctgaatcataagcacaataccggatgttctaccagtttactatatacctatcattccc

SEQ ID NO: 238120 - DNA, 218 bp, Gossypium hirsutum
tccacatctaagagaggccgaagcaccgattaagctagggtgccctaggcctgcatacttaccccattacatatatgacgaatcacccaaggcgaaggtcctaacactcattcggcattcaaagaagggaagctcaaaaccacgatcaatgacaaaagggcccgagaatgacttctttacgctactgcacgagagtctcttttcacctactgatcaga

SEQ ID NO: 238121 - DNA, 407 bp, Gossypium hirsutum
gcaaagtaaaaaaaaaattccctttttcaatttttgccgttacctctccctatagaatgaagaagcactagaacgatcatcttctccctcggttcactgtcaaaaaaacttgcaaaatttgtcatcggccaacaaaaggcaaagaaggtgttagctgtggcagtttacaaccactataaaggatataccattccttcaagaaaaacgaggcatctgaattgggtgacaatgataaacatgttgccaatgattttgttgagctggaaaagagcaatgtactgttaataggtcccactagttcaggaaaaacattacttgtagacactagcacgcattgggaatgtaccatgtgtcattgctgatgcaacaagtataacacagatgaccatgcccagagatgctttaca

SEQ ID NO: 238122 - DNA, 204 bp, Gossypium hirsutum
  unsure (1)..(204): unsure at all n locations
ggaaaaggcaagaggcacgggctacagcaagggggcggggcacggagagncaaggcaagaagaacgacgcggagccccgaaccacancgcaacgggcacgggngagcccacagcgccccagagcaacacggggccagggacacgaagcaacaacaagagacaaagaacacaagaagagaaggagcaccgggaaagcagaaacag

SEQ ID NO: 238123 - DNA, 359 bp, Gossypium hirsutum
cactgggagaactgagattgcttcttgtgtccgggttgctgaggtggagcagataagaataacaatcaaggagcttccagtccattcaattgatctcgctgttggtgcagaaattgaactttcaataagttaccatgatgctataggaaatcccttttacgaggcttctaatgttattctccaccatgctgaaactaattatcctgatgtggtctctgttaacaatacccgtgacaccaatatgattcatctaaaggcaatgcgacatggtagagctcttctccgagtatcaattgataatcatccacagaagtcagactatatgctgatttcagttggtgcctatgtgcatccccaaa

SEQ ID NO: 238124 - DNA, 414 bp, Gossypium hirsutum
  unsure (1)..(414): unsure at all n locations
cgaggaggaagatgagntcatggtgnnagaaagatgnnatgaaggaggaggggctatgaagggtgagtgcccctgggtgtgcattcaattnngaaattgatggctttttgttcattgagtttgtnngatgggagaaattggcattttcatcccgnnaggcaaagggagattaagactaggctttttgaagggttattgggctgagcgaagttagtgatgcctgggtattgannatctcaggtttcnntgatgtgttacaccaatnngttggtaatgaagaagaaaagggaatttatttgtgtgaagcattagtgaagaggctttnngctattgnncttatggannattttaaaagacctgaaaagcaccagttgccccaattatgaatagtannaagaatctatagaagtttgc

SEQ ID NO: 238125 - DNA, 241 bp, Gossypium hirsutum
atgccttcaaggctcaaaccggagactggtaaccgctgctggcgaagacagggcccaagcccaacatagtcatcaagcacctcttctacaaaaggagcacaaccttaccctaaacgcccaaacagcgtaacttgaaacagatcactctcttgatatataagctgtcgagatactacctgcattatcctactacgctgcagacatctgatcataaacttccacctacactagaggaaccaac

SEQ ID NO: 238126 - DNA, 320 bp, Gossypium hirsutum
aatgtatcaagcattatgaaattccgcactctacgtatgcattataatttgcaggttttaccatcgttggatgtatcatttgaacttagtccttgtccatcaagattggaagagttcctcttgcgtatggatgttgtcaacaagaccagttctgaatgtttccagattcatcaattgtcttctgttgggcagcagtgggatgtctcattgctccaacctgttgatagcattttaccgtctcaatccttatttgctggtcaagtattgtcatgcttcttcatgcttaagtatcacaggaagtcatcaacttctgaagacag

SEQ ID NO: 238127 - DNA, 347 bp, Gossypium hirsutum
gggaattctagcaacatacctgctcaaatccagcagcttccccctggccctgtgtcacctcttctgcccgttgcatccccgctcgctatgtttgatgtttctcctttccagtcgacccccgacatgtctgtccaagctcgttggtctcatgttccggcttcacctatgcagtctgttgcaccttcaatgccattgcagcaacaggcagaacgtgtactacattctcagttcagccatgggcctcctgttgaccagtcattgagtagcaataggttctcagactcccgaacatcagcatcctctgacagctctaggaaatttcctgtggcaacagatgcaaccataac

SEQ ID NO: 238128 - DNA, 184 bp, Gossypium hirsutum
  unsure (1)..(184): unsure at all n locations
gaagggctcaagcagcagccacacaacgcacgggccgggcggaacacagcgcggggcacggcaagccagggaacagcgcagcaagcaaaaanggaaaaggaaaaggaaaagggaaagccaggccgggaccgcgaccccggccaaggagaggaaaccnccacangnnaggcaagcgnccacacca

SEQ ID NO: 238129 - DNA, 380 bp, Gossypium hirsutum
tatggatctttcaggcagacaggttccgaaaaccttagggaggattctctctctcccagattataactcatcacccatcggcagccctgcgaggaacccggagcctagttctatagctgcacagtcaagattcgccagcccggacaagctccagaagttacaaaacaatgtgagtaaactaagtcaatccgcagaggaaccagagagccggcctggcgtttctgataataaaaacggtgatgaagtccgaggtgataatgcaattttaaacaaactcgacgcttgtgtgaatgatgataaagaggatcaaagtcattcttcttctactaaagatgaaatgggttgcgaaggtgaagtcattgttgttgaagaaactgaaa

SEQ ID NO: 238130 - DNA, 301 bp, Gossypium hirsutum
tcgacactcggtttactcttgtctaaatactaaaataggtacggtgcaaatataattgcagttgtcattaacatcactcatactttaaaaacctttatgtctatcctgttatcagcacaatctcatctcattacacatgctattaacaataatactccctataaaatgcatctacctatcttatcattgcgcaatactcttcatgagataaaaattctattcttacattacaaccatgtgaatcttaaaaaaactcttggagcattgcagttatacgaaacagatgagattagtgctacaa

SEQ ID NO: 238131 - DNA, 402 bp, Gossypium hirsutum
  unsure (1)..(402): unsure at all n locations
atttgaaagaaacgaattcaagcaaatcccagcacatcgacgtttctctctgtttctagcagtctttcggtgtttttgcttttctgcattacagatcttcgggtcaaaacaaattcagtttagtttctgtttcagatgttcagaaaaaggtgaaagaaacgttccaaatcgattaattcaccaggaaaaaagaacaattgaatacttgcatagttgaatttaagttgattgggagtaaaatgaaaaactcagtgtcggatcatagtttttacatcgagagcgatgaagaagatgaagagaaggtttttatcccagatgaaaatggtgaagaagttgatggaaatgaatctgatgattcagattcttncgccgaaaatcaacagcaaaataaaccccgcaatc

SEQ ID NO: 238132 - DNA, 422 bp, Gossypium hirsutum
  unsure (1)..(422): unsure at all n locations
gaaaaaaaatagacaaattgataaaaaaaagagagagacgaaggtttattcagcttcgttaatggcggttagggttttctattgatttccttctagaaagaaccttaatctctcccgcgtaatttttttcaagagcccgcgctttttctctcttatcgtttacccaaaaaaaccctaattcaaggtttttccccaatctctctcaatttcaacctcgttttttcccccaatttttacgacttctcgtggttattcggggattcgtaaagttctgaaataggagagcgagaagctacgatgggcgctcaagagaaatcgcaagggaactccaattcgatgcagcgagtaaaggtctatcgtttgaatgaggatggtaaatgggatgatcnaaaagngaactgggcatgtcactgttgattatt

SEQ ID NO: 238133 - DNA, 388 bp, Gossypium hirsutum
acagctctcacttgcctgcaacttgcctttgcagtttatgcaacgatccttttgtattacatgagtccatcggtggagttaagaaccaaaccagagtttacttgggcgacaagaatagcaagaaacatgaaacagttcatcatcccaccacatgttcatggtcgctaccaagaggctgcttctttaatcacagctgaaatcttctctccaattaccccatcacaagtttgtgagcatgagaggatcgatttcgtgcagaagaagtccagcgatgttcaaatgatcaagttgaagagagagttatatgatgagatattggattttcaaagcaagaccatcggtacagagactctgtccgagttaatggcaatgaaatcccaatgggata

SEQ ID NO: 238134 - DNA, 284 bp, Gossypium hirsutum
tctataaccagtggatccccctttctgcacgcatacgccacaatcacacattttaatctccaaacaactatacatcattcatagactcgctttaaattccatcttctccataatctaaacctacacatctatgcaagatccccacaaattctatataactgccacctaaccacactcattactcatctcctacctacctcaaatattctaacactaccaataccttttttctaccaaacaaaataatcttcatacaaaattaaccaaaccttcatacagtatct

SEQ ID NO: 238135 - DNA, 372 bp, Gossypium hirsutum
agctaatgttttgatgatgccaccttggcaggaagccaagagttgtggtttgatccagtttcagtatttgactccgactgcgaagaggagtttgaaagtgttcaggaggatacgttgtctttaaatggtcttgaaggtgtagcttcatccaatatttcatctctaagagatgctaattatggagaacattcttctttagttgaccagatgcagaaaccagggggtctgtcaactggtaattctgcacgcaactctgctagtgaggctgctagaatttcaaatagtcaaatcttatgttcaaaggatgttaatccccaattaaagtatgatggggcttcaaatgaagtaaagcaacctgtttttcttgatgat

SEQ ID NO: 238136 - DNA, 247 bp, Gossypium hirsutum
ttttctttttagatacaacaccttctccctatgggaggtctatcatctatattagcactaataattattcccactcaaatattcagaaacaccttgtctaacctcatcaatatacaactctattttatcactctttaccatctccatcttctaaaaaactttatcataaaaaccctggccaatattaatcatattatatctctatttcccagaacgaaatacactcgcatttaaaatctatctacaa

SEQ ID NO: 238137 - DNA, 383 bp, Gossypium hirsutum
  unsure (1)..(383): unsure at all n locations
cgaggggccagtctcatcannggcttcatcttccatgattgggttttgttgcaaggagtgtgatgccgnntcgattttattggggacgnnntcctgtgannatggtganngaaagannagctattnnncaaataatannattcagctagngnnggttatgnnaagttatnntgatgccanntgaagggctgccnnnttagagaaggttgctttgccccaacaacttttgtttccttgcgcctganntattctcgctttattgcatttctganngcaatctgtnncagcatccctggcaaggccggtccccttcaatgtggcagttctcacttaaggaagaagggggatgtggttcaatcagcaaactncggacactttcgcca

SEQ ID NO: 238138 - DNA, 432 bp, Gossypium hirsutum
atcagatgggtgccatgggtcaaactggttggcatcatgatagccatggggaaactaatgggaacttagagataagtccaaacggaatttatgcaaatggttcttggaagggtgctgagccagggtttcatcagaatcatgatggaatgcactggggaaacaaaagaaatgaactgcaggataactcagtttatggaaatggaaactttagaggatacgaggctgatgctcaaagtacttccaatatgcagaatcaagtatggtcatattggcaagggcctaaagaaatcagacagaatcaatatgaccttaatttaccaaggtttacagaatctcaaggaagccatctgaattcgcaaggcccaaatttcagccagtaccggcagaagccgcaagatgtttataattttagttcttttggtcaagtaacaa

SEQ ID NO: 238139 - DNA, 406 bp, Gossypium hirsutum
tagccatggagcctcaaaacccccaaacatctgaaaacttagacagcaaccccacctctccttcaccggctaacttagttcacaaagtgaaaagcaacttggttttccaatccaaatgggcagaactgaatggtgccatgggagacttaggcacatatattcctattgtattggccttgacacttgccaaggaccttgacttaggcaccacattgattttcactggtgtctacaacatggtcactggcgtcatatatggtgttccaatgcccgtccaacccatgaagtcgatagcagcggtagctatatcggatggtccggattttaatatcccggaaataatggcggccgggatttgtaccggtgcaatctttttggttggtcttgggtgctacagggttgatgc

SEQ ID NO: 238140 - DNA, 322 bp, Gossypium hirsutum
  unsure (1)..(322): unsure at all n locations
agactttgttggctcaaacggttgtttggagaaagctagggangaagagaacgaagaagccagagatagggataaaacaatcaaaatgcttaaagaggagatcgattccctaaaagcaaaaattgcagagttggaatcaaataactctgaggatatagaaaataaggagatgcttatgcaaaaaccacctatgttgcagaagtttgatcaaaagctgccactgaagctagatgatgcaacaaagagctataccccctatattagatacacaaagcttgaattcaaggtcgacacattctttgcagtgggatcacctttggga

SEQ ID NO: 238141 - DNA, 225 bp, Gossypium hirsutum
cagcttcacttttacacattcaccatataatcctctgtctgggtacgcctatctcattgctactcatacgatatttctttacaaaatttctttaattctctttcattattaaacgtgcttaactgtctttatacttttaaaaacaatctatcatttatctttcctctttagatctcagcattccaacagatctacatcctaaattcctttcaattcaatgtaata

SEQ ID NO: 238142 - DNA, 247 bp, Gossypium hirsutum
ctatggctttggcttacagccttcttcccttgagttatggttccctttatataaatgatatgaaacaatctcactgaaccatcgtcggataatcagtccagactgtgattgtggctccgaatgccatctgctagtctatgtgtcctcattctattgttgtagcattcgcatttaattatttccgtgaataacattgaattgatcaccattgtcagcaaatgaatgttaaccactatggatttacatt

SEQ ID NO: 238143 - DNA, 407 bp, Gossypium hirsutum
ggtcaatgaagaataatttggacatcattgctccactcgcatgaaactcaatatgtcaaaggagttaattttgatcatcaaggaaagatggccaagaattgtatttaactgccatcgaaggagactcgaaactcaactgatacctaaatcaagtggaagagcattaccaataccttgttgcagtaaaacagagtaatctgcagacaagtgtaaacaaaaccttcatacggtatctcgttttcccgtttctgcattgcccgttgagagcatttcgtgagactagttgggaaggatggtcaaatggaaagcatccttgtgtaatgctgactgtaatgttattacttttactctcattctcgttttagctaatagcccttaattcttttgggggagtaaaattgaaagca

SEQ ID NO: 238144 - DNA, 185 bp, Gossypium hirsutum
atctcaacttacatcccatctgccatcaatacgggctgaggatcattgccactatattttacaactcatttcctaaaaccctaattaaacttaatcctctaacttttaaaaatccctcctatataattaaacacctaaatttttatatacaacacatttcatttaacaacataatcctcatataa

SEQ ID NO: 238145 - DNA, 402 bp, Gossypium hirsutum
cttcaattccttcacgtccctgaattcggccaaggctgaacagaaggagaaaaggaagaaaatgagtagtgaaaggaagaaaaacccagagcactttcagcttaacccaaactgggctcaactccaacaaaagctgaagtcctctgctaagccttcaagacactcgaaaaatccacaatctgaaaccccaaactctatattaggaaagcgtaaggagaggcctaattcagagactgatgatgctaagcctaatcctttaatgccaacaaatgatgattccagtgtgacagatgtgctagctatggattgtgaaatggttggtgtcggtcaggggaacaagagtgcccttggacgagttacagtggtaaataaatggagaaatgtatatatgatgagtttgtg

SEQ ID NO: 238146 - DNA, 217 bp, Gossypium hirsutum
catcaattctacaccagatatcctgcttctttacactgtaatccatatattactacagggacgtttaaaagggacgtacttatataccaccatttcaactttcattgaatatacttataattccatatttaatatcaactatatttccaaataatatctaaaacatcttataattgatatccaaattatgcaccatttctactttcataacaatatc

SEQ ID NO: 238147 - DNA, 328 bp, Gossypium hirsutum
  unsure (1)..(328): unsure at all n locations
ttcctactccccattacataatttcacaatcttcttccaccatctaaactcaaccatttcctaaactcaactcttatattcaatttttaaatntttccaatttacatatacttttcttttatttaatctactataaatatctattttncccaaatttaattcatttcatattctanaattttttaactataatctataataacaattttcttttatcccttaaattattgatacctataattacttatctatttatacttaattcccatttatatttctacttccttttcattcttttaaaaatatcattnattataactaccaaact

SEQ ID NO: 238148 - DNA, 240 bp, Gossypium hirsutum
ctctaaactgtgggtcccgcgtctacatgaattctgcacgatggcatttgcttgaattcaattgttcagtatcatcatccttgtgtcgcatttttccgagcgaagcttccttctcttccttgccatccttaatatcttcttctggtatcataactattatattacaacttctatttaactaaccactatttttcttattataaattctcctattttacattatttctcacaatctatctc

SEQ ID NO: 238149 - DNA, 275 bp, Gossypium hirsutum
  unsure (1)..(275): unsure at all n locations
gaantctacaagaattctacactatccaacagcttacgatttatttacctgtctcctgcactctcgtaccgctcctttagtcatgatgttaacctctataacaactcatttcccttaactttacctacctanctctattattcatctattcttaaaagcttcctatttccaactttattttttatacttacctttatcttcccaattctattaccttattaacctacaaaccttttatttttcacatatattattcaattccttcttaccttttt

SEQ ID NO: 238150 - DNA, 284 bp, Gossypium hirsutum
ctttttcaatctccagtgttgattgattcctacgggttatcttctctacctgcctttgaattggggcccattcttggccattggattgttgacccttttttggatggattcttccttccaaatttatacctggttctggattcagacgcaaagaacccaccgtgtgtaccttcttgtcacagtcttagtctatatcaactccaaaagtggtgcacagtttggagggaatcttctctctacatatcgctctgtttttaacaccaaccaggtttttgatttgggag

SEQ ID NO: 238151 - DNA, 121 bp, Gossypium hirsutum
  unsure (1)..(121): unsure at all n locations
gtttcgtataacatgaagtcccttcaccgttctatgccgttgcttttcgatggtggatgctcattgncatgggttaatgtttcagctaacaaccatgattatttcctagatcgccttcttc

SEQ ID NO: 238152 - DNA, 514 bp, Gossypium hirsutum
  unsure (1)..(514): unsure at all n locations
aactagtggggnntcccgccgggccctgcaggannnattcggcaccgaggccagttngnngagtgtgtgcnnctttgtgctnnctgcagtatgnnngtttttcgagatagtgggggaaaagtgtgcttagagaggggggctnnntcaagtattgggatgagccatttccnnngttcagctttcctttttgagaangnnaatatanncctgtacctnntttggnngtttgcttannagcgtnnatggaacccgtttcaaatttcttgggggatatcncnntgcaagaagccctattttnnaccatacntnncccaggccnnnctcgagannaatttgctttccacacccattcaacagnngtcagcnnatggagaggtannatgtgcaaaggggnngtgtcaattggaaatggtgtgcccanncttccttaaatgagggctgnngtgaaattgggaattttgggtgaaacccctggaaccgatnatggcccaagcacaagctttttaattcaact

SEQ ID NO: 238153 - DNA, 267 bp, Gossypium hirsutum
ccagcactagcgataggttttcttgatctataactcatctctcttgtaatgttgaacaaaatagggggcctgccatttaatctatattgtattcaccattattctatttcatctcttatgaaaacaagtactacatcagaatacattgattcacaaacttatggagaactttcacgttccaaataccaattaatgaatgatgatcaaaatctccttattctcacaagaaatactaactctgattctgttccaaatcttcaacatcat

SEQ ID NO: 238154 - DNA, 183 bp, Gossypium hirsutum
  unsure (1)..(183): unsure at all n locations
gtgntgccttcttcttttttcctttcttactttcaatttcgtctttggtcccgattgttattgttgattcttaatttttgagctttggttgctgagaaaatgtgaagattgataagtgtgatatagtgtgataaagtgagtgcttatactgaattcagcttaaaacatgggttatggttagct

SEQ ID NO: 238155 - DNA, 201 bp, Gossypium hirsutum
atttaaaactttaataaacttatttcaaactaaacaaactatttcttatactcaatctaaacgttccattgtatcataacttcaacataacttatcacacaaagatccatcccgcttttcccaccatcaactattttaatcatcattgctttaaactcattctctctaatcattttctactcccaaaacttctcactccca

SEQ ID NO: 238156 - DNA, 189 bp, Gossypium hirsutum
  unsure (1)..(189): unsure at all n locations
cggngngaaagggagccggccacacgngaaacagggagagggggcaggccaaggaggccaaagcagagcggaccnagaagcccagggaggaccgaaggcaccacccccagaaaatagcatacatggggaatcttctagcacagttttaacttctataggtgcatgtgcctaacgagggtctgcattcaa

SEQ ID NO: 238157 - DNA, 161 bp, Gossypium hirsutum
ccctgaacattgttcagatccatatacaattccttggaaccaagttaattgaattcctccgtgactctttcgttggcaactcagggcctgttatgatctcgtgtatttttccaaatgcaggttcatgtgagcacactcaaaactctgagatatgctcatat

SEQ ID NO: 238158 - DNA, 317 bp, Gossypium hirsutum
  unsure (1)..(317): unsure at all n locations
gttctgctgtctctgaggtttatccaacgtatctgcctagggaaccgatcaaataagcatgctgtacgcaatgctgatctgatacctatgattggtgacatgttaaagagcagcagccgtaaagttcggtgcaaagcattggagacactccttgcagtgttcgaggaagatgaatataataaggcaatattggctgagggggacactgttcgcacaagagttaaatacttgtcccatgaacagtccaaggagagggaggaggctgacatcttgctgtatgaactttcaaaaactgaatcctngtgtgagaagattgg

SEQ ID NO: 238159 - DNA, 382 bp, Gossypium hirsutum
caatcttcatctgctcgccccaatcatgggaaagaagacgggtacagaaccggtaacgatggccggaccagacaccgtttcatctcaatctgatatcttcaaaaccatcttcggtgacattactgagccaaatgccgctgcttcatcccttttttccgatgaccatccattcaaaagaaaacccgaagaaaccgtcaagaaccctgaaaaagtttattcattggattcagatatggtggaattgaagcataggaagcggaaggagaaagagaaagctgaaaatcttaccttgggttctagcgaacaagctatcgagactcagaagtcaccgaatgggaggaaccctgaaaacctaaaattgggttctttagataccaatgtt

SEQ ID NO: 238160 - DNA, 255 bp, Gossypium hirsutum
gcctagcactttgctcttagtacacactgcaaaaatctcaggttgcgtacatacacactgcagtgtaatccatgcataacaccattcttaataacatcactcatgtctataatatctacaacactagaccattattacgtacaagccacacttacggatactttatccgcacaccccctctaaaactcacctattgacactatggcaatgacattcgaacccggtctgctctagaatcacgtcgatatgatcccc

SEQ ID NO: 238161 - DNA, 203 bp, Gossypium hirsutum
caaacacttatgactactctattacactccataaccagggtgagggacctgagctcgtggcgttgactatctacttaagtgatctcttacattgccatatctacctaatcttgcaaaatacaacgactatatatctgtcacagccacatcgattcaagacagaacactgaacgattattagcatccatatgatctccctgcct

SEQ ID NO: 238162 - DNA, 298 bp, Gossypium hirsutum
caggaaaccatggtttttcagccagcatgtcctgtattactattggttctctctttgatgatcattgtgctaagcataagctcaactgcaatattaccatctatgatcatttaataataaaatcttaactctcattcgataccatacttcctttttaacttattgttcatatcgtcattttcttttgcaagtatcttttacccaaatagtctacttttaacaattctagcttcatacgctactctttaataagttactttacaaatcttctattttacctaactgtctactattaaaa

SEQ ID NO: 238163 - DNA, 112 bp, Gossypium hirsutum
cccaccttttaacctaccagacactatccacaactttaagtccattgtttccattataaaggggacatctcaactatgctaaaacattttaccctctttattgaatctcttt

SEQ ID NO: 238164 - DNA, 128 bp, Gossypium hirsutum
cccaattgaatttcaacagttgaatatttcaagttgcaactgtttgagaaacttagtcgatgataattcttccttcaaaaaagtgattgtcttgagggtatgggtttgtgaagggattgagtgagttt

SEQ ID NO: 238165 - DNA, 231 bp, Gossypium hirsutum
gtataattctttcactactgcattggccttcaccatggcagggcctccaccaccatttgcattgtgccctgtgtacaacatcccattagaaacaggaacctccaatgcattaaccattcattatacctaacacgagactttgtataacaatgattcttgacataatttcgaataatatccgtcactatatcaatctaagatgttaagcacttctatttctacactatatgc

SEQ ID NO: 238166 - DNA, 417 bp, Gossypium hirsutum
agaaatgtcatttggtggaagcagcatccaaggagcccgatctggggaacaaagaggaagaaaaagtgtttccagggaggaatacatggctttgaagagtttatattcagaacctctgttattatgataatgatgagatggagaacacagattcttctgcaagaggtagtgagaatattctggatagagttgatggtttggaatctattgaggagacagtcactagtttgagtcagccagtagaaaccaagtttaacgaactgagtaatctttccatgaataggtccaattctttacagactaatgaagattacagcaggcctctatgtgggggtgaagaactggctaaccttactgagccaagtcttgttggtaaaccacacaggttttgtgctgaagttagcgatggtataattg

SEQ ID NO: 238167 - DNA, 424 bp, Gossypium hirsutum
cttagctaagcttatgttttaaagtgatttctaactcagtttgatctaattaaaaggtttttaatcttgatttaacaaatactttagtaatttgaaccaattgaatgttttcccttttaaaagatcacataagcttaatttttctggaaaaattagatctgtgtaattagataaaattgatggcttagatatgtaattatgtgatatttaggaggtatgaagttgaaatctaagcttagaaaagagatttgagtggttaaacatctatttcggtaaaactggctaagtttttagtatagaagttagtaggttgtgatctgtgattttggagggatttgaatgtgtttgatgttgtttataatgcatttgtattatgttttatgtgtatgtgaagtgtcaactcaattaggagccttcacaaaca

SEQ ID NO: 238168 - DNA, 371 bp, Gossypium hirsutum
ctacaacgtggatattgtgtagaactggaacggaggtggttaatgacaagaaggttctgaagaaaactttgatggagaggaatggatatgagctcacagatcctggcacatgactgacaggtgaaaactgtcgaacaagtaggtgatgggaccatgaaccatactagggagctcctctaactagattgaacgcatgtgtgcaagacagatgattaacatcacattgaaagaatagctagatacgtgttgcatatgacaatggcaatgtagcactagcaactattgcaccagatgatgcatatgtgtcatctgagccaattcatgatgtgtctgagattccgcagaaccttactgtccactatgaacatgat

SEQ ID NO: 238169 - DNA, 419 bp, Gossypium hirsutum
gaaaataccgttgaaagaacaacgaggcccacaggagaggttacacttaaaaagcttgcatgtcagagttgatggcgaagagggctctcgtgatgtttctttcttacaatcctttttatctcccatccagaaatgggctgataagcaactaggagactaccacttgatctttgctgagggatcaatggtaatggaggatatagtaacagttgcaatgattgttagaagacttcttttggaagaatctgatattcctgtgcaatcttccactgtctcagatagagatcagatagaattatatatatcttcttcagttaagaattcatttgctaggatattgcaagctgtagataaatcagacacaatgggcgaacatcctttggcattgcttgcaaaggaggtcaagaaacttctgaaaa

SEQ ID NO: 238170 - DNA, 393 bp, Gossypium hirsutum
catagatgctggatttgagctaaagctatgcagatacatttctataatttcaaatttttaagtggggttcgggaaaaaaaataaaattaaattggttagcattttaaagggcattgggaatggtcatttatggttgcatgcctttatatgggccttggcggatctttcttctttatagaatattataaatctattaatatattgaatggtaggtttaatttatagatataggccgactcattatatagaatattagatatataaaaggtttttggatatacatagagcctttatcagttaatccttttcatatttattctatatatatctcatttttctcatttttttaaatggcgccagatgaaaaaaaaaccctcaaatataagtctatgc

SEQ ID NO: 238171 - DNA, 406 bp, Gossypium hirsutum
cttatcttggcttcagaattagccttcccagcagcaccagcaccaaatcttcttctaaatcctttccttcttcatttgacaccggtctttttaccatttggatctgaaacaatagccacttcactctcactctcctctccccttgtttcaagtcaaaagcttagtgttttcactactctctctgcttctcagatacggtttaacactatgaacaacccctttagggaaaaacctggcggaaggcaactcatcaacagcatcaaacagctgaggtccatctctgtcgctccacatatcgaaaccgccaggcttctggaatctgtcagccaaaactttaacttgctcatcagctgaaacggagaacaagttgggtgctttttcaacgactttccaagggcgttcaagt

SEQ ID NO: 238172 - DNA, 246 bp, Gossypium hirsutum
cacaacccccctcaattccatcgctagggtggggtcattttttggtttaaaattttttattttcagaggaaaaatttaccttagcgttaagtggaaaagggttattctgaggatttttttatattattataccatttaaaattttttttttggatgggaaaatggcaacaagtagaatcgggcaccgctctgtgtaaacgccgtggtggtggtggtggtgatgcttagaataatagggatgggttg

SEQ ID NO: 238173 - DNA, 197 bp, Gossypium hirsutum
cacccattaacaaatttatatactactaaaacaaatgagaatttttcatattccacaattgatccagaataacaactccatatgaacactataacctaaatacccctcataggattcaccatccccacgaccaaaccctatattacatctcttctattctctataattattaccaataagattcttcaatcatctta

SEQ ID NO: 238174 - DNA, 271 bp, Gossypium hirsutum
gaccagtgtatgatttcaactcatatagatgaccgtaggggtcggtatcaatcgcatatccgagtaacttagaattcatatatcattgtttcttatagtctacctgttctcttatactggcgacccatccagatcaactgtttaacctgcctacgctaccatgcttttgcaccagacctcctcggttacggcttaacagatacaccagactgagtcgtccattacacttgctgtcacatggtgtgagacctcatcacgcttctagacacaa

SEQ ID NO: 238175 - DNA, 353 bp, Gossypium hirsutum
gggcggcgtctaaaactgtgggtcccccgggcttggaggattccggcccagggaaaatctttctgggaatttccagaaacttttggttgggccttttaaaaaacctggggcttgttggaaagttggtaaaggttaaggtttggattaacctccttttggttaggcttcgaaaaccggttacggttgttctggttcttgcaaaaaggaacccggttactactaagtcgaagtctaagcctgcctcaaagcctaaggaagggaagagtacaaaaactactcctaaagcaaaggccaggacaaaaactacttcgaaggctaagagtaagccggcggctaagccaaagcctacttct

SEQ ID NO: 238176 - DNA, 183 bp, Gossypium hirsutum
cttagctctgttattctcaaacaacgattctccggcaaagaaatgaaattgaaaaaattcctctcgctttcaattttttcaggggttttcgggatgggttttgtatattatatcacaggtttcattttaattgaagattgggttggtttgcagacctcagctgggtctttaaattccatgatc

SEQ ID NO: 238177 - DNA, 355 bp, Gossypium hirsutum
ttcctttaaaagcttatactgcactctatagggaggcgtatcttccccgtctacataaatccccaaaaaaaatgtctctgttgtccgacgaatatcttcagcacattcctatcttactgaactccaccgttgctggaacgctaacgattatcatggctcctaactccataactggtatcagaatgcatgtggacaacattgattgcatcatagcgcttaagaacatcaacaacatggctcatgaaccgactgctcaggacttggtcaaaccaatgacgattgtggcgaacacgattcagaagcctatacctgctttgtaaacaaacaggcaggttgatatccttgacgaaaggta

SEQ ID NO: 238178 - DNA, 271 bp, Gossypium hirsutum
acatttaatgacgtacacactaatgatactcatatctttatctaaaactaaaaacatcctaaaaaatcaaattctatacataagaaacttattcactatcttattgaccttcaaaattacttctcttaaaatcaaatgcattcttatcgaaacccatatagactccgaaaattaagactatctctatatcattttcttaaagcacacaagcttcttggacctcatcataaacataacctcaggaacgcattatctgatctttgttacaaat

SEQ ID NO: 238179 - DNA, 296 bp, Gossypium hirsutum
gctacatacatagacttccatgccaatcacgctacgcattgctgtaagagaatgccatcaaacagattatatacctacattaaatggcgactgaccagttgcgactgatgtagtgacttaacttgaatgctgagcatagtgtgctgctatgctgatctgaggcctataacgtaggaagggctgcttaatacagacgtgtactaccgaactatgccattacgacgcacttcatcgtactcatctatatagactagtctcgcaacgtaatgatgtcacagcttgacgaacattcttat

SEQ ID NO: 238180 - DNA, 398 bp, Gossypium hirsutum
gtggagagctgttgcgagagcttggcccctgttacgtagttttatgatgtggtccattggtgatggtatgactgttcgttgttgggaggatagttgggttcctaataaagaaccccttaaaaactttgttttggggtactgttcttttcatcctagaaccactttagtgagatggttttgcctaatgggaattggaatctagaccttttcagattgtggcttcctaaagatgtgatggagcgtatcattagcattcctcttcccatgattcaggctgggccggatagtctctcttgatcaagaacaacgtctagagttttttggtgaatagtgctttctatgctttgaaagaggaatcttggcatccgaaaaagttgaaatggagcaagatttggaaa

SEQ ID NO: 238181 - DNA, 144 bp, Gossypium hirsutum
atcttactaacggtggcatcagcatgagatgcgtaattggaaatggactgcattgacatttggagaaaattcgcggataattggagttaaatcagatcattgcttaaccaataaggcgtaatcggctgaatcgattattaatca

SEQ ID NO: 238182 - DNA, 279 bp, Gossypium hirsutum
gcgaatagctgtcgcacaagctgctcacctgttaagggaggttatgaagcaacgaagtgctgatcatcggaccgctaatacatgatatgagccgccagtcagaaagacaagcacgctatcatactgatgcatcgctaatactgtaatgatcaccctctagatcacatctatactgatagtcaaatctaatgactctacgattctagaccgactcaatgcattgcaaccgagctatcataggcaactattccttaccagatctatatgcatgaatacagc

SEQ ID NO: 238183 - DNA, 387 bp, Gossypium hirsutum
gccatttttatcttaacctcacccactacacaacagtaagggatccaccaagaggtgaggtctataatccctactttcatcacagtttccctatctttacctacatcactcattcaaccctcctttctctcacccgctgctgctccttcacctgctacaccaagtcactgtcatgccaaatgcggctacacctattccacagctgccatcaatgattcatgcttgatatataatgacatatcccctcaagacttattccatctcacttcacgaacctatgggaacaagtcacaatgcccttgctctcgatacaattagaactcttaacaccactccaagtgcaactctaactttcctctattctacctagttcaaactctacatatg

SEQ ID NO: 238184 - DNA, 400 bp, Gossypium hirsutum
gcactttggacttctactgggtcagagaaaggtactgttttactactgcttgaccctcattgtgcatataaggcaagcatagctgtttctgtaacctctgcggctagcagatttcggcttctatatttaccacagatagctggcttctgtgttgctgctgtattttctgctctgatgcgacaagcacatgcaaagccgattccttctatactgaaagctgctgagtccaatttaagaatgccattccaagctttgccttttagtgctgtccccattttgctttcacttgatatttgcctttctagtatctcaaccatttcctacattctctagcttcaccattgtgtcgataatttgctacctattggcgaatgggattgatattctactgatattggta

SEQ ID NO: 238185 - DNA, 359 bp, Gossypium hirsutum
aaccatttctttttttgtgttgaaggcttcaaatgattaaggtaaacttggcaccttgactatggatcttagaaagcttcaaaaccatgctgcctttcatgttactggccctaataaaaagggtcatcacactacattgaccacaaataccatacattagaagtcatacatacagttcttactttatgctttagctaccaaacctttcctactccattgcttaatatccctgtatataatttcatatgcgcctaaacttcctataaagccatgaccacttgcgacatgttacattacatagaaccatttctgcatgtaagttactattgaactgcaagcttcaacaagattgatcctac

SEQ ID NO: 238186 - DNA, 403 bp, Gossypium hirsutum
gctaaacaaggaatcttagttatgcaaatatttagcgtataatgaatcgatgctctaatgggacgtactaggactttctttcttcctttttaatgagactggataaatagatgctccatttctttatcaaagttattttttttttctgtaggaataaagctacttacttacataccgctgtagcaatcatctttaaacatcaaaaaaaatatatatatgttggctgaatgggatagtgccaaggaatgtaggagtgtaggatcaatgatcatgtgctgtggatgatgtatgttatgatgggtatcgattcctttccttgttgaagcagttgatccaccaaactgacacaaaaagacaaacataaataggttgtttttcaagttacatttctgacaagacagac

SEQ ID NO: 238187 - DNA, 193 bp, Gossypium hirsutum
tttgtttgtacgacataaacgcttctatagcggtcgttcaaatatgctggaggtctagttgaccatgcatgatatccactatatactgccgtctacctgatattgttgaaaacgtgcatgactgttacaaggcactgcaacgagctcattagcagctgtctcaaacacctgctatgcatttggactttctaac

SEQ ID NO: 238188 - DNA, 316 bp, Gossypium hirsutum
cgaatccatactatcaacattaatgatactggaactgtgtgatgctcgactgctattgcaagggaaactgatctgcaaaatcagttcacccaccataagcaagaagcataacataccaaccacacacatctatacatgcaaagaaaattaagtgtagatgagactgggtctggtgtcagaattaggctcaatcaaacagaattggtagggcttatttacaccaaactgtgcagacctatgagctgactttttgctaaaggtctcactaatctacttcaatacatctacattacatctgacctgacaccctttgctc

SEQ ID NO: 238189 - DNA, 220 bp, Gossypium hirsutum
ggaatacccggctggacccactcgtaccggggcttccttgattgtccaatctattttactaactcctgcagtccaaacactgggcgctttttaacataggggacagctcccaatcatatatttacatcatacatgcttactctactatatactccttactcacacaaactcatcaatgatactacattgatacttaaccctcgatcaactccctctcttc

SEQ ID NO: 238190 - DNA, 450 bp, Gossypium hirsutum
gctctaccggtcctgaattcccggcgaggagcttcagaaaatggtcgaagttgcttcttcattgaatagcactagctccgctggtccaaatctgggagccaatatgccagaaatgtctcctgatatgcttaagatggcatctgacatgattgctagtatgcctcctgatgacgtacagaaaatgatgagttttgcttctcagatgggtgggcctggtggtgcccccaggagttcagagaatattaactttggaccttcagtgagagctacaacgagtaattctgcccgtggatcatcatctcaacctgttttggagaaccctgatgaactatcagatgaccaaaggatgagccagtcatcctctagtcttccgccttctacagctgatatgcaagaaaccatgaggaattctatgaaagaccctgcaatgcggcagatgcttacatccat

SEQ ID NO: 238191 - DNA, 280 bp, Gossypium hirsutum
acccacacaatcccccgaactctatacaccaaattcttttttccctctatactctctctttcctcaggcaggccttttacaaagggggcgatctactccataactccctcgacttcattcatctacttaacatcctcatccatcataccatatttccaataactatccccttttactctcacacctctctctttcccacccctccctgacaataactcgtacacacccttacatctctctatctactacccactcaccatcacttccttactacactctc

SEQ ID NO: 238192 - DNA, 419 bp, Gossypium hirsutum
gaaatccaaagatatagccaatgctttcgttaacggtgatgtcaccccaagtgactcactttcaatggccttcctttttcactattcaaagtccatcatttcattattcgaattccaaaaacgagtccagaccaagaatcaccaaaaacccaccccaattttcttgtttttcttccaaagattcatgttttctacccgaattcgatgatttaaccagtatttcaacttaccatgaagacccagatgctggttttagggatagaacgccaccgtcggttagtcgaaatgtcggttctgatgagctggcagctttgcttcaatcttgtagcaatggtagacaagttaggagagtccatgcggttgttttgaagcgtttagggaacccagtgacctatgttgagaataatttggtaagttcg

SEQ ID NO: 238193 - DNA, 367 bp, Gossypium hirsutum
cggtttcggaattcccgggtcgacccactcgtccgtgcgcctgctgtcgcccttgtcaacgcccaacgccccgaaccctcaccttccggggtgcgaacccggttacggtgaagacgttctccgttgaccggatggcctcggtcgggggggacagcggcggtggcggcaagaccccgcctgtcgcggtcgccaccggcaacggccgttcgaacaagtccttatatcggttaacccgtgtgtcgccacaacagccttgggcaccccttgtgtctgatgtcccccaacactctggacacgcacgccattttggaaatgatactctcggaggccctgtatgccagaccgcgcacccaggagctctgcgatc

SEQ ID NO: 238194 - DNA, 374 bp, Gossypium hirsutum
attcccactcgacccactcatcctcagccatacactacaactaacatacttttaacatactcaccatcaatttactttgagcaatttttctaataccgttcaccatacataacctacttcaccatcaatactctatattcctaacatctataaatactccatgcatccttaaacaatactcaatacaccctaaatcatttcactatctcatcactctcacaacactctttacactaactttcacaaccctacttatctctcttatatcctcccttaactacctacttcatttcatcacatatcatttcatcaattccatgacatatactgtctcttcctaattatctttaacaatctattcattctcaatatac

SEQ ID NO: 238195 - DNA, 321 bp, Gossypium hirsutum
tgaattcccggcgggacccactcatcctttgtctctccctccaaacccacctcgtctttctccaccatatccataccattggctggttttttaaaaactcggggactacctataatcaaacctcctcaactactctccactcataacatccttctcccttcatcttaccaatctacgatcccttgtctttaacataccctctcaactatatttccataccatactattatacatcatcatcacatatatcatctcctaactctactcttgactcctttttaacaatctcacacctatactactctatacttcatactctca

SEQ ID NO: 238196 - DNA, 273 bp, Gossypium hirsutum
tccccaatctgcacgaattctacacgatatccatccattaaagctcacttcctatctagaagcctactagaaatacttggcaaccatgtaacataaatctcttaaccatgcactttcaatcatcaaaatccacaatacattatctacaaccttatatcacacatcacattatgcaccttaacaaaccaataatcctactacataacaatacaattgaagatctaataccatatcatattcaccgtaacctcacattaactactctacacacaa

SEQ ID NO: 238197 - DNA, 375 bp, Gossypium hirsutum
ttctaggctctatgaaccctcgaaaagttcaagtaaaatctgagaaattcgaactgaagctattacgtgtagcagcaaggtgatggtcccattacaaccacctgcaactcatcaacatggtcaacatcactgtacaaataataatgaataaatgggtggtgatatttcaacaattgaagctcacaatggaattcaaatgctctagtcattgtacagtgattgcttctcaaatttgttgagcttccagatcaatgaactgtttaaatcacacgatggtggagaatttgagcagaatcctattcatcatcactttccgttgggtgaggcaatgcttaaggattggtctacatgtcattgtcttgattacaatttttc

SEQ ID NO: 238198 - DNA, 345 bp, Gossypium hirsutum
accggttcggaattcccggctggacccactcgtccgcagggactcgttcgcactgctcgatcatactctgctgacgacccctctgtcttggaggtgcttttccaaccgcgtcagccagtagatcttgtccatcctctactacaacttcctattcaacacgtcaccgctggaggacagctcgtgctccaagcgccgcgttcacatgctgtccatcgacgagggtgacaacggcggatccctcaccgtcgaagcactagtcctgctaaagcgcctgctgctcgagctctccgaactaagcgccacacacatctcggacttcatcaacctgactgccgaatccgtctc

SEQ ID NO: 238199 - DNA, 325 bp, Gossypium hirsutum
tcaaattctttgtgccctgtactgactaacgtgagagccgggcaatatctacgtcctgcatacatgcagaatgatcgcctgcaaactatacccgaccttcatgcatttcaggctaaagacaaatatcatctctataacctgttacaatatgcaccgtatactgagatggaatgcgacacacactgaatgacatcacttatacatactggagaacctatctcctattgttcttaacacgataccatcctctcctgtcatgatgctggcaccggaacgctctacatccaaatcacccattgtctaaccgccttatgtgtttaatgac

SEQ ID NO: 238200 - DNA, 363 bp, Gossypium hirsutum
acctctgcgctattactggtgatccaaagtatatcacagaagggatgaaggataaggcgcatttgaaaactcttcccaatacagatggactagttcctatctacatgaggtatttttagcctattcaatcattccatcactcataaattacggatactttaatcagctatatgctttgatatgtctgtctaaggctttctagcctgtcgatttacgtcaacgaagattgccgtacgcttgggtaaagtgacgtcaggcatcaaacagagtatataataatgtcataactaggtgagtcatctactatgattggagtgctatttcatgaagtacctttcttgggatggctaaagcatactggat

SEQ ID NO: 238201 - DNA, 299 bp, Gossypium hirsutum
  unsure (1)..(299): unsure at all n locations
attctacactactcaaacccgttatatcaactggctctcactccaaaaaatctcaaaatttaaacccgacaatcgccctacaaactnctatcatatacatttatatatacccacatcttacaaaacatcataaatttcccatcctttcatctcaaatactttttcttatttcactatcataacaatctaattctttaacttaacaatcatctcccaatctcataccattcactacacacccacaattattattcatttcctattaatcatatccaccatatccatatacaactctctta

SEQ ID NO: 238202 - DNA, 222 bp, Gossypium hirsutum
ccccacacttcacgaattccgcacgaacactcacggttttctcacctgggtttatacaacaactactggtaacatcaataaggacccacgccttcaattccacttactcctactttaaatctcttcacacacatcctctattcatacctaaaaatttaacactcctttccaaccttcatctctatatacaatcaaaccatccctactctatcttataaccac

SEQ ID NO: 238203 - DNA, 235 bp, Gossypium hirsutum
ccagctttgtcacgacttcttgttctgaaaacatttctaagtgtataaccacgcagggtccattgacctaaaactaccaagacctcttggaaaatggtaatccatgcccattgcctgtcaattggatgcttacttggttggttgacaattattagaacagtaaatgtggagattattttcaaagcagaaaatgttcctaaacaatttggcaatatctgtattgatacttaaatga

SEQ ID NO: 238204 - DNA, 134 bp, Gossypium hirsutum
gtttggtatatgcattaagtaccaaattcactcaatttgtagggcccttatttcagaggtgcataaatatcatccaaaactaacaattggctaaaaaacaatcgacatttaaaatcaattggcctaccttaact

SEQ ID NO: 238205 - DNA, 267 bp, Gossypium hirsutum
cccaaactctacaaaaattccacactaattacatttcatacattctaagacaaactctactaaaaactttaaatttttaaacggaatactccacaacatatctcttctctatataaactccatatattctatataactcaaaatcctactcttattacaaacatcaccactatacatattatacctctctatattaactctccttaattctttatctactttttaccccaccttttaaacatttctctctctcaaacacctcttttc

SEQ ID NO: 238206 - DNA, 194 bp, Gossypium hirsutum
cctctatctaacacatctaaacatcccttaacatttatcgaacctattttctttgatgtttgccatttaattaatatacccatccttaaaacacccttcataatattaactccaaattgaccaataaatctctatatccctatctagtccctaaatcatatattacctatataaccatacaacatccttatcaa

SEQ ID NO: 238207 - DNA, 409 bp, Gossypium hirsutum
  unsure (1)..(409): unsure at all n locations
gttgaatcaattaacaagaatggctctttcagctgccagtcttctcactgcccttgcgggactctgctctttctttttcattctattttacatcggatcaagcagacatggagaccgagaaaatggatggatccgacgaatgagcacagggagaatggtacttatccaggtcctctctagatgagatggtacccctattgttatccgaaaaatccctgttttgacttttttttccctctgttatatcaaaccgtaacagttgaaccacagatgaatttccaggatgaaagcagaattataantttctcaagacacatgatgctgttttcgcaagcaggccaagacttcaagtcctaganataatttacaatggcaaaaggggcatagcattcacggaacttgnatcata

SEQ ID NO: 238208 - DNA, 199 bp, Gossypium hirsutum
cggagtgaaagggagccggctttacgtgaatcagtaagagagggctttccaagggggttaaagcagtgctgaccttgtagcctatttaggagctaatgcaccaccccgagattatagcatacatggggaatcttctagcagagtttttacaactataggagcatctgcaaatcttgtgtttgcattcaatactggaatg

SEQ ID NO: 238209 - DNA, 220 bp, Gossypium hirsutum
gttcattgttagataatcacacggaatatcacggaatccgatggcataatctatacgaagggaggaacatcccaatacatataaaattgacctacgcaaatcaatggacttgcctgctgatgacctattcaatatcattaaatctggtctctaagaaatacacatttacagaccaccaaagcgtacacgcagaattgatgcaaaagcaaaatcaaaatgc

SEQ ID NO: 238210 - DNA, 290 bp, Gossypium hirsutum
atctacttgaaccacatcatttttatccctgtttgcggggccaaacactctacatggtaccgtcactcagcctcatattctatgaccatatgacttcttctatgaatctgtctcgattactctggctatgtatcatcttaatgccatcgagcatttatagattatggccaattaccacactatgtgaccctattaataggccaaccctttccatcaactgccgagcatggatcctgcatcaatgtacgcggtggcacacgcataatcatctgctacttatccttcaccac

SEQ ID NO: 238211 - DNA, 410 bp, Gossypium hirsutum
gataacatctctggaatcgatgcatttcctgatttcaagtgttctgagccaagcatgttgtttgacgtggctgagcaatacatgatattacctttcctcgaggacactgtcaaaaccaatgaaataaattatgttaacttgcatgaggaagccgtgatggctcaagataatactggtatacacctagcaattggtcagatgagatcatgcgcagaggactctgatgttaactctgactctgataaagcagatgactttgacccacaatcgtttataaaaagtttaccctacacaatctgatgtagtttcaagtttccggcctgctgcaactgccatggaagctcggagaaggaatcccataactcttgtgcttgatttggatgaaactctagtccactctacacttgaac

SEQ ID NO: 238212 - DNA, 260 bp, Gossypium hirsutum
gtcaaccgagtagactcttgtgaaacccgcaaattacttgtcctggataagcagacataatatatatgcgttcaagccctgtcccttgtagctcggtgactatgatcgggagataaaggcttgtaagacttttacactgggatacaatggaatacttctgtggatgtgggaacgtcataaacttctattttacgcattcgtcacatctctgtcgtacttatgaaatgccttacgcttttcctatcaattcaccaaatagg

SEQ ID NO: 238213 - DNA, 321 bp, Gossypium hirsutum
cgacgtaagtaacaactccagccacaggaaaaaaataacgagcgtctccaacgattctgaggcaaacagaggacaagcttcatttcactatctcaatgcacgcctcaaacaggccatacctgataccaatgaagcgctacaactcgaaccactacatactcacacatatcatacgctaccgctttcatacaaaacccttgacgataataaaacagcttttcacttctacatcatagctggacttattaagccaaaagatcctgatctgaggcaactgtcacatgacctcgggaaaaaaaaaatgacaatgctattctgacc

SEQ ID NO: 238214 - DNA, 334 bp, Gossypium hirsutum
  unsure (1)..(334): unsure at all n locations
gaaaatcggtcctcatgaatgtgaataatattttgtatgaaccaanangtttattagtgcaaaaagattgatggcaatatcttgctatactatgaagccttgtttgtgaggttggcaacttggtttaatggcccacacttttccaactttcatcagtagatgagagcacctatacaagtttcatcagtagaggagagcacctatacaagtttctttctttctttctatataaaataatgtataaacatcaaatattatatcaatagctattatcacagcatttcatttctggatttcaaaaaaaaaaaaaaaaaaaaaaaaaaaaaaggggggg

SEQ ID NO: 238215 - DNA, 295 bp, Gossypium hirsutum
gaaatttttaatgatgaaccactttttaacccttaggggcctctcaacactagacagatgttctctcttcgactatttacaattacgctgatgatcttacacagaatttatagttagtcttatataactatttccccgaacccgacaatacctaacgtcttcacactacaatgataaatcattcgaactccgactgtactctcacaataatatctaaaaatgagctcataacattacaaatccttcgtaaacttgctccaaactaaatgatacttagatacacagatatattata

SEQ ID NO: 238216 - DNA, 399 bp, Gossypium hirsutum
acccttttctttgaaaaagaaaaacacccacgtgaatctggtgttcatatggaagagtgtgaagctgaagcggctgcttcagctgttgctgctgcagccataactagtgatgagattgtggggaatgggatgagtacttgcatcgtttctgcttcagataataaaagctttggaggcgcagctattgatgttattaatacaggtgatggcggtcagaagctagcaaacccatcaaaggctgaagagtctctcaatgtttctcttcctgcagatctttctgctgagaacccaccaatttctttatggccgtctttacctagtacgcagaattcttcaagccacatgatttctcattttcctggaggccctccttcgcacttacacttctatgacatgaat

SEQ ID NO: 238217 - DNA, 263 bp, Gossypium hirsutum
gaaatattcaatcccatagtacaacatatcatagggaggtatccattaatgaatgagtggcttatctctattaccagctaggcaactcaaccaactgatactggtctcacaaattccctcctcatcatcaaaccctatcctatatgtggaagccgcacttaatggcttcacataagctcctctgttcactcctacgatcagcttatggcccacctgtgtctacaccttcaaaccctaaccatagtatatgatctcctatcact

SEQ ID NO: 238218 - DNA, 129 bp, Gossypium hirsutum
ttattttttccgatgcttcaaaattgtttaacaagtgggggcaaaaactctaattggtcggcaaccattcaatcttcactttactcaacgctactacatgtatatatcacattgctaactttcttacca

SEQ ID NO: 238219 - DNA, 281 bp, Gossypium hirsutum
aaacattttatcaacaacacctatcatcataaacggtgtgcctataacaaatcttggagcacaaccattgaaagttacaaagcacatatttacatatataattactacacttcaccagcattcaatcccatatgaaaatactctcaccttctttaagcatccagactatatagcatatactctaatcctttcaactcaattatatgctctcagatctcactactttattactgcataaccattcatgcttctcccacaatcatattcaacaagtacaacta

SEQ ID NO: 238220 - DNA, 209 bp, Gossypium hirsutum
aaaagatttgttaaaagaacttcaatagtttgagtttagggggtttagatcgaacattatggggcgttttggctcttcttcctttaactaacttccccttaatttcaagccctttgcttggcccctgataatgatacggtcttttatgactcattcgatgagccttttgacggaccatggatcgtgtccgataaagatgattccaaagg

SEQ ID NO: 238221 - DNA, 173 bp, Gossypium hirsutum
ctgttttttagccctcaggcataaccaccaatgggtgtcctactcatgctcagggcatggcatgctgactggcctatctccatgatgttgtgcctacggatgtcaatgctgttgcagctactattccttcctatgatcctatgctctgtagctgactgttgccaatactgcta

SEQ ID NO: 238222 - DNA, 184 bp, Gossypium hirsutum
ccatttttaacccctcagacgtggcgcttaaaagggagcctacatactcctagctcgaaggtatcttgtcttgcccatagagacaatactgttcctaacaatgccgctaccgtttgcgctactattgcgaatcagccgaacatttcgctccataacctgaacaaagctgcaacgcgctgcctga

SEQ ID NO: 238223 - DNA, 138 bp, Gossypium hirsutum
cattacccaatatccttccattaccatgaccagatttatctcgagttcattttgcaacggaattcctacatgcaaattctaaaaactctcttgatagtgatcaccaatatggtaactacatatcagctaatgtcaata

SEQ ID NO: 238224 - DNA, 288 bp, Gossypium hirsutum
tccgccttctgcataattcttcactaccctttatgttttattaaacttttcttatttcaaggttactgtttaacttaaatgggtcatgaaaaaaattacctatctcaaatcactacattaaaacttaaaaaattctttccacccttttatacatcattcttaatccctaaatcctatcttaatattaaactttcaatttttaatctaaacccaataaacaattcctaccctaaatttaataaataatttaacacttaaaaccaattcccataatctaccttttataac

SEQ ID NO: 238225 - DNA, 338 bp, Gossypium hirsutum
cctttatccttactactcatcgaacccataatgaggacgggtccaattatccaactgacatccatgcctatcttcaataccacctgaatctgtactgtcatgtcccttcattgttacttctgatatcttacataaactctaattaatttgcgaatattacattcacttcattttactccccttcaaagttcgacaattatccccacctatatgtgctgagaccaataaaatatcttattatccaagtctagcatgtacccgctgattcaattcttgacaacatcctaatttgtcatgacccacaatatgcattagaagttgttcaccatatatgaacc

SEQ ID NO: 238226 - DNA, 191 bp, Gossypium hirsutum
aaatgtttgactctctgaattagacattttcactcggattcggtcaaacttttaagtgaacacagattcccatttcttcccgctgaataaattatgagtgatcacccacttctgtgtgacgaccttctgatgaatcctgatgagtctgatgctgatccctcaacttatgattctagatcatcactcttgtt

SEQ ID NO: 238227 - DNA, 405 bp, Gossypium hirsutum
atttattttcaagttgctctttgttaatttcaatagatttggtttgtgaagacaatcaaacttagggattcaattcattcttaatacaaatcaaacattttcttagactttatactttgctttattcttcatgttctatctttatatcatttctattgttctatctttataccatttctatattgtttttgaaaatcatgaagaactaatccttctataagggattaacgagtagaggtatgatttgttaactattttgtagggttacttaatggatcaactgtttctattatattatagtgattctggtgtgttaccaggggcggatgtaaagcctttaagcttggcacttggtgcccatgtgtgttccagagggatgttagcctacaagctaggcagttgatg

SEQ ID NO: 238228 - DNA, 268 bp, Gossypium hirsutum
atccggcggctgcagaattcgcacgagatttgttttctggttttcccccgtttttgtatggcatgctttggttctgtattttgcctgtgaaagctcaagttcaagaaatggtgacgtgctctactccgtcacagctcgggcgtttggattcaacttaccgccacagacagattttggcttgtctaagatgaagtaagaaaggaatcttttaccatcaaatcattctgagttgaactatcctgagagaaccaagaaatactgatgggca

SEQ ID NO: 238229 - DNA, 413 bp, Gossypium hirsutum
aagaaatgaaaaagagaaagaaagaaaaaggaaagttcttttcccacctgtggatttctgagtaaggttgggatcttggatttgcctctttactaaattccaattcaggtagactttttcagacagtaaataccagcaggtgcagaagatgggtattcatcattgatgatgagctgtttattttcaagttatgacacatactattgacttgcgtgagatgccataattaactgttttagagatggactagctatgtcaatatatattcattctccttggaagacttgtatgtgcccatcaaatgattaggaaaatgggaaaattagtccttatacgttagataaaagagcaaaatggtcccaaggttaaaatttccaaccatttctactggtaaaaactaatatttatatggt

SEQ ID NO: 238230 - DNA, 327 bp, Gossypium hirsutum
  unsure (1)..(327): unsure at all n locations
gaaaatggagcttctagcagttctggtagtactatggctttgcctatgatggctgtcgagtcgctaatgaatggtgaattagcattgccttactccaacaagtttcccttaccttctgttgcttcatgccttggcggatgtgaagaagctttctattgtagtaaatcgtgtgcagaggctgattgggaatcgtctcattgcttacnttgtactggggagaaatcagagtcttgttctagaacggcacttttaaaattcatacaacatgcccatgaaacaaatgatattttcctacttgctgccaaggcaatttctttcaccatatta

SEQ ID NO: 238231 - DNA, 418 bp, Gossypium hirsutum
  unsure (1)..(418): unsure at all n locations
aaaggttagtgaaaagccaagttcttcaggtaaactctcggaaggtccagcttctagcaaagcaactgatgagatgcattctgcaagttcccatggaccacctgatagttctacatcatcaaattcagattgtgttggtactgtctcagcatctggtggctttggcttatcaccgagttcatcgatgggttcattgtcctctgagaagtcaacactgaatccccacgcaaaggaattcaaactcaaccctaatgcaaagaggttcacaccatctcagacacctgtcaggcctctaatcccaatgtctgatggttctntctactatcagacacagatgtctnctttaccacatatgcacatgccttgtaagttttgggtaaagttgcttaaaagtaaataccatttttatgaacactac

SEQ ID NO: 238232 - DNA, 304 bp, Gossypium hirsutum
acctttactttttaaaaagaagatcacgcaaccggggcatgtctatctatagatggctgtgacaccataccctttccataaaataaagccgttataagacaacctagtctttctttagcaagtcctgatataatgactagtaaaatctcagctctaattttcttacactatcaacccaccattctcctcatcagactgcctcgctatcaaattaatctgtcaactttccactcacaatctcacgattctatgacagttattattattgaacatctcaaccttgataactctacgatatctttat

SEQ ID NO: 238233 - DNA, 250 bp, Gossypium hirsutum
ggtcattagatttgctattcccaatattttaatggaaattggttttgaaacgataactggaaggccccaaaggttgaattggaaaaggtccttaataggtagcctaaatgcttttaaatatcaatgtttcaagacccccctcaagggttaaaacttccggaacttaagggaatgattaacacaccccaatgaaagctaaacttgaacattttccaaaggagcaaatccaaagcctacctgaaaatgagtc

SEQ ID NO: 238234 - DNA, 330 bp, Gossypium hirsutum
cactacatcaatacgacacaagaaatttactttcacatcataaaattataccctaaagaacgggcacattcaaacagagacttaggacaaccattcacaaatacacacattttagttaccacatactatgtatcatttacactaataaccaataccgatcaaaagaatactaaacccacaacataaactacgatgtcccaaaccatgactaccactaatgacacaatccctgacaaagtacacaatgatgaactacaattactttaatcccaaacttcactacattatcaagacaacaactcacctcacaaattctaaactctatatgcc

SEQ ID NO: 238235 - DNA, 433 bp, Gossypium hirsutum
caatttcttattcattttgaggtttgagcagatcgatcagttccagagaagtcactcaagggctgggattcccttcaactcaatgctcttttttgatgatgaggataggaacatacaagctggcaatgcggattggaccagctgctaataagaagcctgtcactgatcagcagtatcagaaacatagactcttgtggtttatttcaagttatactttatcttgattgccttatgaagtttgtttggttgtgtatagtttttatttgcaatgatttatgcgtgagtgctttgacttgacaagttgactgctagttggttattgtgtttatgtttattggttttaattttctgaggtggatctgttacaatcttcttaaaattcaagttctttcagttatgcacttgaagatatggcgaaatttatacaaagtca

SEQ ID NO: 238236 - DNA, 366 bp, Gossypium hirsutum
tgtctcgagtttttttttcttttattttctctgttttgttttttttttatggtgttcattttaaaaaaaaatccgccatttcaactcacttccttatctcctgataaaattcccccaaactcaaatatatcattatgaaccccttacggcctacctaataatcaccctcaccatgtctaaactaaaccccttaaacaactcttccccataatatcataaactacatgaccgggctaatccatttcccaaaacttgcttttttaagctctaaaacgtatacttgcacatcccaccaaacttgttacctggatttaacactactatgaaaaacaactctttacactacaccaatttccccatttttct

SEQ ID NO: 238237 - DNA, 160 bp, Gossypium hirsutum
ctcgaacaataatactatccacagttcaaagttatcgtttgacttaagtgggaaagatgaggctggtatgatcggctttgaccaaccataaacaccaaaccagttaaacttatatggtggcttctatcatttttatttttttattactctacttccaata

SEQ ID NO: 238238 - DNA, 319 bp, Gossypium hirsutum
tattatacctattattgtgtcgtgaaatattaaggcaaatgtcctatttttgggggcttgggacttttatattctttagcatctactgaatctactaattgcatctatactaatctatgtcatacttttatcaagctattcaatattgttataattctaattgctcttattttacatactttatgataatctatcacatacactgcaactattccttactttggtcctcaatacctgttcatggaaaaatacttgaacttaatctattattactctccagtaccttccataacttacctacaattttaattgttatgtt

SEQ ID NO: 238239 - DNA, 268 bp, Gossypium hirsutum
ccgaagcctaaactgtgatatctacaacactaacttatacatcatatccttcgctattgaagaaaaaaattaatacctattctgaaccttataagtatgactttggaaaaaaactgccatatattcacatgtttacccctcgatgatatgctaaatgtctatcttgataagtattataatgaacttatcactttcgtatctatactacagtgatcctctgacctatagcctttcatcattattcacatgttcacatttcatgagcgag

SEQ ID NO: 238240 - DNA, 374 bp, Gossypium hirsutum
  unsure (1)..(374): unsure at all n locations
gcttggcatgctggagaaacgtaactcatgtacgcgtggcgctatccaagatctcgtggccatgctntgctgaattcagctgttgaccacggcattgcataggaagagcctaggacgaatgtcgagctacatacattatactatcatcagattcattcgaaactacaacgagtctatctttacaccgcatcttctgggacctgacatgatcacacctctacattgggcatcatgtacatcactgtcggatgagatggtggaagttccaaccgaagacactcacgagatcgcgcttacctggtggagatccactttggatgcaaatggtgacgctccatatgcctatgctatgaccagacacaaccattctcaca

SEQ ID NO: 238241 - DNA, 270 bp, Gossypium hirsutum
cctttatgtgtcttatactcattaatcaaatatccggggcggtccttcctatcccaaacaacttcatttctctattcttttgagggaaacccaacattattgacatgaatttggatctatctttgttataaaattctttactttatacatatttattacaacttccaacttattttccttcacaatgcttcttctgcgaactaccatgggaaacatcataagttgcggatcacatggctggcgtaagaacagctgtcgcctgaaccaccc

SEQ ID NO: 238242 - DNA, 382 bp, Gossypium hirsutum
catgcctataaatttagacttacacctagattgctcaggtgaggtcccaatatgaacagcatgagctaaacagattaacctgcttgatatgagcttctacaaattcactgaacagattcagaaaaggcaaccgtacctctatagcgatagcccatcaaacatacaaaagtctgagactgctaatcaaactggaactacatataagactactgatcttaataccgacattgctgagaatgaggactcaaacatgctttgcaagatccctgatgtcaatgataactccatcaatgattctaaagaactaccatacttggaacatgggtccctgatacttataagtgctaaatattctggcacttgatataggcatgatcagaat

SEQ ID NO: 238243 - DNA, 383 bp, Gossypium hirsutum
ttttaggggccaattgaattgtaattttctgagatgtcaaatatatatttaatcatatattagttaatgattttataatttttgaaaggattaattatactatttttccattttttgagggggccaaagcataattttctttaatattgatttataatttgatcatatgtaaggggttttaatttgaccatataatgggttaatcaactgtccaaaaataattagaatcatgttaatgagttgatatgtagggatttctttgactggttagagcaattcttatgaaatacaaaaattacaaatgattctttttagtaaaaaactaaggaagattagttgatgatgagaagctgtatattataaaactaatggtggaatggatc

SEQ ID NO: 238244 - DNA, 172 bp, Gossypium hirsutum
tggccaagggctaatccttgcccttatccccacaccggggggatcgcccgaaattttaaggggttgcaaaacaaaattaaattgggtcctttgaaccttcaaaaaaaacccccttggtcccagggaaaaggttaccctgaaaacaagggggcgcccttggaaccaaatggca

SEQ ID NO: 238245 - DNA, 229 bp, Gossypium hirsutum
gaaggcttctgttaaagatttttttttttcttggggacgatttgtaggaaaaaagggaccatggggttctaactgaaacttcagtattgcctagggtccgttatggcgctaatacctgcagggggttactcttaggactattttgtcaaggccagagcaacttactatggcagacctgactgcttaggccctccaaggggaccttgcgaatttggagaatttggaaaaa

SEQ ID NO: 238246 - DNA, 361 bp, Gossypium hirsutum
ggaaacttgaaaatagggtggaatagattgacatcctatatcaaaagcactcaaatatgtcctcattttgacaacctatctacgatagatttcacctgaaaagaaaggtgggggatgtagaacaaccatttgaagccatttagcaatggccaatgctagctaactcttaacacaactctcaatgatttttaggccatttaagattaaataaggtttctgataccaaattgttataccccaaaccctgcctagacgtgatggccaaatttgatgatgtcacacgagagtgtttttgaaaacgtgttgaccttaagttgtgtcagttattatctttcgtttaattcagaaaacgcgaattaat

SEQ ID NO: 238247 - DNA, 371 bp, Gossypium hirsutum
gattttctgcacgaattcagttcgagacaacatgtttttttatcatgcattaggaagcacattatggcgcaggtgggtatcttgagcaaataactttcaaaggctatcaggtgcttcttcacatgaaaggactcgtgctgccttatctgactatgcaatataacgtatgctatttgatgccaacttgtggaagtggaagaactgatgggatgtgacagatcgagctgtgctgactttatgcaattcgaaactgatatatcactcttgcttcgtgactatcatagaccgcttggctacctagcacattgataccttattgtcactgtaggcgttatacaggaagatctactgctgaaagctacttggcagat

SEQ ID NO: 238248 - DNA, 374 bp, Gossypium hirsutum
tgctccacgcctcatggcttgcacttggtcgcacgggaaggtcacctgcaattctggtctggctggcggatcatccacaagaccaacgatgaaccgcttagcattgctatcactagctaataccaggaacaattctcccactaagcacgctcatgactgactcaggctagtggacatttggaatcacaaagactcattacagcacgatgtgctatacacatatgatagtcctactcagagatcatacggtaccaatgctgagcctacctacgcgtcgtactagtacaagtcgcactagtgatgcaatgactagcatgatcaaaggaagacagatattacgcctagttcatgacaactgccacaagctcttacat

SEQ ID NO: 238249 - DNA, 280 bp, Gossypium hirsutum
atcttcatatactttactctgaagctccactatctgggagagtccattaagtaacctataaaaacatggggttatcactgaaactacagtattgcctagttctgccataggactattacctgcagagagatactatcacgactatttcgtcatgtccatagcaccttactacggaattcctgactgcttaagcactacaagtggagcttgcggatgtccagaatgtagaataagtgttaacgatgccaatgtagacaggctttacactctctacaagaat

SEQ ID NO: 238250 - DNA, 283 bp, Gossypium hirsutum
cgaaagtggatactaaaatgacattctaacggttcgacgctgggatagctcgattcaaatgtatccacaaagataagacaatgcaaaacgtgcaacatacatgcccaattcgtcgtcttagactatacagtgctgaaattactaccaccaattccgcccaatgttctatacctgttctcctaaaccaccgctcaggttacatgctacgacgacattgtgcaggatagtgttcactatacgacttacttcatttcatgcacattgtcctacacactactacttc

SEQ ID NO: 238251 - DNA, 371 bp, Gossypium hirsutum
atagctggtttagatctgcagctgctcggcatcaacactattatagcaaaatattatagaagtggtgtcggcggaaataaaaataataattataattggtgtggcaacattttagagcaccgtgagagtgcatatatgtgtgcatgcgcatatatgtgcctcgccgcatatatcttctctatagagtattatatatctatatatatatagagagtgagagttatattatagatatatgccgcctcactatatatagtattagatatatataaagggtttgtgtatacacatagcgcctatctgagaatactcttcatatatatactctatatatatcacatttctcacatttttaaaagaggccccatgtg

SEQ ID NO: 238252 - DNA, 326 bp, Gossypium hirsutum
aacccctttccctctttgttttggcatacatttttcggctcgttcttcgttttctcagttttatactctcaaagacctttttgtggtgcagaaattactcctttttagctatgggggctattccaaaaactgggggtctttctgggtaactaagggcctattttgggtgggttgaacttatatcagtactagcagattatagggtctttcaaggttcagacatatttgaggtcctatattggaaccatgatgatgtttgacgagatggggatttgtggggatatggatctcttcagtgctccacttggggaaaaagatgttgcagc

SEQ ID NO: 238253 - DNA, 230 bp, Gossypium hirsutum
ggtggtttaacttatgatttgatgatgatgaaccaagggcgacctatctacagacgggttccatgatctcccatctattcatatatgatacagtggcaatagtcgagacacttagctcagtattcatgaaccataggtattatgacaagtttaagcttagctgtgatataattccaacctcaatgaagcatgcaactgatctgactgaaatactaacatatgaaacgtat

SEQ ID NO: 238254 - DNA, 138 bp, Gossypium hirsutum
cgagatgaacacccattgactggggaatctatctggggaggggttaaagaagaactgaaacaggggttgcatattctgcggtctgagaatcggaagggcttttgtcttgagcaactggacgatgctgttacgactact

SEQ ID NO: 238255 - DNA, 249 bp, Gossypium hirsutum
tcgagctccattcttctctcaccatgtcattgctgtctttgtcctgggttgttgctaatgacttttagtgccaaacctgaagtgcctccatctgaaacttttacgtatgtcaacgacttataatctatgccagacgctgttgaatatgatgcataagaccgagtcatatgcatatctcatgcccccttacaactcgcgttacataacaccgcccctaatgccttcaacctatcgttacgcatgatctac

SEQ ID NO: 238256 - DNA, 161 bp, Gossypium hirsutum
attttcacaagccaaagtgtcaagacgaaaggtgccgaagcctctttctttggaacaagcttcatcatcagccctcttcaattcctggttgttacctctgcattcgctttcgtacaaaaccttcttttccgtcggcagcttaacccccccaaaccacccta

SEQ ID NO: 238257 - DNA, 255 bp, Gossypium hirsutum
cagaactaaaggatcggatgccccgcacgaatagaatacgagccgagatgaaaacgccgaagcgaggagctaacttcgggacaaactacaatggatatcgagtctttattcaccaaaaggctcgaaggtaaagaggcacttgttactggaatcgccaacggattacaagagagttcaaccagacctatatctcaaacatggcggcaaaggtctgattgcagaaattcaacacgaattggcgcactccctttgcaa

SEQ ID NO: 238258 - DNA, 407 bp, Gossypium hirsutum
gccccagagagagacagagagagagagagagagagacagggagagagagagagagagagagagagaaacttaagggtcattaaccagttttttaatatgccgctaaattggggaggtttaatcaccaagcctcaaaatcaggtggatccccccaaaatgatcctaccccaggttcaaacactttaaaaacccctaaatctccttggatgcccttaccaatggtgacagatggtatttcaaaccaaatccctcggtcagatatggatcaaggtaccaatcagtatgaacaattcaaggccaaggagataaatcgggatgaatttgacaaaaactgaaactgatagtcggagatagtttgctgagatcaacaataacatctcttcagagcaagttcccatctagacatg

SEQ ID NO: 238259 - DNA, 237 bp, Gossypium hirsutum
  unsure (1)..(237): unsure at all n locations
agaggtttctatgccgggagaccctttcttgggtttccatctcttatttcagatgctaccctagcgggagcactttccccaaaaaatggtaagccggctggaatctaagcacctgcaatgcgtcgcttggctaaagggtggttctttgcgagccccaactttcttcctagntcattctctatggatgctatgagcctctcatcacgggtatttttacttgagaaacctgcatgggct

SEQ ID NO: 238260 - DNA, 298 bp, Gossypium hirsutum
atgccccaaacaatgtccggaggcatttatttgcaacatatgctaatgctgaaacccaagatgatattaagctgttacgttctcaaagttgagatgacttgaagcaaggtgttattggcgctgtacctatcccctcagaggatgcggaaaaagaggaagtaattgcagctttagttgctaatgtggaagcaatgataaaagctgatcgaaaaatcacagccttgaagcaattgcaaggtcatatctggcgaactggattcgagaccaatgagctcaaaggaatagttttcgatgatgt

SEQ ID NO: 238261 - DNA, 327 bp, Gossypium hirsutum
ggtgatagaactcagagaggttggatatttgggtaaggtagtttgaacgcgggttatttgaatttcggggggtgcacacccatagttacacattgcggacatcacggctatatacaaagtttctcagtctctgatacatgtacgagctgtacgacgtaagggttgtgtgattgagagcaacccttctgcgcacggagcgcgctgagctttgccttccgaaggctgcagtccttccgatctgctcttccttgctggtggtcggattgtctgttagagcttgggtaccctatttgtagctagcttattagtctagtaaatattactatc

SEQ ID NO: 238262 - DNA, 324 bp, Gossypium hirsutum
cggaaaaacccaaagaagctgagaagaagccggaaaaacccaaagaagctgagaagaagccggaaaaacccaaagaaccggaaaaacccaaagcacctgctcctgggaagagaccgcgagagcccaaagacggtgagacgaaaccggatgtacctagagaggtggcgaagcagcagaatgttgcggcaccttctcctttaccgccgatgacgtatgcagttgggtatacttgctccgaaggttattataatggttatggtggaggacctagctattatggtggaccaccccaacaaccgttcccatattacgagacttacggta

SEQ ID NO: 238263 - DNA, 322 bp, Gossypium hirsutum
tattgaatctaaggtgggcatctgccaatgcattcacagccaaaatacctgactttgtgggtaactggacaaagcttacacaattgtaattcatcaaaacaatattgggtatattcttcatataagttcaatcagacatcaagaatgatagctttgcctagatttttcatcagtttgactactctctcggatatttatacaggagatttgtagggaagctcattttgaggttcgaattccatctaagtttttcgaattaaacatctttgaattctttgtaagtagagatatctttctttcaagatagtatactgctgaccac

SEQ ID NO: 238264 - DNA, 384 bp, Gossypium hirsutum
taaatatgttatttgggcttttatggaggatatggaggttctgccaagctatagtcttggtgaattttccatactcgtgattctgcgaaaaatagactaactcgtcaaagtgtgaatatgtaagggctaaaatgtaaagtgccctaaatatgcgtcaacggattattctgcatgagatgaatgattgaacggttcaatctaaattgtattacatcacgaacatataacatcgaacttagatcgaggtaagcacaaaatagtggaatagtccactcgtttccatctgaaattcgtacgaggttagtcttaatacaagtacgtgttacattgaccgaatgaagtatatactagttatcatcagcattggacggctatcatagcctg

SEQ ID NO: 238265 - DNA, 278 bp, Gossypium hirsutum
gtggcgcgtctagaactaggttttttttctcagaatcgccggccttcttttttcataactcatttggtattgttaaaagggtcgatgtgggtctatctttgtgcttgatgtttggtcttgggtggatttgctgatgatctattctaggaaggttggagatatgcaggtatattggttactattggctttggcacctgttagatttgcccaatgttgatgtctgtatttaggacatttggaagctatttattggaacttgttccatttgacattatcac

SEQ ID NO: 238266 - DNA, 161 bp, Gossypium hirsutum
tggagttagttctagatcgtatatatagattgaataagatggttggtgatatgggtcaaagatggcgcaattggcaatggtagctcggtaatctccaggttttgctttatgaaccaatcctttgcgagaatatattgctggttataacttttcattatcaa

SEQ ID NO: 238267 - DNA, 232 bp, Gossypium hirsutum
cggccgttctagaactagggttcccccggcttgtaggatatctggccaggggaaaactgggaaggccgaggaatttgtccagggaagatggagggggatccgtttcatcgggtttaaacttggggcgggggaatgctgtgaataataacggaacttttacccttgggcattgacaatttgtttcccaagaaaaacagggattgacaaggaattgggcccaaaaagatggggg

SEQ ID NO: 238268 - DNA, 295 bp, Gossypium hirsutum
  unsure (1)..(295): unsure at all n locations
cctaatgcattgaaacggnacganggacgttgggggttaaacgtatgatcattggcatcggatagccctccactctgcatgattgccgccgcagagatcgccggaattgctttaccgactgagacttcatcctgcggatcactcacctcgcctttatcaaatgggctcgaattgcatggacattacgtaattctccgttacatcgggcgaattgctgacgatcgcaactaggatggtgacgaagctattcatgctgaccgagttgatgagtggctgaagtatgctcagacccttt

SEQ ID NO: 238269 - DNA, 176 bp, Gossypium hirsutum
ctgcaggaattccacacaagacgatatgtttatataccaaattccaattctatctaacaagttgaatttaaaaaatcctatggacatccttaacgcctaagtatttcatattcacagacgcattcaccatgatcaaacacactgttatataccgtaaggattttcaagtttatcac

SEQ ID NO: 238270 - DNA, 169 bp, Gossypium hirsutum
tcataattctcactagacactttttttatatcaattccatttctttcggtgcagatattttaaattatcctgctcaccttcttaataactacctatttcaaattcaaccactcattcaccatcatcaaaaacactcttatcttatctaattatttcttatttaacttct

SEQ ID NO: 238271 - DNA, 171 bp, Gossypium hirsutum
  unsure (1)..(171): unsure at all n locations
tagccaacttggatactacttcttcttctgaaaacatttctatgtttatattcaaacattgttcgtcccctcacacctacnatcacttctttaacattcttatccaataccatttccctatcattctaatacttactcatttccttcacatttataacacactaaaatcta

SEQ ID NO: 238272 - DNA, 330 bp, Gossypium hirsutum
cttcaagaattctgcactatcccctctgttccttgtcttgctgatttcacttcacagtttgcgaattatctacaatatttagaccattaatatctttttccactctacatattatctccttttacaatctaaatcctcatatgatcacaaattttttattttttccttcaaactctcttaacatactactataaatcttcatctaattaacaatctctatctctcaaactttccatcttaattaacttacatctataaattttctttccattaatacaacatatttattaaccttaactttaatattcttaaacttctactccaatatct

SEQ ID NO: 238273 - DNA, 347 bp, Gossypium hirsutum
tgcataatcgcacagccaaactttcaaggaaaaacaactctaaaaccgtctttcttaataattgctcattcctttcgtttaccaaaaattaaataaaaaggataaattatataattaaagtgcatactgcgcacttttcctaatttctctgatttcaattgtcttttttcctttattaatattttatgttattttactctatagttcattaattccagattttcttccatatctcttttcctaatcttcttcacttcttttatgatttatttcatcgacattatttatattctattcaatctaaatatacaacacccactactagataacaaaaccaactctttatt

SEQ ID NO: 238274 - DNA, 166 bp, Gossypium hirsutum
acaactgcacaattcacactaaccaaatcttaccaacccatatatctacttacataccgttcatttttaaaatacattaacccctcacaatacactaaaattctatccacatcattcatacactaatatccctcacttcacccaaccaaccatcatatcttctcat

SEQ ID NO: 238275 - DNA, 328 bp, Gossypium hirsutum
gaccttagatggtcaaaagactattcacagaatgctcagaaatattctcgtgatagatatgatggttctggacataggagcatggacaagggcaaagaatcaccatttctagagccttataaggataagcatttgtctattgacaggaatggctctgataggatacatggcaaaactatatctgaagagatggattgcgatcctacgaagtgggacagagatggttctcatgaaaaagtgctctaccacataagctctaaacataactaagcacgatcacactatctcatggagattctcatcaacacattgaattaccaattttcta

SEQ ID NO: 238276 - DNA, 242 bp, Gossypium hirsutum
  unsure (1)..(242): unsure at all n locations
attcaccacaaaaacctgttctctttatcttataatataatccaaaaccagccgantttaaaaaactttagagcgccccactactcacttcatacacatcaaattttactataaccatatctttctcataattcacatcttctcattaataacaacactttttttcatctccaacaccacccacatttataaacttctccaaactttttataatcatcatcattcatatattcaccttcaac

SEQ ID NO: 238277 - DNA, 357 bp, Gossypium hirsutum
  unsure (1)..(357): unsure at all n locations
cttcgatcttttttaaaaaggcatattgatgtggaaattgangatatcgaaacaggagtaaagcgagatttacaagtttctatgggtccccttatacacaagataggaatgaatcatgagatgttttgaaaagtctaagtattgctgacgacatctcttggtttgtttgtggtactttaatgaaataatgtatgggtctgaaaagaatgttttgctactcttttgatcaaagatttatgcatctatttcgaagaactttggaggaatgtcaactgattgatataggatattctggcagatggttcacataggaaagaggtaatcttccaaagacgaatatacgtgacaggctatatt

SEQ ID NO: 238278 - DNA, 157 bp, Gossypium hirsutum
ctatgatcctgactacaaggatacataggaagaagaatgtagcttctacaaaagtgaacgctgctcagacaaacgattataattatgaacagttatacataaaatattacataatcatgaactgtactcttaataacaagtactactaataacatta

SEQ ID NO: 238279 - DNA, 338 bp, Gossypium hirsutum
acgcggccggactctagaactagcggacgcgcccgcccgcacgaacgcgcagacaggggaaccgaacaacactccaacaaccccagaaccacgggcgccccggcacgaccaagcggccagcaagacaaggacagaagaacaacagcaagaagaacaacaccaccaacaacacgcgcgaggacagcaccaaccacaacggccaggccaaagcccacgacgagaacacccgaagggagcaaaaccgccaagagcacggcacacagccggacggacaaaaacccagggacaagaccaacggcggcaggagaacgaagccggcaacaccaacagccccgaaa

SEQ ID NO: 238280 - DNA, 300 bp, Gossypium hirsutum
gtcaagtgtttcagactcaaacgtttcttcccacgctcttcaaggaaccaaaaggaaatgggtttcagaagacgatgtagcatccgttccctctatggtggacttgcacactggtggaacctttaatgctcatacagggttcaacgccaggtatttaaacgagtccgaacacatgttagcacaggctttacctaacacaacggtgaagggtcgacctaatattgcatcgagaatgatgctcctacaaagggattgctacattcggcatgacatgcttcatggcccaaacaatatcggctt

SEQ ID NO: 238281 - DNA, 224 bp, Gossypium hirsutum
gaattctgcactagaaaagaacgtcatatagtttgagtttacggtttttagatctggtattatttaacattttgctgtcctccttttactacctttcccttcatttcaagccctttgcttctcctctgatgattatactgtcttttatgactcatttgattagccttttgactgaccattgatcatctcccataaacatgattacaaaggtctatccaaacatt

SEQ ID NO: 238282 - DNA, 216 bp, Gossypium hirsutum
ctgcaacaattctacactattccaaagttctgtatctattgtcttcacaaactacaatatgttccttattaaaaattaaccaaccccctaaatactaacttatcactcataactcctccttccacctctttactacattcctcatccatactatttctcaaacatttttttcaaattctcattgctaatattcaacaccaattcttccactcccct

SEQ ID NO: 238283 - DNA, 239 bp, Gossypium hirsutum
gatcccaaaaaactgcaagaattcagcactatttcaccgtctcctactttgagaaaccactacctacgtatgaatatatttaaaaactctaaggccccccctatatttctcaaaccctaaactccattttttaatataattcttattgatcaaaataaaattaccatataccatttttaatcttcaacataatcaacaaaaaatctcttcaatattcataccacaatccttcattacaa

SEQ ID NO: 238284 - DNA, 285 bp, Gossypium hirsutum
aagctgggttttgtagcttataatagaagggaaaggcatgttagatatgaagagaagagagcgtgccacttctcacttcagtttgatcaaaatttagttgaaccaaatctttgtgagaattcagatattctgaggaataacaacacttgtgctcatctccaaatggacgggcattcagaaagttgttcaaatgttttggaatcatcatcattcagagattcacctaaaacaactatggaggatgaaaatggtataatgagtaattcagagagtcttgaagttgat

SEQ ID NO: 238285 - DNA, 395 bp, Gossypium hirsutum
gtcgtccgtttcttggccaatcaaggtggttcctcaggtactgttcctgcataatccatccattctcagtatggttttaggttttggttcttctagccgatgaaacaaagtaagtcaaaataaactccatggtaatagctagtcatagaaaacgaaactataaacagcacattattgtgcgaagcatagaagcaatgaacaaatgtgtcagcctgctgatctgtatttttacatcttctaagcctcaagaaaagatatgcatctgagttagcttctccacgattccagtcatgcacatagaacgggtatgcacgtgtgaatttgtgtaaagaaatgttgagacttaagtccttctgtatgttgaaattgtagtaaacatgtcttcttttctagta

SEQ ID NO: 238286 - DNA, 133 bp, Gossypium hirsutum
tagatgaaaatgctttcgatgtgaagggatggggtcttcttttgggaccgccattaatgcttgaagggctagttaatcaaacttggttgatgatgctccatattttgcataatcatcgaatgggccacttttt

SEQ ID NO: 238287 - DNA, 184 bp, Gossypium hirsutum
ccattcttaatctgtactttctctactacctattcaatgtagacatgcactccatctatactgggcttctataattccgtttcacccgagcgaaactgtttggatctacttctaaagcaacgaccaagagcttcttcttgacacgctaacgcaatggctgaactcgctaaagataaggaatccc

SEQ ID NO: 238288 - DNA, 332 bp, Gossypium hirsutum
gtctctagtttttttttttttatctacttttttttgtaaggtttttttttaattttctctttaaaaacaaaatcctttttcaaataccttcattataacctctaaagattccaccatcattaaacttattattatcataacacttccgacctacttaataataaacctttcatgactaatttaaacccaatactactttattctacccacaatctaataatatcataaactggttaaaacacctcccaaaaactatctatttctaactctaaaacctttttcttaacttccaaccaatttattctgcttaaatttacaacaacctgtaaaaa

SEQ ID NO: 238289 - DNA, 161 bp, Gossypium hirsutum
  unsure (1)..(161): unsure at all n locations
ccatttcccacatcttcttttcccaaaaatctctaaagtcggtctttcactcccctaggatccgcttccaagtcctcgtctcgtccgatggtcgggtcttcgatccaagatccgagtctggntccagntcaagttcgggctcgagatcagtcgtagtcacc

SEQ ID NO: 238290 - DNA, 228 bp, Gossypium hirsutum
  unsure (1)..(228): unsure at all n locations
gaattcncacgagtcatttacttttttttcatagtttgacagcatataggatgggtactacttaggatgcgttatcaattcatccattttatgatatagagattaattgtacatatagaatgcttctcgttttttcttcactttcctactattatactttcctctttcttatatcattttgttttctttctaatacttctattttacttctatctttttaatctcatt

SEQ ID NO: 238291 - DNA, 234 bp, Gossypium hirsutum
acgagctatcatatatcttatcacagacctacactacctcggacgtacatatatacaagtcggatggatttctcataaccactcttcattacctactaaatctctactacattctaaaaaacatactttttttcaataaactccaatatcatctacttaaatcacaacacattctattatatgttactttaacaaattaaatatatatctccctacatcatacattgcactatt

SEQ ID NO: 238292 - DNA, 298 bp, Gossypium hirsutum
gctaagccttccccacttcacaccagcaaaagaggccaaagctattctttgaatcttgtgattattatgtttcaattttcaatcagttgactgcaataagagattgatattggaatccagaggatcagattttattaaaatgtcgtctgattgcatagtgaaatcatttggaagtttgaaatttgggttaaactagacattgagtaatatttaatgtgtcctttgctttttgcagttcatcgatggatgtggttgtgatggtgtgttcttctaggttaaagacttgttgatgttgccc

SEQ ID NO: 238293 - DNA, 199 bp, Gossypium hirsutum
gagaatttatctgatctccgtctacctgcctcaacggaagaatgaagtatctgatagagggagatacatcgccatgattctcgcggtgttattcgccaactctgaatgcaacatcttagttgaacgctataatggaattccagctgatgaactgcttcattggaaatctttactagctaaactgtgagcagataatctt

SEQ ID NO: 238294 - DNA, 239 bp, Gossypium hirsutum
ctcttacattacctacaaaatctttgctttccctttttcgggattgtgccaatggcttgttgaccaacattcatctgttacttcttccttttagccctcttttccattgaaatacatggtccggatttttttagcaaaatccccattgttaacacaactgataaagaagtgaccaacagagaagaacaaaccacttttgggaagaaggagccagacccaatgtttgatcccaaaaccca

SEQ ID NO: 238295 - DNA, 218 bp, Gossypium hirsutum
acgcactatttttaattcacaattaatatttcttgttacgggctggcttactatataacttgactggacattttcaatctattcatatttatctatttcaactagatcctgttatgcttaacctttcaagatactattttgattttactcaatatctactaatgaatatacatatcgctcatcgcatccaatttttctcttactacttaaacttattt

SEQ ID NO: 238296 - DNA, 272 bp, Gossypium hirsutum
gagcacattatcctgctcactatctgcactttccgttcatgatggcggctgtaaatgggttgttttacattgaactgtgcgtcatattacaccgtgttcactgagactatcctgagcttccattccatgaaagctttctggctcatgacattatgcacttctttagatttcaaggcttgttcatcatcaaacaagcttcctgacttaacctcagactgtagggggaaaccacttgtggtcccagatcaaaatgggttaagaaactgcaccac

SEQ ID NO: 238297 - DNA, 268 bp, Gossypium hirsutum
atttgaagcttcaatggcgatttcatctctccctgggattgaacctgtaagaggtcggtttaaagtttgtagcttctttcttgctggtgtttgtggtggattcaacaataagaaaatgataaatgcttgtgttttttcttcgttgaggaaaatttccaacgatatctacattgaatccaaagtactttttttattaatgtgcatttgcttgatgaagtagccaacttgttttaataattatctgcttgacttttactccattaaagca

SEQ ID NO: 238298 - DNA, 213 bp, Gossypium hirsutum
caagcgaccatataagtaattaactctaagcggtaaggctcctaaacatccttcctgccgaccccaaccgatcacgactcccacaactctaacattaaaccaaacttcaaaagaactatctcctatttctggagaaaacccgaaactagcaattagctcacacaccacatgtcttaataagaatcttgaattgcaaaaaaaaccttctctcac

SEQ ID NO: 238299 - DNA, 296 bp, Gossypium hirsutum
gaaggacatgaagatagacatggtatcagtgcttggcgagcaatggccagtgcgaccggatctccagggcattaaggaaaagtttcgagcaatagctaaggctaatttagctacaaaagaggcaaagaaaagattgcttgcagcaggacgtgagtttgaaacgctagaaaatcaacgtaaaacgccctcaacaacagctgggaactctgatcttcatatggtatgcgtaatcttttgtttaatttaatgacgatgtgtaatgttatgatttaatggtgatatatgaaatttacata

SEQ ID NO: 238300 - DNA, 205 bp, Gossypium hirsutum
tctttcctcctaacactgatccatcattaatttccttacactgaattacttcctcctttaatctttcaatccctataatcaaatcaaaaaagcaaatcaaattaaatcccccaaaaaagtgaaactcataattaaaacaattttatatatttagaaaaataccatctttgagaagaagcttgcaaagaggaagttaacgtttaaa

SEQ ID NO: 238301 - DNA, 104 bp, Gossypium hirsutum
caccagaacgaatcttaatccaaagccaaaaaccttcttccaaatggttcttcttacaccgccgaatgtacaccttcagctaccacttcaatttcccaataaac

SEQ ID NO: 238302 - DNA, 239 bp, Gossypium hirsutum
ccctctagaactagaggatgccacaccctcacaattcacactaggcaagattcatttcttagcaacaacataactgtcatcatggcccgggttaatactgccgatgtcaatgccatcaaaactcttaatacttccaaatatgcaaatccatctcgcaatatccaaaacaagcctgttgctaacccatatcctatgtccaacaagatgctataaatgcgtcaacaattacagtatcttca

SEQ ID NO: 238303 - DNA, 305 bp, Gossypium hirsutum
ctagaactagaggatccgacgcgctgcactaattgagctcgaggcgcaatgatatgcttggacctctcgcagcggcgctatgggagaagagatgatgatggaacagtatgacatgctctaccactgaccgtttgacatgaattgtccacctgataggagctatgtacaagcctgccctaaaagcgaggggcctgtcatatatcctgtgagcgaaggaatacaggctagtgttgatcacatgcttgctgttgattgcaaattctgaaggtcgtatcttctaactgaagaagctggcactattgcca

SEQ ID NO: 238304 - DNA, 424 bp, Gossypium hirsutum
  unsure (1)..(424): unsure at all n locations
cttcactcttnctctcttccatatattctccctttcattttgtcctttgcttttcacgaaatcttttgggttctttcttttttgatgtttcagttccttaatcttttgggtttccaaaaaaaaaaagaaaaaaaagcagagtcctctgtaaattcctctggttggaattttgaactctctcctcttacattaacattaacaaccaaacacttgttgggttttgagattttcttttaattaccttaatttccaaaaatggtgagtttcattgaagaaagaccaaagaacatcgccgccggtcaaaacatggtctctgatccaaaatcagcacagaaaccaccggcaccacctggttttatatccatttccagaaagaaattgcttcaaaaccttgaaatcaatgccggagctagagttaattcat

SEQ ID NO: 238305 - DNA, 257 bp, Gossypium hirsutum
  unsure (1)..(257): unsure at all n locations
tcgaggcgaagccaacggtgaccgcactatattcgacacaagccggaggggcaccaccaacaggcggtagcgggaatcacacttcttcttaacacagagccgatggttgactaaaaccatgaacgaacagctcactcnctaataaatcagagatgaaacacccaactcacaccggaacgcacgcacactcatgcagacacggaaccaatcgagactgcaacgcaccgacaacagaccgaaccctagacaaggaagaa

SEQ ID NO: 238306 - DNA, 325 bp, Gossypium hirsutum
gaaaaagcttgaattggacaggcgatctcgttcacgtactgcaccatctgatccaagcgaacccagaaagcattccaaccggcattcatctgagtttgggtcccctggggggtaacatagaccaaaatcttcagaaatgcagcaatgtgatgaccaactgagtcagataagtactgaatcacgggcttctagtcaccaaggtgatgacatttctctgcaatcagacagcagtatcattctggcgttcaagttagatgtggaagtcaccagtcatgaacaaactgttgggatcattgatagtcaaagcccattcatgacggcagtg

SEQ ID NO: 238307 - DNA, 320 bp, Gossypium hirsutum
ctgaatatgttgtaccatcaatgtatagtggtcagttggggggggtacatgatcaaggcgatgatccgtctatgcaggacatcactgatgatgaatacactagttatgcaattgccgaaggaaaaagggttatgactcctttgggatcttgattagctataaagcctaatgaactatatagcaatgttaaagttcagaagatgactactctttgcgcctttcagatagctagagaatatctttatgtgagtgatttgaacgatgcacaacaaatgttcgaaggagctgcagatttatatacgcaagaatgatgggacact

SEQ ID NO: 238308 - DNA, 171 bp, Gossypium hirsutum
gtggatccccaaactacatcaattcacactagaacaaatctttttcttaaccccctagaaaacaatagcaaagatgcattttacatcatgtctaatactcaaagcttacaaaacatcgactctatcaccaacacatcctaccatactgtaacatatgataatatcaaaacc

SEQ ID NO: 238309 - DNA, 185 bp, Gossypium hirsutum
gctaaggaaagtatgcgtcatcaagatgcttagcaaggctggtttggataaagtatatggtcttcgccgtcaagaagtaccagaaaccataggttttctatatcggacggcccggtcggctgttaacgtgggaaaacagatgcttcccactaccgcgaacagggggacccacattatacggggcg

SEQ ID NO: 238310 - DNA, 171 bp, Gossypium hirsutum
gtatcagcttctcattgaaggtggttccgattgtgcgtcggataattctttatgcgggagcgaattccaataaaccaaacttttcaaccgagctacaatcggtaatcataataatccctcatcatgtcaaatcaattctcataaacgttatatgactaattacacactatc

SEQ ID NO: 238311 - DNA, 157 bp, Gossypium hirsutum
cccaaatgatttccttacctccaaattattaaatcacaggggatgctccataggccaactgggccgactgactaatacataacccctatagttgaacgattcaactcaagtatcactgtatagaccatcttccaatactaggtatttcacccaccat

SEQ ID NO: 238312 - DNA, 125 bp, Gossypium hirsutum
gaaatgtcttatacataaatttcatggctcgtaaagtcttgttcttttgcaactgggagatgcaatgggacaactgatgaggttaaaaagatcgttacaacattgaatgaatctgaagttccttc

SEQ ID NO: 238313 - DNA, 285 bp, Gossypium hirsutum
gcggccgatgctgcttatcatgacaatcgaacctgccttgccgcctgtgatgacgtggggggtgtagaatgatgcattgacaaccattgggtccagattggggattcatacgattcctagacagagttaccgatctgctatgggagcatcactgatgatgaccgtgatagaatacgtcaccgtttctgcactgatgacttctccacttcagtacacaatacttgtgcatattgctataagaatactcatgaacttattgtctactaggataaacgccatacaagc

SEQ ID NO: 238314 - DNA, 144 bp, Gossypium hirsutum
cccaacaacttgcaaacaccatgcttaccaatcttatcaggctctggtttcaattacgggaggtctacccattatcaggccagtcatactcatcgcataaccatgtcaaaacgctactcatcattatcttcactcacttactcc

SEQ ID NO: 238315 - DNA, 233 bp, Gossypium hirsutum
agagaactagtctcgagttctttttttttttttttatttggaggcattgttttgtttttaaaataggaagaagatatctataatattgcaacatataattacatctttattgcataacattgtttaagaaaagtacaaagcataaggctaccatatcatatcttttagcatttcaatatgaaaagcgtaggatgctatcaaaccctgcaaattaaataaagaaagatcactaa

SEQ ID NO: 238316 - DNA, 199 bp, Gossypium hirsutum
gcaatggtttgcatcctgctgagataattggtctttagcaagcgcagttatatccgacgtggtgaatcgattatgaatacgacacagagttgtacgtgcccactaggtgactggtctaatatgatcgctgactgggcctatagccttttcagctacggaccatacatgggcgtgttaatcattgtatgccgcttatgtg

SEQ ID NO: 238317 - DNA, 120 bp, Gossypium hirsutum
ttttaagttcactttcagtcgttcctctggtatgtctagttggttttgatctttacgaatgcagcttacttgagattagccaaatgagtctagatatgtaccgcactatctatgattcat

SEQ ID NO: 238318 - DNA, 210 bp, Gossypium hirsutum
gactcatctactacacttaacgcagccatacagagacaggcatgcctataatgacggtggtcaagacggagctgcacactgcaagaatacgatccaattgtggtatgccatcatgatcgcagctgacatgagagtgatcctgactgtgagggcaagtttacagctctctatacactatacctatcgtacagatgtctaacgggcagccca

SEQ ID NO: 238319 - DNA, 401 bp, Gossypium hirsutum
gttccttcttatttactatgtgtaggatctagaacggagcaagtcctttacagatgatatatattctggttctcaatttaatcgcccatttacttcttcaaggtcatgatcctatggtgcataaccaaatgcctgctggacgtggcgatacacgtggaggggtaggcggaggacgaggagctgtccgaagaacaagaacgacttacactctgacatggctcgatcatcttgcaccagatgtttaagctttgaaccttactccagaacatgattcgatgattcttcaactccattactattcaagatacagcttgtcgcttcttctaccatggaccattctgatctacagtttacattatatgatacatgacctgaatcgtggttaaagactgtaaaatatt

SEQ ID NO: 238320 - DNA, 248 bp, Gossypium hirsutum
gtcctctgttacacactaaatgctgacagatagagtcggggagtcctacacgactgctagtcaaggcgctgctaaccatctcaaacaacgaacttagtcttatgaccagcactatggtctacaaaatgatatcgatcctgactgctaaggccagtgtaatgctctcgctctgctataacagttctctagaactataactagctgcccgccgataactgtcgtgaatctgaaagacattgtaaagcaat

SEQ ID NO: 238321 - DNA, 412 bp, Gossypium hirsutum
ctttacacgctagtttgcctaatctttcttcatatttaacccaatcaacgctgcaatacttttcacacctgaaattttatttgaagcaaaaacaaatcccaaataacacaagctttgtttttgttttgatttctctggtaattagcaatgaataccagcagcaaagaatcgcagcctaattaccccactatctcacctgatgaatataccaaccctttccatcaacagccgcacatggaacctgcagcggccaccgcggcggcacccgcatcaacatcttcgtcggctccttctgcacctactccggaacagtctgagaaatgggggactcatatcatgggaacaccagctgttcccacatgtcatccagacaacaagaaagcagccttgtagggtgctggtgaccaagctc

SEQ ID NO: 238322 - DNA, 409 bp, Gossypium hirsutum
  unsure (1)..(409): unsure at all n locations
aatgttccttaccaatcttataggtgagacgtgcagtgcatgtgaggaaataaaggtagcaaaagattatgaaaattgaaattttgatacaatacatattattcatggaaaaaaataaatgtagcagatagttcttttattgttatagctgagtgatggagagagagtggagtagcataaccaatagatatctggttccttggttttaatttaatagcaagctgcttctgccaacatgttgatgcggtttattgcaatgatccaactgcagttaattatttgattggttaggccaatctactcttggttttgtaccattatcatattgatatatgtgatggagaaaacgtcattgcttaccaatgatatattntctcaaatgtttgttttgccttgagtgacagtctgg

SEQ ID NO: 238323 - DNA, 402 bp, Gossypium hirsutum
gcggtgcattcattggttaagttgatcaaagaaatggctaaagtgattgagacagaaagaccactagttgggcagtgcctaccactatgggatgatcttagaaccaaagtgaaggattggtgctcaagatttcacattgcagaaggcccagtagagaaagtgattgaaaagcggttcaagaagaactaccacccggcttgggccgctgcatatgtacttgatcctctttatttgatcaaagacatgagtgggaggtaccttcccccattcaaatgcttgacacttgagcaagagaaagatgttgataagctgataactaggcttgtatctagggaagaggctcatattgctcttatggaacttatgaaatggagaacagaaggtcttgatgaagtatatgca

SEQ ID NO: 238324 - DNA, 230 bp, Gossypium hirsutum
aagactcataaaaatttcactctctccactttaacgcaggttctcagcccctcttctgtctctattctctcctcttttcgtgattttgccccaacgggtcaatttgggggcaaagctaaatctttccttgaaaccctagattaatgtccgcttaaggcatgtccatatcccctctcgcatcttttattgatttattaattggtaaacaagtccagggtattggtcgagag

SEQ ID NO: 238325 - DNA, 339 bp, Gossypium hirsutum
acatatctttactgtcatccttaaaccatggccccaggcgcaatttctctaattgggaccaatatctcacatcacttttcatcgtctatcatcatcagcacatatataacttttgcgtcacccaatttctcaaattctcattacaatactctaaatcctactggcgtcatagcacccaatctcagtcctgtacaacttctcatcagatgttcgatcttacatggcgaatcgcactctggaagcttgcacatttcctgaaaatgctattcaaacttatcactcacatgctcattaagacacccataatcccttgcttttcaactttgttattgcccagac

SEQ ID NO: 238326 - DNA, 202 bp, Gossypium hirsutum
gcaaacattaggaaaacgctcagcttaccaaatatagggtaaaaagatgacgctgggattgaaacagcaaatggtaaaataagactatatgtaacttggagaacgaagagaaagcactatatattatagatgcatctaaatacgcgaatgatgcccggttcatctcatatactagctctacgatacttgagaatgatcagga

SEQ ID NO: 238327 - DNA, 395 bp, Gossypium hirsutum
ctagactatccgatcccctgcactacttcaattcgacaccacattttcttgttcatgcaatccaagcagatatggcgtgggtcgatcttagatcacgagcttcaaagtttaacaaacagtatcttctgtgcgaaggcactgtgttcaaccatatctgatgattaacatcaatctgtacattgccataccaactacttttatccaagcctctactatattgacagctcacgattaggacggctcgatcgatccatgacttactgaaacctaactcatcatactccgtatgaactgtattaagaactttcacaatattacaaaaactatgatgatggcagctgcctcaaagtttatagcaagtcaaactctagctgagtatcccccaaacctatctc

SEQ ID NO: 238328 - DNA, 352 bp, Gossypium hirsutum
cttctctcatcttcacttgccttgccttcaaagcttgtgggaatctgggtaaactatactgggtaaataatgacaagctgtatatcgactcactgctgtaattgctcacttggagtgatgaaacacgtttgcatctacaagggcagtatttataaccctgcatgactcatatggtgtggaccatattttcatctcggaggattaagtttctcccagtgtcaagctcaatgctatggtgctacttcctctcagagtctagggagatgtggtcctatctgttccggcgcattcgatgatggagacactgactcgattgatgcttaagcttgggatggacatgacgaagcttcac

SEQ ID NO: 238329 - DNA, 363 bp, Gossypium hirsutum
aaacaacttctttaaccacagaaaagatgataaaaacaaaagcaaaaggaaacccaaaagctttgagtccaaccatggagattcaaagaaccttctccattttcaaagcgatctacaacaaactttgatgtctctgtgcccaaactctctgatctttctccaccaacattttaacagaattcgagacttcatcaacccaaaacccagagtgttgtcttctcctttcttccatcgccagggtatgggccaccctattaaccaacggggaacaaagagcttgttaataaccgtcaaggaatctccttccactagaaaatgacggaaacccatgttaatcgcaaaaagcaatgctctttcacaagc

SEQ ID NO: 238330 - DNA, 232 bp, Gossypium hirsutum
attcgacaccatccctatcctataaaacacacctcaactcaccctatagacagattttatcaataagtcgatcacaatcctatataatactaccaaatcaataatacatcatctcatgcaccataaattcacacctaaaattcataataccgctataacattgtacattccagacgtacgctattttaactcaatacacccaatatataccatattttcaaaaattaatctt

SEQ ID NO: 238331 - DNA, 205 bp, Gossypium hirsutum
gctgtcgtctctcactgtctcaacaattatcctctttcttgtcactttatccttctcacttgcagcaagcaaataagaaaacaaaatttctgcaaaaacccgaagtttcctctcagaagagaaaaataaaagcgaagctctgcgttttttaatgcatggtctgatttcatcgattaagcaaaaatatatatctgcatctatttcc

SEQ ID NO: 238332 - DNA, 217 bp, Gossypium hirsutum
gcaagttcaacgaattcaattgtcccgtagagtactaccggtctcctttccttgctgaacagagcaggccgactgccaggtctccgtatatcatcaagacagcccttaagttggatcgaatggattggaatgcatttatgtggaaagatgaccgattgtcggctttaacagcggacattggtggaactacgagaagaccgttcgaggcggatggtac

SEQ ID NO: 238333 - DNA, 138 bp, Gossypium hirsutum
gggctgcaagctatgcctctggacccgcttaatgaacgtgggagtaacgcataatagatggatggtgtgttatgctcttgtttatggagtaccctatgtgcgagacaacatggtctgcatggatgatatgtacacatg

SEQ ID NO: 238334 - DNA, 257 bp, Gossypium hirsutum
ccttacgctttcgtcaccccattactgactttaacttatggagagtacttttagtaataatggatgcgaattattaccagtagtagttatactttaccggtaccaatttgtttatgagttttttaccgtctcaagagtgaaatgcatcttttcaccggcggtcgggatgctatccctcaacacgtggcgccatttcctgatttaacgacgattattgcacccgcggaggacttgatgattactgatcatcgacctac

SEQ ID NO: 238335 - DNA, 240 bp, Gossypium hirsutum
gcctatcgataccggagagcagaaggtgaggccatagaggggagtaagagtctatttagttctgatgaaatgcactggccgtaggacaacatcgtggcgactggtaaaaatcctgctgaacccaactaactcgcgtagaaactcgtcgccctaaagccaaatggaggggtcgaaaccactacaggatggactgatcgcaattacggatgggataattgtacgggaccgactcttcaggac

SEQ ID NO: 238336 - DNA, 339 bp, Gossypium hirsutum
gaatcacattagccgggtggggcagtccatgacagctaggggactgacatttagattcctgcctcttgtatgagtgataagagtgacgacatgaaaccgaatcctgtactggatgattgacctgaaccgttgggaaagactgacgctgcatccgggttaaacgaagctattggggctatcatagtacgacgtgacacatgttagctattacatgcccttactggtacacttcttcaccacacatgagaagcccactggcggatctcggtaataaggaccgtgggtagggttaaccagaaagacatgactagctacagcctcatgcaaagggcttcaaga

SEQ ID NO: 238337 - DNA, 266 bp, Gossypium hirsutum
atccgtttcattttccgtcttttacttagttgctcttcggcgattgctaccatgggaacggaaggttacgatgacggaggcgtatattatgtcgactgctgaacttcatctcatcctttaaatcttaggaaggacgatattcaacttcgactggaatgccctgtgagtactactgcccttgcactgtatcgtacaggactggacatatactgtactggcagcgaggatgctaggatctcacgaccttcggaaggaaccatttctat

SEQ ID NO: 238338 - DNA, 304 bp, Gossypium hirsutum
ctcgaatcttggttctttatattttcctaatgagatgagcggattctatgagacgattttagagttaggttcatgactggcatttgtgattgatgttgtgctttaacgtgactttgatcatgggtggaacggcaaatgggttggatacaatgagcatttttgctatgatgctctgtgaattgttacagtagttagctatgcggcgacatttggctcatcgggacttctcttgcactggctcactccatctggacaggattgtcgactcaataccttacttaacgtgatgaccttgatccttgcc

SEQ ID NO: 238339 - DNA, 355 bp, Gossypium hirsutum
gctgtcgtctctcactgtctcaacaattatcctctttcttgtcactttttccttctcacttgcagcaagcaaataagaaaacaaaatttcttcaaaaacccgaagtttcctctcagaagagaaaaataaaagcgaagctttgggttttttaatgcatggtctgttttcattgattaatcaaaaatatatatttggttctatttccgggttttaagggaaattctaccattgttgccaactcaattgacttttaatatcgtcaagagtgaaaggtgtttgtttgttaggtggggagatgacgctagagtctttacctgggagttcaagggatctggaattgttttcagagagacca

SEQ ID NO: 238340 - DNA, 233 bp, Gossypium hirsutum
gatggccactttcacacgaacgaatataaccacatttttggagggtattccacctggagccttcaaaagctctgatgaaacaaaggcatggatgaataccctgaactcacccacgctagattcgatggggaaagatgggacacacgtgaagcgccatggtgtgcgacttctgatgcttgcagcaacagatctacttctaggtcgatgattaggcagacggtataccgtcaatg

SEQ ID NO: 238341 - DNA, 238 bp, Gossypium hirsutum
gataacacttgtctcgacatgctcgtctgctgagacagggtttgcaattgggaattagatggggaggcatcacattcataagcttccttatttacaatcatcctacaacaatatcgaccatagtgtctcatattactcagctctttaatttccggatgaaccgcctactctgtcgacgcctatcatgatcaagccaccgtcaccgaatggttctatttcgtttctatgactctatcta

SEQ ID NO: 238342 - DNA, 366 bp, Gossypium hirsutum
gctacaagctaccaagggaagcccaatatcttcggtcttgagtactcccgaatccattgcgcggcttttatgacctacggcaatggctaccaaagctgattcttgcaaacaatcatttatccctagcttgctacactcgcctacgacgaactaattctcactggatcggcatcctgaacgccaacagcactgctttatctgcttcgagcttgactatacccgaagctcctgcggactatttctcgacattgatcaaggccagaactttcatgatcccgttccacaaagagcccgggacgaagatcgagacgtatatcccttaggtctacgctgcttgtaccattggcggtgtccatagatgggggc

SEQ ID NO: 238343 - DNA, 131 bp, Gossypium hirsutum
aggcgttcaatgctactgaagaaaaagttttacatttggggaagcaatcattgcccgtaagggcttaaattgcttcaattggatcatgttgccttgatggggcgatattcaacgaagtgttgtatgttgcg

SEQ ID NO: 238344 - DNA, 138 bp, Gossypium hirsutum
acacatttgacactttgactataaacatgtacctgtgacacaattctacctttgattaggcataatccataccaacttccatgccttcacgaatttcataccttatgaacagtacaaacaattatacaccactgacac

SEQ ID NO: 238345 - DNA, 340 bp, Gossypium hirsutum
atgcaaagaatgttcggatagttaaattccatgggtccgtactttgcttgtgtctccaagctttgtaagaataacatatatttgctaaatcacaatgcatttcttctgtaatccactgctaaattactatgatttgtatcacatggcctgtcttacagcaaatgaactccaaagtatttgaaccattaatggtaaccaaatatgtacatatctagtgatggtatactatgcgactgaacttacaacggcatgtcttttgtcaattcattgacattgcctttacaatcttcccattcaagatgccattctcaagatatatctcttttcttggcttcaacta

SEQ ID NO: 238346 - DNA, 199 bp, Gossypium hirsutum
aaacgtttcattgcttcctactatatatagatctctgtcacatctctgcccattgatgccacatctcccaataccatgctatgactcctcgtcactctttaccattgatatatcactactgtttacttctaaagaatcatctccactataccatctccaagatcatcaccaatcatatccgagtgattctaatccatta

SEQ ID NO: 238347 - DNA, 283 bp, Gossypium hirsutum
gaaagataaaatcccatagtaaaacataagatggagggagatccacgaatgaatgaatctcttagctctattacaagcaagggaactcaacaaactgatactggtctcacaaattcccttctcatcatcaaaccctaacctctctgtggaaagccgaattaatggcttcacgtcggcttctttgttaccttcttcgttcaacttttggccgatctggggctaaaccttcaaactctaacccttgtctatgatctcctatcactgggccctgtggtaaagctac

SEQ ID NO: 238348 - DNA, 355 bp, Gossypium hirsutum
gctgacttgttaggttatagtgattaacagtctacccagggttcactgttgtatggctggtttaccagaaaaatcatatgcggaatactagcgacttctcgtgatgaagttaaatacccaattaaagttccttgtcacaaatttaaggttgataataagttgcccaaaattcttaatggtgggaattcaaactaattaaaaggtgaattttctgcgtgcttaaaaaagaatttgaatgttgaacaaaaccttgggcatgctaatgctaagaaaaagttgcacaatgtgttccattttcctgacgacatatcaatgcacgaagaaacctcattatcttggcctctttggtttcatg

SEQ ID NO: 238349 - DNA, 252 bp, Gossypium hirsutum
cttcattgtcttaattgagaactaatatctaaactgggctaatgtttaaacctggatttagggaactcaaagttttggtctaaaagtttcttgtttgaatcttctgattcatatcatgagtccttattatatatctacaattacactgttatctaaatggaaaactcaacgaacaggagaagccatgaataatgtattgtagatgcaacctatattacagaaacgaagaaacctttgttaccagctttggca

SEQ ID NO: 238350 - DNA, 206 bp, Gossypium hirsutum
gccaatttcctcattatcttgctatttataaagtcagttctctaaataatcactgggttatatttcccacgatctgattcgaaaactttctttaaaatccttgccttttttctaaaagctaccaattaattttcctttcatgttaccttattatcttgatcaaacggtcctggcaatacaagctaggtcatctttcaatcccttac

SEQ ID NO: 238351 - DNA, 329 bp, Gossypium hirsutum
  unsure (1)..(329): unsure at all n locations
cctttaggttggagcacctggtaatggtnngtgaaattcaaagatataggtgagtacctannggattttacgtagnagaatcaatttgtatcggggtgtgttggtcacttannttttgcatgttaggggccagannataaaaaaaaatgaaattatgnnngtgttgaccaatggtcggcaaaggggtgccctgtaacttatcctgaaccatttgaagggtgcaagaatgtaaaaaaaagccactttttntgaagtaaattataggttgaatatgtaaaaatttgtgcccttcttaaatcaaaggggggcctttttcgctttctataccc

SEQ ID NO: 238352 - DNA, 226 bp, Gossypium hirsutum
cgagcattatgattggctatccgtccacgccacgagttcgagcgtactgtgtgattcagctagaatcatctataagttactgtcatggtcgttatacgtatcacaatgctttctgtctcaatacttcatcaagtgaacctaaaaggacaatagtgttcctagaataagatgcatgcgttggtttactgtatgcgtggaccttgcaccatatgttagaaccctttaa

SEQ ID NO: 238353 - DNA, 188 bp, Gossypium hirsutum
aaacaccttcttcattagttcattaccattctatgaggaatccatggagttccttataaccctgttatgcttatatgattttaatggttcatgtagactttgtggcatctgatatgattctcgaatatccgccgaaagacttgagctcgtacttgatagcctcttcgactaatagatgggatgcagta

SEQ ID NO: 238354 - DNA, 323 bp, Gossypium hirsutum
  unsure (1)..(323): unsure at all n locations
gggtggggcggtaggcaccannngtggcaagggcttattggctgttgaggattctcggggccgagggttagagcnnccgatagggccttaaatgctgnnagttttggatggggaaccactatgacttttcggggccannagttttttgggcttggatggcttanntggagaaggggtcaaaatggtggnngtttaaaagaaagtggatnnntcggaagaaatttccgaatgtnnngcttggtcatttaagggttttgnnngaaaaatgngnngggcccnnngatcttcncnnttttcttctttcaaagggtacctttttcagt

SEQ ID NO: 238355 - DNA, 264 bp, Gossypium hirsutum
gccaaattcttcaccttttaaagccttcaaactttgcgaaagaagccatggaaaggcttctttactcctcttctacaacttcctttgaaaacctctcgaagtccttttcctttactgtctcaactcgccaaattcactcttctaatcttggcctaagtccttcgcttaattactcccaaactaatccaatgaattttaatttcatgcaaggccaaatttaacccatctaacttctcttatcctctatccaatcccagcattgat

SEQ ID NO: 238356 - DNA, 285 bp, Gossypium hirsutum
aaacatttttgtcattggtccataaccatttcatgagcaaactatgtaaatactgaaaaccttggattgtgaatgggacattaatgggattagaaggcatcttgtcagctccaatgattacagaagcatcgccgatagactagttctccttgtcgatagcctatctggaaaaaatatgcttgttttaaacttcgctaaaagacagactgctaaatccaatgtctctgccatacgtgcaacgttgttgctgacaaacattggctgtgaatgatgactctctaaagt

SEQ ID NO: 238357 - DNA, 223 bp, Gossypium hirsutum
caaccggtccatcctccttcctgaattaattactaacaaattaccttttttttatttctcatccatacattatctaggcagattacaaaaattattcggatccattacaaaataatccatctcattcaatattccaacaatactttacttattaaaattaaactccctcttacaaaataacttttcacaatcataattccttactcatacattttccactcac

SEQ ID NO: 238358 - DNA, 202 bp, Gossypium hirsutum
gttcattcctctcctttcttttccagatctctcgtgggcgccaaccatacctgcgctcgcttctgctctcggtaatctttcaacgatttctccgagctttttttattggtgaacaaaaatcacacttggaccggtacaactcaaaccgaggaagaaaggcatctttttttttttaaatttggtttgaaattggtggtatcat

SEQ ID NO: 238359 - DNA, 234 bp, Gossypium hirsutum
cacttctgtggctctctttatctctctcttcccagaggaattatttcaatgtctgcgatctcttatcatctatccgatgaatgcataactcaataaaaatcttcacaagttttctcaaatttcacatctaaaccatatacgtacactctcacttccccggaacttatcctaagagagatcaagagaaaagacttacatcaatcgacaaagacaatgatcacaattccgtatttg

SEQ ID NO: 238360 - DNA, 251 bp, Gossypium hirsutum
gtcatcttggacaccacttatttatccaaagcagaggggatgagttcatcaattggcaactactagcttgtccagcggataatacatatgcaacaacagtgcttattcctgacagggcaagtgtaaagattcaccatattccaattctgagcgatcatcctgctgtctctgagcgggaacacaggccattcataagtactggataccatgtcactgaagacgcatagcacttcattaatcctgaatgcggt

SEQ ID NO: 238361 - DNA, 271 bp, Gossypium hirsutum
cttgttttgcgctaccttgctgtatgagagccccctagggcggatagtcatcagataggtgctgaactagcttataatgataaccagtgatctccaaaggacttggcatcgatatcagggccgcttttatacatactacgtatatcatgatgtgtcatacaggacaagacatgatgccattgctacaactgccatccttccatggaagactggatctgctgtaaatcctctgtctccggcaacatacttgtccaaaactgcacaacaaaaa

SEQ ID NO: 238362 - DNA, 366 bp, Gossypium hirsutum
  unsure (1)..(366): unsure at all n locations
accaagctaggttgaaccacctgtaatgtgtgaaattcaagatgtatgattcctaggattttactaaaaatcaattggtatggtggtggtggtcactattttgcatgttaggccagattaaaaaaaaatgaattatggtgttgacaatgtcggcaagggtgctgtaactacctgaaccatttgaggtgcaagatgtaaaaaaaagcactattttgagtaaattaatgtgaatatgtaaatttgtgcttcttaaatcaaggnggctttttcgcttctatacaaaaaagtgtgcctaagacttggcttgtgcttaatcaattgaaaggatggcataaagaaatgcataacatgtgacaacccaacatg

SEQ ID NO: 238363 - DNA, 265 bp, Gossypium hirsutum
ttttatctattatataatttgtcaagtatatcattatacatatcgagacgtagagagaatggcttattcttcttcatttagtgtcatgtttgttgtggtggtttggatgattgtggggagcagtagctatgctcagctctgcactaatttctactctaaatcatgtccaaaggtgtagtctacagcctagtcggtagtttaatcatcagtgtcaaaagagaagcgcatgggtgcttctctcgaccgcttggtcttccatgactgc

SEQ ID NO: 238364 - DNA, 243 bp, Gossypium hirsutum
gatcgttggttataaatgactgctatgagtactatataggaggggtcgtagatgagcctatcttttatgtgcacaaatgcaaaactgggaatctgaataaggtcatccaacaaccattttttcctggtaaaatggatttcttaccaaagaggaaaccctctgacgatattaacattgaacaccagatctacacttgtgaggtcctccaatggccctataggggactccaaattgggttttatg

SEQ ID NO: 238365 - DNA, 137 bp, Gossypium hirsutum
ccccagcaaagatcagtacatacacgaatggtccctttggcaccttaaaaaagggaaaacccaaatttgaaggtcaaagtccgtttgaatttccatggaatggggcttggggactaagttcaccttttggaaaagga

SEQ ID NO: 238366 - DNA, 140 bp, Gossypium hirsutum
ctacatttttcttctttatatcaaaaaatggctattgcgcaagtttttaaattaactgaagatcataagatacactgggcataactatacaactcattgattctactagcttcatcgattgttcaaattacatgcacttt

SEQ ID NO: 238367 - DNA, 203 bp, Gossypium hirsutum
tgaatatatgctcttgcttttactgcatcaaacctgtggatctggtggagccaccattacttcaagtaaagaaattgggatttattcttcggagaaggctggagtaatcaaaagcgagaacgaagagccactacagaagttttcagatggaagtgcaaaattctgaacaagggcagataattgaaatacgtggagatgtgcca

SEQ ID NO: 238368 - DNA, 127 bp, Gossypium hirsutum
atttcagtgagttcaagtttgcttgaaagtctgataagggggaatttaaagcttttgcaaggccttaccgccaattgtatgacatggggttctgcatgttttgaaaacttttgacatacttgattat

SEQ ID NO: 238369 - DNA, 352 bp, Gossypium hirsutum
  unsure (1)..(352): unsure at all n locations
cagaaatccaaaggccaccttgcttccggaaatgccgggggtactttcgaaatgtcccgcgtttatactccgggggcaattaatcaatccagttttttggaacttatttggatcacgctaatatcggcttccatcagcccatcgtcgggagcctacgcttctctgctcgtgtgaattcgagacaatgaatggatcggtaagaaatagccacgcttcgatatcacatgacgctagcgtacgctcgtgaattagcttctcgactttggacacgagaatgtatcgcattagagatgtcattccttcgctttgcngagagatttaatgatgtctacatgccttggaactcatggat

SEQ ID NO: 238370 - DNA, 193 bp, Gossypium hirsutum
aaaaaaatgggattcaataaatatgattcaatttttgataaataaaaatattgtttgtatgtttaacaacaaaaagaatgaacaaattataatcatcaaatcaaggaacaatattgggagttttcattttttaatccatgaattgaacgacgttttcgagtttcggaacccgacaaatccatgttctttgctc

SEQ ID NO: 238371 - DNA, 248 bp, Gossypium hirsutum
gccaaatcatcttatatccttttcagatatattgcgcgggaacaagtaccagttcagtatggttgattgagcagggaccgtattcaagaattatccggctgcgattctgcatcaaaattggcaattataccagctgccattctcaatgacgaatttcttgtaactgaggaaagtacagtgttttttaaagaactatttttgttctggatcacatcacactcaccttaacctttttggcacgatgtcat

SEQ ID NO: 238372 - DNA, 260 bp, Gossypium hirsutum
gcgaatccacccggcggccggaatgcagcacgagcgaggcggcagcaacgcgcctggtagaaaaccaaaccaaggagggacccaaagaaccaggccacagaaacatgaccacaaccaggacggatggctaccagctcatgcgagtgcaaacgcaaaccaaaggcaagaggacagaacagccacagagctgcgcagcagatacgcgaactgcaccaacgcaagacaagcgaagcccgaccatacaagcgaaactgaccgac

SEQ ID NO: 238373 - DNA, 140 bp, Gossypium hirsutum
actgacagaagccaaaggtcaaatactaaagatgcagaggcgacttactctgaaacaagctacatcatcatccttctccagttccggctcttcacttgctcattcccttgcgaacacaacctacatgtaagtcgacagct

SEQ ID NO: 238374 - DNA, 290 bp, Gossypium hirsutum
cagttggttttgcacaccccacttcttctttgatcattagcaagaaagataaaagcctctcagtcgtcccttcaacttcacaactctccatttacaaatgcaagaaacccatgtccaacaacatttcgatggcaatggcgacgcgacaatcagagagaaaaccagccaccactggctcaatgaagagtccaatgacgatgacagagaagattcttgcaaaaggggcggagaaagcagaggtgaaagcaggcgacaacgtttgggtgaatgttgatgttttcatgactaat

SEQ ID NO: 238375 - DNA, 112 bp, Gossypium hirsutum
gattaaacaatttttcagatagacatcctatggggacagcatctcagacagggatggactacaaggagccaccagcatcactcttctttgagcctggactactcaaatcatg

SEQ ID NO: 238376 - DNA, 252 bp, Gossypium hirsutum
gcggacacaaacgctaggtcaagacctgaagaagcagaggcaatattctcccgtgaactccaagaacaattatatcacgaggtctcaatatatagcaacactgagactgatgaaaacaatcgccggtctcttcaccaggagagcgacacattccccagtcctagtattcgcatcatcgaaccaccgacataaccaatccacgactcaccgaagagcctactgataactttaaagaatgttgtgcgacatacc

SEQ ID NO: 238377 - DNA, 146 bp, Gossypium hirsutum
gctttacacataagcatcatgacctatctcatgtggctttaaaccaacaaattggtcttactatctcaatctactactcaattacctactacatatatacccttcaccacacctgacacccttaacttctttactttcaacattaa

SEQ ID NO: 238378 - DNA, 295 bp, Gossypium hirsutum
accctagtacaggctctctcgcgaatgacacatgggtggtacaagcagatgctgctgcgcgaaaggctcgctcatcatcgcccacaaactcaaacaaggagactgcgtacgtcccgactcaggaataaagtagccacaggctacttaaactccaagtctcgcaagcactctatcatattctcaactccagaacggctgactaccatatgccaacaactgcgaatgccatgcccacactgggcatcacatgggctctgcacagtctatgttataagcccaagtatagtgtcactag

SEQ ID NO: 238379 - DNA, 211 bp, Gossypium hirsutum
cgaggaatctgatgctagggcaagacaggaggacacagggaagtataggcccatgaactgcaacaacaagtatatcatgagggctcaatatacggcaacaaggagactgatgaaatacatactgaggactcttcaacccgaggaagatacatacccaagtccttatacatctgaatcaaatgctcaacgaatagacaggctgacctctcat

SEQ ID NO: 238380 - DNA, 184 bp, Gossypium hirsutum
aattaactggcttttgtcagtagaaaaaccttcgggcgggtataattgttgggctgtggttagagaaatatactgtctttttaaggggttcttataatttaataatggtattgcatgaacatttttggtccagttgataactcttgtatttacgcttttgattaggatactggatttcatggtt

SEQ ID NO: 238381 - DNA, 405 bp, Gossypium hirsutum
ctttttcgggttaacaaaaatgatggagagatggttacatctgctgaagaggcaatagttttgcagaagaagaagtctgcgcttaatcgcttttattggaatttatcacagccaaccaaaaattcaacttcatctgatgttgataataaagaattgaagagaggtgttcaagaaacaatagtggtttcaaaatctccgtctcaattggaagtagctcttggagttataaagagctattgcaaggctcatttaagaaaagagggtatgttggcagctacaaagcagctacaatttctggagagcatgaggaaggagtatcgacattgcaaggctcttatgcattgctcaagcacaagttttgaatgcacatgacgaaatcaagatggcaacgactcgattgcacat

SEQ ID NO: 238382 - DNA, 230 bp, Gossypium hirsutum
cgaaaattaaaagtagtcatcatctttagatcagggacgcataaaatgtattggacggttgttgaataagatattaaaaggtttaaataagaaatgagttgctgttttttgactatcattgatatagtcaaatttgatgatatggatctttctgcatttagtgatttatggtataggtctgtatctattgtgttttttatcagtttgttattctgaatgtgtaattgtat

SEQ ID NO: 238383 - DNA, 226 bp, Gossypium hirsutum
  unsure (1)..(226): unsure at all n locations
tgaggaaaacctacttcagggacgattgctatctagccaagaagntgggttgggtcttcccagtgtgaatctcttgaaatacctttgcttgggactaaaggaagggtcttagcacacttcagactcatggatgcttggattctgatggtggaaaggatgggacttcagcttgttcgcgccagttgtgattcgtgcttacttgtgccttgtgttcaaccttgatcta

SEQ ID NO: 238384 - DNA, 162 bp, Gossypium hirsutum
  unsure (1)..(162): unsure at all n locations
tgagacgtgaatgnnttctctgcttctgtacattacttggnngaagctgtggtgatgttggcatgaggcgttaattgctaatgatgatgaccgtgttataggcattattgtcaactaccagtcttctcattgaaatatattatgtgcgttatgggaaatagc

SEQ ID NO: 238385 - DNA, 221 bp, Gossypium hirsutum
ggttcgaactcaagaccataaccgatggtcttccgctggatcatcccagatcagggaattggttccttgagacgtatgaagaagccattaaaatgaaaatcaagcagaggtttagagagatgttgatgaatagcaatccaccggtggattgtgtaattgcagatgggttgtctgggtaatccattgatgttgcgattgtgctttggatgcacatcttagga

SEQ ID NO: 238386 - DNA, 320 bp, Gossypium hirsutum
atttagcctaataaaacatttccttagaccatatgtcgagttatactaaatgggttgatcatgtttgtctatgctttactcgctgtatcattcattgagtgattgtcctaccttttactgcttgatgctgaaatctggtaccaaaaaggcaagaatgatccagcgtttggttctaccaatgctttcaatttaaaaacattttatcatataacaccgttcactatccattgacaatcgaacaactgttttactcgggatgcacacatttaagctctgtttgaattctgttgtggatacttcatcagcttgcaaactctttt

SEQ ID NO: 238387 - DNA, 394 bp, Gossypium hirsutum
  unsure (1)..(394): unsure at all n locations
ataaacccatccgttctgacaatagctatttgcaatgaaaaaactttacttgctatctagttttgaaatcagattccctcaacttctccttcaatctagacttcttgcccatcttccctccaagccgaaagaatggcagttcaactcttctcccatcaggtaagagatctctcctctatctagagtgttctctgcaattctatgagcttgcgcgttccctgatctatgaatatactgaaagataatctcttgaaagcaagacttcttattctgaatatctctgataatcgcttcgatcattgatgtatttgntgaagacttttgacatttttttattattgtcctagaatccatcataattttaaccaattgtgtactcatttagatccctaac

SEQ ID NO: 238388 - DNA, 265 bp, Gossypium hirsutum
gtaacatactggttaagagtcacggacattgagcgcaacgagagatgggaggacgatccccattcgtctgcttcaaaactcgaggcaggtcaattgctgttataataaccaaactaataccatttgacatagactatatgatccatatgaaaaacaggtaaagactaggaattgggccaaataagatggaggattccatttttctgcttcaaaccttgatgcatgtgaatgctgttaattataatgaaacttataccgttggatt

SEQ ID NO: 238389 - DNA, 165 bp, Gossypium hirsutum
ctcttaatcttttaaatcttggtaataaaagatatcatacgtttacttaatcaaggatatctcgtaatgaactcaaagccataagccttacagataaacttttgagcaggttccatcaatagacgtatcacttgcttctaataatccacacacagcaatccatac

SEQ ID NO: 238390 - DNA, 387 bp, Gossypium hirsutum
ggatccaatctgaaaaacctaaatctaagccgcgcatgagtcagcatctgactgcatggtaatattagctccacatgagcccgaccttgcaaagacagccgtatctcacacaacagtcgatgatgttgccttgtcatataatcggctaatgccttcactctatgttatcaacttaagcaacacagacattaaagaggctttactccagctaggcactaagtcgcatgacgatagcacactaacatcgcttcataaacttaggtatctacaaagcttaaacttggatcatacacgatttagggatcctgatttgctccctttattgagtttcaaaaacctgagccatttgtctctcaaatgtgcgtctcttacagatgccactttgca

SEQ ID NO: 238391 - DNA, 217 bp, Gossypium hirsutum
cctatttctttatggctaccaatatgcagaatgaaggcagttctttcgatcagaaatcgactctgacaacgtagagcaaaacttctaacccagaaacatccaccgccgagaacaaaacttcttccactcagccgactcaaccagcacaggctggagcttccgttaccactatgcctggctttgtgccacccaatccttatgatttctcagccatgaa

SEQ ID NO: 238392 - DNA, 182 bp, Gossypium hirsutum
ccaactcacattccatcctttgtttttgtaataatgggtctgttctcttaaaagacgaccccagccaaaatcacatgaaatacgatcatgtaaacgaacattttgattcataaagacattgcatgcgattcctaaagtttaccctaacatacctttctatgctcactgtcttttttttctac

SEQ ID NO: 238393 - DNA, 210 bp, Gossypium hirsutum
cgtttccggtttaacctcttacccttggtttcacgcaaaggtgactttccatcctggactggcctgaatatcatctaaaacaaaaacgatacacacgctataccttgctatcaccagctaataccaagaacaattctgccacgaaccacgctcatcaaggactcaaccaaatgtgtatcctaaatacgaaacactcattacagcaaacat

SEQ ID NO: 238394 - DNA, 110 bp, Gossypium hirsutum
ggactcggtttttgatgtaggaaacaacaataaccgggacgctatcatataagcagacgtgggttcttatgggagggattatgtgaataagaaatgatcctgctgaattt

SEQ ID NO: 238395 - DNA, 360 bp, Gossypium hirsutum
aagattacttagtggctgctgaattagaagacgtgaagagaggtttcgttgcacgagaagcgtcacgagaaacatgttcaaaggatttcatatctctgcatgctgattgtatacaagatgaaatgtatattttttattttctttatattttttatatatgttattcattatttcctaatatttgtttttatttttttattatttttttatttatttttcttttttccttttttattttttttttttattattttttttatttttttttttttttttatttttttttatttatgtgtttttttaattttttttttatttttttattatatattttttttttgacactatttattttctttc

SEQ ID NO: 238396 - DNA, 128 bp, Gossypium hirsutum
ccttttgtgttaactctagataaaaacataaaacggccggggtactatgcatagatgggtaggaatatcattacttagacctaggacttgacgaacccctggaattagagtattgatatactccattg

SEQ ID NO: 238397 - DNA, 425 bp, Gossypium hirsutum
attatatagataatttaatttaaaaatgaaattaacaatggctctcctaaatatgcataaggttcaaagatctcaaaatttaattaataagattatttacatttttattactttaccaataacttttttttccaaaagaaattattgcttaaatatttgtacattatatgtcataatcgaattttattgaaatgggtgatttttaaaagaaaatagtgggcaaaatatatagaaatttcttaagtgggtaaatctttttagaggagatggtatttccttttgaagtaacagatgttttttaaaataaatattagaaaatgaattattaataataaggttttttaaattaatatatttaatcctatatttaataatttaatggagtggtatcttaacccaattatttatttgggaaatggcttaaa

SEQ ID NO: 238398 - DNA, 336 bp, Gossypium hirsutum
gaccttagtaggtcaaaagactattcacagaatgctgaaagatattctcgtgatagatatgatggttctggacataggagcagggacaaggggaaagaatcaccatttctagagcgttataaggataaggatttgtcttttgacagggttggctctggtaggagacatggcaaatctctttctgaagagatggatagagatcgaaggaggtgggttttttatggtcgagatgtaaaagtggactaccatagaagcttgagagataaaatagccgatcacacttcttatgaagaatccaggggccattggaatgatgcatcttctgtgaaggagagg

SEQ ID NO: 238399 - DNA, 255 bp, Gossypium hirsutum
agggtcaaatgttttatatttcgaacaggcattttggaggacttcccagaaaccttttcggcagaagtttttcatggtgaagccttgtccaaaggatttgaaatgtgaagttgagagtaagttcttacgcaatttgagacgcacatgaatacacgaatatctgtgatcgtgcacaggatcaatgcgcactatctgaagaaattattgaggatattgctgtacatatgagacctctatatatcatacactctgaga

SEQ ID NO: 238400 - DNA, 265 bp, Gossypium hirsutum
caaaccaaaaatcaaaccccagaaactgtttcatttaaagcgaggcttgccaattcttcgccgatgaaattcttgcttataacaacaccagcattatcaccggcacccacattagacactgcgccaatttttattggtttcaggatattaaacatgacatcaaaaggaatgcaaacaacaagtttatggatttacatccttcaatttccctattttatgctaaaatgaatcactaacaacttcattggtttactaatcctgatca

SEQ ID NO: 238401 - DNA, 242 bp, Gossypium hirsutum
gaccttagtttttcatttgactattcacagaatgctgaaggatattgtcgcgatttatatgatggtgctcgacataggaccatgtacaaggggaaagaatcaccattactagagcgctttaacgataaagatttgcctattgacaagattggctctggatggagacattgccaaactctttctgataaatattaataaagttttaatgtaatcatacttttatttttttttttttttttttt

SEQ ID NO: 238402 - DNA, 306 bp, Gossypium hirsutum
atgttgtggatcagtaccggtcgagtgatgtcggagagccttctgaaacgggggggaagccttattcattcttcggttgctttttggggtttggataaagtcattatggtacgtcatcaggtaaaattaattacttttgggagctttaaatttgtaacttgtaggacttggtagggctcactgattagttacatggtaattcttgataaatgctacgatgtgtctgggaaaatctaacgcttgcaaacaagctattatttgtccatttcaatacttggaaatggtaatgttccagtggtatatttg

SEQ ID NO: 238403 - DNA, 398 bp, Gossypium hirsutum
gaaggattaaattggaaaaaggtgagatatgatgtaatgttcattgggatggaaaacttggaagtactccaatgctgtcattgataaaagataatggtgacttatattacctggattcttcattttctctaaagtcctcatataccattcttgtgtctgatatatgtttggagtacacaattctcgaaatacatggaaaaacttaaaataataaacattcctgtattaaacacatgcctgtatgcaactcaaccttgagtctgggtagcatagacggttgacattctatttcaactacatttttatagcttcacgttcgtggtgtactattgatcccaaggtactcaattaatctggtgtagttctattaactctgcattcagatatgtattctcttc

SEQ ID NO: 238404 - DNA, 341 bp, Gossypium hirsutum
acctctatgcaatttctggtgatccaaagtttatcagagaaggtttaaaggttttggcgcatttaaaatctttcccaaacgacaaagacgactattctcatatacatcatgaatttttattatcttcaataattacatcactactaagatactgctacttcaaacagctatatcctccgttatgacttcctaaggatttctagcctgccgatttaggtcaatgaaaatatccgtttgcttgggtaaagtaatgtcagccatcaaacagactagaaaataatgtcataactaggtttttcatctatatcattggagtttaatttcatttattacacttcttt

SEQ ID NO: 238405 - DNA, 358 bp, Gossypium hirsutum
agatgacgcacgagccctgagttctctgagtgtgcgaggtcattgttgcaaaccaacgaattggatgaactaatgctagatggtcttgctattcttactcagcagcaaacagcacaataaactcttgctgcaagctctggtacgtgacggctcaggtgaagagcaactatattcttttgaaagtggcttctcacgagatagtattagctctgagctcgatggatattcaaaaaagttgaaggaacaatatggagtgtctattgacggatcagcaccaagccctcgtatacgtagaaaccaagtccttgatgcataggtcaaactctttagtcgatcagatatatctacagaaaattta

SEQ ID NO: 238406 - DNA, 127 bp, Gossypium hirsutum
ctcaaactccattacataaatgactcatatatatctagtccggctactactcatggtggactataactaaacataactcacaatatcttctaataaaatactattcccctaatcttcaaataataat

SEQ ID NO: 238407 - DNA, 109 bp, Gossypium hirsutum
cacatgtcaaagatgtagccgaccaaccattctgggggattaaaccttggaggggcgaacatgccccatcatataagatataccgcgtcaagcatcattgtatatcata

SEQ ID NO: 238408 - DNA, 354 bp, Gossypium hirsutum
aagagtttatatatggcgaattcctcttcttgctgggtaaagatgctatgttagtctatggaaattctcaacggctagggatatcaaagtcaaggactcattcaccatgatcaaaaacactgttatctggcgtaaggagtttggagtagatggctagctttatgaggatcttgtaaatgaattgtataaagtggctttcatgcacggttctgataaaaaatgtcatactgtatgctacaacttttatgttgaataccatatcaatgatctgcatgataatacttttgcatatcaagttaatctatccaagttcttgaggtggatgattcaattcttgtatataagcatttttat

SEQ ID NO: 238409 - DNA, 393 bp, Gossypium hirsutum
ccgacctgcttcctggctgtttgctgaagaaaaagtgggagggttctatgcggtgagactctttcttggttttctatctcttatttcagatgctactctagtggtagcactttccagaaaatatggaaagcggcttgcatcttatgcacttgcaatgctctgcttggctactggttgtttctttgcgagcacaagttttcttcctagttcattctctatgtatgctatgagcctctcatcagggttatttttacttgagaaacctgcatgggctgttgctgttgcagctgtcggtgtaatcctaggttggccattttcaatcttggcatttcttccactgaccttctactctttagctaaacaattcaaacaagcatttctttctggtgctgt

SEQ ID NO: 238410 - DNA, 406 bp, Gossypium hirsutum
aattaaacacaaactttacctttaccaacaaaaaaaaacaaaaggagaatgtgaactttaaaaaaaaggataccaaaaaaactaaccttgaggggacatcctttccaacatttaccttcttgacactacctttccttttaactgctcatctttttaccacttttctaatggaaaaaccttccttttacccactttacattctttccaccaattccctttttccccatttgggcttatacaaaattggcaccttcaaatctcctttaaaaacagttgccattcctgattgacaatgggaaaattttaccctttaatcttttgtcaaattcttccttaaattttcgcaaaattaccccatttttttaaccatagtctaaatactttaaaaccctttataaattaaaaa

SEQ ID NO: 238411 - DNA, 397 bp, Gossypium hirsutum
tacaggctagtacgaatctagcacgagcgctgactttacttctgtaccctgcaacttctagtgaaacatgcatattatttgacgatctcaattccttcactcagtcctaatacattctgtaccttacctattctaactaccagatctactccttctattctaacaacaagcacaatcccggctgatacaatctctatctgttcttacttccttgattccaatcttctaacatacttcagtgctacaaatagctctcgcttcatctaacataacctcaaactttgcatcttctaatatcactgtaacatgctctaatacacagaaccctttcttgatttgtaactcacagctcacattcagcttacaacaatgcatcacatcatgcatatgattaaaa

SEQ ID NO: 238412 - DNA, 247 bp, Gossypium hirsutum
ctctgctatatagtcgcttgattgtctgtatgtaggggcactaggctttattgaagatacagtatattggttcatcatgttgcgttttgctaaggccaaattgtgtaggacattttaagggttctcctttattcatgcaacttatgcccattatactgatataatgaccattactcatcatgtccttaatgtacaaaccaggtgaccctgaatctatatggtgtattgcactatcattgctcaatca

SEQ ID NO: 238413 - DNA, 257 bp, Gossypium hirsutum
caaacaactagtcttgagttcataccatttggcattggatacataaactgtgggactaatacgagcagtataaccatagtataaagccatcagacacggctacttgccccacatgtccatattgatgccatactaatatgatggcaagtactactaactactatacagaataccataggcaatgactaaacacctgacatgtaactgcccctagaattcgacacctaacacatcttatattaatagacacttttaac

SEQ ID NO: 238414 - DNA, 253 bp, Gossypium hirsutum
ctttattctatgacagaatttactcattgcgggaagggaaacttacgatcatggcgggtgtcaattctgaaatcgagttctcatccactgagatcctgccattggatattcatcatgtaactgcactatcttaccgaccatgcaacactgttcaagaggctagggagactatatgttgctacgcatcagcttatgacaaggatctgctgcctcaactagatttcgcctacatccagcttaaatatatacttta

SEQ ID NO: 238415 - DNA, 138 bp, Gossypium hirsutum
ttacttctctatcaaatactattttactagatcctatattcattatgtattttaatactattcattcattctatcactaatattttactgcttccttaatcatctatatccatagttaaatctctataattttatcta

SEQ ID NO: 238416 - DNA, 288 bp, Gossypium hirsutum
caccaataagttttctagacattaaaaacttgtctgggtttccaaattgcagatgagcccttgattgaatcagacacacttgatccattcaatcctataatgaagaacacaagggctagaacgagtgtggccctggctgcggttgatgtatgggaacaggaagttggcgaacgtttcactgcgaatatggcccacccgattgtcgattctgcggatcttgagatccgacttgagctttacacgatactcaaatagaacactgctgtgagaacactgtgaggcttaatg

SEQ ID NO: 238417 - DNA, 171 bp, Gossypium hirsutum
gttatttttcagatgtggacatagattctgtgtccaagactatgtcttcgggaaggagccatgcatatgacgtctagtcttatgacgagaaatgctatatgcatgaccactatggctagactggacttgacactggtgccatattagcgatcgactctaaaaatatccgat

SEQ ID NO: 238418 - DNA, 229 bp, Gossypium hirsutum
tagtttaactataagcactcctaacaatatctagacggctgttattcatctcggcttcattaaccaaatctcaaaatatcttatgttaaccctctcatctcatcacctcacttctaatttccaccactatatactagaccttccaaagcctattatttaaaatactacccaaactttacctaccgaaatgacttctaaacccatacctctcctttaacaatttctaccc

SEQ ID NO: 238419 - DNA, 293 bp, Gossypium hirsutum
gtaattaaaatcttacgctcttgcaaatgatagactagatgattaccgcgtgacggattaccatcttgctattatcaaggactatagtaagcctgtaactaatgttatgctgaatgatctacaaaatcgtaaaccatatcgaattttacatgatggcatatactcaaactatgcaaaccgtcacagtctttcacaaacgatctttgcttgaaggcaattgtacccacatatccaattgactataaataaaacatctcacctgatctacatgtaaattaccatgtcagggaacc

SEQ ID NO: 238420 - DNA, 378 bp, Gossypium hirsutum
ggcatacgagagcgaaaacaaaagaaacatcggaatggtagtgtcgtcaacaatgcatctattaagcatgtgtgtcctgtctttggttttatcttgctgtcagggaagggtagatccgaatttccggattcgagcagttaatctaggaggttggcttgtgaccgaaggttggattaaaccttccctttttgatggcatcgtcaacaaagattttctggatggaactgcacttcagtttaagtcagtaacaaccgggaaatatctttccgccgagcaaggtggaggaagtatcatagttgccaaccggacaactgcttctggctgggaaacctttatgctgtggaggatcaatgagacagcttttaattttaagggtct

SEQ ID NO: 238421 - DNA, 328 bp, Gossypium hirsutum
gtcatgttcacaagtgaaccatctatactgccccttgggcttgtactaccctgaggttagctatccaagattcttcaactgctaaccgttgaatctgctacactcgtcataatcaagataaagaactcgttagatggaccattatctactacacttgatcgtaccttcgcagttattcagcctaattcagatgtcacagaatcaatgacaggaaactatgcacgggaggcatgtgattacactagtcccttgaaaggcatttcaagatacattaggactgttcatcaagcatgctcttctaacattgcttcccaagcaaacactctgc

SEQ ID NO: 238422 - DNA, 287 bp, Gossypium hirsutum
ctgctattatcaattaaacgctaaaccttaaaggggggcgcagcatggacctcacgggatccactactgtccctaaactaaggatggctcccgccaaaactgttcctgatcgacagtcaacccattacactacaagaccctgatgcactacaatcacatatgggaacaacaataggaagaacagcatcgacattagcgatggcgaaagcgaatcaaacgcgagcacttctcctgaatgctctcactaactctacacattggactgcttgaccggcggtaagaccctc

SEQ ID NO: 238423 - DNA, 180 bp, Gossypium hirsutum
aacaggtgcagcggttagctatcttctcatcctctggggccagtatgaaccacgggtgtgcctacccagattcttcatctactttctcctatcacggataatcaatgcaatatattgattatgcacgctcttactataccgtttgtttccccataaagtcgtaccgtcgcttatagctgg

SEQ ID NO: 238424 - DNA, 131 bp, Gossypium hirsutum
caccactgagatagttagatattaagaacttgtctggggctacggatagcaaatctagtgcctattgaatcacacactgtatgttctttcaacattgtaatgaagaacagaatgcatagatcgagtgtggg

SEQ ID NO: 238425 - DNA, 147 bp, Gossypium hirsutum
agagagagcatcaatggccaccacgacccaaacccttgcgatgatgactatgtcagtccattttcgacaggcggttctgtatgacctggccgaccactggcatccgaacctttgggacacgggcacaaacacgatggtacatgtgga

SEQ ID NO: 238426 - DNA, 144 bp, Gossypium hirsutum
ggatcttgcatatatgaatcctgatttgagcgggctggttaatactggggtagctcgatcacacttggctatcactagcataatcccgtcgaggccctcacaacggctgagcttccacagctcattggcttctgatagaagatg

SEQ ID NO: 238427 - DNA, 226 bp, Gossypium hirsutum
caatagccaagacattgactgatctgctggggctaaactgaagacgggagcaggtctctgatacttcataaacccaactcctagctaccagtctcagtgcgctctcatggcagcgctcacatctggagatcagcatacctcatcaactactaacgcctaactactagaccatacattgagaccctgctgaggtagtcacctaaaatagaggcccggattctctata

SEQ ID NO: 238428 - DNA, 217 bp, Gossypium hirsutum
tcatgattatgaacccgaagcgttgtaacctctgcctcaattacaaatctacttgggggataatacattagcgcaaataactccatctccgaagataaaggtgtacaacattacctccatcctcgaagaacgtggccaattcaccggcgtcatcatgctatggaaagccacacaggctgctgatcaactaatcaaccacctaaactcaccgcaccct

SEQ ID NO: 238429 - DNA, 199 bp, Gossypium hirsutum
ccaagcgctgtttcaccctgacttgctcttcttgtcctctggcaaggacacatcagctcactatattcctgcgcccccgcttaacgtggtcaacatcactcgcatcctctacaaaagtggccaaacaccactttcatcatgctcttgtatgccacacaactggctgatcaactaaacatctcagcttatcacaccgcta

SEQ ID NO: 238430 - DNA, 162 bp, Gossypium hirsutum
tagaaatggatattgcaacataagcaccggaaactcctttgacaagtgaaaggaatgttatagctgaccttgatgatataattcgctagaccctatgtggaatggtcattgtttcacttgatgggtgtgccatacacatggtacagtaccaggacactactt

SEQ ID NO: 238431 - DNA, 164 bp, Gossypium hirsutum
ccgctctagaactagagcttccgcatccctggagctgtacgaatccagcacgagctcaattgctgccagtagacaagacgcaagggtgctctccaattgatgcgagatgctcattgccaattccaactaactacttgatcaattcattcgatactacacagctt

SEQ ID NO: 238432 - DNA, 337 bp, Gossypium hirsutum
aattcgagacgagttgcgactgagttctggaccacattcttctggaagcgcgactactcttcaactatgtacattccacgagataaggataccgatagaccctaatgatctgactttcgttgaatacgaagccgaggacgtgggcgcttacgctatgcagatgaatgttggccatcatactacatataaccgaaccttgcaagccacgatgctcatgcaagagatgtctatggaaatccctggcaattcatccatgttttctgcagagacacactacagagcaaggttttaccagggtgtagtgaacatcatagctaacctagaggagctgaagaag

SEQ ID NO: 238433 - DNA, 233 bp, Gossypium hirsutum
tggctgtagatctagaactagcggatccctggatctgttcgaatccagcacgcttatgcacttagttagaagaaacgtgacgggggaagtccaatggatttggaaactgtgaataaatacttggagaaaggattttgggctgacgggaattacatgaactccttacccatcaatggacttccttcattattcttcgaaaacttcatcatgcatggtctctatgtagaccaaat

SEQ ID NO: 238434 - DNA, 327 bp, Gossypium hirsutum
cgacattggtgacaatccctatctttgtcctaaagggcctccttttcctctccagctcctcggctacaccaaatagcgatgcacatcactacctgttcctatcatcatgtgtccactccagctatccaagcctttgttttcgcaccctttcatcctactccggcccatccaacaccctacgatagttagccctatccgccgttaaagtcatcctgtcccgtgcccgttaagagtctaactacttgtctactagtgtgacatagtacaacatgagggaactagtcgcactgattgactgcgtggagcaaatagattagtctatggatg

SEQ ID NO: 238435 - DNA, 209 bp, Gossypium hirsutum
ctcatttgctttgtatatctactcatattcggtggtgtctacttacgctagaatatttgtaatacatcatgatgtcctaaacgcctacaacggatgaagaatcactatgctggcatttattataagaaaatattgatcacacagacattttcatgataattctcctgggaaaaaactgtcttctgattgattaaaaatacactaaggtt

SEQ ID NO: 238436 - DNA, 200 bp, Gossypium hirsutum
gttacataatgcatgtcataatgtatgatgtactcgggaatctcatgagagttacatattgcatgactcttttaattgcaaaacgcattacgcatgtgacggtaactagatgcagggcaatattgccaactgttacctaccgttgcgtgccgtataccagacctgactctaagctgtcttcctaattgggctttccactc

SEQ ID NO: 238437 - DNA, 158 bp, Gossypium hirsutum
cgcgtgtcagctgcgagacttcttgtgattatagaggggcaatcgtgtgaccatctgcttgcgtcatatgctacatcaacagattcattaccaacgaatcgtacgtagatgagaacgacatacactgctacccttgcactcttcgagtatattaccat

SEQ ID NO: 238438 - DNA, 383 bp, Gossypium hirsutum
caactaataaatcataaaatgacattcaaatcagtaaactttttctattgctcattcggattccaatcaagaacaaaactccatattgcaaaaaaaaaatataactgggaccaaacgaaaagcaataaaagaattctagtttttgcattctggatttgaaaacttcgaaacttcaaattgataatcacacactaatatcttacatcacgaggctttcgtggtgaaactatcccgcggctgtactttgatcgcgattatgctcttactcaccatttccaatatccttgccggtcttttttctatttccgaggccgaaaaatcaggactgcggtgacaaatagccttgtggagcggcatctcaattgtcataaaatgatctcgtc

SEQ ID NO: 238439 - DNA, 245 bp, Gossypium hirsutum
caaaagcattctaggaccctattacaaagggcaggacctttgagctggacgggtgcactgcttgcacttttacaccagtcctagcggctgtgcatggcatgtgtacagcactgcttctatcagcgtagacatggagtccatgaaaatgaatgccctgagtgtgctccagagttcagaattatctgggaaatgatccgtgactaaaaggagacttctgctgatcaagttcaagaatgcctagaagt

SEQ ID NO: 238440 - DNA, 275 bp, Gossypium hirsutum
cacgaggcaaagaaatttatgacactacttcaaatgggagggtgtttcacctgcaggagtgcacgccttgcacagagaccctggtctttgctggggaacactgatgtgttttgccctactgcatcggcgtgtgaccgcgtgctagcgaaatcgactgccctctttgcgcgacacaatgcagatatgcagtggagctaaaaagaagcttgtaacaggtttcatctcatcatgaactctatttccaacaagtctttatccaaaaggataagattttt

SEQ ID NO: 238441 - DNA, 361 bp, Gossypium hirsutum
gttttaaatgggtacgaggctcctagcacctttagagaactagaactcaagttttgtcttgccttacccccaatagttgcttctagttttttgttccaacaagaaaataaaatatcctgatctaaacaaaggcttaaattcctacttaggaagttggtagactatgacaatgtttctgcctaaaatatcagagcgaggtcattacctataggcaagtgaagatttagtaaaatgatgtccttttgtcggtgatggataccacacgtaaaaatgccaatattgataaggactatgataaccttgaacaataagtaaacaaagcatagcataacagaatggttttggctttgaaggcttgctt

SEQ ID NO: 238442 - DNA, 228 bp, Gossypium hirsutum
actggggggaacccaaactagcattatgccttatactgaaaaaagagcttttttcaaaaaagctgaaatttctccggaaaaaaaacctatccccatggttatttttgatatgatttgacccctttttaaaggcctttaatatcagggttaaactttttacaaatatttttttttaaaaaacaaaagaagtccaaaacccttatttcaattttaaaattttttgggtgt

SEQ ID NO: 238443 - DNA, 268 bp, Gossypium hirsutum
catctgaaatccactgcctaatagtgaatcatttgggaagattaaattgaatttagtgcaacttccattatgagcttgataacaatttcattaagcagaaatagagtaacaaatggaacaagttaaacaaaactgtagcagtaaggagaagagcagcagcaagttgcagaccagatgaagcaatttgtatctgtaaaatttacacaaaaaaacctgcaatattatcccaatttgcatcaaaggttaaaatccagagtaaccctttata

SEQ ID NO: 238444 - DNA, 393 bp, Gossypium hirsutum
tagaaggagtccaatctctctatggatcaaaccctaattttacatttggttctttgttggaatctgacacttcagcaaatcaagccattggtttgagatttgaaccatctttttgggcggccatgttcttggcagcttctttcttctgcatctagcttccttttttgttttaaatttagaaggtgattggcttttgattatctgatctccataataggagctagcattccagacccttgaaatagggtaaaattttacagtcatacgaggaaactccctgatcaaatggagaagatttatgactctatatccctatatagaggcgtttgtgtccccatttaatataatgggacggccctttgagagcataacatgacttagtttttaaattat

SEQ ID NO: 238445 - DNA, 173 bp, Gossypium hirsutum
ctgtctccatggacattgttaatggggatggcaagtccaaggtggcgttttaatttttataccagatgggataaggagctttcggtgctgctaatttggtccttcttaacctggaaaaaacaacttatgggttgaacataattttcttggccaaactacctgatattttcaaa

SEQ ID NO: 238446 - DNA, 412 bp, Gossypium hirsutum
  unsure (1)..(412): unsure at all n locations
gatttgcgggactttatcaaataggtttgtgtttttatgctgttatctccttacagtcctcggtgtttggtcaagaggctgtaaatttaacatgcctggcatgggagaagagatggctttaaaagaaattattattgtaagagctgggaagaatgccctagcatgcacagaggaagacaaagagctgaagatggtgatggcaccatccatatttgtggtttagttatatctgcttttcctacagttttgtaaagatgaggtagatgatgatcgtgatgtaataatatgtaagtggtggtattggtacgcaagtctggtgacacctcatccagtctcggtgtttgttgtgaacttcgattgatttgattttgcgatgaagaanatcatgcatgttttctcataaaaaaaataa

SEQ ID NO: 238447 - DNA, 138 bp, Gossypium hirsutum
ctcattctttttttttgtacatcattaaatcttggggtaaggataataatcccatgacaatcgagaattatccataccactttactatacccttacaaattttagaacacacccatgattcctaccgatgccatgcat

SEQ ID NO: 238448 - DNA, 344 bp, Gossypium hirsutum
gggctaaaaaaataattttaaggggaggagggcttttgttaggtggcacctataggaggagtgcttttgtcatgcgacaccactgttggcagtttaatcgcctacaacggacgtgatcggacaatcacgagatatccaaatgggatatttgattagataaaataatcacacaataaatacgattaatgtactgggttagtaccacgtattgagggcccgagtcaatggtttgggctatcggctagatgaacatcttatgccatacttggaggcattcggattcggatcagtggcattgatctgcatgttcgatttgagatgcgacttgatattccctttggtcg

SEQ ID NO: 238449 - DNA, 400 bp, Gossypium hirsutum
gagtttcatgttgtcggttcttctgaaaaagcacattatagctgaagttaacattacagcttgaaactgcataatgagagtctgtacaactgtttgataattacaaagccaacaaatagtggatcgactgtccggaagatctctgcaggttcatgtgcaagatacttgacagattatcaatctagaaacatctaggtgagttttcccagattgattctaccacgatcaaccatctaatgtaatatattactctgttatcacctccatattttatacattctttgactctgtagctatcgcctcagattcgcatatggggcattcattcttaacagccatccacttcttcaagcaacctgactgattctcgaggtcacaatccagagtcccgattttctct

SEQ ID NO: 238450 - DNA, 319 bp, Gossypium hirsutum
cttaagtggattggaaacctgatttgaaagctgagaaataagcagtttatgcaacggtaatagcctatagaaagcaacagttgagggaaaaaaaacgccgattggagatgcaaaggcttgagaaggaaagacaagcagatttaataagctacaagggtctgatggtctctgaaatgatgacattagacaatcaaattgcatctgacaagctagtctttccaggaagtagaaaaggatgttatgtgaaacttgctacccgtcaaattatggtggtttctttttacttttttgtcattgctagcttaagttatttgccttg

SEQ ID NO: 238451 - DNA, 272 bp, Gossypium hirsutum
aaggcatcctattctccgttttgagtttcttttgttttggaatcgtcttgtcttcttttaaaaaagatcttctcccttgttcttccctcttcctatgatcttgacctgcaaagtgatttccgaaagctcccactattactaaaaaactcccaataggccacgtagccgcttatattataataaagtaagtaggaaggagcgaaagctactcgaccagactggagaggcgaccaaaggaagctggttcaccttctcttctccggtacaacata

SEQ ID NO: 238452 - DNA, 266 bp, Gossypium hirsutum
ctttgctcaatctgatggaacaaaacaaccgtttgcctcacatttgatgtcataagtttgatatgcatgatccaatcgctaatgtctgacttgattgtttagtcttacatgggctgttgtctcatatgggactgtaatactgtacatgtatgatagcctacatgacatgaccactatatggaatgctttgagacattagtcatatgttattacctgttgaagacactctcccttgaatgataacgaatttaccggacatgccggat

SEQ ID NO: 238453 - DNA, 192 bp, Gossypium hirsutum
ctgtactcaatctgatggaaccatacatcccttggcctcgccttttatgtcatatgtttcatatgtatgatccattcgctaatgtctgactcgattgattagtcttacatgtgctgtagtctaatcagggactgttatactgcacatgtatgagagccggcatgaactggccactactatggaatgtcttga

SEQ ID NO: 238454 - DNA, 322 bp, Gossypium hirsutum
cggatctgaattttaaaccaagcgagggagttaaggggtgacgatagaaggatcagaggaattgatataaacactagaatatattgaatcgaagttttttgatggttctgataactaatcgtgaagatttccatttataatgtacaagtttttcaaaacctacgcatttgataaatataagatctacttcggtgagaaaatttatctgaactcatctacgaataagcagatcacttgctgacttttttaaaccttataaccttgatatcaatctacttgagatgttcttcattaataggcaagaaaagttatttatttttgt

SEQ ID NO: 238455 - DNA, 307 bp, Gossypium hirsutum
acttatcgattccttcgacatagagctggatcgcggtacctatatactcgtatagtgtgtcgtattacattgaactggctgtcgttggacaacgtcctgactgggatatcgctctcgtcacccagctcattcgccttgcagacatcaacatgtagccagctggcatcatagctaacaatcccggacacatcgcgacttccgaacaactgcgcattctcaatcgctaatcgcaaaatctgagcctctgtatatagtcaagacgctcttaacattaccgatacttcagctcatgctataaccaatatgc

SEQ ID NO: 238456 - DNA, 403 bp, Gossypium hirsutum
ggaaacttcagcacatgcatggctggaaactacaaactcatctgggataattcatattcagcctttttcaagaaggcccttcgatacaaagtggactgtatacctccggttttggaggagtcggagaagggcagtgaaagaaatgaagtggaagaatgatgatgataattggtaccctggcttggttttcgtctttgatcatgtcttgtatttttattctattctatatgaatcggatgcaacttttgcgtgttaactttacgttgtcgctgttgtgcccaaccttaccctttgtacattgtttatctgtttgactgacaacgagacgcactcaaacgaaaaagaaaatctgttgcgtaatgtattgtccatcattggatactcgatagtcgggcaattggcg

SEQ ID NO: 238457 - DNA, 222 bp, Gossypium hirsutum
tcgagttttttttcttttttatatctatttgttagggattctccctatcgttcttggattttacttctaatggcctttttcttaagaataccttcccgaggtcgagtatatatttacacggcttgggcgatgactatggttcccaccatattatcgctttgcaaaatcgtcgtgaagttttttgatgttcggaaggagggatcccatacatgataatcacaa

SEQ ID NO: 238458 - DNA, 314 bp, Gossypium hirsutum
gaaacttcctgattatgtattggccagtcctcagcggatacgtggccttgtccggctgaggctgatcactatcactttactcttgtctacctaatattaggcttgatcaatggcgatgcagcctactccaactcctcctgggacaccatttgctcccttgtcagctcgtacggacaactgagtggacgagcgtgttcaatccaacttagcaacctatgcaccaatggtattgtctctgaagtcatcgtcagcgcctctacctagctctggtactgtctatgactgcaaatccgacacggatggtgatggcatgc

SEQ ID NO: 238459 - DNA, 339 bp, Gossypium hirsutum
gaaatcaagaggattgccattatgcctttctggtatgtattttcacactgatggcccataacaaaggaccacattttgtatctcgaatatatacaacaaactttccattaccttgatataaatacaaccagtaccaacctacaggcaagcttattcatgcctgtgcactgacatgaagaacaagaaataaacatccaagtttcttacttacaacgtcaagttcagcctctagcttgcttcagtagacatgatctcaagctctgcccaccaaagaggagaaagtgtggggattgcattatcaggagtgattgcagtaatctctctaaatcttgcactgac

SEQ ID NO: 238460 - DNA, 395 bp, Gossypium hirsutum
gaaagataaggcagaaaaaagtgatcttttggagaaagaaactgtgggagagaagggtgaaaaagatgttcttttggagaataaggatcaagttgttgttgagaaggcaaatgaaaacaatcccgttgagaaagtaaagggtaatgttgatgaatcaagtagtggcaatatagtaactgagaaagttaatttggagaagaatgaggaggtatgcaaggatgattcaatggcgaaatctgttgagaaagtagcttctgaagctaaagacggagagaataaagagcctagcaatggcaaaggtaaagacagtgacatttcagtggcgtcaagccatccatcaatggttgaggaggaggaagaggaggatcttgggtgggatgaaattgaggatctca

SEQ ID NO: 238461 - DNA, 412 bp, Gossypium hirsutum
ttcatttcgttttggttattcccgatcatcgactcttaattcccaacaggatccaccttcacgccacacttgataacccaatatcgttctttcagcccacctacatcccttatatagttacctttgcaaacctcttcaaacctacccctacactagaagacctagtgatagggggttgcgcatggaccaagatcgagttgtcaagtcacgggaaactcctacgaaaactctaaacgcttggatctgaaacgaaacagaaaattctgtttagaatcaattagatctgaaacgaaaatacccaaatcaataaaagatcaaccaagaattaaaaacacttatgaatagctaatcttggaagccaagaacacggaatttaattcaagataggttttgaacaactgaatctgatacg

SEQ ID NO: 238462 - DNA, 132 bp, Gossypium hirsutum
aaggcaaattgcaaagagcttacctgacaccacattgtgccactcttacctgaaattacgccttaaccaacatccatacatacatttacatcttatgacacatttaacttgccaaaatctcatacacataat

SEQ ID NO: 238463 - DNA, 169 bp, Gossypium hirsutum
gtcgttgcttacttcctctcatgattaaaaaaggcggggctatgtatagatgttgttgcattcatgagtatgatcttgataacgaaatgattcgccatagatctgaaatatatctgtagcggggccgttcgtcaataatctatatacactcctgttttacactctctat

SEQ ID NO: 238464 - DNA, 295 bp, Gossypium hirsutum
caggccttcctacgctcccgctagctataccgtataacggctattcttgctcacgcgacgatgcacgtaccatttcggactatcatcaaagttgctaccattgttatcgaatgctgtattgcaaaggtttggatcatgcgatacttcatgcgcttatacactttactagctgccattgacatcgagtggacctgcatacgatcagtcataatgagagatggttctacttgaattagaacatgaatgtctggaggtctacctcagaaaagctgaccgagcaaatatgtcaagatct

SEQ ID NO: 238465 - DNA, 279 bp, Gossypium hirsutum
gagtttttgttcttatcagctatgtacggcattgcggtacctggcgtttcaggccaagctactgctactcctagtaatccattggacatggactccggcagccatcgacttcacccgtttccacacctgcacctactacttaaccacctcctacacccaccactgcttatccgacaccagttatgtttacttctactacttcatgaccaccaccagcttccactaatcctccaacgactacgaacacctttagctctcgactagcagattctacttaca

SEQ ID NO: 238466 - DNA, 403 bp, Gossypium hirsutum
gagaattagggattttagggcataaactcagagcatatttggttggaggccttatgaatagattccagtttgatttggcaggctcaccactgaacattaatttagttggttgtaatgctattacagcccgaatctatttagggtgtattacaggaaaatgttgaatagccattcccttccctcaccactgaatagccattcatttcggtgcgaagtaaaatttttttctccctcttcaatttttgccctcacctctacctagagaatgaagaagcactagaatatcatcttctccctcggttcatggttagagtcatcaaaatggaatcaagagatatcagaatagggaaatctgggacttcgagcacaaagtggcggtggcaacgaacttgctggttatttt

SEQ ID NO: 238467 - DNA, 280 bp, Gossypium hirsutum
cttatagtccaagtcgttctagtccaaagtcatccagctggtttagcagtattcaagtcatcccagctgtagtacatcacagtgtatacattaaaggatggagatcgttccaagcgcctacgtggaatgagaagtctctgcattgttagaaacttcatcgtggatatttactctcaagagttagcagatgatatgtgaatgaagttgcagaacgatcagttcagaaagacgagaagggttctacgtagaacttagaacagtgaatgctctggaaggtcta

SEQ ID NO: 238468 - DNA, 175 bp, Gossypium hirsutum
ccaacttcgtctctgattatcattctcggggcagtgcgatcctcctgctgggatcattgcctgcgatcaacatccaagtcagctgctgttaaacgctctaaagatcgcgcctgtcttctctgctccacatcaaaagctgctgatactgaccatgccgtactcactggtctatcag

SEQ ID NO: 238469 - DNA, 179 bp, Gossypium hirsutum
caagtgtcctatgtgtgtcttcttatcgttaaagggggaatctagtgctgctatcaatgccgctaatctagattatggtctgatgctgtgggaccctgtatttctcatctcctgaatataatccttgggatcgcagccgatcagacataagcattaagcttcacttattacaataacca

SEQ ID NO: 238470 - DNA, 347 bp, Gossypium hirsutum
cgagattcagctttgttaatttttaggctttgattattatatttttgtgcaattctgttgttgtgatctgattgatttacgtgtcaatcaacgagatttggtggtgaacttgagtgaaatttaaggtatcgtagggatttttcgtggatattatgattctcttttcgagagttaatcaaatgagagatctgagctaaaaaagagatgttgaaaaatgacgaatactgcggtagctatgaaagggaattgtgtgaactgaatacgaggagagtgcttctcttctggctatagtgagccaaatgatggtcggaataccttggatgggctcaatggtcattctactcgtc

SEQ ID NO: 238471 - DNA, 324 bp, Gossypium hirsutum
atctgaaccaagatgaaaaacccaaaccagatttactcatggcccccgtgcccaactataaacagttatgattattttaaacgcaagattgttcttcgattcgttgaatttcgttaagtgaagatggaagactgggaggatgagattccacctctccctgcaaaggaacaacttaaaagcaaatgggatgatgaagatattgatgactctgatatcaaggaatcatgggaggatgaagatgaacctgctcctgctccgcaacctgttgcaaaagctccagacgaaaaggccccaaaaaaggctgcatcaaaagctactgaaaag

SEQ ID NO: 238472 - DNA, 336 bp, Gossypium hirsutum
gttttctgagtcaggatgttatgatttaaccacaacttccgatgtgatggaattattagacaacctcaaaagcctatcaaatgaagtccaaactaaagctgctctaaaattgcgccttcttgcaaacaacaacatgtagaatcgtataattattggtcgctgtggtgctattgcaccattactatctctactgtactcagaagtgaagctaacccatgagcatgctgttacagcccttttaaatctttcaatcagtgaagataataacgctattattgcaaaatcatgagcattataccactgattcatgttataaagtctgaaatgatggatccc

SEQ ID NO: 238473 - DNA, 318 bp, Gossypium hirsutum
agtgcatcaactattagttcactaatttctaacaaatgtatcaatacatataataattatcgatgtctaatcatataatatttaactattgtatcaaattttatgacatttaaaacacactaatttcctgctctactcttcctcccagagaaagtgaaagcttttggatgaggattacgaggttacatgcaagagaagtctcgttggcatttctcctctaaggaaggagataaaccagaatataaaacgcaatttgcagcatgtacgttgaatgatggcttgtatatatacatatgtatataaccaaccatttatgac

SEQ ID NO: 238474 - DNA, 206 bp, Gossypium hirsutum
tcgagttttttttcattacctttttttttgtgcgaaaaacgtatcttatttaagaaaaatgttagataattagcaatacctactcttttctggaattttacataagcacaaaggattaaagtcatttttctggaacaactctatagttgacaatgaacattcagagctaaacttcctaactacatgctgaagcaacaatcaatctt

SEQ ID NO: 238475 - DNA, 230 bp, Gossypium hirsutum
  unsure (1)..(230): unsure at all n locations
gctgcaggttgaagagccgctcgtctctgattaaatatccagggacttgctttcttcataaagtancggctcttcaattatcagagatgatgaacatgttgacatatatcaatctcgtcatgaaaaacacaatccttgatagcttcaaacaggattcatcggaagtggaccaacagcctttttctccataatcatctccatcatactcatctcacatgaaaaatatttaa

SEQ ID NO: 238476 - DNA, 161 bp, Gossypium hirsutum
tctaaatcattactaaaactccattttcaaagcgatttttgaacatctttgtaacaatccagttgaatcttacaaagatgcagtttgcggctttcaaaaatcaactacttattcttaaagctgcttttaaaaatatgtcgaccccaaataagctaaaacta

SEQ ID NO: 238477 - DNA, 398 bp, Gossypium hirsutum
agaaccacgtggacttattgagccttggtgcagagacaacgcttgccattgatgaaggaatgggtgaggtggtggattcttcacctgaggaacaacagcatcaaaggcaccccaatgaatcttcagaggctaacatctgggaggagcataaaaaggaatctgaaatggatcaaacccaagcgccattttctgattcaaagaccaatacaggttgtgatgagggagttccttcaaactctagccatcaagatatgtcttctagagaaagtccttcatcagaatcagagaaacaactgttgtttggtaaagatgaactgcctgttgatgaacatgataaactcgaggaaccatctataattgcaaccgagtctacaagggtagcagacattgtcaacact

SEQ ID NO: 238478 - DNA, 313 bp, Gossypium hirsutum
agaactagtggatgcacgaatctggaagaatgcagcacgagttcaattttttattatcatgaatagagatacaaggatttaagggtgtaaaaaagtgtgttctggatatcacatgacatattgtatggttattattactcccaaaagtatatttgcagtaagtagaaccacaatgtataaatgtttcttttagacactgtactgcttgctatatagtgtttatttaaaaaccctttaacctaactactgattcgacatagccctttaatgaagtatagttgcctcaaacttgaaacattatgtcagactattt

SEQ ID NO: 238479 - DNA, 327 bp, Gossypium hirsutum
agggccatggtatatacatttactcatcagcaaacctcaaggcatactcgaagatttataacgccgtcattcatggatccaaacaatccctcatggagattgaatttgttggaacaatggatagcagcatcaccacattagggtcgtcatacaacaataaaggcacagatcgaccagccatccataacgagtgcacgcatcatctttagacgagaaatcaccaaagcttatactctctaccaactcaatttggataaacacttcccaaagactggccagaaacacaaccaaactacaagactgctatccgtgtcaactcctaagaca

SEQ ID NO: 238480 - DNA, 422 bp, Gossypium hirsutum
  unsure (1)..(422): unsure at all n locations
gttaccgccttatcttcttcatcattctgaagatgaaggagaaggcttcaccatttttgcaagagatgtatgcanaaaagacactagagcatcttgataaaaggccttccttcaggaaggtaccatctctggcttcttccaagcgccaccagcctctccactctctttcatctcaagagggtcttaactctccattacactaaattcttttttataatcataaggcatcggaaatatgccattgctatacatatgaattcatgattattaattattgtgttgaatgctgatgtttgtgtagcttaccaaatgcatgcttatacaaggggaaaatagagagagtatgtgttgaaattttatatgattacaatgaaataaggggattttcaataaactttgcgatcgaagttaaaacaggccat

SEQ ID NO: 238481 - DNA, 122 bp, Gossypium hirsutum
cagttgcaccttgaagcctctccttgctagcttggcccaggactgacctggggatttcatccgtagtgcccatatcgcccttttctaacccggttggtgctttccttagaaacggctttaga

SEQ ID NO: 238482 - DNA, 355 bp, Gossypium hirsutum
tgcaagaatactattatccaagtacttattaccaaccacgtcagcaaacgtagtcaaacagatgcttctcaagtggtggtttcaactgtcaatgcagatgatcaagcttctttatcaactgaaacaaatacaggaaatttgagcactgtagaaagtggtgcgggtttgagtggtaatactggttctgggtcacaaaaatcaactttcaaggtctcctctctaaatccgaatgcttcctataaaagagaaagctttccaacaggtaaatccgaaggtcatcagaattcaagatttagctacgaaggggtccagccaacaattccttggatagatatgtcagtgtcttctaatgggc

SEQ ID NO: 238483 - DNA, 311 bp, Gossypium hirsutum
  unsure (1)..(311): unsure at all n locations
ccgtataaatcatatatatctttgcatgtgataattcgaaagctttgaagtcgtatagataaaagcataatatttgtttattgtcgaagaatattatctaaaatacaattgaatgatgagaaaaacttactggtggtaatttctcctccggccaagacaaaaggaacccattgtagccaatcccatgcaaactatgttaataaagttaaagcaatctctcaaaggtctagttggacttgcatagctgcaacatacaacctatgctactcaaactctntttttttcttttaaaatatcacgtctaacattca

SEQ ID NO: 238484 - DNA, 113 bp, Gossypium hirsutum
  unsure (1)..(113): unsure at all n locations
gtaaaaatcctatgatggctcttctttctttggtaaaactttcaggaattcaaaagtnaagatattggtcaaatttcattacttgaattagtgtataccatacataatatata

SEQ ID NO: 238485 - DNA, 300 bp, Gossypium hirsutum
tgttacttcaatgtgctatacattcgaaattagcttcttaagagtcctctctttacatgagagcattatacctttctgtatccgaaaaatcaaactcatcactacatacttgcctttaaacaatcaaaccaattctcaatataaaaaagacactgcaacctgttaaataaacaggaagctctatcgcctttatactaaccactactccttatgtaatgataacttcttcaagcatttctctttaactagatattgatcctacatacaaacgagtcctgcataacactgcttccttgatca

SEQ ID NO: 238486 - DNA, 258 bp, Gossypium hirsutum
catcttttccctagttttttcactttacttttttttctgtgtgttgagcaacttcattttgtgttcagcaatcttctattgaacaactcctatcttgacttgatacagacttataactctgatgacgtcttgataccttctctctgagggcacctagaaaacagaactatgcaaatcacatgcatctatgcaagacaatacatcaacaaccacaccatgtcatggacccactacttactcagctgaacacaaatccat

SEQ ID NO: 238487 - DNA, 367 bp, Gossypium hirsutum
agaaaaagcactcaaaaaaatccaaaattttcttacatttgaaaagtctggaccaaagcacaagttataatcataaatttcttgctttgaagttagatcccactaaatgaagacttaagcatagatagaaaggcataggaagaagctgtgttgagaagtctacaacatgtctttgtcttcctaccttggcagcaacacccgccgtggaggaggatgggctcagtcattactcccttcttcatcacccaccgtcaaatcaaccctcaaagtccaccccactcgaaagtcacggaagcgtacggttctgatcaacttcctcctgaccaacttcttcaccatagctctttccctttccttcatcttcttc

SEQ ID NO: 238488 - DNA, 292 bp, Gossypium hirsutum
tgaacataaacccttcagaacttcgaccgcgactctatagggcctgcatgggatcacgcaacgtatctagctcattcggtaatgggccttcgctgaagtgattcattattaaatgaacacatgcgcgtgaccaatggagcattggccacattattgagcgtgcctggtatctataccggaccccagatccggtctataattgcctgacgacaaacattgtaggacacttttcgacttcaagtttagacctaaggtggctctcgttgccgatagctctatagatatagtcatt

SEQ ID NO: 238489 - DNA, 227 bp, Gossypium hirsutum
cttttctttagctgattcaataataacaacccgaaggggtacttctactttcgatatgggaacctcccaaaaacctggcctatgaccatacttatctacataatatacccctaatacctcccatggatcgatatctggatatacaagggcaacgccttgatcatgctcttaatggcaaagttaagctctacactggcgtcaagcctttcattctattacttaccgta

SEQ ID NO: 238490 - DNA, 140 bp, Gossypium hirsutum
attacgagcttgattatattataaaacaatcgtttttaggggggacaacataacataagtgggcgatcgttccacaaatataacctgcatatttctttacacttttgaatatattcaaatagaaggctccttgctcaaac

SEQ ID NO: 238491 - DNA, 375 bp, Gossypium hirsutum
aattcccacgagtggttttgtagctcatcgtctaccatgggtgtgattttatgacggtgtgtggttctgaagaactagagtctaataaggatcgtttacttgatgaagctgtcgatgctttatatgaaaagaggggttctacaccggagaaggccttggctgcgattattgacgctttcaatatcaatttgcaacatggccagcagttcgcgtagaggaaatttgctacattactgcatcacagtttgaattctatcaaaaagggttccaacaaagagatttctttggcattccattccattgggtttctggccttaactggttttccaagagatcattcactgtaaatttttggaagaatcaatgattcctttt

SEQ ID NO: 238492 - DNA, 271 bp, Gossypium hirsutum
ctggcgtcaaaatggctatcattgttttatcctagatggagacttccgccggaaggtgttttacactgccgggcgggaaccccttatcatatgcatgcatcaaatatttccagagcgtgatgacttgcttaagctttgctcaaggaaaatcatcgtctccgtcgaatgagtgctgtaattcaatggcggtgattaaagagaataaacccaaatgtttgtgttatattttgcaacatacacaaacctgtggtgctcaaaatcttataagctt

SEQ ID NO: 238493 - DNA, 300 bp, Gossypium hirsutum
cttgctttccacctccacggagttgtcgaggtggaaaagatatgcaccatgaaagtcatcggaataccgataagagtcgatgtgccgaccagcgtccgtgaataagcacgagcacctaagactttcatcggtcgggaacgggattcgtacctacacggacggaaagattcggattcaagacatcatgtctaaacctttaaaattatgcattacaagggctaccaataccaattaacatatgtcgtcttgactgggatatgacgtgtgtatgtatggatgtatatagcaattttatgggct

SEQ ID NO: 238494 - DNA, 180 bp, Gossypium hirsutum
gttttatctaccttcccttacgtatttgctgagatggagttcatacagggtgggactttagatcttgaaggttcgattatttataatattgatcagtaaccatactaaattacattctattatggtaccattgaagttgctcatagctctttgtatcctcatcgatgagtacgtcatcct

SEQ ID NO: 238495 - DNA, 363 bp, Gossypium hirsutum
tcttttaccttccggttactgatctctttggccgagctttaacattggaggcacggaatgccccaaacaagctacagatgtcaccgccgacacatccaacccttcttttccaaccacttaagcacaacaatactgagaccatcgccctgactaccatacacaacccgaacaccaccgctaccgtcattcttgctgatcatgctacctttcaaccaccatagctatacacgatctcatacatatagccgctcgagcttctgctatactgtacgttctttaccgacactaccactctacttttactgattactatctcaaaatctctgcactaaacgtaacctcagcttccaagcttaacaccaa

SEQ ID NO: 238496 - DNA, 138 bp, Gossypium hirsutum
cccaagccaaatgggccgacacattaacactgaatatttcaaatgttgggattactaaaacccgagattccttaaaattttcaacatcaaagaacaaactcaacatcatcacatggtcttttaaggccaagttttcat

SEQ ID NO: 238497 - DNA, 323 bp, Gossypium hirsutum
ccttagacgtattttccagggatgctttttaacatagaacggcggattcatagcgaaatttggataaatgctatataaaccattaaaatttctaaaaccaatgtttctataaaatgcactatctacctactgaatacgacatataatgctaccacaccaaagaatgtggtctcaggctgtgctccaacattaaaaccccatggtgcctatgctagtctcataccatcatacagatttgcccaaaggacatcacttctaaaagcctgttctataactaccaaattaccttacaactatcattcttttgctcactatgattaaac

SEQ ID NO: 238498 - DNA, 298 bp, Gossypium hirsutum
gaattcattacgacgtgttccaggccttttaagtttatcaatgggtggttaaagaacgttggttgtgcccgcttgattgataaagaatgtactaatatggattgtttgaattgccaagtgctttgaaagttgagaaagcttaatggggtctagagaaagtgcattagtaatcactgtcatatgcttgaagataattttgctgattgcgaatcaaggattaatgtgtttgatgatactacgtgaacatgtacatattgtatgagtgctgaaacggaggaactaaataaattgaattccc

SEQ ID NO: 238499 - DNA, 267 bp, Gossypium hirsutum
ggcttttattcattcccttgttcacttcacgggggggctttttcatggccgtgtgatcttttctcttcgttatatccaagcactgttattaccactcataaaaactcagggtggttaccgtccactattcagttacgctgccaggtctgccacctacaggcttgctttacaccataacgcatctgtaacgggttcactaaccgtccggtcatcgcaccaagatgatacgatagtactgtatacatggtgtgaacttacgaggctcta

SEQ ID NO: 238500 - DNA, 292 bp, Gossypium hirsutum
tcattttcttcttgatcagctgcaacttcggtgggctgaaagttgtttttgcaaatcttttgatgatgtcttatcttttgacatttctcacactattgatctggcttttgccaacatttgaatggtggatgacctttctttccacaatgcttgctaggaaaaagaaattccgtttccctattgattttaggagaatcaaaacctgagttgtccttctagtaattcctttttcttttatcctttgtctccatggcttgattgaactcttttaccaaatcatcttacttctcgc

SEQ ID NO: 238501 - DNA, 306 bp, Gossypium hirsutum
aattcgggaactcgtattccaaacaggtacgttcaactgaaagaatagattttagaaatctaatcattaagagcaaaatcttaggattcccaaagtactggctttacaataagtggacatataactgtacgggcttacaactttgatctagtatgactatgtggcaccgtgatatgcttatgcttggtgcgcgtgcatgcatatacgatttgtgttctcttttcatgttgggtgattgtgctttggctgctcgatactaggaacgttagagattgaattggaaagataatttttgggaagaaaaat

SEQ ID NO: 238502 - DNA, 238 bp, Gossypium hirsutum
caatctacagccagctgaaccaaccggctgcattaattcatcacgaacttttttttcttttaccaatcctccaaattggctgttttcattaaatcgttgactcaaacatttacccaccccatcattatccaccacatccaatccacacacaccaacttactaactaccaacacacaaacatttaccttcataaaccaatttactcacatattaaccaataccacacacacacactcta

SEQ ID NO: 238503 - DNA, 345 bp, Gossypium hirsutum
ggaaagcagaaacggcttccacaaaagttggtaatttatgtaaaaaggatcctccaacaaaggccctaaaatctgttaaaaattcccaaaaggtacaaaagagtcctcagccagctacaatgaaggaaacagtaaaagaaaccacaaaagcttcaagtgcaaagaggatctcatctagaacatccccattgcctgctactcgtaagtcatggccttcaacgccatcaccaagaacaagaggaacatcaccagctaaaatttctgctggaatctcttcttctggcactgtgccaacaagtcggaaacctcagtcagcacaattagtacctcgactgagtcctaaag

SEQ ID NO: 238504 - DNA, 302 bp, Gossypium hirsutum
ttatgacggaagctgataaccacgaccgagctccgatatggacagtgaactctcttgcgatcgcttcagttatcagacttacggatgcattctacgataaatcactttagatcacctgcataaggagccggaactctatcgagttgacgcgcaaaggatgaagatgctaatgcaggaaggagctgaaggtaatcaccaaactttaattaatggcggctatgcgtagcatgctatcatagaggaactatcttgtatctataagcatctaaaatctctgatatactgatatcccgatcctgaca

SEQ ID NO: 238505 - DNA, 360 bp, Gossypium hirsutum
tgaagaattatataatagggttctatgttggttttattattttaaataacaataataaaagaaaatattggcagatcgaatcgaattggaagttggaacctcctccttcttcttcatctttttgtccatctctctattcacagatcatcgaagaaaaaagatgttgaaattcctgaaaggagtggtaggcggatctggagcagggctcaaggatctaccttacaacattggagatccttacccttctgcttggggctcttggtctcactttcgcggcacctccaaggacgatggatctccggtttctatattttctctttccggaagtaatccgcaagacggccatttagctgctggtcg

SEQ ID NO: 238506 - DNA, 270 bp, Gossypium hirsutum
gtttcgagtatggttattattttgtgaggaatgcatataacatgtttgatggcagacgccaaaaattttatatttaaacccacacacccatttaacatgaaaaagcttaacataccttaaaccatttcaaatctttaacaagatctagatcatcttatcttagcgtaacacagtagccatttgcaatcaaacacctcatacgaaacctcaataacatgtgcttattctgactaatgatattaaacctcatcaccctgagacgacttatct

SEQ ID NO: 238507 - DNA, 368 bp, Gossypium hirsutum
gaagttttgaacctttataaggccccgctgtgtgtagggggttgggatgaagcacttcatgaaatatgcaggttgtcacatgaaacaatcctttcaccacagaatgcgacatcgcttttaaatgctgttgaagagatgccggtattggtcattgctggtgctgaagattcccatatttctcttaaatcttctcaggccatggcttcaaaacttgtaaattctaggctggttgcaatatccgggtgcggccatcttccgcatgaggaatgccccaaggcattacttgcagctatttcacctttcataagcagattgctaatccaaaccagaattgcaaagagtcagtaggacacctttttaacttacgt

SEQ ID NO: 238508 - DNA, 253 bp, Gossypium hirsutum
  unsure (1)..(253): unsure at all n locations
tacaactggtggatccccacatactgcattaattctgcactagcaaaatttttccaatactcgacaaaacacaaattctgacgtacattatacaaatgctgaaggcattnaaaatcattcttctcaaccatttcattttaatcataccaacaatataccataatttaacatttctattccttcttcaatttaatgatcatcacacgaaattcatataccttattacaatctcattcaattaattctacccact

SEQ ID NO: 238509 - DNA, 262 bp, Gossypium hirsutum
tagcttaattgtttctatacggtattaatcccttcttctgattgcctatattctaacctggctgtttattacatactctctttgattttctagatcttttcctttcctttttttcaatttgcttctttaaagctttatcttcttaataacatcaaacccttttatatatagcaccaccaattcaaactccaaccaatttctttttcttttaccactctttacatccttcttttaatgaaatgtttctttcatctattaacat

SEQ ID NO: 238510 - DNA, 335 bp, Gossypium hirsutum
tttgaagtttttttaaacggaagctgacaaacccagcctggtctctttccttccgtcggaggggaagccgtaacggcaaacaaccaaacgtagaagcgctgattttgaattgtttggcgcgtgcagtgcagagaagtgaataggaactctcatcgatggtttttagacaaggtttgagcttgtgttggtcttaatcggcatggcggagtccacaatgaatcccaaaatgtcgccttctcctcctctctttgtctcctcgaatctgccgccctttcagtctttgctcataaccgatctctcctttctcttttacctctcagtttgggggcgacctg

SEQ ID NO: 238511 - DNA, 256 bp, Gossypium hirsutum
attcacaccactgaccttttttataaatagcgcccaaaacactggtgttggttatactatggtggtatggccacaaaattcccccaaatactcacattcttaagcaacttaccatcgccactatcaccatctagcgttctcaaatggtctctaatttttttcaacttatactacataatttatttttccactatatataataacaccaactacactattttttcatccactactaaattcataattcccgattaaa

SEQ ID NO: 238512 - DNA, 289 bp, Gossypium hirsutum
actaaataaataccaccccaccgccctcgtttaaacgcggcaaccaaaacaaacctgttgggttatatatagaactcaggccacaaaacaaacacaaaaacttcatcgttttaactcatcaaatacactataatctaatctaaacataaatactattacttttttaattctctttatttcattcataacaattctttccttaaataattcaaatttccaccatttcattttcaacttcactactacctctataattatacaataccaaatactttcacaccattataac

SEQ ID NO: 238513 - DNA, 168 bp, Gossypium hirsutum
caactactcttttttttcgtctcccaaccaaattctcccggtattgattttatttacaagatagcttccttcctcaaacaacttcttctctctaaaaactcatacattacccaacataattttctttctcctcattattatcttctaaatttactttatcatttatac

SEQ ID NO: 238514 - DNA, 224 bp, Gossypium hirsutum
cgtccggcacttacactatcacactgcaaacttctcactcaacaacaatgatagccccagcgacaaccttcatagtcaacaccgatgtaagacgacaatacaactactacgttttctctgtactagctaatcaccatcagactgctgcccacgccacctgagatcacctcttctccgacggtgtctcgtataactctaacgcacaattcattaaccccactaac

SEQ ID NO: 238515 - DNA, 403 bp, Gossypium hirsutum
ttgtgcaggctgctttccttcatgccctcatgggagtaaccatggtttgtgcatctttttttgtggtcttcacccattttccatcggcattcatttcaaatctcctaccatgggtgtttgctctccttgttgctctatttcccttgacttacctattacaatgtcaagtgagtattaatagcttccttgcttaaaactaatttgttgacaccatataggtatacatgatgcttacaactctactgtctgtttatggttccttgacatctgttcttattctgtatgcatcaatctttattcttatagctttttaaataaaatattaactttccttacttattctggtaaagtctttttacatggtttcatttttacacaattaatctggttaaatttattcttt

SEQ ID NO: 238516 - DNA, 150 bp, Gossypium hirsutum
taaacagtggatccccctgctgcaagattctcaccaggcttttatccttttaatcttatttcaaaccgtctgcttagcgttatcgacctggcaaaaataggagtcaattggcaacttcatctactccattaactacacattctatatact

SEQ ID NO: 238517 - DNA, 211 bp, Gossypium hirsutum
gatcactcaaaccgggtacaacagatccctttttgcaactacgccataatcacacaaccgcgcagactcgcgatcttcaccgcagacgacggacaccgataatctcaaaaccgaccaaaccgtcgagaatccttccgtcctctcaaacaactctcttaataacctttcaaatcaacatatgttttatactaagaaagcccataacaaagcc

SEQ ID NO: 238518 - DNA, 280 bp, Gossypium hirsutum
tccgtcgggctgcacgaatggggcactagcgaagaagattatccttttacttatatctaccataagaagcataaatgcaaattttcaaaggatatccggacagctcttgtaggtacatctttttgatgcaattgctgctgaacataattactgatgtggtacctaatgattgagacaatactccaaactaagaaagcattgtctatgtctatgatcattattgtgatgatttgattgctaaagctttgtcaggacagaataattccaatactgataaaaa

SEQ ID NO: 238519 - DNA, 105 bp, Gossypium hirsutum
tagcacaatcattttatacctttccaacactttctttctgtcgggctactgtcgattcaagcagggaacaggcattctaacttacaacgtttatgccctttaaat

SEQ ID NO: 238520 - DNA, 158 bp, Gossypium hirsutum
gagaaagcttctagcctttgccttacttttcttcttcttgtgctattgaacattatctcaattagcttcatctctctctataatagtggacaacatcactttcatcctttaaatatgtgtccatttcactcacttcatcaatctatataaatccacac

SEQ ID NO: 238521 - DNA, 373 bp, Gossypium hirsutum
tagagaaaatccattctgctttctgtcggagttgactgctaacaaaaattgatcccattcccccgcttacgaagatttctaagcttctcctataaaacatccacatcaaactcccccaaaacaatatccctattagagaaaaaaaaatgatgtaagattgtcatgaatcaagctattaaaaatctttatgcttttcctctctctaatgaacatttgctgcataatactcattctttatcattagtgtccatctatggtttaattataattaccactcttttctttcactaacttacctattatctttctacatacacttttcatcatatttctttatactttaaacctttattaacacttttcatttcacatt

SEQ ID NO: 238522 - DNA, 189 bp, Gossypium hirsutum
gccacatgatctctgttatcacttcaactacctttcatctgatcatcccacgttcatcttaaacttctctaaatgctctattcaaatcttacctcaatattatcattcttatttctctcttattttatttatacaattatatcattttaaactacattcttaattcatttatccttaattattctatat

SEQ ID NO: 238523 - DNA, 281 bp, Gossypium hirsutum
ctggacagattttaagaagggaggagattctcgaacttggagaatgtcctaatgacttctggggaattgaacgtggagccgtttgaggtgaaaatctcatgttccgatctgttgattaggcaattagggtgacttatactataatttttccactatcactctcatataatctaacattgtcttacgtaaatacttcagatttctaattacttattgttttgatattactgttaatataccttttattgttccttttttactataactatctatctttctta

SEQ ID NO: 238524 - DNA, 410 bp, Gossypium hirsutum
gtgaaatattatgaagtggaactaacaggatatacccctgccatgataaaaggatctcccgatgatacttcatgagatcttctacaagatactgattcatccgatacgcaagctcaaaagcctgataacttaatgcataatgatcgtattacaggtgataccagcagcttcaatattcatatgacatctaatgctgattatcatgcaacagatgaaactatgatggataaatatccgctcccggtaagcaattcatatttgtttgatcccaattatggtgaaattgactccaaagtcttttcaccactaatgaactctcaacctttttgaagatcctgtctttctcgtagattctccttatccaaagattttggtcatgatccaaatggatttcaatttcatgaatggac

SEQ ID NO: 238525 - DNA, 135 bp, Gossypium hirsutum
ttcactagctctgactctttggatcatttcccgagcttatatatctgatggttctggagaatctaatatggctagaactcgcatttagtactaatggtcttccaacaaataattatatacattttcgaatcataa

SEQ ID NO: 238526 - DNA, 329 bp, Gossypium hirsutum
gctctttaactagtagatccagcggactccacgacttcgacacatgaacacgaggttccatggttcaaactcacaaaattcccttcattctcaggcaaattctcctctgctgaggtcgccagtattatatccatgctcaaattctttcaaagatgataagtcctttattatttttttttctattcctccttttttaattttttttctcctattattttacattttttttttttagctttctgctgatataccttcactattgtagtttaagcgtttctactattaactgattattatgtattactatcatttcaattactacctttaaa

SEQ ID NO: 238527 - DNA, 183 bp, Gossypium hirsutum
tacaccagacattatgttgcgtattgatcttctccttttactagctgtggcttcattgggggccctttgcttatccattgatgactatactgtcttttatgactcatgatattaaccttatgactgtccatcgatcgagtcctataaagattattacaaacgcttatggaaacatttcttaga

SEQ ID NO: 238528 - DNA, 183 bp, Gossypium hirsutum
cccacttgtctcatcgatttcatcgacctctcattggatctcttttaggcgattcttctttagatccttaacaatcctacccttcatcaaaactttacaacatctgatctccatacacaccatattgtcacaaagcacaatgtgatgctttacccatttatgcatgttcatgaacacaatctt

SEQ ID NO: 238529 - DNA, 287 bp, Gossypium hirsutum
tctaatgtattgataatccactcaaaaggaatctcataggaatgttttgagccgatcaaacgtcatcatagtcacttgctaactctaaatttcataggcgattgcattgatagttgcacgtaaatgataaatcgtaatgataatgttgccactctacttatccagcttcgtcatagttctctattacaacaacaacatcatgaataaacaatgatggggtcaatgatagatggcatctatatgacctaatttcaacttacatgacttcattggtactactaattcaa

SEQ ID NO: 238530 - DNA, 411 bp, Gossypium hirsutum
taggagaagcagtatcggggatgaaatcctcagaggcaagaaagacttcggtggcgtttacgaaagccaagtatgatccttgggaaggtatgaagcagatcctaaatctttttcattgatggtgaccaaaaattctttgatgacattttttctaatactgttcctgattttattgtttgataatagccattttttttaatttgttacattttttttagctgtggctacattagaatcagatgattttacaaagatattgtgacgtacaaagttggtactgttctcattatatacaaacttttaaaatgaatgtcgtctatagattcttgcggattgatagaagtgagattaggattgattttgatgaaggacatggctactttgtcctacaaataatgaaacaccataatt

SEQ ID NO: 238531 - DNA, 256 bp, Gossypium hirsutum
aatcgatcgtttcctgcttttcatatcgttaataaatcttaggacccagatgctataacaggcaatgattggagttggtaagataaagcaatactcaaacatcctttataagccccttatcaagggcaaacaatatgttatcttgagtgcctatacatttttgctctctgagcttgttcattacaatcaaactctgtttgacaacattgctttattataaagaatgctgtatgattcattgtattcttttataact

SEQ ID NO: 238532 - DNA, 198 bp, Gossypium hirsutum
aaaaatgaacaagtcttctcattttacttcgtcaaccagggtgtattgttgaggcaattctactaatgttaatgatcttgtaccagatacatcaacttgctcggtaaatttgtgctctatttcattttcttctgcttctagatgtgtttttacataatactgtttgcattgatatcgattcttatagtatcttatact

SEQ ID NO: 238533 - DNA, 259 bp, Gossypium hirsutum
ggaaatgcatggattgttcaatacgaaagtggattaaatggcgatgtgcagaagctcttaacaacgtgttacattttgggtttcaacatgtttgtagtttgaattagagtatagattatgggttatatgggtatgcagattctcttaaaagtattcccatgtgggtagagagattgatagacattaatattattccttaatcatgtggtttatgtattccatatatattttataaattaattatatggttgttatcaat

SEQ ID NO: 238534 - DNA, 179 bp, Gossypium hirsutum
acgtttttgatgcaagtgtgttgcctactgctattggtgttaatcctatgagtactgttatgtctactgcttattgtctctctaagagaatagcagctaaaatacaaaacttatagggttaaaatgtgtcataagtacttacacttttcataaatttggaatttaatccttttgttttt

SEQ ID NO: 238535 - DNA, 396 bp, Gossypium hirsutum
ctcggaagggacatcctcggtaaagaaagggaccggttttgctggaagtaatgtccatgaatcgcgtggtgctgcttctggctggcaggctgaatttcagtctgatgatcacggttctattagcaccatgtttgctgaacactcttttgcatcagtatactgaacttattgtccgtcctgctcctatgccttattggtccttttgattctattagttcctatatggtttcaaatactgtttttaccttttttttttttttgttgtttctttaattttatctttttttttttagttttttttttattttattttttttcttttttttatttttttttttttattctttttcttttttttttttttttttttctttgttattatatttcttttttttt

SEQ ID NO: 238536 - DNA, 451 bp, Gossypium hirsutum
ggttagctttcatatcatgactctggtgtacctgataatggagcaaacatcataggacgtgtactccttaagaacattaatgtaagatggagaatgcatgctgggttggactggcacaaaactagaaagagtaacatgtgttccaataatattcttggaagggatagaactgtatgtctagagcttgcagtatctgggttggaatttcaatatgacatattcacacctgccggattctttgttacctaacttgtttgtttatgttaattttttctattttatcatctattttgtaattattcttttatttttttttgtttcttttttttctatattttttctttcttttccttcttattttttttcttttttttattttgtatttatttatttttatcatttatttcttttatttttttttatttatttttaatcattttatttttttatt

SEQ ID NO: 238537 - DNA, 197 bp, Gossypium hirsutum
tcgagtttactagttttatctttattaggaaatcagagttccaaaaattcattatggcaaatataaataatattgcaatcctactctacttttattgacatgtttatttacattgctactcttatcgcttaaaactaatatttcttattcctttattgattcccttattttaaagctttaactatgcattatatatt

SEQ ID NO: 238538 - DNA, 390 bp, Gossypium hirsutum
gacggttcctttgatttcgagagtagatattcgctcgtttctggctttcgtcgaactccgcgtaataatcgctcatatttctcgcagacgtgaagaatggggctgtctttcacaaagctgttcaaccggctttttgccaagaattgagatcttatattgaagtgtggacttgatgcttctttttaaatccttatttttttactatccctagtttttatagtattttttactcttttttcattctctttgttttatatttgttatttttttattttttttttctttttttattattttttttttttataatattctattttttttttttttttttttttatttttttatttttttttatcttttattttctatattttttatatttttttt

SEQ ID NO: 238539 - DNA, 426 bp, Gossypium hirsutum
tgaaaattcattttctttggactttactctccgaaatccgagtcctaggaaggatgcgtttgattcttcatattcagggagggcagttcggcaactatatcggttccttgttttgtttgtttatttattttttattttttttatctttttttttattttttttttttttatttattattttctttttttttattttttttcttttttcttttttttttttttttttatttgtttttatttttttctttttttttatttttttttatttttttttttctttatttttttttatttatctttctttttatttcttttttttttctttttttttttttttttttttttttcttttctcatttatttctttatcttatttttttttttcttttattatttatatttttttttacttattttttatttttt

SEQ ID NO: 238540 - DNA, 402 bp, Gossypium hirsutum
gaaaaaaaatactaaagattttgtgcagaaatatttgtgggatagcctgtatgaagaaattttcaaaaaaaaaaaaaggagagaagctttggattatacatgaaaatcaataataattattaaaatagagagtttctatggaattttaaagcacctgtgtttatatggagtgatattagtaactataaaaaagagttgatttgttgtatgttaggttttgaaataagcaaattgagtgatcattttgttgtatgctttgactgttttacgtatcttttatgttgtttattttttttttaactttatgttttttgacttttttattttatatttttttttttatttttttttttttttttattttttattttttatttatattttttattttttttattattt

SEQ ID NO: 238541 - DNA, 250 bp, Gossypium hirsutum
ccttatagcacccgtaagccttaagagcaggacccaaagttcagtcctgaagcccagagtggttatgagcacttacgggcacgagtcatgacaacgctcaggctgaggctaaggctcaagcacgcacagtattagcaccgcagaaacttatgaactcgacagcacccgtgttagactccaggctgatgagcattataacagcatacagtagtgcagcatcaatggcgacactcactactgcagcaagaat

SEQ ID NO: 238542 - DNA, 312 bp, Gossypium hirsutum
ctcgtgccgattcgcacgagtcatcatccagaaggagtccagtcttcaccggtaccttttcctccgcagctggatgcaaattttcttgcaaaccctgacttgatagaccatcttcctttacgatctatgcttttatactatttatttctctttctcttttttccttttttcttttttttttttcttttattcttcttcctaatttttatttcttattattttttatttttcatcttatatttatatttcttttttttattattttctttatttctcttattattttcttttattttctttttttattattct

SEQ ID NO: 238543 - DNA, 191 bp, Gossypium hirsutum
gatatctaaaattctacgtacgatcaactaaagggtcctcaggggcacttttaactacaaactcaataacccgaaatacatcaattacattgaattacatgataattttatattacatatttcattgatatgtacatatattcacacctttcataagttctttattagttttagtttcttattcctatttt

SEQ ID NO: 238544 - DNA, 277 bp, Gossypium hirsutum
tagctaatatggaatctacctacattatatattctgaacctgtattgaaaccttagtagatttatctattcaaaatatgcctaacaatttatacttcatatgaaattttattttcttatgttctattctaatttttatctatatttaatattataattttcatctttttattttatttttatttttttatttatatctatattcttttctttaaattattaacttttcatttatttatatattattttatatatttattttatttatatattttttt

SEQ ID NO: 238545 - DNA, 435 bp, Gossypium hirsutum
cgcaggtcgagccggcgcgggtccggccggtcgtaaagagtcatgtgcgacacgaattcctggccggcgcccaggctgctgcccgggtgcgagccgggccgctgaccggcggcgcgctgcggcaggcggtagtggaattcgtgcagctcgtcggcggcactcatcgcggcgtggcgaccttctctatgatctgcgcgaccagcgcgtttgcgatcttgtcgctggtcattttttttatctgtgtgtttttttatgtgtttttttttttttctttttctgttattttttttggtttttttatttttattatattttattttctttttttcttatcttttattttttcttattcctttctttgttattttatttttttctttttttttattattttttttttttttttatttatttttttttatttttttatttttt

SEQ ID NO: 238546 - DNA, 164 bp, Gossypium hirsutum
ctacagttctatcccgtgggtatggaaatgtaacatttagattctttgacaatgcgaaaaatcatctaacaagccaacattgtacagtttacagagttcctaatgtaaaaaacatgactctagcataaggtatctgaacatacatttataaaggatccagatta

SEQ ID NO: 238547 - DNA, 140 bp, Gossypium hirsutum
atttcaaagacatggattatgtgaatgttccatcaatatactgggaatacagcacactacaggtcttgacaatggagtatgttcctgtgatcaaaataaacaagattcaagctttagaccagctgtgagttgatcggata

SEQ ID NO: 238548 - DNA, 333 bp, Gossypium hirsutum
gaaatgttatcttcatccttactgcaaattggttaccatggaatcttaatttctcatcaaatggtattattaccctggatgaaaagaagcttgccagtttagctagcggaggttggcagttaaagttatctcttagtgtgaaatcatcatagcgtctagcctgttatcttcttttctttatactgtttttctttttttttttttgtttctatttttatttttttttatttatttttttttttttttttttctttttttctttttattatttttttttttttcttattttttttgttgttttatttatttattattattttctttttatttttt

SEQ ID NO: 238549 - DNA, 181 bp, Gossypium hirsutum
cttcaatctgagtttctcgacaatctctcctctcgtttgccctgaaaaacaagtgaatctaactcctctagattgtccagaccgcacaacaaaagagaccatattggttactggtacccatggtcaagacccaagacattttctgaaaacattgttgctatcttctttcacatttcgacac

SEQ ID NO: 238550 - DNA, 122 bp, Gossypium hirsutum
ccatattttttcctccttgtatcaaaacctcctggcctttttataacatttacatcggcaattcatatcacagttttatacagttttaattactttaactctctattcacacttactatatt

SEQ ID NO: 238551 - DNA, 299 bp, Gossypium hirsutum
ccacaagacctccctggggtgtccacagttctctgacggggtgtatcttcagcttcatgagatgcaaaacaacgttccactgatttgaatggctgtaatgctcccttcgagcgacctacttatggatcgagggacgatctgattccaagatatggaacatatagatctgcattgtctgctacattatgaccaccagccctctcgatagtgcggtcagcattttcgacattggggtgatcataactgctccgatagacattgctcagttcatgctcgaagccaacacatcaaattcactc

SEQ ID NO: 238552 - DNA, 317 bp, Gossypium hirsutum
tcccgccccaccggcgcaactggccgcaaaagccgcacccgtgaaggaccaacctccacaacagccccagcaaacggcggcgccaaaaaaacccacctttacaaccccacgtcacgcccaacttaccgttcacaaccccatcacgtaaccgtccgcggcggaactactgttgctggaccaccctcaaaatactcatactcattcttttagccgccataaccggcaccgtcctttacgtacgtttaccgcctcaccgaccttgtttcaccctcgcttcattccgcatccaccgcctgaacctaactaccagtgcggac

SEQ ID NO: 238553 - DNA, 293 bp, Gossypium hirsutum
tgattcaagaaatacccaatttgtgttttgatttgagtagtttgaaaggaaaatgagttttagctttaagcaatcaggtttagctacatgcatgaatgttacaaattctgggtttcataaaagattaatttcaacaatttgtagcagatcttcgttttcaccatgtttgaaccttcaaaatccggaaagaagaaatctttcagtgtcaaaaccattgcatatttcatcgattgagaaaattaatgagaaaaaaccagtgtttgaatgcaaggcttttgaagctgacaagtcac

SEQ ID NO: 238554 - DNA, 168 bp, Gossypium hirsutum
ttattaaatatacccccacattttattatcataggcgagggctataggatattgctgattgagaatgaacaataattcaaaaatcatgccattcagttccggcctgatcaactggtctatatttaaacatgacataaaacattactatcttccatccaagaatcaaac

SEQ ID NO: 238555 - DNA, 455 bp, Gossypium hirsutum
  unsure (1)..(455): unsure at all n locations
gcggccggctctagaaacctagtgnganntcccccgggcctgcagggannattcggcaccgaggaataccagcncactcanntcaattcaaatctgatggatcaaagatcccatcgtactgtcaagannaaagctgaaggggtgagttctcgtgctcggatggcctaagaaggggagggctaacaagggggatggaagggtcggatcaacaattgtctgcacaacacatatnntactttcctgtgaattggggcacgcttgcaannngaagaatttctcgggccagattactctnntctgggtganaggaagggttttggcccgagttgtataatagggcgtattggaagaagcactaatcaaagttggtgnngcaatcaagcangtctttgatcgtaatggacctgcaaggggaacccgggaaattcctttgttgaaagtatnttgatgttgag

SEQ ID NO: 238556 - DNA, 293 bp, Gossypium hirsutum
gagcaaatcaatggttatctgtcagtaataagatatatgtactaataactgatatcgttcagaacatagctaaggcttcttagtgcattattgcaggtcatgtatattatgtgtttttatgcagagcacacacccaactctccccctttcagcctgaaactacgaccccactaaagcagaagcttagttgccagaagcagagaccccattttgagacaataacaaagttaccaccataatttcatatggtacaatatacaagcattaatttgtggtgccagtaccctcaactt

SEQ ID NO: 238557 - DNA, 308 bp, Gossypium hirsutum
gagagaactagtgtcgagtttatgatggaagctggttcggacgcatggagagggacagaaaacctcacagaaaataaagcttgaatataaaggagtgcttcattcagatgttgggtctgatcgggttcagttgggtttggttggttgagcctcgatgggaagatttgatttgtgaacttataattgaattttaatttgtgttcatgatttcgaatgtataatggtagaaacaaatgtatctgcctattcattcatgtttcacatatttattctatttcttataaaaataagtatgaattaccatagtc

SEQ ID NO: 238558 - DNA, 194 bp, Gossypium hirsutum
gaaggattccgcgccagggaaaccaccaccgatttcagatccttcttcccagctctggagaaaggactgggtgccgaaagggaagaacaaccatggggcttgcatttacaaagctctttatcccgcttttttgccagaaagagaagcctattttaatgggggggcttgatgccactggtaaaaccaccattttg

SEQ ID NO: 238559 - DNA, 190 bp, Gossypium hirsutum
tttactgatatgtaccaagaaagatataaagatgtggagatgaatagttctaagaagagactaatggaattgaaagccatagggagaatagaacgtgatttacattgaacatacatcaatgtcatcagcatagccctttttctttactgatatttacagatttgatgttaatgggttttttaaaaaatat

SEQ ID NO: 238560 - DNA, 213 bp, Gossypium hirsutum
ggcaacttatctcacctgctgggatcatttttggtatttggcaggggcggtttaattttgctcaaataatggtttctctcttcactgatgtttccatacaattagtggcattggcaaagctcccgttctactttaatggtggatcatccaaaatttgcgtccataggccccccaaattctggatgacttattagaagaagcagaaaagaaaat

SEQ ID NO: 238561 - DNA, 304 bp, Gossypium hirsutum
gttttttatatcctactcgcatattgaagacagtcgttggctgattttctataaatcggttctctttacttaactatggccaagaacgacatatctgaccaataaaatacaatgcaactccatgaagtatctatagccaattcaaccatacacactcaatctccacaacccttacaactactacaaccaagaagacaactagagacaacatgaatatgataataaatgattcatagatgatcatgtggaggatgaacatgtagatgaagctgaatagacggaatacttccatcaccataatctg

SEQ ID NO: 238562 - DNA, 265 bp, Gossypium hirsutum
cagtttcaacccaatcaccgtcgcgcttgtcacggacgaggacatcgctattggggaaggttccttcctttccttcgagcacggaactaaaaacacgaccctcttgaaagctgccatcactagtaacaaccaagaactcgatgacacgttagctgccaattttaagaaagctttcaagagcaagacggggctgacattaaagatcaagctcgatgctaaactgctagcatatatgggagcattggatacaccaaaagtcgggata

SEQ ID NO: 238563 - DNA, 299 bp, Gossypium hirsutum
ctcttgccgcgaaacaagcatataacagttacgcgctctgaaataatgaaatagaatcacgttatttttttaatttttttaattctttttaaattttcacagggaattcttgaattaatttccaatccaggtttcgatcaacagattctctcaactcgtgatggtgttggattctaatgtaatgagtaacaagtagtgttatatgggctgcagacagaaaggaaaggaatgggtggttgttgctgctgttgctcttctagaggagttgaaataagtagtgcaccagcatattattatta

SEQ ID NO: 238564 - DNA, 176 bp, Gossypium hirsutum
ccgaacataacttcaagtgatgcacttgctgaagcttaacaagggggcacgcttgatgccttaagtccgtgccatgtaattaatgatttgggtgggttgaggatttcaaaaacagttgtggcttgaacttgaagttcaagcaatgatcccttacctttcggaaatggaagttcata

SEQ ID NO: 238565 - DNA, 303 bp, Gossypium hirsutum
atacttccgagccatatctaacaagcccttttcgatcaaggcatcaatcagagcattgtatgcaaactcattcgggctacttcctagttcttccatcttcttccaaaccataaaaaccagtcgaagaaatccccatctcccaaacttcctcataagcatcacatatgtgtccatccttggctgaaccccattcctaatcatcaaatcaaacaacttaaggatctctctaagcttctcaagagacccaaaaaaagcaatggtatgtaatcacatcaggtgcacaatcattctttagcatttgat

SEQ ID NO: 238566 - DNA, 277 bp, Gossypium hirsutum
cagggttatttttttttttttttttttggcacaaccttaaaactttagtgaacattgaaaggttacctcttaaggggacaaaaagcaatccttcttaacaatatacttaaaacacccactcaaggtatatagccagtgaaagtacaaaaagatttcaaggaatgaaatacggagactagtttacaacaataaaaatatggctgatgaagtaaaatgaaattttgaggaacatgggggatcattgactgcgactgctgatttcttgtaatatggatct

SEQ ID NO: 238567 - DNA, 233 bp, Gossypium hirsutum
attattttttaggtgatttaattcttaaaatttgcatcagatcggtggttttcggtgcataatagtttggaaaaatggaaggtatcatcgttagaagggtcatcccctcagataacagctgccttttcaatgctattgagtatgttatggaccatgacaagaccaaagcttcggaattgagacaggttatagcagcaacagtggccagcgatccgacgaaatattctgaggca

SEQ ID NO: 238568 - DNA, 237 bp, Gossypium hirsutum
gaagtgattgttactatgcacaatctgaaacccgaagctgtccttgaaatgcttgagagatctacaagccactctaccccaaaataagcaccaaacccagagacctaaacttaactataacccttatagacgaaaaaacctataaccgaacgctgacacccattcccgcaccctgttattgggcatcaaaacccgctacattagtaccctgatacgggaactgacccaccgagacta

SEQ ID NO: 238569 - DNA, 275 bp, Gossypium hirsutum
cggcacgagtttttgtttggatgcctttgtggctatctagtgatgtatggacaccattgtggctatcttatgaagtaaggacacccttgcggctttctatttttttatggacacctttgtggctatctagtgctcctgaatgtttttatagctactaagtcaaaggaggacatctaaagtgaagagtatgcctttgtggcgcagtctatgaaatgaccttgggataacaattcaaaggaaaagccaagcaggtgaactttgaatggaactgcagc

SEQ ID NO: 238570 - DNA, 271 bp, Gossypium hirsutum
aaccagtgaggaaaaaatatcaagggaggttgcccttatctaaaggttgaagggtcaagccatgggcattcctgcaaccaactcaattcacgtttcttaagaattcctcgtttacagatgaggtttcaaaccagacattggtttttcatttagagggtgcattattgaaagcatattcactcttcccttacttcatgttggtagcttttgaagctggtggactctttagagctctcatcttgcttcttttgtaccctcttgtttggttact

SEQ ID NO: 238571 - DNA, 340 bp, Gossypium hirsutum
ccccatctctatcttttcttctctccctctaaaccaaacccaagcaaattctctatcttcaagcaaaacttaaactatgaattaatcccattctttataaattgctgcaaaatgtttggttttgttcttaatatcatttatttttatttttttcatttcatttattttcaaattcttatttttctttttttcattcttttttattttttatttttttttttttttttttatatttatctttttttttttttatttttcttattttttttttttatatatttttatttctttttttttttttttttttttattttattttttttttattttattttatttt

SEQ ID NO: 238572 - DNA, 382 bp, Gossypium hirsutum
ctgatatttaacctaccttgctcttttctatgaaatccgcttcggtcaatacaaaatggggctacatttttccattattgatacatttccaacaattaaacttcctttagtacaaattttcttgctcagctttttttttcatatttttttttccttattgttcttttaatattttttatatttttttcttcttatatattattattcatattttcttttttttcttttatttttttttttcttttattttttttttttctattattttttttttttaatattttttttttttttttattctatttttatattttcaatttttttaattttttttatttttatttttataatttatttttattatttattttttttttctttt

SEQ ID NO: 238573 - DNA, 305 bp, Gossypium hirsutum
ggaaccttgtgagctgtatcattgtgtgcttgagagcagttcatttcttgaaaagatgaccgtccttgaacatacaattcctttctttctgccaatacgagaagtataaaatgatcttctttcttctaatgccatgagatttatagatcatattggagaattattgcaagcttatgttgacagactggaacaggttctgctcgttaaagaattttattgaaattaaatttgatagctttattattatctttcctaccacatttattaatttttcctttaagatttttatatcaattttctttatc

SEQ ID NO: 238574 - DNA, 217 bp, Gossypium hirsutum
aggatgaccagtgaggtaaagatcattaaccaagacaaattcacacatatggcaactataggctataaacatgtacaagatgcaatatacgtagtgagtgaaagttgactttcacagaatgtgtttattaaacatacaaactttaaaaaaaacaaaataacaaaatggggtcagcatatacatatacagatatactcttgctctatcaagtccttta

SEQ ID NO: 238575 - DNA, 229 bp, Gossypium hirsutum
gccgtatgcatcatgggttaagaacgagacactgcgattgtagattaaccgcgatcctggcgcaagaagaagtggatgagcttaaagataaaggcagagggatgggcagaatccaaccggtgaaatcaagcggaggggaggtggacttgatccaagggttcgatttcgcggagtggtttattaacactgttacagatagcgattttttagttattaattttgatttttt

SEQ ID NO: 238576 - DNA, 354 bp, Gossypium hirsutum
  unsure (1)..(354): unsure at all n locations
tttttttttttttttttactctgaaatgaactcttgatataaataagaggaagaaataagtacccaaaatatcaattatttatatagtttgtacaaaaaagtaggctggctcttctccatatcaagcaatcacaatgtactttgcatgcaagctttgcatctaatttaaagttcttaaattacaaaccacagcgaattcggataaagaaccgagtacttggcccttctgatgatgtaaccttctgatgatgtaaaagccgtaacagcctacaaccattaagatcaaactccatttgtcagagggatgcacctcaaaaccacaagatgtgatgcttccatctacccngtggagtc

SEQ ID NO: 238577 - DNA, 391 bp, Gossypium hirsutum
  unsure (1)..(391): unsure at all n locations
tcanatatgggagtatgtagcaccggtaaaaggagcttttatagtcgagtcttgtggacatgctcgaacggtggagcaactgtatattcaagtccactttgcaccgagttttggggaatggtcaggagagatattctattgcatactttgttgagccgagtcatgactgtcttgtcgaatgtttacccacttgcaagtccgaaaacaatcctcccaagtttccaccgatctattgtgcaacgtacctgagccaacgatacaaggacactcatgctgagttaagcgtatacgagaaacatcaaacttgaagtcctcctggattatgtctaggtataaggttaccttataattttcgtatcataggctcattatcaatttcaatgtgctaata

SEQ ID NO: 238578 - DNA, 237 bp, Gossypium hirsutum
ccgccccaagttttttttttttttttttaaatttgcttttaaggacctgggggtccaaaaaaagattcattaactataccaaaaactaaagacctaaacttaaccactgtcgggatcttgtatccatgatcctcttcactacatcttttacaaaagaatcgaaacaagttaagcaacaacctttcattaagctcgcctgtccagctgccactctttcaatgtgcacacaatttgatg

SEQ ID NO: 238579 - DNA, 237 bp, Gossypium hirsutum
tttttcgagatttttacacaaaaactatgtgcatataccaacgtagcgggtatatatttataaacgagcagtcaaaacttgaatacacaagacactgtgttgtacaaaatacccccttcaaaaaaaaaaccaaggagataagctctgtacactctctttgccattatttttcctttcattctgcggcacccagttctatgacagtgtatatacacgatcgcaaaatgggggaaatta

SEQ ID NO: 238580 - DNA, 117 bp, Gossypium hirsutum
catcactttttaaccgactactgattgacaaaaaaaaaactttgtatttgaaccctctattctgctaaactgtttaaacacacacatctcaccttctattgaaggaaaacccctcat

SEQ ID NO: 238581 - DNA, 321 bp, Gossypium hirsutum
  unsure (1)..(321): unsure at all n locations
acagnggagcccgcgggctgcaagaagtattcaacaaagccaattttttattttaatacaaaaaaacataacaatcgtgtcgcttgtaaaaaccatctaagtccaccactcaacaaaatatataaagaactcactatcatcattgcataaaacgagtgacgaaacctcttcaatcaattattattttgttgcttagcttacacctcgtcctcttaatcctagagcggtgtcatcttcttcttcaattccttactcttactgatctaatcaacataccttgctacctgggaaccatgttccaatacatctcatgacatcata

SEQ ID NO: 238582 - DNA, 192 bp, Gossypium hirsutum
  unsure (1)..(192): unsure at all n locations
aacttttgataacaacccacccccatcccaaccatgtagtgtcaattaagacgggtcgcattccacaaaattaaaccaccctaanacatcctaatcatcaaccaactaagatatacaatccagcgaatacctctgaacattcttctataaaatacctatcaaatgaaaataattccaaattacaagacaatc

SEQ ID NO: 238583 - DNA, 212 bp, Gossypium hirsutum
gtttttattttaatttacattcaacctttccattgcatgttctaatatttcaaatacacttgcctaccttccatcatattttaaatctcaaaaattgcacgactagcataccaccaactcccttcagtaccatatctaccttacttcttaaccttccttcaattgcatctacatttctttgtatgaaaatatcttcctatacaaacactata

SEQ ID NO: 238584 - DNA, 169 bp, Gossypium hirsutum
  unsure (1)..(169): unsure at all n locations
aaattatatatattcttcattttcaangttggcgatgtggtaaccaaagcggatgctggttgtgggaagttcatttcgatcagcaccacatatatcctactactatgtacattggattcttgcatctgcagtttgagcatttttatttttactattacgaggcttcata

SEQ ID NO: 238585 - DNA, 213 bp, Gossypium hirsutum
ttttaatttcaatcatccgctgatgaaactatcggcgatgtaattgagctcgatttgctttttttttcccgaatagtttaaacgcttccatttagattcattacgaaagcgatcttcaaagataaatcagatgaattatatgttgtattggtggttttggaatatgccatggtgatagcgatttgttcttctatggtatacttcccatttgct

SEQ ID NO: 238586 - DNA, 218 bp, Gossypium hirsutum
  unsure (1)..(218): unsure at all n locations
ccatcggngcccttcccgggggtggataaaattgctgtgcgcgaggttcnnngggaaatccatgggcactttcttccaaacctgttgatcacaacagccacttccactcccatggcctccccttactctatatatcgccacctttcaatctctgcctcattcaaaagccaggtgaaagaactaccagaagaaaatatcatgttccatacttagcaaaa

SEQ ID NO: 238587 - DNA, 219 bp, Gossypium hirsutum
tcgaattttttttttttttttttttttaacaacataacaggtctacgccaaataaaaaaactgaataaccatacctatattaattctcttaaaatttacagtaaaaaatatattggcactcaatttaactctgattctatacatcgattttttgcagcaatctaagcttctgtatattacacttgcacctgtatcaatctttgtatgttacttcaaaac

SEQ ID NO: 238588 - DNA, 286 bp, Gossypium hirsutum
aatttatacttaattttaatcaaaaaaaaaaatgggggtcgttattttattacgaaggcatagactgctaccaaagtttatatattatactattccatatataaacatttagaaaaactatcacatgtaataaagaaaggttctttttattttcaaagtaccaaatcctaactcttgcaagcactcaacactatgctatattatattctaacataaaataactcaccacctataaattattttccaaacatttcaccacattaccatacagaagctaatactttta

SEQ ID NO: 238589 - DNA, 162 bp, Gossypium hirsutum
tgaagtgaaagccactgctggtgacactcatcttgagggtgaggttttgattaccggatggggaaccaatttggtcaagaatttaaaaggaaggaccaggagggcctttatggttaacccaaaacctttaagaaggttaagacctgttggtaaaaggccaaa

SEQ ID NO: 238590 - DNA, 438 bp, Gossypium hirsutum
  unsure (1)..(438): unsure at all n locations
cttcaaggtcaagttccgaccacgttctttgggcttgcacatttgcaggctgtggaactagaaagcaaccaacttaatggtacattggtaatcggcacgagttttaccaaccaactacaactcgtagatttgcagaacaataagatttcggaattcaatgatgccggatacaattttgaaatagtacttgtagataacccggtgtgtatggagactggaaaaaccgacaagtattgccaactaccttcacgaaagtccttgtattcaacacctcaaaagaactgtgtatcgggttcatgtcgttcgagtcaaatcacgagcccaacatgtacatgtgcatatccatataccggaacactacttgttagaggctataccttcacggagataggaaacacagctncgtatctttctcttgagcaaagcttgatgaagttc

SEQ ID NO: 238591 - DNA, 431 bp, Gossypium hirsutum
aacacgtcctacagggtacattttcacttagctaaaaattacttttttcttcttttttcttgcagttgaaaattagaattttgtagatttatttttatttgtgtttgagatagacaagtgatacaaactcgcctcggtgatgattcgagttgtttgttgcccgatcgttaaaatgaagaagtatcgttcttgaacagaataatggttgaatttggctaagtaagactttaaacaaaggttggctagatggttcagaggttataattgtgttggggatggtttggttaagtataatgatgatggaaaaatggttaaatgaatgaggattatggaaattcggctaatcaaagaaacaagataaataagttggataatgtggatgggaaaacgatcttaagcccaaggaagaaccaacactatatcaagtgttg

SEQ ID NO: 238592 - DNA, 537 bp, Gossypium hirsutum
cagaaatcttgaggaaaaaattattcatgcaacaaacacaagttctgctacaaatgaggcttgcaaaggattggagacagaagtacccaaggttgcatctgaaaaagttagaagcacttcacctttccgtcgttttagcttcagcatgggtaagataggcaaaagttctggcctcaaagagggctcttctatgcctcagatgagctcaacatgtagttctgccaaaaccaagccagagaatcttgttgcttctggtgttgatacttcttgtggtgataaactcaatgctaaaagcagagcaaggtccaagccttttgagaagactaatagagccgcttctgaaaccaaaggcagtgaattgtcgcagttttaccaatcaattacaggagtcaattgtaacagaaggtggcttgaagtcatcagaacggacaggacattcaactatgactatgcaaccagcaaaagtgaaatcagacacaaccagcacaacagtaaatgattcagcactgaacaaaaagtgcggatcttcagcagttc

SEQ ID NO: 238593 - DNA, 239 bp, Gossypium hirsutum
tgttcgagcttggaattccttctgtcaaacaccgcttttattggggggcatctcacttgagtcaggtttcccaaagatgaacggtcaaatccatggcttggatgtgcatccttctaggtcaactctcgggaccataaaagctttgcttaaaccttctacaagacgagtttcccttgctgaaacaaagaatgatgcccataccgatcaatggctccagaatttcaataacatagtatcca

SEQ ID NO: 238594 - DNA, 498 bp, Gossypium hirsutum
tgagcatttgacttgaacctcacaggatctctgatcgagtggtagagccagaaataaaatcataggtcgaagcatttagaacatcagtgtagcatatcaatattgacatgttccgtttatatatgacatgggactcgattactacaaatgtatacacgacgaactgaaacgcaataatgctgacgactcgggtttgagaagagaggatgaatgggtactcttatgataatgcagcagatgggtgcaataaaaagggagatattacggatgaagtcataggagacattgcgaaagaagcatttatgacgaacgaatgtcagcctaaccttcaggaacggctactcgtcgctactgtcgagacgagttcacccactgtgactctggccaccatgtatctactggtcaacccataggctttgcaacacttatcagcggatcatgaagaaattgtgatgaacagagaatatgccatttctggactagtatggtaggaataca

SEQ ID NO: 238595 - DNA, 345 bp, Gossypium hirsutum
ggattttcaagtctggttcgcttgagagttcatcggacttgctctctattgcacccaacataaacgtctgaggcatgtacatctgtggatggcactaaccacgaagggtggcccaatacagcagaagtttgctactcatgcttcaaatgttcgagcttataattgcaagcactgtcaatgcgttccgtccggtacttactggaacaaacacaagtgtccattgtacatatataaagtaaaccacattgtcaaacccaaatgcccttgaaaatgaaatctattctaagttccggatttaatcaatcttaaatatctaagactaataagccatatatatatatatat

SEQ ID NO: 238596 - DNA, 223 bp, Gossypium hirsutum
aacaaattcaattaccaattatgaagctagacaccaacagacgagaagggtccactccagactgggaagctcccatgaaactagaagacacatttaaccctgacaaacgcgatcaagcttgcacacacaacaaaaaagcatccaatgcaaaaaaaagcaatccagatttgcaaaccaagcaatgggaccaccacacgagagatcatatgtaaagaagaacaca

SEQ ID NO: 238597 - DNA, 250 bp, Gossypium hirsutum
agatctctttaacagaaaacctattctcttaaccggactgatatccaaccacagaagagcaagactagtgttaatacacaatattggacaagacactaatttattcaatgaagtgtctgaatcagatggtaacaaatccttatgtatccttccacttactatactacttctcttatcagatcttccgtacctatcacttataatagactcttccctcaaatcactcaactactgttttatagggaaattc

SEQ ID NO: 238598 - DNA, 516 bp, Gossypium hirsutum
cgaacaccataaagtagcaccatccccccacaaaaaaagagaaaaaaaatactgaccccattttcccaaaggaaattcgaacaagggtttgggaaactatgagaacttcatgggcggattctgtgtcaaattctgcagctgaaattgcaatttcggacaaaaattcattaccttgtcctactcgttccacttatgtccctccccaccttcgtagcggttcaatttccgacctgtcaggtccggttaccgggaccaatggcgggtcccgttggaccggcagtgatggtggagggacaaagcctgaactcaggcgtcaaggacaggcgaatagttatgctacagccggacgagatgccgctgccggtggtggtggtggtggtggtcggaataatagaagtggaggttgggataggagagaaagggaagtaaacccatttggtaatgatgataaaatttatgatataaaacaaaattttagtgaacaagaagattccggtatcaattttgatgcatacg

SEQ ID NO: 238599 - DNA, 388 bp, Gossypium hirsutum
gacgtaattcagctacgagcgtctagaggttctctagtctgcagattagccagcatgactcttacatcggcacaggactatcgcaacgctgatagacaacagagacacagtgtaaatatacatacataataggtcgacaaacgattctaattcaatggaactactgaatcaataatgaatatagccggattatttgtcgcattttctaacgccatactcttatgataccattcatagctacgtttctaatgtactctctccttatatcactcaactactgtccaatagtgtacatcaatcagaggtggaatgctgtaacctgactgcatacaagatagtcggagaatatacatagtacgcttgcattgatgatacatcgtgctttgga

SEQ ID NO: 238600 - DNA, 355 bp, Gossypium hirsutum
cgtttttcgcaagcatctagaaccgagacgggatgtccaatcgtgggggtggtattcaagctaactgtggatgcaacatagggccgacgctgactgacgacctcactaacatcatccaatatgcacgattgacctagttcgagatcctctttatgctgatactgatcatcgctattatcatcactaaagatctaacgtcctgaaccgaatacatgcaacatgctactacaaatctgaccattctaaattggctgccgcactaataatgggaagtggatgctaaacgaattatgtcctgcatcatttcattcttcatgattatcttgactgctcatacatttcatatttcacttac

SEQ ID NO: 238601 - DNA, 361 bp, Gossypium hirsutum
accgaataattttccagattcgaaagcgaggccaaacccgaggccaatgtgaaacttaccaaggaagagggccacgcacaacccaaatccaccgagcactacacatacaaagaaagagaaaccccaactcacacaaccagtgaacgaacctaaaactatacacacaatgtacgaacctatgaacaaacccccaacaacgaataaaccagaaaagaaagataaccttgaacccaaaacacccacgaatgaaccttctataaaacccaccaagaagtctccaaagaaaaaaaacctattcccaaatacacaaacactcaaagacacgacaaaaataaagccaccaattctaaaataccccaat

SEQ ID NO: 238602 - DNA, 435 bp, Gossypium hirsutum
ctcaaaacaggtagacattttcgccaccagagagagaagaggggccgatctcctatgatgcagccaactttaactccgaggcatgccagccatatgtctcgtcagcaacggataattctgaacaacctcaaactgacagtgcagttaattccaagcggaaagagacctctaaaaaacgaactgacaccgtaaccactctagcgatcattgcacatacgtaaatagagagccacatgtctttctaacaaggcctgaaactgggaaggaacaacccaaacttctatgaaagaatgcttctggacatttggaaacagaggccaaacaatgtgattcgggcagaacggactagtaatcctgcacgtattgctgctcaaaccaaatttgacgcgttcagtttaacagccaattcccgtagatgaacccattcatcctacc

SEQ ID NO: 238603 - DNA, 516 bp, Gossypium hirsutum
atttgattgaacctcacagatcctgatgagttataaaccagagaaaaatataggtgaagatttaaacatcatgtagcaatcaatcatgacatttcctttatatatccatgggaccgattactacatatgtatacagaagaaatgaaaagcaataaagctgacgacttgggatttagaagagaggatgaatgggtactcttatgataattcagcagatggttgcaataaaaagggagataatacggatgagagtaatatgagacattgcgaaagaagcatatttgacgaacgaattcgacgccttaccttcaggatgggctactcctacgctactgtcgagacgagatcacgcactgtcactttgggcaccatgtatctactggacaatccatcggctttgcaacacttaacagaggagcatgaggaaattgtaatgaacagagaatatgccaattctggactagtatggtaggaatacatatacatgacgttcactagatacgtgattaatgaaac

SEQ ID NO: 238604 - DNA, 145 bp, Gossypium hirsutum
attccacggactagacgcgcacgcgtccgtctgcacttattttctacatcgccttcatacacatattatccatctgtcattaggccgggattaccaaggtcagcgttgtggatctagagtttaacatactcattatctaacatga

SEQ ID NO: 238605 - DNA, 270 bp, Gossypium hirsutum
ctcgtgccgtcatgtcttattattctttgttaatacattaacggctgtgagggtagttttcaactttggtaatagcaagtctggtatttcagtttacgtatagcctataggatcagaggtaaacaacacttgaaattaattacatgtataaatcaattatctaaactacaatgaacttccaatcttgtctcaaaattgtgtgatcatggactgggacatatgcttaatttaagccctgaaatgcagtgttcgatagatacagttattttt

SEQ ID NO: 238606 - DNA, 221 bp, Gossypium hirsutum
ctaagctctagttttttttttttttcaaacgggcaattgagatgcaaatcttcgttgagactctgaccgtctggaccatcacattcgaagtcactagttaccacacgttcaacaaccttaacgcgataatccaagactagtgaaggatccgaccatactaacaacgcatgatctaattctgataacagctctaatattgcccgaccttggccgattacaac

SEQ ID NO: 238607 - DNA, 356 bp, Gossypium hirsutum
atttgccgttacaataagtgcaatcttttacagtgctgggaactattacctgtggtgctacactttccaaagtggcagaacgacaacttacaccgtaagataagacgaagttagaactctatgggatggtcactaaccacattgatttggctgctatacatttagtaaacatcaacaatgacgaatcgcctgatgcttatcaagatactaatacttcatcatgaactcagcctttattttcatcataagagtctattatatatccatagtacatcaaccaacgtttatcaaaggaatgatataaagcacaatatcgatattctacaacatactctaccaacgattcggattacttt

SEQ ID NO: 238608 - DNA, 290 bp, Gossypium hirsutum
tagctcctccttttctgtttcattattactcaagttaatacatgtgacaggggaaaatctaatttgtcactataatactttcaaatctcttcttacaaattccatatagactatgctatcaaatacacacatcacattaactcaacaacctgtatgcatcatctatctacactacaatataacatccactcttgtctcaaaattgcatgatcatagactgatacatatactcaaattaagccctgaattaaccagttccatacatacaattgttttttctcaaaataaaa

SEQ ID NO: 238609 - DNA, 248 bp, Gossypium hirsutum
atcaaatcgtgtacagcacatgatactacctaggaaagggcacgaggtggctttcaatggagatctaagctgctggattcatgaccgtatcctaagccgaaatggatgtagcctgtgattcgctcacacgaatgcttcactgtgatcgaacttagccatgctagtcaacctgtctctgctaacactcatgctctgaattccgctgataatgcttctataagaaccagagctcctgctctatactaact

SEQ ID NO: 238610 - DNA, 201 bp, Gossypium hirsutum
tatctaaattgaaccatatgaaacaagttcagtgccccggtgacaaccaatccagaacctaatcgaaattatggcacctggtgaaacctcctaaatagcttaaagctgaaaacccctacctagtattaccttttcaaattttaagcatgattgccacgttttaacatctggatccattatttcaacagccggtgaattcaa

SEQ ID NO: 238611 - DNA, 125 bp, Gossypium hirsutum
ctttatcattgacaaatatcaaccgctaatgggaaccaggtaccatccaattagtcacgaatcttcattattgaccatcttgccatatgccgaaatggataaagctaataaattcatatctggaa

SEQ ID NO: 238612 - DNA, 330 bp, Gossypium hirsutum
gtttctttttttttcatattcattttttataggactgaggaaacaattatcatgtgatagataaagcttcaaatactggagaattagccgtacttatattattgcatcactaacatgaatgcgatagcatattaattcagtcagctacctatgaagaaacaaacctttaattcacacttcataacggcatttactgtaacacaacatatcaaaaccaaaatcatttgaaccaaccatgactgtcaatatgcaacctgcaatcttttccaccgaggccaccatccgaatccggtctacattcacctagacgcctatacagtattctatcac

SEQ ID NO: 238613 - DNA, 125 bp, Gossypium hirsutum
attaatattttctccatcaccactccttagagggaccatttcaaagtgaatcatgtcgaggaagatattacttcatgaggaaattaaccaaacgtatcatgaggaggctcattacgattcttaca

SEQ ID NO: 238614 - DNA, 212 bp, Gossypium hirsutum
ctataaatttctctctcgctatctcgcctaggacatgtctgcacttttcattgcgctaggattatcaacaacttcgagccttcaattaagctaaatctctgaactacaaactccacccccttaaaccccgttattgcaacaggcaaatctcatacacaaatcctacttgttaacaagctaactctattccatactcaccacttcaaactctc

SEQ ID NO: 238615 - DNA, 390 bp, Gossypium hirsutum
gggattatttgaggtgtgtttttctgggaacgtgtctgtggagttgaatgctaacaagaagagattgaagttagtctatttaagttgaatgctaacaagaagagattgaagttagtctatttaagtgaatgcttcaagttgaactccgcaaattgtgaaagaaagaggtttcttgagttcatccttttcatttgtaggttgtatcgtttaataatagagataagagatgggttgaaatgagtaagcccatagtggtgagaaataaaaggcaaagcccactccttgggttgtcgtctacttgggattcgaatcaatttgactaggaacggatcacagaaactgagaagtgagacacccacccaatcaaccttgtgaaaattgcgacacccc

SEQ ID NO: 238616 - DNA, 372 bp, Gossypium hirsutum
ctccctaaaatccacatgtaatacgacactctcccatggattatgagaaccagatatgacggtcgaataccgatcaggttttttttaacattgcactctccatctttctcatacacaaaaatatacatcacattttccctaaattaaatgttcatgcctctccatttccaacatgctatactcgtactatatatattatacacaaaccaatttccaggcaatcaaaataaatgtatgttgtttgtttgcatcgtgctcgaataaatggagtaatcgaactcaaaattacttctggatcattttttatctgttgttatgccaaccacgacgttgctaaccaattttccactctcatcgactgacatggggggg

SEQ ID NO: 238617 - DNA, 337 bp, Gossypium hirsutum
gtaatgagcttgcatttgtcaaaaaacattttccgctggctttaagccggcgatcttcagttcccgtacccgaatccaattagtgtgggtacactaatgctcgcaagagtacactgtttaatcaactacttgcaactattttaatttcacaggaccaattgacgtgctcaaattgatccatcactatgaaatgatccacatgataatcagaagtgcttgcatacttactgacactaatcgctacatacgtacgttgactcaagccacaagggctgcattcagtgatacattaggacagatatacaactggattgttttactgcatgtgagcgtcatc

SEQ ID NO: 238618 - DNA, 297 bp, Gossypium hirsutum
ctagccgctagacctatattctacatccttatatgtacacgctggccggggacaaatagttgaattgccattggatcgaacccgtgatcctgtgatacggtatgaaactaatcaatctagcttttgaattcgaacctggtaacatacatcgctatgtaattgaatcatgtcaagttcctctaacatgcattcaggataatggccaacacatcaatagactaatatagcagaacctgcaacaatagcaaccactggtagttgagaacttaacgctgggtacttttatcggaccactta

SEQ ID NO: 238619 - DNA, 433 bp, Gossypium hirsutum
tctagtgcactagtaaaaggttttcatgaagcttttttattataattatttggagctatagaaaagccagttgtgtgttgaattttcctaaccaatgtgtacgtattgcctcggcacttccaactaacaagacatccataaccgctcaagtattaacaaatcgaacatacatggttcaaggaatgaattatagtctccgctgagagaaacggcaggagctttagctgtattaaaaacatgccatgtagtggctttagaacataacgtagtctctacaagtcgatgagtttttgcatagaagcattctgataccaaactactcattcttgtatctcttctctacttcctccaaactctgaatttccttgtgatactagcaaatccggtagatacaccagtaaaggaggcatgcagtcgtacacataattacatt

SEQ ID NO: 238620 - DNA, 177 bp, Gossypium hirsutum
attttaagttctaataggggtgatgttttacgggcttgggaagtattatgagtgaaggaactctttcgagagtgcactaacaaagcttagagcaagtgtggagaggaagtcagtacttcttaggggttgacttgaaccatattgtcttggctagtgttcaattattcaagattgact

SEQ ID NO: 238621 - DNA, 299 bp, Gossypium hirsutum
gaaactttgttttctactgcacatcagatattgcctccggaacttgtgaaaatactcttacaagatgtactttctcacatattacagtagaccgtcaccgctttatttggacactcgattaacatgtataatgtcaatgctattatagctattgatgtgcatatttccttgtctgaatctctagcggatatacctattacctgatttatctgaacgtgatacactatcaattgaaaaatgtacttgcttagtcaaggcacatggttaattcactttactgcaatcatccacagaatttt

SEQ ID NO: 238622 - DNA, 283 bp, Gossypium hirsutum
tagattgagtgtttttatgatgtctattattacctgtgtcggggcgattatgcaagctgctatgctttgaatcttgttaaatactttaaatggtttactgtatgttatgcttattcatgttttatatgtgtttgtattgaaacttgatatttttgttgtctgtatatggaagtaaatttttaatgctactttttaattcccaacatttataatttattcatattttttatatactctttgtttttactatttaactgttctattataactgtttatttttttt

SEQ ID NO: 238623 - DNA, 181 bp, Gossypium hirsutum
atttagtgtttttatgatgtctattattacctggaactggacaattattcaagctgctaggctattaaactagataaacactcaaaatggattactgcatgtcatacttattcatgttaaatatgtgtatgcgtttaatcttgatatctatgtagattttatcttaattaaattattaatt

SEQ ID NO: 238624 - DNA, 288 bp, Gossypium hirsutum
ataactgcgattctttctaaaatccacatttaattttacactctcccattaattataagaccatgtattactttaaaatacctatcgatttttatttaacattacactctccattattctatatacacaaaaatatacataacatttatcataaattaaatatttatacctttttcattttaacattctaaactcttactatatatattatacacaaaccatattttactcaatcataattaatattattttatataattttcatattactataaattatattattta

SEQ ID NO: 238625 - DNA, 147 bp, Gossypium hirsutum
aaatcatctttataccttctatacaccttctgggtacagttatctagttaaatggccatgtcaatctcaacctctacagtgctataaaataaaactactcaatttattttatcaatgctcattcttatagttcctaacctattatac

SEQ ID NO: 238626 - DNA, 370 bp, Gossypium hirsutum
aggagacttttctgtgtcaatggctgaccaggggttaacggaaggggcttgtgccaaagaggagtctactgaaattctgaacaagcatatggagttttacatcggcggggatgactgccatttgattccagttgaattgatggattctactgctatgagaagccaaaaaatatacaagttcacagaggaagatgaagatgttgctggtacaggagatgttattcaggacttcgatttgcagcaacctgagacaccagtggagttggttgtggagaatggttgcagttcagcggagaaagtgacacccatttcaccccatgtgagtaaagaagaaaccattgatgtaacgtatgaaccaatggagcctaat

SEQ ID NO: 238627 - DNA, 263 bp, Gossypium hirsutum
tagaacagtggatccccctactgcgaggaattctcactaggattaaccttaacacacacccacacaaatccgacaggagaattccaatggcccaaacacctatattataaagcaaacaccctatatcaaataccactctactctaacctaaacaatctcacctaaactcaatcccacaacattatcttcaccaatcaacaacattactatctctattactactactacttactatataacactataaaattataataattatt

SEQ ID NO: 238628 - DNA, 224 bp, Gossypium hirsutum
catttaccttttacacacactacacacatatccgagaatgagatattccatatgcccaaacacctatattataaagtaaatcttttatatcatataccacactgctctaacctaaccaagctcaacactactcaatcccactacattatcttcacccatcaacatccttacaaaatctatcactacaactacttattatacaacactacatatttataaatatt

SEQ ID NO: 238629 - DNA, 347 bp, Gossypium hirsutum
ctaaaacatttatagatttcccaatcctcgtactaattgcggaatggtgtaatccatttatgaatatgaagtacatgatgattataattgatgattataactctaccaactctcattaacttctctcatcttcttcttcatctatacattaaattacacaaacttaatcatcttcaatttcatgtaatactgacttattgattcatttacatcgcactgtttcacaacttaataattatcctctgatatccacattcacctatttataacttaaattaacttacaaattataattaacgttattcctgacgttaatcattaccttctaaacattaattctcttattc

SEQ ID NO: 238630 - DNA, 254 bp, Gossypium hirsutum
tttacctcttttcctactagtctttgactctctccaactgaacccgtacatgcacatgaaggcacatctctcactctacttaatcgccaacatccataaccgtttacccattaatcatcttctatacttgcgatccttttccaacctttggctatcctttatcgactatccctatttcatcaatcttcaccttcgtcactccctcgactccctcactaaccacaccctcatactcaaaaacaccgatcttcaca

SEQ ID NO: 238631 - DNA, 233 bp, Gossypium hirsutum
cttttctctttaaacccaacactggcttctaggtctactgtctctttcaacttatttaacatgatctactacttccatactatcagattgaagagttataagacaatgctaataacacaccgtgaattacaacatgcaccttgaaaaaatttcttccagccaaaattgactaacttacacttacataaatcactgacattagcactaactattacacaacaatgatttactct

SEQ ID NO: 238632 - DNA, 277 bp, Gossypium hirsutum
ctttttctttaaacccaacactagcttctaaggctactgtgtctatcaacttgttcaacatgatcgactactccctcactataagactgaagatttataagacaattcatataacatacctttaattacaacatgcacttattaacactttctttcagccaaaattgactaacttacactctatttaatcatattcaatagcactaactcttacagaacatttttttcactcttatcatcttataaattccatcttcaaacccttcaccattttttt

SEQ ID NO: 238633 - DNA, 326 bp, Gossypium hirsutum
tttacctctattcctaccagtttttgactctatccaactgaaccggaacattcacataaaggcacatctttcactccacttaatcgccaacatcctcaaccgtctacccattaaacatcttctatactttcgatccttttccaacctttgtcaatctttgatcagcgatcccgatttcatcaatactcaccttcaccactccctcgacataccgcactaaccacaccctcattctcaaaaacaccaatcttcacaccttctatctcaccttcctcctacctttcaacaagctacaacacccttacattagctacaaccatgcactc

SEQ ID NO: 238634 - DNA, 287 bp, Gossypium hirsutum
  unsure (1)..(287): unsure at all n locations
cacgagggatccttttctctgcttttgattccanactgggggaggcttaaaaaccggtgctgttcaaaaccattaaaatcaaaatcccaacttacatcacatttcatccaaatctgaaatgcccaaatcaaattcatccaattccttctactatgaggatgttaaagcacctaatatatttgaaagagcaaaggaagagattcgggctgtgattcatgttgggaaaatacatccttttggtaaggaaactcattggaagcgagatgatattaaaaaaaacaccccat

SEQ ID NO: 238635 - DNA, 419 bp, Gossypium hirsutum
  unsure (1)..(419): unsure at all n locations
gaattcccaccagagaagaagcagaagaacacgaagtantttgcatgattcgtttctcatctaaaagtttagtgagattttgattaacatagaaaaaagctctctcctttttgtttcttcttttgttctctctctcatactttctgttttctttttctttttttctgtccttttcctacatttgcatgctaatttttcagcactgatgatggagaagctgagtttttagtggggtttcaaaaataaaaaagaatacatagaaagaagagaacccactagaaaaaaagagagggcaaaagaaaaaaaaaactgatcaccaccccacatttcataattcactagtctttttggtttcttgggtgggtttcctttccaattttgggggttttatgtgaaaagtcttttttcttttctttttt

SEQ ID NO: 238636 - DNA, 332 bp, Gossypium hirsutum
  unsure (1)..(332): unsure at all n locations
caccattatgtgatgatcatctggttggttggttggttgccgaaggaaggttattgcattgtcgatggantgacaaacttcatatttttcagatgatggtcttattttgttttttgctgagtttgtacacaatctataggagctttatgtgttccccactcattcatttttctagagaacatgtgtgtttgttcccaaacgcataaccaccattttgtgtgtaaaatttgactgctacattagggtttggcaatgagttgaatcctgagccgaatgcaactctgccctttacttatctgttccttctcattttatgaatggtagtaagcagc

SEQ ID NO: 238637 - DNA, 357 bp, Gossypium hirsutum
  unsure (1)..(357): unsure at all n locations
cgagtggtttttttttttttttaacataaaaaaaccttggtgggcgtttaaagctcagagtaatgtcaagaaatatgtgagattgatacaatcaggcaaacacatatgcatgctatatatatatatataaataaaagcggggcgcaaagcaatctcgctcctaaaaaaaagagaaaaaaaggataaacacattaaaaagcctnctaaatgtttttttttctttagaactcaaataaaacctgcaaatgccaggaaattaaggatatatataattaccacacaaactctagttttgatcactgatagtacattagttgctgggcagccgccacgttctggaatccaccgtcatatatg

SEQ ID NO: 238638 - DNA, 502 bp, Gossypium hirsutum
  unsure (1)..(502): unsure at all n locations
tagaacgtggtggatcgccccgggactgacatgaattacggcaccgagctatatattatgtgttgaacccctggannaaaaagggaaaggggatggggcgcttgggcagggtggttcgtttgtctgaggggttgctttgagtaaaatcagatgccaggaggggagccggatgagctgnngtcgtcagtcagggcttcttanngggccttttattatatanctttgaanaatttctttaaaagcttaacccttaatctaaatctaaggctataggtaagggactgccgggtgctgggtgctatgaagagactgctcttgctttttgggcttgtgaatgagaatgcttgcataaatggcagccatagtcatgcatgcgctttggttggttaccagattgagactatagctatagtgagtcaactagcctcttcgggagccctcaatcagttttgaacactgattcgaaactctttcagctaccataccccataccagtcttttg

SEQ ID NO: 238639 - DNA, 299 bp, Gossypium hirsutum
  unsure (1)..(299): unsure at all n locations
gagnnnnngtttttttttttttccaaccgtgtacaatgtgacacattcggttaccaatcacatctagactatcatgaaatagttaaatcaacatttattctgtatcactttcatacatattatgacaaactaatttaacacaaaacattacagatgaactcaaactaaacttccagttccccatactctttatatttataaccatgattgattttacaatgtttattacatgtgatttgtgttgcttctttgaatttatgatatcgagcagttcacatgaacattacattctttctcta

SEQ ID NO: 238640 - DNA, 442 bp, Gossypium hirsutum
tttagcttcagtttggtccattggacttgattatgttgcgggattcattcccttcgtttggctatggtgctttcttgaacccgaaaacaaggtaatctctgaaaactacctaaatcccaaggcttcattatgttgtcattgccactgttgttgttgctattccatttgcttcctcaagtcgatgttgacattttagcttcgatttggtccactggattttattatgttcgctatatttggtgcttgcttgaatccaaaatcagggtaatctctgaaagtacctaaatcccgaggcctcatttgttgtcatcgttctcattgttgctgctatttgcttcctcaagtcgatgttgaccattttgcttcaatttggtccggtggccggattaaattttttgccatatgatgtttgaagctgaggtctgagggctacccaataatg

SEQ ID NO: 238641 - DNA, 274 bp, Gossypium hirsutum
tggaggggaaacacaggctgagccatttgtatatatgcaatcatagaaccaattgctagtattctaacattgttaaatatataatcacatttacatctatgacaatcaagagttttatcagggagaaaaaaaaaagacctttttaaatgttcaccatctgcgcgaattgcgtaatgatctcgacgatcctccgaaaagatccaagagcaaattttccacgtgttcgacggtatgcttgacacatttgtcgtcggtataagcaaggtttctcccg

SEQ ID NO: 238642 - DNA, 273 bp, Gossypium hirsutum
gtcaaaccaacaattatattgttctatttccacggcaaagcgagcatataaaacaatctaactggagtcgttcggatttacatagttacaaaagcatattcccctgtgaatcataactgctctgggcatatgccaaaatcatcaaaccaagcttttgcaaattgcaaagacacaatatatttgttttacgaccattaaatatagactcaatctgggttcctcaatttactgtccaaactctattctgtctccattcccacttcatgcataata

SEQ ID NO: 238643 - DNA, 282 bp, Gossypium hirsutum
  unsure (1)..(282): unsure at all n locations
cctgcccctaaacaaactttccacaaaaatcatctttcgtattgtctttttcttcctgttgtatacctaaaagggccctgcattacaagctgcgaaaaataaataaaaaaggaaaccctatttcggcatggccagactgacaagagcaatcggacttcataacataccgngcatcaaactgtgcattgaaagctgggacatggtggtatctcaatgcactgtaatcacatttcacgaggagatgaaacacccaggtaacgtcaactgtgttcctgtgatgac

SEQ ID NO: 238644 - DNA, 235 bp, Gossypium hirsutum
  unsure (1)..(235): unsure at all n locations
ctttggcattccatatgaatctgctgcttanaaaaggagactgaatttgagcaatgaaagtacaaagtataaatacaaattttataataataaaaaaaggtctttgaaactgcagggaagtggtttcctttgagacagaaggcaaaagaaaaaaaggaagacagagtgggatttttagtttggttttgagatggcgttctgctctatgatttgttgtgggaaaagcttctatcgg

SEQ ID NO: 238645 - DNA, 434 bp, Gossypium hirsutum
  unsure (1)..(434): unsure at all n locations
ttcacccccttataaaaaaagttaaagttggtgctcagcacataaacgtaaggccagttcgaaaccgtctctgacaccagctttcgtctttcagcaatggccgccaccactacaaccacttnctttaaagccgcactcctttctacaccgtcgatatcttcatcgaccaaatcaaccgtcctcaaaacacgctttacatcatcatcgtcctcacgttattcgccgattccaaaatcactgatagctcatcatgtctctacaaggaccaacgccatcgtcgccaagatggggacagtcccttcggcagtgtctgagacgacatcgcttgacttccatacctccgttttccagaaagaaaagatctctcttgctgatcacgaagagtacattgtgagaagaagacggcatttgtccctttattggatgatgctttt

SEQ ID NO: 238646 - DNA, 315 bp, Gossypium hirsutum
aaaaatcttatacgaaaatagccctttaaatacacacagaaatttccaatttggtcaatgttctagtttctagctcttcattatcctaatggctttgtttgtaatttccttcaattttaaggctccttttatttatgtattgattctcacgtcaatcgtcaccctctaacctgtctaccacctttttccactatctctcaacggcaactcaaaattttcaacgaccggaaacaaacccggaaaatccggttcagttaagaaatcgaatcggttttctcgtgagagagaagaaacttttttgaaattcaaaggaaa

SEQ ID NO: 238647 - DNA, 260 bp, Gossypium hirsutum
ttcactagttagcacctttcctaaagcgaaccatccacaaaaggttgttaatacatcaatgtgcgaagctcaacaaaataaattttaatcaccatgctcgcttgactttatctgcatctaaaatgcacttttttttgaactgccctaactaacataatgcactttctacaaaccaataataacacagttcatctttattttgatacaatatcatatgacactatcaaatgccctatatcacacaatgcacaacaaaaatc

SEQ ID NO: 238648 - DNA, 307 bp, Gossypium hirsutum
aagaaactttcatctgccgtatcgaatatcggggcttgggcttttaacgtcggcagctccgttggccttattatggcttacaaacagctcatgttccccgcccgttattccttcgttttcgcgacaacctttacacaggttccacttttgtattacactcatatactcattatagtgacaaacgccagtgttcaccacccaaaaaaaggttccattatgggaactcctctgggtctccattgtcgccaatactccaaatactctgatgaactctagccccatactctatactacaggatattatcat

SEQ ID NO: 238649 - DNA, 414 bp, Gossypium hirsutum
cggagagttactcaacatttcaaattttcatgtcaatggtctttgttaatccctttggaatgaggttcttccatcaaagattaaagaatttttataaagattattgtgagattttgggtgtgtttgtttggttgtatttcattttccagtgtttggtagcctgaaaaccttttccatttggaaaatattttccaaaccatgcgtaaaatcccttacattttgggaaaatgtcttaccgtttcaatttctgtaagacattttcccgtgcttctccttcatccaggcatttttctcttcctgcataaagcttttttttcgggtcttggcttaagattcaccttcttgttgctgttcgtcaagattctgttgttgtttcagccaacaaagaacctgaaacgtcagcatcgaaagaaa

SEQ ID NO: 238650 - DNA, 394 bp, Gossypium hirsutum
gttttgtttttgttttttgtatttatctaaataagtaggatttgtcgtattaaaatttggaaatatatatatttgtgagaataacataacacaaatagatgtaaaccacaatcgcaccatttttttcctatgccaaatttgtacatgaatttacttgttatgaacataaacactctcgtgttatgaacataaatttattagaagccaaaattcatttgaacaaaaatgtggcactgcactaggcccattcccctttattgtgtatccgcaaaatctcatgaaatggaaactctgagtatgcaattctatttcttttcttgtatacccaatttgatccgatttcagcccaattcatgagcaactttcatgagctaatgtttaaagggtcatatac

SEQ ID NO: 238651 - DNA, 354 bp, Gossypium hirsutum
cctcaatgtcctccattgcttcatcatcatcatgatcgtcatcatcatcttgttcttttaccttcaccgcttccttcccattcctctctcgtcccaaacttggtacccattccttccctcctgctctcttgtcaatccctcatttgaccccaataaaaacacccaacttatccctatctctcaccactgctgcggcgacctccaagtccggctgcgaaaatgcggtcccctcgaaaaacccaatagagaccaatatagcagtacttgaagacgatgaactggaggtgcattgatgaactgccctggattcaagagaaggcatttgaccttgtttagttcactggttcttttact

SEQ ID NO: 238652 - DNA, 313 bp, Gossypium hirsutum
atatcaaccttatcgtaaccctctacctctattgttttccgctcgcctacttcgaactgtagtcaggcgtattacaattcaatgtccctcaacctacaacatactctctatgaaaaccctcacgctacccaactcaatctccttgcacctcatccacatatcaccagctagcattaatatcgaacagatccacaccgatcttacttcccaatcattactctgacttaatatcttaaattcaaattctaagctcacatatttagataaaattcgcttaaaatactatttcaatcacatcattcattaactcata

SEQ ID NO: 238653 - DNA, 310 bp, Gossypium hirsutum
tagattgggtttgataattttggttcgagaacatatactggattcggttatatttttgacgggcacggtccttactgtcatttggtagcaaagacggtgagagaccatcttccgttaaagctgagtgctcattgggaagctaatgtatccagtgaggatgtttttagagacttcagtttatgaagcattacctctgaaaatatgtctcttttattgttagacaaggaatctatgccttacatatattttctggaatcagaaaagcacccttatatcttctatactcttaaagagtctttccttaaggctt

SEQ ID NO: 238654 - DNA, 331 bp, Gossypium hirsutum
tccaactttctgcattaattctacactagctttggtttttctaaatcgtaataacaaactggttccgatcattttacaaggtagccagcccacctaaattgactcatacataaaatccattgcccataaactagtctaatcaaacacacatcatcattaaatctactcttattataaacaaaatctatcatcaactcataaaaccaatattcatcgatcctaatccacacacaactctcaaacttttaattaaatcctaataaaaccatacatattccaatacaattcaatctcaacacccactataacatactttaatacctaaaaacta

SEQ ID NO: 238655 - DNA, 390 bp, Gossypium hirsutum
gttttgtttttttttttttaactaaataagcatagctagattaaggcactgagaatttacagtaaaaaatatattggcactgaatttaactgggattctatacatggattttttgcagtaatctttgtttctgtatatttctcttgtacttgtatcaatctttgtatgttactgcaaaaccaattgacatcggtttaaattctcttcctgtttctcaagctgtcacccattttatcgcaacatgtattactccattcttcgaatcgatcaggtggtatttctggttgattcgtccgttatggacgacgtcagtaagattaatatcgacatttcccagatgttcctttgatcggaagctaaagcctgttcgcttgctcatgacttcgatat

SEQ ID NO: 238656 - DNA, 352 bp, Gossypium hirsutum
tttttggtttttttcttcaaggtatatcaatttagctgggtcaattatgctcgtgaaaaccactactctaatatcatctaggagtccatcaagcacatacttctgcacatctttgataacatcatctttctcaataaacccaaacatgctgttattccaacccaagtaccacatacaatatacatctccttccttgatgtcgacatcaacctcaagcattttctgcatgtagtcttcaaactactaatcttctttcacatcctttccatatcacttaaacttatcaaaatccttgcacatttgtttaactaactcatcctaggaatctgctttgccaaaattcatgactacc

SEQ ID NO: 238657 - DNA, 396 bp, Gossypium hirsutum
atgggggtcagtttgttggcaaacatgatggtgaggttgctgagttgtcaatgtgccaatggttgactacccgtttagcttcagcttcagtagatggcacggtgaaaatttgggaagatcgtaagcccataccacttgcagtgttgaggccacatgatggacatcctgtttactcggcaacattcttgactgccccacatcgccctgatcatattgttcttatcacaggaggcccactaaactgtgaagtgaagatatgggcctcttcaggtgaagagggctggttgttgcccagtgatggtgaatcatggcagtgtatgcagacattggaattgaggtgttctgctgagtctgaggttgacaatgcattctttaatcaagttttggcactttggc

SEQ ID NO: 238658 - DNA, 396 bp, Gossypium hirsutum
ggctgttggagaaagcccttgctacttctgctgggatgggttcggaactagaacaaaagaagcagaaaaagaaagaagagcagcagaggcttgatgaggaaggcgctgcaattgccgaggctgttgctttacatgtcctagttggcgaagactctgatgattcgtgtacggtcatgctaaacaaagaagaggggtttaacccttgggattatgccaacaatctcaatctatttatggatgtaggtagaggtagaggttgctttcttcagcaaggtcaagcaaactggggagggcaggtctctgattcatataaagatggatgggagtgggcgatgttggaaaacagtaattggtccttaccatatggagcttatggaggtgatcttcaagcatcgg

SEQ ID NO: 238659 - DNA, 365 bp, Gossypium hirsutum
gaaaaccacgaataataccagctagttctttccgatcagtagtgaaaaacctttagagccctaaaaaataggaaagtgaaacggtactggaagaccccaaaagagattcaacagaaccttctcccttttaccactgcctaaaacaggaaacttaacactggttgagccattcagtctggtccttctccactagcttgaaaactaggtcaggagccttctcaacccaaaagcaaggagcgggtctactacgcctatacatcgccagagcgtgcgcctgcctattaacagctcttgggacaaaaagattgagctttttgaaacctatatccaatgcaaatcgaagagctctttcacacgctcaagct

SEQ ID NO: 238660 - DNA, 420 bp, Gossypium hirsutum
tttttgtttttttttttttgtttttttttttttttatagaaagcagtgtcatggaccaggttttactgcaagaaatcaacaattatatgcaaatgttcatatttcccaactttcataaatatgctagataaacatgtatgaactcatcaccatcaaacaagatatatgtcaaccaatagcattttactctaaaagtttcctaaatcaaggaaaaggccagaccaacacggtgaacctaaaaaagggaagaagatgtagatggcagtggtgattggtttcttgttaccatagtctcgaaaaggttatcttcttatatgcctatcaccacgtcctcgaactctgctgccgctggatggctgcaccgagcttgtatattgtggtctatgaatgactttcccattaacaaacaaattccctcca

SEQ ID NO: 238661 - DNA, 428 bp, Gossypium hirsutum
  unsure (1)..(428): unsure at all n locations
gttgcatcccagtgctatggttctcgtggagcaaggttgcttantcgcagttgctatcttaggtatgagttatatgcattttatgaaggtgccaatgaaacctcagcttccccgaaaactcaacccacgacaagaagtggtggaagtggaaggaaaatatgggtgattatagttcttacaattggatcagcatttttggtggtagtgctaatggcttcctttgtatactgtggtgcaatgaagaaaggaactcgaaaagggaaggacgaaatcctgagaaatcatgttcaactacacaatagtggggactctgagaacccagatttccaggattttgaaggcttagatgagttaaaagcaaatgattcttatattgatttggcaaccatacactcagctactaaataactctctgattcaaacatgct

SEQ ID NO: 238662 - DNA, 330 bp, Gossypium hirsutum
ccgagatagaatcgttgaaacgagaactcgagaaagcagagatctacaaggagaagttgatggaaaaggaagctgtcattgaacaacttaatgttgagttacaagctgcgagaatggctgaatcttatgcgcgcaatgtattagaggaatgcaaaaatagggtccaagaattagaaattccaattgaggaaaccaaaaaatttgaaccatcaagattcgaattttttgaattcggtattaaaccacttgaagaccaccaccattcacttgattaatcttaatcttaaattgcttcttttaaaaaaaaaggttgattattggaaattacca

SEQ ID NO: 238663 - DNA, 299 bp, Gossypium hirsutum
  unsure (1)..(299): unsure at all n locations
gaacttttcagatacgagtgtagtgaagaacagaaaggggaatggangaaaagaggagaaaaagaaagtgagaagctcaaaactgagcaaaggggaggaacagtactattacaagagaaatggagaaggaagttatgcattggctcaaaagatgaaagagctggagatgatggatgttggtgatatggaacatgtattggatgttgaagaagcactccattattattctcgactaaaaagtccggtctatctttcaatcgtcgacaaattcttcatggatatgtactcagaattctctc

SEQ ID NO: 238664 - DNA, 418 bp, Gossypium hirsutum
gtttggtttttttttttttaacccaaattcggataatcgtcattaaaaagaagccttcaactcatttggccttcaaatctgtatacttcatctgtaggctgtctcctcctttgtacaatgtatatgtatataatgcaaagcaaattttcaggtaaatagattaatttgtcactgaatgaccctaaattcattcaggtgtcaacgcttaacaaaatacagcgtcacagcacaaacctaccatagctccattaacctggcaataaagggctaaatcttcagaagcaacctaagttccatacagtaccagtgaacatctctaccttaatgtttgatgtggaccaaagccatcattctcaagcagttacatctaatttgatctattgcttactaagtcaatgtttaaaaacacacacgcaca

SEQ ID NO: 238665 - DNA, 106 bp, Gossypium hirsutum
ctattaattaagagcttgacttttaaagcgggatcatggcctaatttatacaaggtacctcctttaaaatttttactaaagaatataccatctacacgttcaatat

SEQ ID NO: 238666 - DNA, 386 bp, Gossypium hirsutum
tatcaacttttggacataacctacaatttggaataatcacataattcacaaaccttaccgcaagatacatcataatcttaccatccctcatcccaacaataataatcatcatcatactaatcaaaacataataatattaataatttcccttactattaccacttatacctctttctatcaatcaaaattttctctatctaaacctctataatctcctattattttattacaacatgcatatattccaattttatctcctaaaaatcctctatcaccttcgattcccattttcacccattccatatcacttcttatcaacaaaatcctatcattttctttaactcatatactacaaactattattcaatattctttttcaaaacctc

SEQ ID NO: 238667 - DNA, 385 bp, Gossypium hirsutum
aactagcttcaacatccagcccattccatcttacagtatgttgggaccattatgaaaaacgtgcttctgcccttctttcttcttagaggattgtgatttacggttttctcaaaaaaagaaaagaggataaaaagctgagagtatcaaattaagaaatgcacatctgcggtgtagcaactgatgtattgatagccatcccttcaacctgagccctcaatatcagacaccttcatcccaatcatttcttacttctttcttctttctttaaaaaaaggtcctaggtattcaattcaaaacttggaattggcccccaataataccgatgaagaagattcttaacctttaaaaccttgggggaatcaagtgataattcatcaaccattgc

SEQ ID NO: 238668 - DNA, 333 bp, Gossypium hirsutum
tgctcgtaccgcgttcgtgaattctccgggtcgacccacgcgtgcaggaactcgtcacctggcaggagcctggcaaccctaccaagacggctaaagctaggtaccgtatcatggcgatcaatacaagagcacaagggacataaagagtacgctaaagcagagtaaattatttacacataaatccctgcttgaatgggaggagctatatagtctcaaagcccaaaaccacatttatttgcttgaaaaagaaaaagaagctgatgcttttatctttcatctaaatttacattattgcctgtcttttgaagtttggaccaatccatcaacttaaac

SEQ ID NO: 238669 - DNA, 206 bp, Gossypium hirsutum
cttatgtattaacgcatattatctctttcgtgtaaaggggatctattatccggtcaacacgttactacaattaattctatatctacaaccattttaatctacttttttcactacactcattaaacaatcttgtttaaaatataataaaaaaaatcatacactattagcacttcttcacaggttattctttccaaaactgcattatc

SEQ ID NO: 238670 - DNA, 429 bp, Gossypium hirsutum
gttctacaatcgtaattaggaatatatattgcataaggaagaagaagatgcatggccgaggagtgccatctagaaatttatatataataaatcacaaagtaaatcaaagggattcaaccaagaaaccaagtcatggaatcaaagtgcattcctagaaatgactgagttgctcaagcttacgagaatggaagaacttacatctccctttaccacttgattctatttcttcaattttccgcttcgccaccttgccgaaaccaacattacttaatttcaattgcttctgactgctgccataaccaacatcttcatccaccttatcagattcccataacacttcaaccatatccttgtaatatgaagtgcatgtaccccaactgaagcggactagtgttgggaatccaaagattgagtgtttatgatgtgcca

SEQ ID NO: 238671 - DNA, 240 bp, Gossypium hirsutum
ggaacatggggtttcaacaggaacatgatgggtcgttggatgatattgtgggtcgagatatggagaaagatgcttggatgttccttcaaggtgaagatgactttgtggcacttgagcttcaagagttggttttcgatgggcttttagatgaacttctttgtgactgattgaggagaatatgaattcgagctcctcttagtttctaatatatatataagctttgtttatagatattttctt

SEQ ID NO: 238672 - DNA, 229 bp, Gossypium hirsutum
caagcatggctttcgttctcgcggcattccttcttcttcttgtcaccttctaattggtcatcggcgtctactacttctttttaaaaactacccctttaattttttcttaatatttataaaccctttttctttaaacccaaaaaacaaaccactttaaacctctccaatactactcttgaaaccatttaccattttaaactacctatcttcaacttttctcttttcctct

SEQ ID NO: 238673 - DNA, 265 bp, Gossypium hirsutum
ctcttgcctcatgttttctgctatcattgtcactactgggaccctgcaactagccattaggagtgccctaacactatcttccttaacttacactaccccaactactacaaacactcttgcactctaaacatcaccaccacctacatcctgacaatacccttattcaacaaccacattcacctacaactatagcaacatctcctttaacagcctcaacttccacttactccactattaccgcaccagctgaatcaactgcaacaac

SEQ ID NO: 238674 - DNA, 421 bp, Gossypium hirsutum
tacgttgacccccagacatatatcatatcgctcctgagacatggttccatgttacaacgtggtgttgccggcatcggtaaccactgccacctcttacgagaagataaataagcaaaggaaaacaataatatatatatgcatatcaaatatacaaattttgacatctaatacttaaattcgtccttggaattagccatcttaaggacttccgtgctcagtctccttcaccggattaggaatccttctcttccttaattgtgtctgagctctcctcggaagctaatatctcatcattacaaacagcagactgcgggttcttgaacagatcactattttctagttcacttaatttctctttggactctcctttgagcagcttgacaacttcaaggatggtacgtcttttctcgggctgagcgtc

SEQ ID NO: 238675 - DNA, 202 bp, Gossypium hirsutum
gcgaacaacaactacaacagcaaaagaaaggttctctagttgtgaactactgtttccctgtgcaacagctgatttaccctttttcaagcattcgggggggttttgtacatgctttgttttgcattgccttgacttatatttctagctcattcggatgctaaagtttaagggttcagtttcatgtttgcttctttgaatgctc

SEQ ID NO: 238676 - DNA, 207 bp, Gossypium hirsutum
ctaacagtatcgctgaatagcggaccgtcactaaccttgtgactacgattcttctccgtatcaacaaccgcacaaatagcttcataattcaactctaaatctccatgcactttgaaatatagcctaaatcttcactcaacttatcgcaaaaggcggttaagtctaccacttggcatttttaaaattcgctaattaaataaagattta

SEQ ID NO: 238677 - DNA, 364 bp, Gossypium hirsutum
agaagattcttagaagctgaagaagatggcggcggctagctacgattacaagaacgacggaaggtgggcatactattgttccaatgtattgattcctactcacatggcatctagctccgatgtggttgatcatttcaagcgcaagttctaccaacgctatatcgatcctgaccttgtggtataggctatgtcatcatcaacaccatctgcttcataatcaacatcatcatcatcagcgaatgaaagcattcgatcacgcaatgcaagctcaaccactataagtacaagggcatcagcagctgccacttcaaatacaacttctatgcgctgggatcagcaaacaatacaatgttctgtcaatgct

SEQ ID NO: 238678 - DNA, 281 bp, Gossypium hirsutum
aagatcgattctaatggaaactcatggaacggaactgggtgaacttgtgtaggcgtcaaggattatggtgagcaacatgatgctaactaatttgaccagcatctcacggatataacatatcataacatggatatcctaggtatccttcactatatatgtaattttacaaagttttcatagtaaacaacatatcgatctataaccagaacaacatcttgctataatatcgatctgttaacagattgattcatattcctacactctgatggcatttaaatcat

SEQ ID NO: 238679 - DNA, 410 bp, Gossypium hirsutum
aacagagcaaagcaattccgcactcttccagaatctggcttagccaacttgggctctaatctttttgatggcatgcaagcacagccgtgatcaagccatggatttccagggctttttaaatgacttgcaggactgggaactttcgctcaaggacaaaggcaaaaacaagaaaatgacatctcaggcttctggtaaagaacaattgaatatcactgagaaaggaaggccaacagggaagaggtccctgaataattcttcgtcaactactagttccgagcaatatgattatttgaagaattatgataaacggagcaatttgtcaactagctttgtgactgaagagaatatgcctgatgctgcttctgagaaagaactgggaaatgaatattttaagcagaagaaatttaaag

SEQ ID NO: 238680 - DNA, 405 bp, Gossypium hirsutum
ccacagcatattcatcacatatccaagctggattacgagctaaacttggtggttctgatggatctgctaaaattgggcttcctgaaaaggatagtttgcttggtgtcagtaatcctttgaaactccataatttcatggctggtggtgtaaaatcagagctatcgccctcccaagagacaccaattgatgcttctgagaaagctaacagcttttaaagcccgttttcaagaataaaaaacctttgtaagaaggaaagaaattccaatttttctttcccgtccctattactttaaggaaccagatattccattacataaccaaaacgtccaaacatcttcttcttaacttaatccctaattgaatcatggaagtcctttggttcattcgttagattctcatcattct

SEQ ID NO: 238681 - DNA, 412 bp, Gossypium hirsutum
taagcaaccattgactttcattttattcggttcgaccacccgacacaattcccgatacaatgtgcccaacatggcaaatccccaactaagttagttgcattccttcaaatcgatgagatgtattagccccaccttaagtgtacaagatttcgatatttattgagcattcaaaaatccctgattaaccttaggatgaatgctcaggcgtattgttgtttttcaaggacagtcacgttctcttcaagctgattgaaataagcttgcaatcatttgatgtctatctggctacctttatacttgtttggcacctttctttataaatagtgagtaagctaatttcgtcccaatcgaatacggatactggccttgtaacgattggcccatcgacccataaacttagtttaaagccatg

SEQ ID NO: 238682 - DNA, 262 bp, Gossypium hirsutum
tttttaattttttgatcaaaaacacctaatttccaacaggcaaggttcaaacatggaccggctgaaaccatgtttcctgtttataacacaataacacacacaaaaaatatatgatgaaatactctcttataagattttaactatctacaacaacattcttgttcagcttatgactttaacaaataataccaaacattatcttcataattactttactatttataacaataattatacccttactatattttatacataattc

SEQ ID NO: 238683 - DNA, 418 bp, Gossypium hirsutum
attacttgctccatccgaaaatgttgatcagttgcttagggagcatgaccgtaagatccaagaatttgctcgaagagcaagacttgacaagataaaagctgggaaactgcaagctcaagcaaagcaagtgacagaaaattcattgtttgtcaccgctcgcagagctgaatagacatcattttatggtttttcaatctttgtggtaaagctgggaaaatcaggtaatctaaataccaagagataattagtttacaggatttaccatgtatagtgaacaagaaaaagtagatgttatttgttatatagagtatttgagcaaaagcactcatttatcttctttgatttggtaagctataaatatggcttttataggatacaattctctggctttgtaggtgattactacttgtggtttttt

SEQ ID NO: 238684 - DNA, 380 bp, Gossypium hirsutum
aactagtggatgctggcttctgcatgaattctgtacgagctcgaattgaaaatactaatgctacaacaagcaatagcggctaggaccattaagggatcagcaatggttgcaatgctttttataatcgcaacaaatttatggacaggatctatggcacaatcaatttgcaccaatgttctcatcagcatgtctccctgcctgtattacatacaagggaactcttctaaaccctcttcttcgtgctgctcgcagcttgctaatgttgtgaggtcaaacccttagtgcctctgccaggtactgaacggttgtgcttcatcacttggtgtcagtgttaatcatactcaagcaatggctttcccaacagcttgcaatgttgaaac

SEQ ID NO: 238685 - DNA, 360 bp, Gossypium hirsutum
ttatacatttttttaagaacaatcattccaacaacaatgggttaataaaaagaaagaagcatatttgttctctacaacatcaataatttgattataacactaaaaatgataatgaatatgaaaaatgatatatatatatcttcaacttataataatttaatcttcaaatcaacacacaatgtaaacatgtaaaaaaaataaaaaataaatcatacttataataatcactaattatgacctctctttctctctactgtcttccttagatgaaaattatatggctttctgggaagaataagaagaataaacagtgtccaccttaagcacataaacaggatagtcatcaatatcatcaatcca

SEQ ID NO: 238686 - DNA, 224 bp, Gossypium hirsutum
aaaaaggctcagcaatggcagatccagttaagaagaacgtgttgtaagaagaaatcattgcttacgcttacctcattctctacatcgctctttccagcggtcaaatcttcttcaacaaatttgttttgtcatccaatgaaatcaattttccctatcccctttggtttactcttgttcacatggacctctcttctggtttatgtttcttactcacttaaatcttt

SEQ ID NO: 238687 - DNA, 202 bp, Gossypium hirsutum
ctatatcctagaaacttgctttggcatttaatattaatgggatgagctaaatcaaggggggactatgatactctacatgatgacctatatcttttcattgattacatatgcatcactctctgattgagactacattgcttcatctgaccattgtttttttctttagtctcttactatacacaactccatctaaatttactta

SEQ ID NO: 238688 - DNA, 397 bp, Gossypium hirsutum
cgctctacaactagtggatctcggtattctgcatcatattctgcacgaggaactcggcgatgcataaaatccgatctaactcaatataagccgggcttaacaaatctgagctcccacacagcattctccacaaccttaacttgcttatatatagttaccataatcaccaacattacacatcattacgtatcccaattaccttattaacctcaacagtatactactcaatgcatgacccaccttattgcaccgcaggcgacatatatattgcacccgcctaaccaacctgactctttatagccatactatcaccaccatcaaatacacgtgctgtactacctggttaactctcctgctaaaaaacctccccaatattcatcttcacttgcgaaaaact

SEQ ID NO: 238689 - DNA, 440 bp, Gossypium hirsutum
  unsure (1)..(440): unsure at all n locations
gctattcagtaataatagaagccgcttgattaggctagagtacggagtagtgatgtatggttattaaccagctatgtttaatttgggtttggatttctcaaacaaagtggtcatcttctacgtgtcataaagataagcttcatttcaagtgatttgctgtgcttcttgttgtgattgctgtatatcacttttcattggctgctgcttataatctancttcaacttatttgctgttcttcattctcagcttcttacaataggaactctcgctgcatatcttacgcattatctggcttggcttcgttatatttntggatcagtgcagtagtgtatcgcatgtgtttgctgggaaaacctagctggctttggagccattcattgttggtattaaaccggagaagagaactttacaattgctcaagtggtgcaataaatatact

SEQ ID NO: 238690 - DNA, 438 bp, Gossypium hirsutum
gtcgaaaccacgaaaccaacaagttcaattcaggcgctgatcacttaccctaacaccccgtacgattttgactacaaatccacaagaggagagcccgtacttcacgatttgccgctgccaaaatagaaatataaggctccaaccgggaatttggaaaacaaaactacagaagcgttagaacccaacttaccgaacaatcgaaagaaaatagaacaacataatacgaagctttattgatggatcgaagcaaaatagaggagtatcaaaaaaaggtgaggaataaaagaacagaggaaagcaaaagaaaatctgaggtcaattttcctggaaagagagaggaattttgaaaaaaataaaatcaaataaaaagagagataaaaagaattgaaatgtgggacttgaacccaagaccttatacatacacccagaacatttaac

SEQ ID NO: 238691 - DNA, 338 bp, Gossypium hirsutum
aatatataaaaaaagtatagctttaaatattttgaatacagaaaagccaacttttttacattttttctcaccaatgttcaataatccattcttgataattgttcaaacttcaaagccaagcatattagaacaacgaaagggcaagggaaagggaaaagagagacaaaaaataataatagccgcaataaaaaaaggggacatttttaactcattactaggttgaccattatcaacatcatcaaagttattttgtcaacccttttaccaagggaaaatttttcaatgccgatttaacctttctaaagagaatatggtaactcaaaatgttctacagattc

SEQ ID NO: 238692 - DNA, 363 bp, Gossypium hirsutum
ctgacaattgtgatacttacgtgaaacaagatgatggggggcaggggtttaccctagatgtgcggacacttccacttgcatgacctattgggccttggcatgtctacagaagaacgcacgtttcactgtgcctttaccaaagcataatctacatatgggtctgaacaactgcactgcttctaaggcgcatcttctttatgatctttgtacaactacttgcacttctataggcttgacttctttttcttctccttaaccaatccacaaactatgctatctacttgacacatttggccccgttgatgttggacttaaagaggaaagttcagattagaatccatgagctgtgttttagggactaaa

SEQ ID NO: 238693 - DNA, 220 bp, Gossypium hirsutum
attaaccatctatggtaattgtcccaaacagggatacggctaatactgctgatggcggtgctaatggatcacctattcctccaccgacgtctttaccgtctcaatcattcttagagaatagcaaagacagcaaaatctaaacactttttctccctctacaactatctttctccttattaacaacttcaccttatcaacgatatccataatttggatcttt

SEQ ID NO: 238694 - DNA, 409 bp, Gossypium hirsutum
  unsure (1)..(409): unsure at all n locations
ggacagagggtctttgatagattgggccaaggactatgtggaactaccggaagtgatgtctcatattgtggaccctgaactaaagcatttcacatacgatgacctcaaactcatctgtgaaatcataagcctttgcattcatccagacatttcgagacggccatccatgcaggaaataagcctcatgctcgagagcagaattgacacgtcggtatctattgagctcgagtcatcttctttggcatgggctgaacttgctctttcatcatgattaattgaagctgctaaccacactattagatcaaaatacatacagttttatcctttnttttcccttcctttcaatctttgtaaatgctgttcgccaaaagaaacatttggggttcatctaattactgaaaaattccac

SEQ ID NO: 238695 - DNA, 241 bp, Gossypium hirsutum
  unsure (1)..(241): unsure at all n locations
atcaatatgcttgcagaggctccagatgcaatgttcactcacattcgtgggggggcatnatccttcatctggttcaattcattgtttacgatgttgtcctgctgaatatgccctatctccccacagtcttctgtcaattgcaatttactactcttacaattgaaaagacatggatattattaataactcttaccctaaaatccatcattccaaatgcactattttcaatggtaaaactgga

SEQ ID NO: 238696 - DNA, 217 bp, Gossypium hirsutum
ttcactaattctacactaggtcaaaattatcattttcactcacttcaatatctataggaaacggctttattctaaggcggatatttaaaataaaatataaactgttcaatattcacatgtctaatcctctacacaacaaattcttatctattatataaataatccttaaatattacactacacttacttaaaacaaaattacctaaaatatccttat

SEQ ID NO: 238697 - DNA, 402 bp, Gossypium hirsutum
  unsure (1)..(402): unsure at all n locations
gcggagtaagtggccggagaaggcacggaagcaggcgagatcaggctccgccaccacatgcacctgctccagctcagcctcaacctgaaatctccgccaaccgttacgtctttgccgccgcaacgccttacccgccacaatacccgaataccaacccaccccagtactaccagtacccaaggtactacccccaccagccgcctgtgccgttgccgcttgaggcgccttacgatcatcatcaccatcatcgaggtggaccccacatagagcccgccaattggagtagatatgcttgtggaccgatgattactccaccgncgncgtatatagagcatcaaaaggcggttactataaaaaatgacgtaaatttgaagaaggaaactntgaaattcgaagctgatg

SEQ ID NO: 238698 - DNA, 423 bp, Gossypium hirsutum
atttggccaaaaacgctatccaattaaccaaatccaaagcctgacttatctcaaatgaagtaactcaaaatacccaaaagtttaaaccccaaaataacaaaaagaagtaacttaaaacaccctaactcggatggattcaatccaaacccaatctgtgctgcgaatgaaagattccaaacaaaagagatctaagaacaaatcatccaaagcttcctatatatcagtgcaatcatctgagtgggatgggattcataaaattaccttggctctcatggtgatgtgatgacgaaaagcttacagtcgcgggaaaaagctaaagctggtagaagatgctgcttcatcgggtttacaccattatatagataaaccctagggcttatttatgatccagctataccttctaaatgatgggctaaaatttgg

SEQ ID NO: 238699 - DNA, 334 bp, Gossypium hirsutum
tataactacatgaatccttgaattccatcaacatcaaaaaccttatggggacggttcactcgaataaagtgacaaccctaaacataaactatatacaacgacatgcctacactaagcatcttcatacaccttactttttcttccaaaaaaactaacctaactaaaccctttaactactttatgaaggctctactcatctttccattacttactcctatgcatctattccttatccattccattatattcatatggaattcatcaactcaatttcactaatactatgctactaatactactaattcacagcacccatatataccttattcacatt

SEQ ID NO: 238700 - DNA, 256 bp, Gossypium hirsutum
ggctgccctctagaactgtggattctacatcaattcttactaggcaacctcttctattaacacccaatacacttctatcgagtcaggtcatctactaaccaatggataaaatctcacacaacattcatcactatactactctcatactcacctttaaatcattatctaaatcagatcaataacttctaaaatgaacccccctctccaaaaaatcaactatacatcccatatcaccatacatacactttactcataa

SEQ ID NO: 238701 - DNA, 350 bp, Gossypium hirsutum
cccattcccatgcagccaggtgttggaccgagagctttggctagacctccattctttggtccagctcctgggttcatgattggtccaggttaccctggagctttgtgctatgtgcctatcgctcctccaggctccattaggggaccgcattctccacgctttgttccataccctataaatccagagactactgtgctccctccggagatggtaactttgagggctaatataatgaaacaaatcgagtattatttcagtgatgaaaatcttcaaaatgaccattacctgatttccttgatggatgatcaaggatgggttccagtctccacaattgcagactttaaaaagag

SEQ ID NO: 238702 - DNA, 198 bp, Gossypium hirsutum
gtttttgtttttatatattaatgtatatgaactgatttgatcttatttgaatagagtgagtaaaatacaatcaaatctttaatataggggtctcatacttttatcggtacaaatatattatgtagtaaccctaatccttagggaaaggatgaaagtagaaagaacattaaatggaaaaggtaccatacaatgattacc

SEQ ID NO: 238703 - DNA, 274 bp, Gossypium hirsutum
ttctgatctatatacaatattattagaagattcatttcggaagcgggctcatataattgtgttattgggcttttgttttacgtttggattggttcttattttcttatatatacctcgggatttttcatttgtatttaatctggtgaattagctgtgtcattctgtagtaatttcaagtatcaaaattgaaaaaattgtttcttgaaaattaattataatacttggggggcctaggtcccaattagccctatattgagtctttttacaatttact

SEQ ID NO: 238704 - DNA, 391 bp, Gossypium hirsutum
gttgatgggggccctaatatctcgattaatcttcctgggtctcagagattatggtataacggcacgacagtttactttaatcgtgccctttatttatcctgaatatgttactccgactgtaaagaaaatatcgactaaagaaaagatacatttgattgtgaactcctgtatcgtaactggcatcttgtgcaaggctactagccatacttttaaggaaacataacggcatgctgtgaagttatcgtttttgtatgaatctgaagttctgacttggtctaaaacggactttactttcacatatagcgtctcttccagtaacaagttcttagagtgtccttttacagtctgcacctttatatgatcatgaccaaaaggatatgttctgtgtgta

SEQ ID NO: 238705 - DNA, 418 bp, Gossypium hirsutum
aactaattcagattagcatgtgacatagtagggtcttagggaggattagttggggttggaggttgttgaacagccagattagttctaatgtattgattgaaacaatcattcatcatttgataaaaggcttgtctagcctctccatcatggctactcgtagctggtctagagtcggatggtgctgtcccttacatgggagcaagcacattactctcgacatcgtcagctatgggtcattcaggatccatttgctatataaaaacacattatcattgtcaggattcatcacactattgttatttataaatatggcatgtatagctagactcacatatacaatgttagtcttagaatcgactaaatcgtagctctgataccaactaaatgtaacacccctaactcgtatccatcgcttaat

SEQ ID NO: 238706 - DNA, 286 bp, Gossypium hirsutum
aactagtggattctggatcctccatcttcataattctcactagttctctgtattccaaaggatataacaagtggtgtcaagtggattaataaggggactttgcaccattttttgtctgttttcatcttcattttatacacatttattgattttttccatattgttaatatcttatctgaattcccatcttaaaaagctttcctccttatcttatgaatatccacttttattgtatcattttttaacgtttcagacatttaataatgctccactttctccttatatt

SEQ ID NO: 238707 - DNA, 183 bp, Gossypium hirsutum
gcaagtttttacccattgctttttcatctaaggggtagggctcaaattaactgatatcatctacttaaattacataagctactttttcgtctcatgatactacccataaccactcaactatacttttcatagtgggaccaaccttcctgatacatgttacaacctacattcacctttacaaat

SEQ ID NO: 238708 - DNA, 319 bp, Gossypium hirsutum
gtctgccacagactacaccaatgacgctcaatgtgaagggctcacccttcggtaatctaacactaactatctcatgttccttctcaacttactctctaacaaaatcacctcctttctatcttcttaatcctattcacaaactcctctaatccactatgctttattctaacatcactcaacatatatcaccatattataatacatacatacactaaatctttccttctaaagaagccattactgacaaatacatcttacacaagactaatctgcaagttaaagaaatagtttacttaaacccttctaataatgctcaatc

SEQ ID NO: 238709 - DNA, 344 bp, Gossypium hirsutum
tggagtcttaggagttggttttggtggcctaacgggtggtaccaaaacaccggcttcaccacttccttcttcacgatcctttcctttccgtgttcaaatctctgttcctgttgaagataataagaggaattatacccttcaaatttcacaatatgctttcaatgctgccctgcatttgatgcctgtaggtgtaaattcttccttctcgtgcttttaaatctcctggtgagacaacctatttccatggattcagttaacgcttctcacatgttatacatatactgtaatgagtttatctactattttagctctgggtgacctgctataattactcattctaatta

SEQ ID NO: 238710 - DNA, 428 bp, Gossypium hirsutum
taggctctcaggtccctatataacatttttcagtgctgggttttgaacagcccgtttggtgcaatagaggttggttaataagattctcaaatctacaaacacatcaatgcaatggtaacgaaatcatcacacaaacacatacaaaaagaaactataaatcgaattttcttttctttttccagatttcacttcaagtcctcaacaaccaaacagaactttaagtaaattttgcagaactagaaggaaacatttagaaattcggttccaacaaaagaattacagctcctttcagttcgttctatcgagccattgtcacaatcacccgtacattgacattttcagaaattaattaacgctaagcaaccaaatccaagtaattaaaaaaaaacgcaatcgaaaacgaaaggatttaaactcacgtggaaaaa

SEQ ID NO: 238711 - DNA, 150 bp, Gossypium hirsutum
tagcaacacgatatgaccttataaacatgttcaccttccatggctacggttactctgaaagggccgacgaaaatttactacttaatcatttatgtctccactctcattcaagatcttaacttcaactctttccacatcaacttatctaca

SEQ ID NO: 238712 - DNA, 226 bp, Gossypium hirsutum
caacgatgtcctactactcgaagaatacctaagatgaggtttactaggatgaagaacatcacctcacccacttacacatcattgatacaatcgtcgctctatacctaacagtcggatttttgatctctgcattaagactagctactcttacgattcatcttccgatggccactttgattactcacataatgataactctatcagttacactctctaagcttatgcc

SEQ ID NO: 238713 - DNA, 373 bp, Gossypium hirsutum
aatgttttgttttataatttcgttttgctaaacatggaataggttacttttaaaagtgagaaggttacatatctaaaccaaatttataatcctaattgtcaatcctacataaaataatccattaataaaacacaccttacattacaaaaatcctaatataatactaacaaattaattccattctaacaattatactattattctgcacattttacaaattcctaacttacctaattcttctaaaaccaataaccatccattaaaacatacccataacaactatattaaatgaattctttctacaattcatccactaaaactattcttaaatcaaaaaatttctacttaaaaaaactttcatctacaattcatt

SEQ ID NO: 238714 - DNA, 436 bp, Gossypium hirsutum
  unsure (1)..(436): unsure at all n locations
gttttgtttttttttttttattcaaaattacagatttggcactgaataattaagtttctaactgacggttgatgtaggtataggtaaatttgcaatttagtcattcaactagtaataagtttacaagttgaatacccaatttcaaaaatttataaattggtcacagaactattaataagtttacaaatttacactttgatcactcaatctttacaccattactccctaatctaataatccaaacaatattgataataactcaaccccaaaccttaaagtcagtgtaaaccccatgcctcaatttaaactcaaccaactcgataatccttcattcttaactcactcaccatttcttcttcgaccaaaaccataattcaagaaaatccaccatcaagctattctcaaacaaaacanataaaaagcgaataaagaaaaa

SEQ ID NO: 238715 - DNA, 446 bp, Gossypium hirsutum
gcatcctacatgatttcagaactaggaccaatctttagtttttttttttcgattcaaaattactgaattagtacacattaaataagattctaactaacaactcatccatatatatgtaaatacacaatctaatcattatatactaatcatttttattattaaacaacaatttaaataaataaataccatctaaaccactctataattcatcattcaaattcacactttctacattataattgtacttcatttcaaactcttatactaatctaatcttccaatcttttactttatccctctacacttatcctatttaaactatctattctctaactttatctccatcacatcattatctcttccttcaaaccacattcattatatcaccttcaaataacacccttattaatatttaccaccatcaatctaatcttaaacataactta

SEQ ID NO: 238716 - DNA, 346 bp, Gossypium hirsutum
ggttcgcaagctccaacaactccactccatactggtacgaccatccaccctgccagggaggatcaacatatcaaggcagaatcaactagtaaccaccgagattgtacttacaacaaaggcttaaagccaatgataactgacatcataatcatttatttcatatttgaaccatgtcaagtctcttagattactctacttctcaagcagtgtcacctataacgtacttatactatatgcttgattctcaaaataccttttgtatttctcaaaattccttatactcaaaacttattacttaataatctaattcatcgattgaatattcctttttaaaaaaaataataca

SEQ ID NO: 238717 - DNA, 282 bp, Gossypium hirsutum
tgttgttcttgagcaaatcaagaagaatccaggtctcattttacttgacaagacggaaaaatattggccagaattcaacgacgaaaataatggtattgagcactatttacatgcttacaagaagagttacacccagtctatcaataaggtttctttctttcatcatactgatcatcttgaatttgatacatatagagacacaaagcttgctctacatgctaggaggaaaccataaatgcaacatgacccttgattctacacattcattacttgctttacatt

SEQ ID NO: 238718 - DNA, 312 bp, Gossypium hirsutum
ctattatctactttctatgttaataactctgatgagcgggaaacttaaagggtaggctcaatgtaccaaaaccctaacctggctccatatttgataccaatgtatatcaaagattgcgctaacatctatctgagagtccaaggctacttccttgctaataaccttgccacgcctttcatagcagcctatgcatcaaaatcctctctatggtccatcttctcatacattaaacaaatctgcagcactaaattaactcaaggtaacacctgtctaccaatgatgtacgctcatcactttcatctacttacatgc

SEQ ID NO: 238719 - DNA, 321 bp, Gossypium hirsutum
gtttttgtttttctgttgtaaaggtgtaaatggcgtaggttataatcagccgggggactcatagagctaccatattagccatctaaactaatcaactcatactagattcactatgtaccctatccacaatggcaaatcttcacatacactatctgctaacacactcacaaaccatacacctaatctgaatctgattcagattcatgatcattcggattcgctttctctcttccttcatcttccttaacaccctttccaaaagcttcaactggaatcaatcgtatatacccaactacaggataaccttttccactcttcttc

SEQ ID NO: 238720 - DNA, 377 bp, Gossypium hirsutum
taggttctagcttttgttttttcaacattaaacagctatcagtatcttgcttaatattacggttgcataaacctcaaaaaatcttctcggtatgatggtcttccacaattcaagagtataaaacatccaactcgaatattaaatgaaacacatccatgtaaatcgcatacatatcttgatcttaaaagataatggatggaaacctgaaactgaaagatcccatccatacatcctttctaatatacacacttcttaattaaaactacctctttctttaccaaaagattatcaatagatttccttttcagagatcactgcatattataaaaccccttattcaatattaaaatgttcatatcttcactcaccattatttc

SEQ ID NO: 238721 - DNA, 253 bp, Gossypium hirsutum
catatagtttcttactctaaactcatgtcacagagcttggttaacaattagtgacggttcacatctcaatcattttaacatgtttaaagtgtacatactacctactacgtaatagactctaaattaacttcaaaattatattatcatacacaatatattagtaataacaatcttatcaatttacaattctttcaacttcaactattactatctactctcattaaacaacaatcactctacacaatgattcata

SEQ ID NO: 238722 - DNA, 242 bp, Gossypium hirsutum
cactctcataaacaactccactccaaccctccttcacctcataatccacctacttatttttcaactcaacccttcctttctcctaatatctacaattaaacctccattcctttctctctcaaacatcaccctctttcttattctaatcatattcataccatttcttataattttttaatttattaattatcaacatccatcatactctatataatcatttatccttcaaataattcttcttt

SEQ ID NO: 238723 - DNA, 374 bp, Gossypium hirsutum
  unsure (1)..(374): unsure at all n locations
atcgagtcaattgcttcttcaaagctgcagtgacaggagtgtccctcctcatgatcagatacagtagaggataagtccgatggggaatcatcggttctcgagttttctttgttcttattgaaaaccttttcaagctgccctgcaatagtcttcactatccctttggtgattttcagacatggagctttggcattaaatatgtcttgagatagtttgcaggtgcttttaaattggttgcagtcctcgtggtaaatgtcagattgtgaataaagaagatggttggttgaattctcatgcccttttccatgcaaagaaagggttagaagaatntttcctgcatttattgagaaaaatatactgtaaattcattattg

SEQ ID NO: 238724 - DNA, 411 bp, Gossypium hirsutum
taaatgagtctcgagcttcatttgtgggaactttcgaggcatgcgtggattcagcccagattgtggcagaaacaaggtcagcgattagaaagaaaagcaagtttaggaaaaggatggagcagcttgattcctcggactgtagtgatcaaagtcagattgataagcatcctgaggaagttggccttactaacactgatcaaacgaatactgtttcaggtccaactctatcggatgaagggaatagtgaagaaaagattgattcatttgatgcaaatgaaacaagtgatgtatctcttgctattgttaaacctcctgttagtcaatcgaggaaaaagctgcttgttcttgatttgaatgggttacttgccgatataatctataatcctccaattgattacactccagatgcac

SEQ ID NO: 238725 - DNA, 376 bp, Gossypium hirsutum
agaaaagcggcagtcatgctaatgttaataaaacatttgagaatgtgtttcactttcccgaggacatatccgtgcaggaggaaacatcattatcatggcccctttggtttcacgctgctgttcctggaagtattcctttgtacattacaatatattacgaaatggaaggtgtatcaagcatcatgaaatatcgcactctacgcatgcattataatttgcaggttttaccttcattggatgtatcgtttcaacttagtactcgcccatcaagatcgcaagagttcctcttgcgcatggatgttgtcaacaagacgacttccgaatgtttccaagttcatcagttgtcgtctgttgggcaacaatgggaaatctcatt

SEQ ID NO: 238726 - DNA, 451 bp, Gossypium hirsutum
gttttggtttttgtttttttttagtaaacgaattatatgagtctgattaccattggttgtgatgtcccccaaaggcccaatttctctccagcaaaaaagttacccacaggacataagtaaaagaaaaacaacaacaaaaatgaacttccacttctaccccaaaaaagacctctgcaatagcatcagccccaatttattacacccaaaatttatagtaaaaagaaagaaaccataaaacatttctggtaaaaccttttacctttcttcaattttccaacagaagaccacttgtaaaacttgaacctcttcaaaaaatatatagtcatgacctactaatctctgttcatatctcattaataaatattcccttatcttttcttcttctcctaggttgccgacctttgttttggaatgtactttgttttagcacccctttcaagcttcttttttt

SEQ ID NO: 238727 - DNA, 206 bp, Gossypium hirsutum
gatccatgtatataacatatatctagtatccgttctaggtataactgcttccattggagaccaccattcatgtgtcaatcatcactataaccctttctaaaatataattaaatacttcctctgttgggtaccatcccccattaccagcttatcatgttaaatcatccacagaattctatcattaatgatatggctcacctaattac

SEQ ID NO: 238728 - DNA, 297 bp, Gossypium hirsutum
attgcgtggagtgaggatgccagaattgcgaagtggaggccggagatcgaaacgccttggtgatcttgagcctccgtctcagcctgttgttcaagcagagaattgggtactgcctgctcaaaacagatccaggaggagagttggtggaagaggaaggggtaatgctgtaggtgtagccaaaggaccctcaccagcggtacccacaaggccaagagctgctggtagaggccggtgcattaggttgacagattttgaccctgagctttgtcaagttcttcctgaggctgcacctttggc

SEQ ID NO: 238729 - DNA, 441 bp, Gossypium hirsutum
gctcagatcagcgggctttttggttcgtaggaaacctggtttgaattaacgccgattccgaaaccggaaagccgacccgtacctagtttttacggaaggaagccgacgctatcggcgacggtgagaaaataaccccactcatacaccctctcgatactctattgcaatcaacccgggtacgctcccgaggaagcggtcccccatactacctgcctgagcctcagataaagctacacgactgtccgaaacgactgaaagagttacgtaacctgcctcgcaaacaggtacacacccagaccccacgccagggaaccaacgggaatcgaagccctcaacggcaatcgaagccctcaacggcaaccacaatccccagccctcaagtacaacacccgccaccgtaagacttcgccacacacacacgcgcgcgcgcgcgcccacctc

SEQ ID NO: 238730 - DNA, 460 bp, Gossypium hirsutum
tgtctcagaatcagcggactttttgggtcgtaggaacctggtatgagggagttattcgcaaccttcgtaaccttcaaagccgcaagggaatgaccggttaaggactaaatagcccttagtctaatcccggaagagtgaatctaagagaagatcgtattcgtaaaagtcgaaacagtcaaggtcaaattcgtggtaaagcttacggaataaaagaattcgataagcaaactagaaaagttcgcgaaactcgctttcttcgtaagcggcctaattatcgtcctcagtagggacaaaaccgaagaagtagaagaaaaattgaagacaataaaggaggaagaggaaacggtcaggaaagtagaggaactgagaaaggaagaggaagtagtcaaaccaagggagtaatgctcgccggaggagacaatcaaagtcaaggaagtatcagaaaggaagaggtgaaacg

SEQ ID NO: 238731 - DNA, 392 bp, Gossypium hirsutum
aaacacagttacaatatttataattctttatgttttctggggggccattagctttctttttcttgcagtttcaacaaacctcagattcaagggaagatagaagtattaataatctaagttttgttttttggggtatgtttgtttagggttttggagatcggattacagtgttttcttcttctgcttcttgctggtaatggagttgaagaaggacaagcttgtcaggttctactctgatggaaaacgacataaagaaacaccatggggaaagaatgacccatcattccttgagaagtcatcttctgggtacaagatttcattttcttcagtgctaaaaccggagattggaatggatggaggaagaaatagacttcctgaaatggggaaaattg

SEQ ID NO: 238732 - DNA, 205 bp, Gossypium hirsutum
gctcagatcagcgggctttttggttcgtaggaacctggtttgagacccacggctttcagcttcggaaaccttcattcgattccgcctccaatggaacccgggcggtccagagccaaaccggccgtaaccaacgagcttgctattgagccgttaccaaacacggaggccgcttttacaagtacgaccaaccggtattcaccttcgt

SEQ ID NO: 238733 - DNA, 445 bp, Gossypium hirsutum
  unsure (1)..(445): unsure at all n locations
tttttggttcgtaggaaccctggattgagtcgaacttattacccaaattgggacgggattcaaaaaacgcttgtccggttcctcctaaacgtatttgacggtaagcagaaaaaatctcggacttaactaaatcgttttccttaccatccccgcgatagtgcccactttggttaccatttgtaggctgctgatacctctgcctcctcttctgttatcgtcctgcattccgtaatatcggctactacgccgacagacacactgagaagagggtggttccgtccgagctagcttaagaggccgccctcgttactaggcttatcgctatcttttccaacttcaccggtaccagttaanggtccgtgcactaatactccacatttccctcttcgtaccgtcctngtnacctcctaatcggcctaaaccctgctctccgtgcctgataacg

SEQ ID NO: 238734 - DNA, 410 bp, Gossypium hirsutum
ttttcattatccagcaaggaagtgattgactctgcagagtttacgcaatgagatcgcatctcatttatttttctgcagcgttgtgttgggtagatttattattggttcctcttttttgaaattcaccttctggcagtgacacatatttatatctaccctttcctttaatatcatattcaagtcttctccctctctctctctctctctctctctctctctctcgtagcgaagcggctctttcttttgacttctagcttataatgaagtaaaatggagccaatgttacccaaatcccacaaactcccatgatactacagtggggatgatatttttggtactcccaggtggatccatggtagcatatgattcacgtctaaagtttcagtctttgtaagttgtgtccatctatc

SEQ ID NO: 238735 - DNA, 209 bp, Gossypium hirsutum
cggatccgggataccgaccctaagcgaggtagaaccggcaagggaaagagctattccaataccgggggtaccggttattctgacctttgaaaactgattattaaccgttaatcgactcataagtccggcggcaccgataagttcgcgaccgaaagggccgagaaagaagtcgtagagacgaataagaagctacctaaacacgtccgggc

SEQ ID NO: 238736 - DNA, 416 bp, Gossypium hirsutum
agcggactttttgggtcgtaggaacctggtatgagttacaccacccggtcttcgaggcctctaaatggaaccacgggttagaaaccgacacacggagcgtaggagctacctctcacaccccgccgcgtggggccttcttcccccgggtcgagctcgaataaggcgccgtataggtaacctcctgcgggccaacagaccctaaatgggatttacggttaaacaccctagagagcgtcaagagctcagcttgataaacgccggaattagatttaaagtcttggtccatcgtaaagtaagcgtccgagtacttccggtcttaaaatgtcaaaaaagtctttaacgcgttctccggcgacgccgccaagctaaagtccaaataacccctaacgacgaatagacctaaaagaaaagtttca

SEQ ID NO: 238737 - DNA, 448 bp, Gossypium hirsutum
ctcagatcagcggactttttggtcgtaggaacctggtatgagtgtactagaccagcccggctctgaacgcggaacgcctccgttgaccctcccgccctagccggaccgctcgagagcccactcgcagtaacccccgcgacggacctaccgtggtagtccgtcacgaagcctccagaatgcgaggaaccggtaaatcacaacccctagaactaacccccgaggttacccgcgaccactacgtagaaaagtaatctcgtagaaacaagggaaccaacagcctgacgtaccctttagacggcttccagttgcgctatcaacgcgaaactcggacggaaaagcgcccccacggcgcctatagtcgtcgtcgtcgacgagtggaagaacaccgctccgccggtccccgagataacggaaaaaacagcgtgagaacatcccttctacacaatcg

SEQ ID NO: 238738 - DNA, 422 bp, Gossypium hirsutum
cgcggtgcttgtctcagaatcagcgggctttttaggtcgtgaggaacctggtatgagacggtagcccccgtaatggcgactggagtatcgtcggctgccgggtattctaaacgcggcgtgaatctctcatgtaagtctttccacacgtgatacttgcgggagtattcgccggggacgggctcatgagttgcgcgtgctaattagtctgcgaaccgggatgtctagtcctaatgggattccgatatcacgtctgaaaaggttaaactcgttaatcagtgtcgtcatcccgacggagacgacgaccaacgtccctgttttactactagaaaagatacctacgtgttaagtctacgtcgctacaaattcgcctatactacgtgcagacgaccacacatcgttcgcacgtcccagaaatcatccct

SEQ ID NO: 238739 - DNA, 460 bp, Gossypium hirsutum
gtctcagaatcagcggactttttgggtcgtaggcgcgcccggaaataagacagtcgggcattcgtccaccccgtaccggtcacccgcataacgccgcggcttccgattggcacggcggaagtctaggcacacgccattagcggtattaccgtctagcggcatcctcttaaagacgacatgaaattctattggagtacaagaagactcccgagaaacgtacccggcttcctcctcggtattactcgctcactcggaccatccgctcccgccgcctgagcggcgtgcgtcgtcgccgacagcgtaagagaagaagacgccttcgggacagcgaactccgcctcttggcgccgcgccaacgtttcatcgctcgtgacagatccctccaataagcctatcactaatcccgtggtaacaatcggtgaagtacaccgtattctcgtgaggacgatacatgagtcct

SEQ ID NO: 238740 - DNA, 394 bp, Gossypium hirsutum
  unsure (1)..(394): unsure at all n locations
ctccatccttcctcatttttcagtgccgctatcttcttggaagaatcaaatggcgaacgaaggtgccttaaggtcggctatagtatggctatcggtgatcatggttttagttgggttattcacgttttctttgaagaaaattatggtaacttacgcgtttgggatgctcggaattagtgggatactgttgcccgactgggatttcttcgatcgtgatttttctcgctggccttatccggttactgccgacgaaagagctgctcttcaagctcgaagatctggattcaaaaggtacaggatttacccaatgagactaattatttacaccancanttatagcattggcccttacaaagtgtggattttcgtatcaagttaaatccaagaactctac

SEQ ID NO: 238741 - DNA, 435 bp, Gossypium hirsutum
  unsure (1)..(435): unsure at all n locations
tttttgggtcgtaggaacctggtatgaggaatccgtccaaggatctccccattaagcttaatcctcggacggtacccttacacgcagtcgtcctcgaggaggaaataacggagaacccgccggccctaagccccaaggaagttcgcgtttatggcccgggagccgtcaacgccgtaaccccggaactgcgtctcacagagggcggagacccttagaaatccgtaaatccgtacctagcttacgactactcagccaaaaggacggaaaagagaataaagggggagatcgactcggccgcttcacgttacggaggtccctagctctcgaaagagtccgattaattacctttagagagcgagaccccgatcgaagctacgagcctcgcggagtaactcggggtaaaacacgtagtttcccacgcnctcgatttcccca

SEQ ID NO: 238742 - DNA, 460 bp, Gossypium hirsutum
  unsure (1)..(460): unsure at all n locations
ttcggtgcctgtctcagatcagcgggctttttggttcgtaggaccttgttttaattaggccctccattttattaggaattctcttactcatcatgcggttcctgccctgtgggccgcttataaggataatcctccgatcgagataaggactgggtagcctgcgtagggtatgtgtgaggcgaatctggcggaggtaagccacctggcggcggacctccctgcggaaggaaaggccgctgatgtgacgaacggtgagaggagttgcggtgagtctaagcctaacacaaaggcggctgttgatgccgtgccctgacatggagggcggagaggatggtgcaggacatccacggcccggcgcgatgatgcggtgtccatcggccttcntggaaagacgattggtggccttaaaaaacgttacgccgaccgacccatcgagtacacgaacggtacctacggccaa

SEQ ID NO: 238743 - DNA, 383 bp, Gossypium hirsutum
ccgctccgaaggaaaggccggaacgacggggggagaagtagtaataatttctggtattcccgcgccgcccgtcctggcctatttagagaccgccctccctccttccgcggataccgcgtcattcgccccatgcgcggaataaggaccgtagaagaagtcggcatccgtttaacacgctgcatgaagacgaagaaagcttggaaggcccccatagcccaaggtggccccaatttacacttgcccacgagtacgacccgcacgagacccgtccttctcgcacacgacgcaatctccggtcgattaacgaagcaaacgcaatcacaaattccggtactaagccggcgaccgactacctgaaaaaccaacaccgccctgaatttccc

SEQ ID NO: 238744 - DNA, 429 bp, Gossypium hirsutum
ctcagatcagcgggctttttgggtcgtaggaacctggtatgagtcaattacgtcaccagggcccgggaccgaaaccgaagtggagtgaacggaccgccgaaagctggaccaccggaaaccggggaacctgatagaaacgggaagtgaagatgtcgatagcgacaagagcaagtaacggctgctcttaaatagggtccacaaagggaaggaggaagattttaaatcccggggatccccttctcccggcccaaccggtgttatcgttattatccctgtcgccagctagtcgaggaaactcgccgaccggacgcccgtctagccagttaggctctaaccactctaaaggggaggcctcccctgaatacttccctaggaggaagtacggagaaggcataattgctgaccgtaagaagagcatgaggaagaaac

SEQ ID NO: 238745 - DNA, 324 bp, Gossypium hirsutum
tgcattaattccgaaccagcaagttatttttatccttacaagtcaatccatatggtagtttattcatatggtgagcgtgaagacacttaagcatccatgcatcttaatctcacacattgtgatttacccacccctagctcaagaacccataacccgttcttattgattagtcagctctatcaaacctccttccttttttttcaccgaatcgtactattactgatcccacatgatgctctgccatcatcataaatacctctctatctctatgcattaatccataagaacctatctaacttgtactcaccttatacttaaattcaa

SEQ ID NO: 238746 - DNA, 422 bp, Gossypium hirsutum
ggggctttttggttcgtaagaaccttgtattaaggccccccccccccccccccccaattttttaaacccaatggggcgttatcagcccaggcccgtagttaccccattagattaaattaggcattaaaccttacgatagtccaacaacacacgcagagcttacacggccaaaacgtacttccaccaaactctacaacactataatatttcccctagacccgcctctcttaatctctctcatttaagacggagaactcctccgctacggcgggagcagggagcgggagccttctctctaactatacccggagcgaagaaaccgtgagacgttaaggtccgaacagtacctagtctcgtcttcgccattacgcccgtccttctaatttctctcactctcgtaactccagtctggagatacatat

SEQ ID NO: 238747 - DNA, 450 bp, Gossypium hirsutum
tgtctcagaatcagcgggctttttgggtcgtaggaacatcgtatgaggagccgacccccacgacttccatatacaaacttcatcagggagtttcacccacccggttccgagaccacaaaaccgaactatatctatattaatatcccacgttaaccgccataaataacctgaacacataaccccctatcccgaaaccccaccatatgaagtaactcacgccatacgtctcgacgtaaaataaagagttcctacagagggctcacattcatagtacaaaaaaccagcaccatagaccacatacaccatcgaacgtccaggacggtacattattcgatctatcgaccaggagaatccccaattctgaagggcgctttggcatttaacctaattcacaacgagctacaccataacctatcggttccttactcataatgctacgatcgggaaaat

SEQ ID NO: 238748 - DNA, 420 bp, Gossypium hirsutum
  unsure (1)..(420): unsure at all n locations
tcagaatcagcggagttgttgggtcgtaggaacctggtatgagcaaaagtcagtaacactccgccggacctgaagtcgtgagggagaaccgttgatcctgggcgggtaaggctcccttaggaagactagagctatactagtatcgttaccgttgggatttcaggacacacggtcttggagcattcagtttacggttagccaattgagaaagtagacgctcacagccctggngcgtccccatctgaaacagccatagggaagtaaaataataagagtaaagtaatagaacacctagatagtacagcaatagccatccggagatacccctagccagggatcgcggaggagacccacgatttaaactcaacgccatataacgataataacggtagtaatgccaggaacgaaaacnctagagtg

SEQ ID NO: 238749 - DNA, 254 bp, Gossypium hirsutum
acatgacaatggatttcacacaccttataagtacagttgggggcaagagaggtctccaagaagtgcactgagtccacgaagtgattcccttgatttagccattgatggtgtggtggcaacctccattgagcagctttatcacaatgtttatgagatgcaaagctctgatcaatctccatcaatgtctagttacggatcttacggtgaagaatcgaggatcgattccgaattacgccatcttgtcggggatctcg

SEQ ID NO: 238750 - DNA, 355 bp, Gossypium hirsutum
cacttaaaattaaagtaattctttccgaaggtgagatggcaaataaggccagttgtttgcaaagacaaaaagttaaaaaacgtagttaaagagtaacaagtttatatatcttaattaaaacaagcatatgggctcacaaggaccacctgtatatataactttgttttttttatctctattctcctcaggctcagggtgtatcttattcccaatcttaactaccagcatagaataaacaccaacatataaccaaacacgccctttctttcttccccactatgaccaacccaatatctgcagctgacaactgaaatgaagggagccctttttgcctatatcttgcaattgcacccct

SEQ ID NO: 238751 - DNA, 423 bp, Gossypium hirsutum
tgctcagatcagcggacttgttgggtcgtaggacacctggtttcaggtaaccctccccggcgcttctcttctgaacatactcgcgcgcggtcgtatagccggctagaaattcagtaaagttaagcaccacccggacgacttagtcgaggccgcaaatacgtccgaactctccgtagaagtcctagacttcgaatttcctctagatattagactagaagatcttacccgaaatacacttctgacggtcccagaaaaaacctcgcgtacgccacttccctaattagccgggaagaaggatacgttcgattctcgatgaaggcagacactaaccccccgtcaggcccgggagccgctcgtcgaaaacaacactttggggttcctcgctcgaccacccggttacccgaggtacagacgcggagcatc

SEQ ID NO: 238752 - DNA, 244 bp, Gossypium hirsutum
tttttggttcgaaggaccttgttttgaggaattaggcaattggccccttaccttccgaaaaggaagggttcccccgattagtaaccagattattccgaaattcctaattcctgaactaacgattaaacgccaacgcaagaaggcttcaaatttataatcgaattcgaaaacttaccgaaattcgaattattcgtaacgaaggtaccgtaaaaagtattgaccacaaacgacgccgataaattac

SEQ ID NO: 238753 - DNA, 227 bp, Gossypium hirsutum
ccccccccccgtgtatttgtccccttcggacgagttcggcccccaaggccggcaggtccttccaactttaattccactttcttaaagtctgttcaattggccttcgtatagttcctccctcctaccttcaacgcggcaatccttggacggatgagcatcctactagaatccccctgtacaactttctctacccggagctcgacatgaaaatttcctatccgccgtct

SEQ ID NO: 238754 - DNA, 225 bp, Gossypium hirsutum
aagctacatcctctccacctaaaacaaacaacttatcggtcgactttctcaaacgggagtctgtcctacacactatcccttattctacaactatcatatccaaaaccaaacaccctgttccatccacatattcagtactcaaccattattatacatcaccacttacacgccttcatatgaacacatcccttcattatcactattactcatcatacaactatctac

SEQ ID NO: 238755 - DNA, 367 bp, Gossypium hirsutum
cgctacgggaagggactcaacacacagctggccgtgtaggcaccatagtggaggagaaaagcaaagaggtgaatggagagtagactctaaaattaccctacctacgctccaatactttaaacaacacggactgaccatcgaaagtcgtaagagtccttggcctctctaatccacttaactgactctctagagacgccttggaagagactcatagaagtccggacgtcgccggggaaggcgaaaaacggcgggaggtcgcggagtcataaaagtcaaccccggtatacaataacactgagctaccgaaggaagaagcgaggaatccattcccaccgatcgcgccgaaacgcagctataacaagtccat

SEQ ID NO: 238756 - DNA, 419 bp, Gossypium hirsutum
ctcagatcagcggactttttgggtcgtaggaacctggtatgagttaagaaccgcctctgccctacgaaggcgtataagcatgcgaaagtcttaaccgataccgatcactaatctgacaaccaccactagaattactgaaggcacgctaaaagtagaagtgacaagtaatctccggacggttagaagcactacgatataagcctccgctagttcgcggagctgaacaataacaggttcaccgccttccgtggaccgacagtacggagcccacccaacgacatacccgaacccacctgcgagggagtagaatctaaagcgaataggaaaaataccgtgcggaagagcgacaggggttataaacctggaaagaacgcacacttccctaacccttaaaacggaattccgaccggcggcggaaa

SEQ ID NO: 238757 - DNA, 459 bp, Gossypium hirsutum
  unsure (1)..(459): unsure at all n locations
tctcagaatcagcgggctttttgggtcgtaggaacctggtatgagctgaaattgctctctatattagtccctgctccctagtagcggttgttattatcgtaggtatccttcccaaagttgtatcttccctcatattgctgacactcctactgattaaactaattgcttctaaattatgtcccatactactactgcttctatggcacctgttgaccttaaaactatcgacagtctactacgctctcataaagattaatgttactgctgttaagacggggatagctttcctgttagccctcgagatgatactgtccgatccttacattcntgccccttagaaagaaaagactctctccgtcggctatgaagagcataccgcgagaagaggatggtacccacctttcccaccggacgacgtccccaagggaactaaatagaccggcgccaccggccggggcc

SEQ ID NO: 238758 - DNA, 392 bp, Gossypium hirsutum
tcgtaggaacctggtatgagctcgtcttctccagccctttcccccgctttccgcccacgggacgtccttaatctacggtcgttgtcgacgctcagccttggcgtcctgctcgagggtctgtacgggttattgatcattgggtttccgaagaagttcctagcgtgcccggcgaaactgctcaactgaagactaccaacgactgcgagatcggaagactttgacgtcccagacctgccatcccttgcgatgagaaagtcacgagggatgtgactgaaggaacgaatggctaaaactccgacggaaggaatacaatcgctaatgaactttaactgtgtagaagcggacgtcgcggtcgacgacccggaggaagaaatggccgccatagttgtggc

SEQ ID NO: 238759 - DNA, 349 bp, Gossypium hirsutum
gcgacttgccgttcctcttaatagctactctgccgcaagctattaatcgactagcgagggcaatatacataccgaaaagaaacacttctacagcagactgtgttacacaatgcaatgactcaaatgattgcacttattcgaactaaaaaaatgaaaaagaaaaatcactaaaagaatgtactgcaaacttagattaccaatagaaatatgaatatgtataaaaatctcaccaacttcaatcttgatggaatgcaaaacatgtgacctagcaaatcacactcagacatgacatgatcatgttacacaacctttgcaataatgctataaaatcatgtcctatattattatg

SEQ ID NO: 238760 - DNA, 306 bp, Gossypium hirsutum
cccctggcttcattaattcctcactacacatatacaatatttacaattatctatattatctgtgcacctttaaaactgtggttgtcctcctattcaacaaccctcatatacaaatctcgataaaactattcacaattcacttcctataatttacactattttaatcatcttcatatactcatcttcttacaactacaactcattatccctgtcccttctaatttttcttaatactcacaacatttcttttcattacttctctagaaactctacaatgaatactaccatttttaatacttttatcca

SEQ ID NO: 238761 - DNA, 469 bp, Gossypium hirsutum
tggcggtgcttgtctcagaatcagcggactttttgggtcgtaggaacctggtatgagggcgcaaggccaccgcgtccgaacgggttcgctgcggaagtctaagggtatcctaacgacggcaaacacctccccgaaacaacggagtcgcgacgccatacgtactaccattgccctaccgtacgcaacacaatccgaggcggggcggggcggggggtacttccaaaaagaacaggtcatccccaggttcgccccgcacccgagacgaaagaaaaccgggaaacgccgcgtagccgtggccatacgcccaagcccctaaagcatctccccctcacaaccccccccaatgaatactccgcaacggatccgcagagccgcatgctcagctcccccgctattagtcttatcagaaacgtcgcgccaaacgtaaagggacagaaaaaactaacaaacgccacccgtcccactcggc

SEQ ID NO: 238762 - DNA, 468 bp, Gossypium hirsutum
gtctcagagatcagcggactttttgggtcgtaggaacctggtatgaggaaaaacatagaaaaagaagtacacacggtaagtgagctggtcgcggaagccgatgtgtgcactcgtggtggtgttagaggtggaagtaataataggggtagagaagtaattatacaaatctgagagaaagcggattccccggcccgacaattaactaaggttcaaataaggtgttgtccggggcattctctcatgtaaggcccatatacccgatattgcataagaaccccggcgcccgcacgactaaacacctaagtttagtaagccgtttgggaacgtcgacccttatccgcccaaggttggaaccgaatttaaacgggaagactttgagcgcgtcagcggaagaaagcggctcgctatcagtaatagaaaggtcaactctgagaacacgcggtccgaaattccgacggtaccgactgg

SEQ ID NO: 238763 - DNA, 291 bp, Gossypium hirsutum
tggcggtccctgtctcagaatcagcggactttttgggtcgtaggaacctggtatgagaagtcataggtaagtgtcggcctcctgtttcgacccgttgagaactaattcgcaattcggcggatataccataacgcgcccgcgatccggaagacttaaagaacaaaccctccgaaacccaaagtacatccaagagattgacccagattctaggcaccttcaattcctatatcccctacctaacacttcacctcacagacataacgtccgtatccgaaactaaccgcaaacacc

SEQ ID NO: 238764 - DNA, 466 bp, Gossypium hirsutum
tggcggtggttgtctcagaatcagcggactttttgggtcgtaggtccctgtaattagtagaatgatcgcgacttataacactataataaactggaggggtcgaccttagggtcgtttgctcagactgtagagtcccgctcctcctactcgttacacttacattagctggcggtatgcctagcacgccgtctacggaataggattacaactgatttcggtccatcctctctttggagacttccactgtccctctcgttccactcgcctgcccctgtcccctacaatctaatgtataggacataacggtaagtccccgatttgtgactaagttgctggcccacaccattctttacgttccgctttaagctcgcgcctttattagggcccgtccgcatcctgaccttatgctaaggttagtctcatgcaccaggtggcacgtgcctagatatataaatccttactaata

SEQ ID NO: 238765 - DNA, 470 bp, Gossypium hirsutum
gcggtggttgtctcagaatcagcggactttttgggtcgtaggaacctggtatgagagaatacgccggattccccaactccggaaatttgggggagcctattacgtccgagtccgtcgaggcggcataagaaataacagatttgaacgtgaagacagagcctaggttaaatatagaagacgatttgtataagaggaagttcgacactctaagagttaaagagccatccggccggtaatttaaggctctttcttgaaagggctctttctcaacggccctagatccttgataatgcactcccggcgactataaggctggtagtagtattattattattaatgatctactactccaagacggttcacacatctcctctatagatagagtgacaaaaacacacaacggccaagaggaaaagagtccgttgccgctcccctttcaccgaaataaccaacaccacagcgcactccca

SEQ ID NO: 238766 - DNA, 232 bp, Gossypium hirsutum
ggttgtctcataatcagcggactttttgggtcgtacgaacctggtatgagacattcctccacttatcatcaccccgtaattacggtgccgcatctaacgtacggggcggtcaccgactaatatacatataactcattttattgtataatacctactctacgccatatatcaaatactatttctacataagactgtccttaaccccaaaagcttcctaatcatcacttcgcta

SEQ ID NO: 238767 - DNA, 351 bp, Gossypium hirsutum
gtttctttatagggtgctgacttaacaaaagccgtagcgttaccagtgtgggacacatatacatcaacatctaaccctaatcattttccttttcaagtcctataatttcaaccagtaaccattcctgtctaccatttccttcctatcaatcacattattctaaatccctaagtaaaaatccttaatagtatattcattcactataagtctcatcatattatgcattaaaacagcataaagcaatatccatttttatctatcataatactacaactcatttacttatatcatatctattcattaatcattgctctggtactacatatcattatataattctatttatcacaa

SEQ ID NO: 238768 - DNA, 411 bp, Gossypium hirsutum
caaacaaaaagttcgaatgttcatgttaaacttaaacgcatctagagatatcaattgatctttcaaagcacaaacttgtattgctttcacaccctcaaagaattcgcttgaaatttcaagcgaagtttccacaaaataatcaccaacaagtaaaagaaatttgagatttgggaaaaccactcctttaagaagttcatcggtagtgcttgaaactttcatccatcggtagtgcgtcaacagtcccaaaagaaatctcatttcttgaagatgttatccacaaagcaaattggcgaaccacatcatgcattttgacatgccattctccacaatctagtaacaaaccagggttcttgaggatctcaatcgatgcaagaacttcgcttctaacgtctttaattgagtcgatgcctt

SEQ ID NO: 238769 - DNA, 390 bp, Gossypium hirsutum
tggcggtggttgtctcagaatcagcggactttttgggtcgtaggaacctggtatgagtggtaagttcactcattatcccgccggaattctgagtcggagttaacacatcggtggttacgccggttaggccgttaagactagcttaattgttttctccgacaaagctcgctttaccagtcgcgggacacgcataggccccggggttatcgcgaacgccgtcaaatttaaaaagggctaaatcgccgtagcccccggatcgggcgttgccggctccgttgttgtcgaaggcgtaagggcccgcggggtcctctggactactgtcgccgacgcgaattttagaagacccgaagaagtcaagaggcccgggaccatagaacccgcgaacttaaa

SEQ ID NO: 238770 - DNA, 467 bp, Gossypium hirsutum
  unsure (1)..(467): unsure at all n locations
tggcggtgcgttgtctcagaatcagcgggctttttgggtcgtaggaacctggtatgagacctaaagtccctaaaagaatagtctttcttttgcgcgtgaaatcgaactaaaggattatcgcttattattagtcggtttagggtggtcgtgaagaaggtccctactctcgctctcaaaatcataatttatcctcctattggtgatgctacggataccttttagacttaagcttccgctccttacgggagaacacgttggcagtcttactaggaaacggcgggatcggggccggctccgggcctctcttaaaaagtttctgcctgtcaaagataccgaaacgaatgaagaagaaattaggacttccgggcgttataataaaggtagccggaggtacgcgccccataaagctagactcgagactagaaaatctgcgggactcgacaaagccggttcnttataaatccata

SEQ ID NO: 238771 - DNA, 219 bp, Gossypium hirsutum
agcgggctttttaggtcgtacgaacctgctatcagacctaccgtccctaaaagaatagtctttctttcgggcgggacctccaactaagggatgatcgcttattattactcgatttcaagtagtcttaaacaaagtccctactctcgctctcacaatcataatctatccccctattcctcctactacttatacctattaaacctcaacttccactcttta

SEQ ID NO: 238772 - DNA, 426 bp, Gossypium hirsutum
gaagaatcagtgagaggggaagagagttgagttttcctgaatacgggtgggttcttttcactgtgttagattatttagaacaaggaaaaacgtctttctttttgtactctccattttcaactgaagtagttcagctgccgcatttaggggaacctctcttcttcgaagtggggactttttccttagatgcaacctgccctaaatgccttatctttgtgttgggtacaaatagaaacaattgttatgtcctcctggtggttcaacatggaagattttttagttcaataatggtttcactgagcctaattctgttgttgatgctgcttatgccaaaggggttttctattgtattttcaatggaggtcaatgttgaacttaaagagtggagtggtattctaattgatcaacgatttccaggtgttctaa

SEQ ID NO: 238773 - DNA, 470 bp, Gossypium hirsutum
tggcggtcgttgtctcagaatcagcggactttttgggtcgtaggaacctggtatgagacggtcgagagcggaaggtaggtcgaccccgcctcggcggccggtgacgatagactcgacgaggagacgcccgagacaactagcagcgtaacccttagcggcgcttctcttctgaacatacttgcacccgttcgtatagccggctagaaattcagtaaagttaagcaccacccggacgatttagtcgaggccgcaaatacgtccgaactctccgtagaagtcctagacttcgaatttcctctagacattagactagaagatcttacccgaaatacacttctgacggtcccagagaaaatctcgcgtacgccacttccctaattagccgggaagaaggatacgttcgattctcgatgaaggcagacactaacccctcgtcaggcccgggagccgctcgtcgaaaacaacacgtt

SEQ ID NO: 238774 - DNA, 419 bp, Gossypium hirsutum
ctttcttccaaataccatggtgagggtggttggggactgtttcttcttcttcttcttcttcttctcaatttaacacggttttgaatatatatatatgtatatatgtataaaagaaaatccttctttatatttatatttttcactcttcaatttctccttcatttccttgcttaatttcccataaaaatcttttacccaaattttatttatttatttcttcttttttctccatttggttcctcgattcaattttcttgaaaatccagaagcaaggtttctatccctttcttggagagcttcttttatttgtctatttgaaaaaaacaagagttgttagatctcaaagcctggatctttgaaagcagagccttctttttcctccttttttggtctaaaagttcatcttttgattttctttt

SEQ ID NO: 238775 - DNA, 341 bp, Gossypium hirsutum
tctcagaatcagcggactttttcggtcgtacgaacctcgtatcagactccccttcctacacaataccttccattacaatagagggtctctcaagtccgggaaggacctcgcatcccacccaagaaaactcccaataactcaactttcaattctactaacactgtcaccaatcaactacctagcttacaccaatatcaccatttcaatatcaaaacttccccttacacattaacatccacttaactaaccacacttaattcaaacatacatatactcgattaacattcatatccctcaccattcctcccacaataaacctattttccaaacccctacaatat

SEQ ID NO: 238776 - DNA, 461 bp, Gossypium hirsutum
gcggtggttgtctcagaatcagcggactttttgggtcgtaggaacctggtatgagcctaccccagccggccctaactaagaaagaggaaggggggctaccccgccccggaagaaaaacggcgtagatttccctaccaagtagcatcccaataattctcggaaatatggtcacccacggaatagaagcaggtgggaggtggtaacccgagacaaccggaaaaggctacacgaaacacgggaccagcagataacaccctcggtacgggcacgcattaagcccccatcccaacggtaactttaacccgacgaagaaaaggaatcccggggccaaagccggccggttgcccaaaggaggcgattgggaaccgggcgtaagtctagagtgcagcgagatcgtcaacgaagacacatcgacccctcccccttaaccagatccggtcatctaagcctagtgcgtcccg

SEQ ID NO: 238777 - DNA, 413 bp, Gossypium hirsutum
attttgttctaagaaatagggttttaattacatgttgggcacggttttaacgttaatactccttcttcacccagtacgtcatcttcctttctctcttccgcgccggccatagtctccttcttcttcccttgccgctgtggactccctttagtcagcttcttgtcagggactattagtcatcaggagagtcagacgttggataatgtgaacccttttgcgacgagagttcgaggatgtcattgagagatgcgataatgatttcttggacgataatcatgatcaagatgagcatagtgaaagctaccaatcccatcaagccgttcatgagagtgactcatattaatattaagtggctcctcgaaatacaattggtgatgtaccattgtactggtgcacagatgaaaaacatattg

SEQ ID NO: 238778 - DNA, 185 bp, Gossypium hirsutum
gattaggatcgtaagaaacttaaatcttcataggaaatgggcagcgtttctttgaaagtatacaaggtgtacttaaagttcctttttaaacttccggttcactaactgatcccaaactcttttgaccaaatattccattcctattggggtacctaccgaacccgaaaaatccttttccctttcca

SEQ ID NO: 238779 - DNA, 404 bp, Gossypium hirsutum
atcacctgcaagaaaaggcctattcttccatagcaggccgaataggaaatatttcattattagtaacggatagcattttatacaaaggcatttatccttccaatttggtgtacatttcgtctttatgtggagtagtctatacaactttacaaataattcaaagccaatatttgaaaccaaccagataaaaagtcttaaaggaaccaaagaaactaaaattgcacattattcatcactcactccattaccaacttgcacacatgggctctgtgacgaacatacacataaatactccgagacaacgtttacgttcctaaacatggttcaccgtcatgtatgatttttccaacaccgcatgttgtccttcacaaaatagaacatgagcagacagtctttctgggtga

SEQ ID NO: 238780 - DNA, 186 bp, Gossypium hirsutum
aagctgcatattatctttgttagttccgacaaatgaatggcaagtttatataagaaatgcgatcgttttctttttgaagtctggttatagtttttggggatataaaaatgcattgattatttatgcatatcggcagttaactttatgttctagcttattactgtcaactgtagaaataaatctaat

SEQ ID NO: 238781 - DNA, 444 bp, Gossypium hirsutum
tggcggtccttgtctcagaatcagcgggctttttgggtcgtaggaacctcgtatgagactaaaattgatacacaggaccttagatcgcgatggggggtcctccagctccgctaaaaaactcgcatcccagccacaaaaaacaagaacaactcaaccgggacgtccgccaacaccgacagcaaccgaagaactggagaaccctaattgaccagtcaaccgtcaagggcccacatccacagagcgaccgacgaaacaaacaacagttcaccgaccgacccgagcctctatccaatttgcccgttcttactactcctttctacggtcatcgagaaagcagtcgtttccgtcgtcgccattctcgacctcatcattacacccgataaaactactaataaggaaacttctatcattgctgcgcacgaagactacaagttaaatccacgc

SEQ ID NO: 238782 - DNA, 463 bp, Gossypium hirsutum
tcgttgtctcagaatcagcggactttttgggtcgtaggaacctggtatgagtatacccaggttcttgccgctgccttcgtaatagagtagggcaccacgtaaaggagcggtaacgactaaggcctacgatccgtgatagaaactaaaaattgactccccggtctatccgaaagactctaaactcgaatccgtctcctcctctgccgtcaaagccattggcggcgtattcaataagtccctcaagacaaaggcggcgaggtcgcttaccgtctaagcctcgatcgcaactctatagaactagaatctcgtaccgagggacgtacataagaagaagaaacctccgttctctgactcttgcttcaagaacatttgagtcacttgtacaaggtccattaagtattaggtactcccgaagattgaatgggagaagaagaacgaaacgcatccattaacgaagaagcac

SEQ ID NO: 238783 - DNA, 448 bp, Gossypium hirsutum
tggcggtccttgtctcagaatcagcgggctttttgggtcgtaggaacctggtatgagtaaatccttaaaaagcctacccgtagatagccgagcgatggtctaaaggaacggaacggcgttccgcagggtcccaaggaagacttaggcacccctaagtacacacgaaacgagggaacaacgtcatagtcacagccacacgtgacatagtcgacggaacgcaaaacaagagaaacaagactacgacaacacaatccgtagcccctctacgtagaatcaatcctctcgaatagtcggcttataaacggggataatcccctactacgaagcaatccctcaccccacagtacgaacgaaataaatttaaaacccggaaaaaaaaatccaaaccaaaaaaaaaaatctgagggggggtttggcatttaacctgtttcacagcgagctgcaccat

SEQ ID NO: 238784 - DNA, 467 bp, Gossypium hirsutum
  unsure (1)..(467): unsure at all n locations
tggcggtcgttgtctcagaatcagcggactttttgggtcgtaggaacctggtatgagtatcccgccggagaactatccaagaccccgtgttggcaggccggaggctacgtagtggcatcaggccccgccggagtattccggatgactgttatacacacagcagagggaggcataatttgaatccacataattacaaagagcacgcgttacatagtattgaacccaccgaggatctcctccctctacccaataaaggtaacacttgaacataccacccattaagcggagctcggagtataccgtacataaacacccgacctccggggcgggtaatcattattcgatacgcgggagtaacggctaaagttccatacaatcgagaccgcgagcgcagcatgaaacaaacgtttcaaaatattcnccgcctctcataccaatggcaatggcggttcctccgaatgtacgaa

SEQ ID NO: 238785 - DNA, 299 bp, Gossypium hirsutum
gttaagttgaagggaactgctggaaacgtctgcggtgaagacaatgagtgtggcagtcaattttttgattctccaggcttggaggatatggttagtggtaggaggtcccactacaccgagggaggaagccctgtgtttgatgattctgatcaccgcgtctgtgatcatagtcatccaacctctttatcttctgattcatttctggagggagaggtttgtaagagagtagttattagtcaagatgcctgtactggtgagacacaatcatctgattctgactcttctgaagaagatgaaaa

SEQ ID NO: 238786 - DNA, 470 bp, Gossypium hirsutum
  unsure (1)..(470): unsure at all n locations
tggcggtcgttgtctcagaatcagcgggctttttgggtcgtaggaacctggtatgagagtcgaagaaatctcctaacggtcgaaaagagtaagggcgggactactggaggaatcggacactcgggaaagcctaccgcggaagttagcgtaaaagagggctactttatccctgcccccgcaagggagcttattgctcttgatttcgccaagggaaaatccgctgataatcctaagaatccaggggcttacccgccgccaggggacacgcatgattacgagagcccggctaaggtaacaaagtaagccgacgcggcgaccctggccgcgggctaaacgtagccagtagactaagccaagactaccgtcgtcaccaaagaagtcgggaacgctaagagaccccctttactggaacccggaacggatgcggataagaataacgtggccgagttagtanaactgatacctgtaac

SEQ ID NO: 238787 - DNA, 467 bp, Gossypium hirsutum
tggcggtcgttgtctcagaatcagcgggctttttgggtcgtaggaacctggtatgaggactaccgtcgtcaccaaagaagtcgggaacgctaagagaccccctttactggaacccggaacggatgcggataagaataacgtggccgagttagtaaaactgatacctgtaactaaggtctaaacttgctgcgtcgccgaggtcgaagggactttccatatccacgcgttcgtcaatcgtcccgtaggtcacccctccttcataccgctgtagttaggagttattctctttttaagagataaggcggccacctcaggcgacggaaacttcaaagtcgcccctaattacgaagtcgatactggaatgcatattactaaagtcgctgacgattttagaatagtgaataagatctcacctactaagttccttaagaatattcatctacccaatgagtctactgtttcgcggg

SEQ ID NO: 238788 - DNA, 424 bp, Gossypium hirsutum
tggcggtgcgttgtctcagaatcagcgggctttttgggtcgtaggccccagaggaagtcgccgcctccttctcacggacgttcgagcacccctaggggaccaggagattacggaaaggcgcctccacgcccggtttcttcggaatcggtaaaatgtcttcggtcaaagtagccgttatcgagcgtggaataatcccccctaacgccctcctcgtcatcccagttctaaagcggtacggggagagcgaatgtacggcctggcgtccgcccgactccgtaagagtccacgtatttagcataacccccaccgacgagaccgatctctcccgtaacgtttgcggggtcctcggcgagtacgagctactcatgagggccaaacttgaatcctccgcctaggcagacggcgcaaaccacatcggtataaa

SEQ ID NO: 238789 - DNA, 314 bp, Gossypium hirsutum
caatagagggatttaggcagttgctggatgaagcatcggaggatattgatcatgacaccaattatcagactttcaaaagaaaatggggaagtgatccacgatttgaggctttggaccgtaaggatcgggggcttctattaaatgaaagggttcttcttttgaagagggctgctgaagaaaaggctcgagttatacgtgctgctgctgcttctagttttaagtccatgcttaaagagaaaggagatatcaatgtaaattcccgctggtccagggtgaaggatagcttaagggatgatcctaagtacaagtgtgtt

SEQ ID NO: 238790 - DNA, 464 bp, Gossypium hirsutum
  unsure (1)..(464): unsure at all n locations
cggtcgttgtctcagaatcagcggactttttgggtcgtaggaacctggtatgaggccccccccccccccccccataaaagaaacaggactaacggttccacacacggacgacacacaagaaaactatattaaccataccataaaactaaacccacgctatcaacgcaatacgacacacacagagacactcaaaatcccagagaaaccgaaaaccgacaatatttaaacaccactctggagaagaccagaggtcatcttttctactattagcgagagcgaaaccaagggcagttaacgctacaaagctccgaaaagtcccgaacctaacgtattaagagagtaaccaaagagattaatacggaagagtacaagaagatagtggaaattggtaaagtagaattcgtcttggcagttaccgtangagaaggagtaacacttcgcgttacggctttggatataataaa

SEQ ID NO: 238791 - DNA, 431 bp, Gossypium hirsutum
tggcggtggttgtctcagaatcagcggactttttgggtcgtaggaacctggtatgagtccggcctagatacccggataatggaattacgcgggtcggaatgagggcctagctataaccttcttccacgtctttttctaaaagacgtaggtttgttagaccttatcagacatcttatggctcacccccgctcatccttgcggaccgccccacgacgcgaacaacgatttcgaaggcggtcatcatgtaagaggcgtaagggtagtcgcccgggagaatcctaagaataacttatcccctgatactcctatcgaatacttaatcatccatcatgaagatacgtaatgagtcacacctcgtccgggtttatcagggcgggtatttcggagcttgaggtcaacggaagtcgcggcacccgggcgtaccttcggta

SEQ ID NO: 238792 - DNA, 473 bp, Gossypium hirsutum
tggcggtgcgttgtctcagaatcagcgggctttttgggtcgtaggaacctggtatgagggagccccatgctcgaccgcaccctcttagtagtggatgcgcatattaaacggttgcgcagacccgccgcggcggccagaccctaagacggcgcttgatgtaagtaagaagaaggtcgtctagaagaaggtcgtcgttgtcgtaaagagaggagggaaggttgtcgtactccttaaggtggtagtcgtagtgattgtggagaatggtgccgacaacgtcctcgacaaagccagtacgtcttagacacttgactggattcgcatcggcgcctctcgtctgtacttctcccttagagacacctgcacagagcttccactagccatcccttatggatacgactccaccgccgacctaataccggagtccaaccacggtagatgtcacggcccgtcaggaccaaacggccgcgggaaac

SEQ ID NO: 238793 - DNA, 417 bp, Gossypium hirsutum
aattaatgaaacaagaatagagtgatccagaaagtagagatgtcaatactatgggaaaaaagcgagacatggcggtggctagtgaggaggacaagggactcgaagccgttcttcttggcctttgccaccctctgcggcgttgttccgggtgtcattggctacggcgtcatgcaacttaccaactcccgcaaccctcacttggaggcccggctgcgcgaaaacgcccgccccgaatccctcatgatggggaaagtgaaccaagagcgattagcggaataccttggggagctccagcgaaagaggatacaaatgatcggtatgtagctgctttgaggggagagacattgactaggactccttatcagagaattcagcctgttccaaagcaaaacgctgagaagaacaacagcaacgaga

SEQ ID NO: 238794 - DNA, 377 bp, Gossypium hirsutum
ggcggtgcttgtctcagaatcagcgggctttttgggtcgtaggaacctggtatgaggggaagtagcaaatatctacggccgagacggaatcgtgcgcgaacgaactagggcacgcccgccacgatcgcaggctccaaaagccgcgcatcgaccttagcagatcgacacaaaaaccccttcttacctgcgtctctaggcgtaacgaaggtaccagccggacgcaaaacaccgtacccaacccaacgggcccggccggacagcaacaccggcccgaggtcaccgcttctctctcacgaacgccccgagaacccggcaccgacgcaataaccgtcggtcccccctaagctaacgcggaaacccaaaaaacgccggcccct

SEQ ID NO: 238795 - DNA, 247 bp, Gossypium hirsutum
tcaactcctctttgtatcatcagatggaacaatattaggtgcaggtttacacaacaatacgatatttacattacaaacagaaacaatgccaatagaggttgctactacatccaatctctttgccttcaaaattctgatgcctctcacacaacatacgcaatcttctataaattgaaacaacatatactaccttcttatgcacaatatatccttatctaaaaagtcaactacacattcattatcctta

SEQ ID NO: 238796 - DNA, 394 bp, Gossypium hirsutum
tgtctcagaatcagcggactttttgggtcgtaggaacctggtatgaggcccccccccccccccccccccacacaaaaagtagggtagccacacatgaaagagggtccttactcaaataccacgtatacaaatctcaatcatatccggaacactaagccttggggtctcaattcgcgcattgtccaatccaagcacgctaaacgttcctcccaaattttatctctctctaaattctaccctacaccggtacaattatcctaatcgtatttataactaatcgacaacattcaactcaaataagtcgatactaataacttccggacgaatctgtattcctcaatcacacttctacgacttccgattgatacccggtatacgttaagtctctccttta

SEQ ID NO: 238797 - DNA, 432 bp, Gossypium hirsutum
ggcggtcgctgtctcagaatcagcgggctttttgggtcgtaggaacctggtatgagtcacccatgagggccacgtttctttatacgttacctgctggtccgatccggtcggctgagattctatcgaccatccgacgaaaacctcgatcgagtgcggacaccttcctattattatagttgaatgggaaaccgcgagagatgccaaggaaaagccgctccataccgtttccgatcacgaataggagtcagagattctaaaaataagtctactagcagagaagagtcacgagccattcgacggctaggccaccattaccggcgtcgaatgccctagacgttctgaagcgtccccttaattacttccgaccggcacggaagtcgtaagtacttacgagatcatacataacctaacaacgaagcgtgacgcggacac

SEQ ID NO: 238798 - DNA, 442 bp, Gossypium hirsutum
  unsure (1)..(442): unsure at all n locations
gtctcagaatcagcgggctttttgggtcgtaggaacctggtatgagtcaatacggattggctgacaactgttgttgcggagaagagttccaaacataagggcaaagataaaagatcttcggaagaagttccgatgtatctcctgcgttgtgaagatacgctgcatgaaacatcggagcctaccggggatgtggcgtctggtccggtcgccgtcatttaccctccttgcccggagttgtgatcgaatctcgattagtccatgtggtcttggaaaaaaagcgcaagtaataagagatcggtgtatgcggtagtcaggtacgggtccaattgtcctgctaggaggaaagatatcgtcttctccgattctaccgncaggaagcacgcangggtagccaaataaggagacgactacaaaaatccggtagccttaggcaccccggtcg

SEQ ID NO: 238799 - DNA, 409 bp, Gossypium hirsutum
atcctatcacggaccaagcaatagaaaaacttgggcagggtgttgacaacgaggtcacgagagcgtttatttcaatggaattgcatgagaagcttgaatcacttaagttggagttatcccgagcctctgataatcagacccttaatcctaatttgaaggctaaggcggataaacttatgcatgaatttaagcaaaatttgtctagaccagtgacctatcttggtttaaaacataagctcgataagctaatcatggttagcagactcattgatcagaaagagaaaggtgagaaactgaaagccgcggttaatcagaagattccattcgagatcaatgaaaagttggaacaattgcaaaccgctcaggctaacttatctaaaggagatccactcgatgaacatttggtggc

SEQ ID NO: 238800 - DNA, 426 bp, Gossypium hirsutum
agcaaatgggtgaaaatgaccttaaagagctagggatggctatgtatccaggtgcttaccatgttacagatgagaagatttacaatttgtgtctgctaacaataaatttaggggattcgataaaatgggttgtgatcagggtgtcttctagattcaaatccataatcatctatttatgtgaatatattgtttgggccctaggaagaagacacttctggctttgctgcttgtaacagctcattttttgtgatgacagaaacagtggtttcgagaccacaatcccgatggaattttgaaggaagaatagccattgctagggtttgaaggttcgattagcttaggtgtgtgcatgtaagtgatcccgagccccatttttaatgattattatgtttatgatatagttttagcttaatctagctagcctgg

SEQ ID NO: 238801 - DNA, 468 bp, Gossypium hirsutum
ggcggtgcttgtctcagaatcagcgggctttttgggtcgtaggcccccccccctccaatatataacaatacctcccccacaacaatatataggaagacacacacgaaagaaaacggggctcaaaaactatagaaaaccgagaattttacacgcgttttttccctaatacaaaaccacaatgctctagaaaaagagaattagttacttattcaagaacgttaaaattagtcgagcttaaacgtttgagcctacaacgacttcaggagacgacgaatttgaaaatgaaggtcccgacgaggaattagccctcctggaccccgtcgtcgacggagcgctagtcgacgggttaacattaagagttggggtaggcgtatgcgctggaggcacgctggctttgaaaacggttcttggaaagaggattccactgacccgacagatcgtgatcggtccggatgcacgcatcgtgtc

SEQ ID NO: 238802 - DNA, 235 bp, Gossypium hirsutum
  unsure (1)..(235): unsure at all n locations
ctcagtcaancacacttattaancaanntctatttaactgaacacacactgtctcaaaaagtacacttcataccaaatttggcacacccaaatatcttttcacacacttaatttctcaaataatctatatcttcatatatatatattataataccccttccattttcaatttatatatactattctatttaacaaattaatcacccaatatcaaatccaaaaccatatcaatatt

SEQ ID NO: 238803 - DNA, 396 bp, Gossypium hirsutum
  unsure (1)..(396): unsure at all n locations
aaatataagcnatatttcatataaatgaaaatttttttcactaatgtaatacataanaaggcagagcgtttttattaaatactagggaaaatatcatttnttttaattgctttgttagtgttttttaccaataatgactttttttctctctcttttttgttaataatttttttaattttcccaatatgttaactaagaaaatttacctaaaaaaaataaatttattgcaactcatttcatttatctttacatatatattaaccatcaatttttgattataaaatattttctatctttatattacttctcttcattattgactataacccatttttcttatcttttaatactctaatctgccatgataatccttattattcttcaccatttttaaac

SEQ ID NO: 238804 - DNA, 452 bp, Gossypium hirsutum
taattttcagtttgtttgaatataaaatacaatttttttataaaaaaatattttttttaattaagtcgatctgaataagacacgctcttttttacataatgacgaaacactacatataaaatttcaagtctatcatatcatttatctaaaactattttattaatatccaaaaagaaaagtccatctctttttttaatcatacatttaagtgtactcgctttttaactgcattataaacttttcacctattattacattcttttatcacacaacttgataattcctcttaatcaaattttttcccttataaaacttttctaaattaacttcaccgccttttatattaataattttcacaacctttaatatactttattttctcccttcttaaaaacctacataattttcaataacacattttaattttctttattctcaataaactctcattt

SEQ ID NO: 238805 - DNA, 394 bp, Gossypium hirsutum
  unsure (1)..(394): unsure at all n locations
gacaaanaaatgaattaatttaataacactccaatgtttaatccatatttagcactcaattcttatggatgttttttataatataacaagtcaaccccanaaaataaacaatttcaaacatgcaaatctatttgtttctcttggctcaaaagcatatatacatatacacaacattgttatatacatgacaacatatatatgcatttataatgatacatatttcattcaaagaaattattaaatccaccctagtaaactcaataattttaactgaaacaccatctaaataatcccatcaaattcacatatacattcactacacacatcatattccaatcaatacactatccgttcattcgtacttttagccctcttcatacaccatttttaaacc

SEQ ID NO: 238806 - DNA, 417 bp, Gossypium hirsutum
  unsure (1)..(417): unsure at all n locations
acaaccaatacaccaanttttttatatatgcatgctctaggatctcatacaaaactttaaaaatcattcaggccacatactttanatcttataaatttttcacgtctatcatcataaatatcacctcactaataataatacacaataaatcattacataccatttattcaaaacaacactaaataattaaattaatctcccaccattaaatatgcaccaaatataaacccataactcctataaaataacataactaacctcttcactaaaaaataatatacttatccttcttccttgcttcaaatatcatattgttaccctaatttatatataccccttttatcaaaaaaaccttcttttcaaccttttccctcaacaaacaacttttcccttttcaaactttctttttaactccct

SEQ ID NO: 238807 - DNA, 375 bp, Gossypium hirsutum
caaccaaacatatcccaatctatataaacaataaatcccttctaatccggaaaagttttaaacttaagggggcccaacacaatcctctctcaaataatacaatataacgtttaactaacctattctctctattataaaagtcccatatcataacatcatcccataaatcactataaaaacacatccttattaatccaatcaattaaacattacaaaactttttcatcaaattttaaccactctttttttttaaaccatcatattgatcaaaacccattccatatctaaccatcccataatcttttattccgtccacattttaatttcttcactcttgttatttccaactatacctccccttacatccccctaaaa

SEQ ID NO: 238808 - DNA, 391 bp, Gossypium hirsutum
  unsure (1)..(391): unsure at all n locations
agttactacctggagctggaatgggctaagccaagcatgctaatcttttggacattcatgtgaccaactnttgatctcttgatagtcgtcaaagccagggtatcctcctgcttccctttaaattccaggatttctcctaaaacttgctggcttcctttaagctcaagcctttccacattagggcctggcctagaatgaaatttaaccgcttattgaaagagtccttcattttcttctttccaccacgaaaagcgccctttacccacccggatatcatacctttgggtcctggttctaattgcacccattgatcataagtgattacctcaggtggaaaatttctataaatctcacagaagttctgattgtgaattataactctgtaagaaaa

SEQ ID NO: 238809 - DNA, 319 bp, Gossypium hirsutum
aaaatgtgattttcttaataactaattcaagcttaaataatacaagtatggcaatctccactcagcgagtgtatttatgcaccatggacctcaaattccatgactcgacaatgatatatgaatacaacaatataacagtcacaagcgtcaacattattgcaaaaatctttaattcctacattttgcatttttcacccactcttcatccactccatctaattacatccatgccgtacaatggatcttacatcatcaacccaaatacactgcacaaatcatctataatgtgtggctacgttacaaaagttgaactaaaatg

SEQ ID NO: 238810 - DNA, 413 bp, Gossypium hirsutum
ttgcgctggaattggcaattatttattggatgatttgatcagcgtaccacaatcttaaaaacggcttgttatttttaaagataatcttggaatatcgaaagaacaatctacattgcatcattcattgatacaatttaaaactgtttttaaccattgcccttaatacagaaatttttgcatggccagaaaatgtaagaaagaatacaatttgcaaagggcttcttgatctgatggtaatagttggcaaactagtaatgcaagagaaaacaaaatccttgcatcatcacactgtttcaatcttgattgaaagaaaaactgagatcttatttgtgtataaatcaagttgtattgaaatgctggggcttttaaacatttgacaaattttttactcctgatagaacaagaatagtttt

SEQ ID NO: 238811 - DNA, 278 bp, Gossypium hirsutum
tttgttgcaatcaaactttccatgatacttttacctttaaaaaaagatcacatttcctggatgcgttacatccgcatagtggggaaaatatttaccaacatgatttacaaacgatacatcatataactttcgtattataatccaccaccatttatctttaaatttacatatatatacacttttttttcaaatattgttaaccttattattcgttacttacaattccattccctttctaacatttccttttcaaatctttcaaactctatatatttttt

SEQ ID NO: 238812 - DNA, 440 bp, Gossypium hirsutum
tatgtgcttacgtggtgcgtgtgaatatgatagaagggttaggatgaaggaagggagggaagaacagggcgcgactctgaagcgcaaggggacgcggagagcctcctacgacaagggacgtacggacgaagtacttgacgtctattaactagtcttgttatgttattttgggttccggtactcttgctcctgttcctcgcactcatcctcctcgtgaataacctcataacacgtctcacgtctattacttctacctaaccctctatgctaaagttgcggacgactatgcaaattcccggacttatgtatcttaccttactactatccaacacgtccgtcaatacccctctttaattcctaacgcccagaccctacattgcgcctttccttcctttacccatcaactcccctccgtcgccttcataccccatctttcctaa

SEQ ID NO: 238813 - DNA, 225 bp, Gossypium hirsutum
cttttggtcatcgtcatcatccatgagtaaacgacataattcagcagcttcagcagcctcaggttcagtttcttcttctgcctgagccttatagggacgtcttctcatcttgagccccttaacagcatctgctttgtcaaccttgttattgttgttaccttcttccccttcttcgaattcctctgcatcaagcaaattttctaggtcgccagcaaaggaatcaag

SEQ ID NO: 238814 - DNA, 424 bp, Gossypium hirsutum
cataatacagatgctatttattatgaaaaaatatataaagaacaattaagaataacagatctgtcatgttctttactgcgagtacaatacgtagcagtgtttgacaaaggcactcgctccctcaatctctcaggatccaaccgttttgataaagcacatagtcttgaatgaatgataatatacaaacatataattatatgaatgaccattgcattaaccatatctactttatactgtaccatgcacattgcgtcttggaataccaccaactataataagactaatgcttacgaactgttaaccgatgaacaattcattctttggatcttattcacaagcacgttaacttgctctctgtacaatctattcacgtctacaatatcatcatagagtacctataactcctcatggcgtttacccatta

SEQ ID NO: 238815 - DNA, 454 bp, Gossypium hirsutum
ttgagtgcaatggccttgtctagaatatctaccatggtatagcagctctacacatgagatactcatccgttggagcatcatcactgacaaaaatgcagcacaaagcaactcccatccattgactatcatttcgaacttccagaggcaaatttatcttaaaccaagactcacctctttgttgactaaaccattctgcgatttcacttccaggtagaataacatcaaacatttctcttgaatttccaaaaacctgcaaaataaaacttcgcttgtttggtaattaacaccatgaataattataagacacagagaaacagagatattaacgaacctttagatgttttttcagcaatgttaaggcaccgatgttctcagccaatctgaagcaattaacacctactatatctgaccaataacttgaccgataatttgaattgtaaacttttgatggatt

SEQ ID NO: 238816 - DNA, 293 bp, Gossypium hirsutum
  unsure (1)..(293): unsure at all n locations
cgaattcggtnggcagccnncgggggtaatccacttttagttcttagagctgtgtccgtccatccgtcggtggagcctccggggctttggtgttccncnttttagtgagggggttaatnnttcgagctttggcngnntaatcatggtcattnnngctgtttcctttgtgtnngaaattgtnntatccgctttcacaatnnntccacacctaacataccgtagccntnggaagccataaannngtgtaaagcccctgggnngtgccttaatnngagtgagcctanannctcaca

SEQ ID NO: 238817 - DNA, 467 bp, Gossypium hirsutum
gtttattttttttttcttttgtttaaaaaggagtgatacaattatttctacttatttcgcaagtatatagagtagtaattagttgattggattaggtcatataataatacagatatgttataaatatcaaggcttgccaggtttcttcctagggtcgtgctcgtgcttttggttagccccagtatcatcataatcttgcattccacccagcatcatcagcttcctcactgtcctcatttggatcatcatcatctccttcccaccctgttcaactgagtaatctgcagcttgcttcatgccaccatgaagcccttcttcaaccatgccttgagagaaaggcatgaggaggagcagagacaccagaagaaaagtcttgaaccaaggagttcataaatatgcagatttgagcttcaaaaataagttgtgataggtgatggaataaggactgacaatggttgatttgcaac

SEQ ID NO: 238818 - DNA, 383 bp, Gossypium hirsutum
ggaaatggcaaggcatacatgtgttatggaaagaattttaagattggaaagattttgtaccgcaaaggtcggtgtaacatcatagaactacagataaatcctcctgcacagatttaatctccttgacctaacacacagacacatatgtcgccactccaacacataagttactaacagccaccagttcggacaaaacacaacttcagcactatacatctcagacagacaacaagccaaatctgcataaggagtctctcccctcatgcaacataatttccccatggcttacttacctctttcgtcgtttggcattcacctttaaatcatatactggtgaaggatgaaacccattctgagatcttttcagatcatccttaaaacat

SEQ ID NO: 238819 - DNA, 391 bp, Gossypium hirsutum
gttcagattatgcaacgcccttatcctggtgactaactgagatagacacacactggacgcaaaactgagcctgggagactctaatggggtgcagactctaccggcacaaagacataagctcgcattaatcctaacccaggctgtcaatgctctgctacgtgcgcaaaatgaattagcactgcactttgaaacagatgctcatacttctagctctgctacgaacatagtcccaaccataatccataacgcttcatgagagtgaccataaccgtaccggtcgcctactattaatcccctaactatgcggcaaccattaaccattccgtgtggaacgatccgtccatgtaaccctttgcataagcctgaccgccattattgcatatctcagctt

SEQ ID NO: 238820 - DNA, 411 bp, Gossypium hirsutum
gtgagagactaagacttcttcgctacttcactcaaatacaaggctcaaacaaatgtggccaaggttccgcaggatacaaactgtgaccaaaccaaaaaacagttgaaaactacaaattaaataaactgcatttgtgcacctccgatcacgttttccctagggacaccatctgtttttctcctagccctgatcaatccatataccattatcagttagacaagatttaatagttttttacaacacaaaaatgctgcctactcgtgaatacctgaaaatatgtggggatcaaaccatttgttgttcacggcagattgcggtttacaccaaaacaaaataacatacctaccctcaatttcatcctccctactcataaccaccaatgccacttagacgtccatgaaagtttccccc

SEQ ID NO: 238821 - DNA, 304 bp, Gossypium hirsutum
ctgttaataggaacaactagtctagcaattaaaggttttcatgtccatgcatccatacaaatacaattggatttggatggggcaaattaaatccctaatagtcaaataacgtcccatacagcatcctaccataagtaaaacagctacatctaaaattccattttaacaagtgcattggattcttcacatactttacactatcacggattttcttgacaatctcatgccctgcaccaagcacatcctttgccatgctgctcaggttacgagctatgcaatttccaagtaacaactgaccgttaag

SEQ ID NO: 238822 - DNA, 437 bp, Gossypium hirsutum
cctcaagttattgatctattctgttaaataaataaaattcagtaataataataataataataaacatattcaagtattacaaatattccatcgactggcatcccaaatacatctaaaaaaagagaattttacaagaaaaataccataaaataaaaatacagtccatcttaaaaaataatattatatgaaaacaaggcacttgaaccacattagaatcaatataactcatatatatatatataacctacaaaacaatatacagttcacattaatggtaaaaagaagaccatattttcatgactcaacagagatgtttccgctactcggattcgtgatttacggagcagtaactttcattgatgtcggtaccggttatgatcgatctttcaccataccagctccgatactgctctgcccaacaacccgacccttacttt

SEQ ID NO: 238823 - DNA, 460 bp, Gossypium hirsutum
atgaagttcctaatttgtttctccttctgatgcaaatcatttcataccaaacgttgcagtatgaacaaagggcgaaggtgttgattgaggcttaagctcagaaaggcattggtggcaccctagcccgcattatcaacataagtaaacgattaaaaactatataaacttgtaaatgctttagatcgttaagcattcatgtgagacagtcatctctgccctgtacaacttggaaaatttgccttcaaaagaataaaactagtagccaaaaagaaattaatgttaactattattgcagtttaatcgttacaaacaaagatgggggagaaagatttgaagattggagctgattgatcatcaatggtaggactcttgaaacaacggagatgcagctagaaataacctttagtgattgcttcttctagttccttgaactcccatgcatccttcgatgaatattccc

SEQ ID NO: 238824 - DNA, 486 bp, Gossypium hirsutum
ccctcaagtttttttttttttttgttttttttttttttttttaaattatatacactgtttatttacttttcctgtcgaataatctatatagtgtaaaaaattaatttcgggatattatcattgggacagatagataggaagtctttttcaactgtacctattaaaatctgggacagtttcatattcctttcagacaaatataacctgacggtccatatttcacctgatccagaattccaaattccccaccgttcgttttgtctgtagtgaatgcggtgggttcagactgttggagacctcctcaagtttcgtgggttaaactgaattttgatgcagccatggcaatatctttgatgcgttcttggcagaagctatagccaactttcaagggcttctttttgctaaagagaccgggtttaccaaagtggaggtagaaagggactctaggacggtaattgagaaaatcaaccatgaaggttttgatcc

SEQ ID NO: 238825 - DNA, 461 bp, Gossypium hirsutum
ctgtcagaattttacggtatatgggaaaagaaatcccagctgaatgaattacatatttttgaggaccaaggccagaattatatcaaaattttacctgaaccccattagatttctgcatagcaggctgcgtgaacaaactccgagaactcattaggcacactgatattctccattttactgttttgcccttccttcgtttccaccgtgtaaaacccaagcgcaccacatccatactccgacccggtaaccaaatgcctccctccacatgctctgacccgaacgcccgggttgatctctgcccaattcagcaatttcccatcttcccctatccccacacacgatcttgggcatcgacccggttcccaaaccccttccacccgtctccattgttccgacttgaacccgtacacgtcagcgctcccatcaaattgaccttggctctccgttctgtatccactcac

SEQ ID NO: 238826 - DNA, 288 bp, Gossypium hirsutum
ctaataatagggtctgtatatacttgaataaatactttttattttccacattctgtaaccataaatgatgtgttaaattttacatcacactccccataaaacattatattatatgacctatatatatatactgcacattattttaactgatttttaattatatacatcaacatcataattctttcattcccaccttttctattaacttatcattttattccacacatctctacatcttatccactaactctaatttctaattcatcaatccttacccacatcatatat

SEQ ID NO: 238827 - DNA, 412 bp, Gossypium hirsutum
taaacttcaaacagataatgcttgaaatctgatttatttaatcggtatatgaccttacatttggtaagtgaaaattaaaaatccaatttcacactcaaattttatcaccaaaaccatattaaaaaattcatcaatctggacaacctttataccttgtctcaaaacatccatttacatatcttgatactagagatcaaccttacattttacacccaatacattgtccgccgacgacaacttacctttcgggacaacccctttaatcccatcgcacgtaattcttatcctaactttcctcttgccaaattcctatacccctggcgatccactcattctatatacaccgccacctcgatggaactacaacttttgatccctttactgcagattaatttccagcttgccttaatca

SEQ ID NO: 238828 - DNA, 271 bp, Gossypium hirsutum
  unsure (1)..(271): unsure at all n locations
ttttctttaaatcaaatcaacggttcttatatagtaagaagattacttttaaactcaacagcaggaagtttcatgaaagaatggtgaggtagccatggattatttggcaatgcatgtagcattaacctaataagattcatagttaaaaattatgaccaccctgtgtctaaattaccaggagaaaattaggggtaccatcttaaatacccatgagaaccaaggaataattaaaacanaacangacaacctttgtttgaaaatttgaaggtgc

SEQ ID NO: 238829 - DNA, 218 bp, Gossypium hirsutum
aaacttgaccttgatcttttattgtctcttatttataaccttcctacgggtgggttgcatcagaattacgcattggccgattctacctacctagacactataagtaactattctcttgtgacaactttattacttccagtcctaactctgaataccattgcagtgaccagtttctaccaggcttaaccaccatttgctaccacatactccagatcata

SEQ ID NO: 238830 - DNA, 207 bp, Gossypium hirsutum
  unsure (1)..(207): unsure at all n locations
aaaaaaacganatttcaaaccatcatcaatctcttttcttcctacaatattcacttaaaaacacggcggcttttataaagatagttggccacacacataaaaccatatattcttattttcaatccattactgaaacttctcccattatgaactatacaccatattacaaacctaccacacatctaataaaactcactccaatatcta

SEQ ID NO: 238831 - DNA, 386 bp, Gossypium hirsutum
aaagtaaaaaaatctccattcaaaatcacattctaatacacacacatgacctcatacaccgcgttttcttaagaccaaaagcaggccaaccaaaccaaaccaaaacacaacataccaacttctaccagttggcatttccccctccccatctgactacaacgttagcattacctccaagcttcaaaaagctcggctctcgtatttatcagccccacaatcctcgttcccctgttcttctgaacagctcctgttacattaccaactgcctgttcgtttgccttctttgctcccttccttaaacctgaagcacctgattgatcacttctgctctttccacatttacttcccatgctgtcatttgctaaacatttcactttaaaaactaa

SEQ ID NO: 238832 - DNA, 384 bp, Gossypium hirsutum
aagaaaaatactttattatatatctcatcttttaacactaattaaattcaatcactggttgtttttaaaaaaagcgcccccccactcaaatctctaatataaaatattttaatttttatattcattcccataacataaatcataatacaaaatatatttcatatatataacatctttattatataaaactatattcataacctattcaacaacattttataataaataatttattccaaataccttaaaacacatcccaacaccatattaccccattatcatatctaaccttcttcatctaacttctcctctcttatatatacccaactcttttcttataatatctactcccaccctaatatcctcctattctcatattatccc

SEQ ID NO: 238833 - DNA, 394 bp, Gossypium hirsutum
aagaaagctataaatatgctttatatatatccaatgaaacagtccgtaccgtatcaaacgtgggttatataatacattaagaaagctttcctagccgggtttaaaactcaataaaatctcaaaacataagtaaagatggatacaataggcaaccatatgctatagatgaaagcaggatgcaccttcactgctaaaaaaaagcctctcctaaatcttatgcttaagaactcaaattaaaccatcatatatagcctggcttgctccagcaacacccactcccattgctgcttgcttcaaaagatgctgtccctgaaggttcattataacattaacgccacccattttgctcatggcaagttgcctttcataagctaataggtcaatcccttaaaag

SEQ ID NO: 238834 - DNA, 210 bp, Gossypium hirsutum
ttatttgtgttacttgttgctattcgatatctattaaatcattatttgtcacagaacatttttgttgtgacaaaatcaccaaagaaaagttacaagattgaaagaaatacattcccccttatcttatattctaaaactatagcctttacatcaaaagcatgcatcttcttgcccaccaaacttgtctccccacaataattctcttcaatc

SEQ ID NO: 238835 - DNA, 254 bp, Gossypium hirsutum
  unsure (1)..(254): unsure at all n locations
aaagacaacanaacacaaacattattattttatatccactccaaaaaaaaaatacacccgctcgttttatataaacgtgactccaccaaacaaaccatacaccctatcatctatccttaactcacaactaacccatattaccatccataatacataacaacatctaccaaactcttttcctaatactaactattaaaactttcttcacccatccaacctatatactactcaaattatcccatatctttaatact

SEQ ID NO: 238836 - DNA, 349 bp, Gossypium hirsutum
aacaaacaccatttataaaccctaccaaaattaaaatatttccacaaactcttcacattcggcgggatacataagatgattggctatcgcatcataaccaacaaaacaaggcaaaccagatagccttaactatattaaatcacacaacataagctcccagtttcccaccccaatcactgaacatactaaatacacaatctcaccttctatataaaataattcaaatacttttttttttaataaaaaaaatctatttatcttatgacactcccagcctaaacctaaaatcctcccacatcacaaaaagaccctttcgcaacttcattatctgatccaaacctatcaattc

SEQ ID NO: 238837 - DNA, 371 bp, Gossypium hirsutum
  unsure (1)..(371): unsure at all n locations
atgatanntctaccanctaaagcancattatatcttgtaccacatccaataaaaacaggacggtttctaacaagaatagatctaatgaaatctttcaggccacccaaaatcacactcttggctttggtagaacctccacgtttaagtctcccccacattgtggatactaagagattcaagttgctcattaatttctttctgcatataatactcataattgcccttatttatctcctcaacctccatctcaaaaaaatataatccacttctcactaatcatggccaaaaaagttcattgccacatattcctttttcattctcaaatttaataaaaaaaacacctccattcttaaaattaaactacttcacca

SEQ ID NO: 238838 - DNA, 414 bp, Gossypium hirsutum
  unsure (1)..(414): unsure at all n locations
cctaattatcataataatatgactccacaantacatgaatcatctaatttggagagaataaaactactgaacccttgatgctatactagngcaagtatagatactatgataccaaatggtgacatcatttgaataacaagcaaaaacagaatcaagattgaaagtgaatcaaaagttgaaaccaaattttcatgaccccaattcagatccttcaaatatgacctaaagtgctttgcatctacagagcatatagcgacaaaatcagacaactaccagcaggcagatgctccactacgagagctacaaagtgaccataatttacagagtgactgaaatcaacacacgcaaaacggaaaaaatactgggagctgaggtcgtaagcaaatccacaccaatcaccaaccaacacacaac

SEQ ID NO: 238839 - DNA, 160 bp, Gossypium hirsutum
ggttaaaaaaatcctctaccacccatacaatggatcaaaaaataaagttcatgaccatctactaaagctacaaacaactaccttcccgaacagccaatgcattgcaaaactcgaatttccttactgataaggaatctattaaattaaccaatacgcataa

SEQ ID NO: 238840 - DNA, 452 bp, Gossypium hirsutum
  unsure (1)..(452): unsure at all n locations
gaactaacctaacgcagatcgtttacaagatcacgctgtaagttctgcaatctcgtctcatttaagatttggtcttgggaagccccatcgttgactcttttcacacctccgcgggtatcataaatatggcagagccgaacaagcagcttcaaatagcaatcaactgcataagtccttccatcacagtcccatttgacacaaggcctacaaacttccaccacttccagagctgtctctgtccagtttaatgcaccatatcctgttccatatgccaaggctccaatcactctactctccatacctgaattcttttgttcaggtaaaggtaatgacaactggaagcaactttcaacaagagttgctaccaactcctctctgaacaagcttttacttgtaacattatgaagatcatcttttacactaggatcctncaaaagagaagctatatcagt

SEQ ID NO: 238841 - DNA, 425 bp, Gossypium hirsutum
ttggaaaaaaaactcatttcattcatcaatcaacacaatttccatacacaagctgttaaggaggtcacccaaaaaaaaaaagtacaaattccaatacattgaagcagaattaaaaactttaccttttttctctctttctttttttctaaataaattatcaaacctttcatcctgaagtttcggttgtagtgtaatgtttcatccagcatcctcacccttccttaacgttgtaattataatgcttggaagtgcttccactgttgcttctattcttacgaggtttccctcctcaaaacaaataaaagccagccgacaaacatccccataatgtcaaacttgggaagcaacaagaatcacctcaacccttttataatacctaagaattgcatcatttgactgttttcaccagaaaaaatgaaattgtt

SEQ ID NO: 238842 - DNA, 373 bp, Gossypium hirsutum
  unsure (1)..(373): unsure at all n locations
caaaggggtgattgcttcnatttcaaaccatttggttttccttacaccttaacaacaaagtcgccaggttaaacaaaaagaggggactagtttatttacaagcatgaagccagtagggggttcctctatagaatatagacctcaacaacaatcaacaaaaaagcaaccatctggaagtgaaagaggaagggaaaagaaacaaaataatcctaaggaatggaattatgcaggacataattcccatcgcatccacttcccattcttagtacggccaccaatctacaccgccgggttttttcacgagcaattgattgtattcaggccgcgatgtctgcaacccaattcaactcgagatctttgaagatgataaaag

SEQ ID NO: 238843 - DNA, 335 bp, Gossypium hirsutum
  unsure (1)..(335): unsure at all n locations
taacacagatcctatanacttataccttcacaatttatttatctttataacccttcattcaatagttggatacatttcacacgtgggtgcggcaaaatacccccttcaattaataaaacctatcagattcaccctgtacactttttttcccctttttttccctttcattctgcttccccccactctcttacagtgtatataccctatcccaacatgcacaaacttattccgaaaatataccacctatcatcctaccaaacaatagatatactaactcatcatcatataaaataacatctcttatctactctatatcttattaattaactatcata

SEQ ID NO: 238844 - DNA, 181 bp, Gossypium hirsutum
tcctaaaaaaaataaatacaacaacaacatgcttcaaactaactttaatctcatatcatccttgctatcatctaaacttatgtgcaaccaccaattctaaacccaatcattcctctattaccatcatatactacttccaatgtctcctgctattctttcccctatatcatcacatctaaat

SEQ ID NO: 238845 - DNA, 349 bp, Gossypium hirsutum
  unsure (1)..(349): unsure at all n locations
aagtaagnctacattccacatatgtgttaagcatgaatgttcctcaaaaaaaagtggtggatcacataaagagaagggaggaaagaaaaaggaaaagaagctgttctcaaatatacatgctagtcgatttcctcccaaaaaaacactagaacttaaacaaggttttcagattttggtatcaagactatcagtcaaatttaatatcagagataggaagagagattgagggagggaactacaatatctcaaagcatcattgtggtttgtaacacgcagtatgatcgacaaactccttttttgcgtttagcttagctcccaaaaacgccaaactaggatgaggatgatgatc

SEQ ID NO: 238846 - DNA, 414 bp, Gossypium hirsutum
ggttatgtttgtaaattatagcaattaaagatgatgatgatgatggagatacattattgaaagccggcatcttgttggcaactatccgcatcaatacatttaatatattcggctcagggatggattattggtagcaacattgatcgtttgaaggtttagcaccttcaggggctgccacagtgttatcaaatatctatcatgttgaaatacttgaattagttgagttaaagcaaacacttgatggcctgtaaattttggggtgaatcgggatcaaccttccaatgtgggaacctgtacatcttggatagctctcaggattgctttgccgccgtactccactggcaaagcttcttcacctatatcctctataaagattttcttctcatcgtcattggtcacaattacaatcttttc

SEQ ID NO: 238847 - DNA, 328 bp, Gossypium hirsutum
cctgctctcgctccttctgaaaaaaagaatcatagcattttttatcaatcaggttcatgatataataaccgcttatttcatatctgattggtggaggacaaaaaaaggttcaatgtcatggatctaacatcaatgatgcactgtgttccaaaaatgttatcaactcttaaaagctgacaccatactgaaatgtttaggctctcattattcagaagggtacatgtatataaagattcatcactctttgtttactgtcttgtattaagcttttgtaatctgctgcttcattttaaaaattggggcttcattactgctttacaaagttttt

SEQ ID NO: 238848 - DNA, 353 bp, Gossypium hirsutum
acaaaaaaattttatcattgtattttattatctttaattgctcactttcatgtgctgattttttttagaacaaggaatcaataaacaaaatttttacctaaaaggatcgaaaagagaatcagatcttgaattttggcatagtagaaggactaaaaatgaaattataccttggaaaaaacctgtagaatgtggatcatataattgattttaaatcaaaaggctgatactaatcggccaccatttttcatcatcgtcttgaattcatcgaaattcaccatcccatcgccgtcgatatcaactttccgtatcatcgctttacaatcttcgatcttatcaccttcttttattcccaa

SEQ ID NO: 238849 - DNA, 390 bp, Gossypium hirsutum
aaaaaatattaatatatatatcaaagtctatattaaacaaaacaaaatatagaaataccttaaagacgatgaaataaataaataaatataaaaacactccaatgttaaatccatttcgaacattgagtgtttatcatgttttgggttattttcaatttaacccctgaaaataaataatttaaaacatgcaagtgtatttggttctcttggctcaaaagcaagatacaatacaaaacattgttatatacatggcaatatatatatgtatatatatattgttacatatgtaatggagggagatgattaaatgcagcttgtaaactcaataatgtgactgaagcgccatctaaatgagcccataaaattgccatatacatccacacatacaca

SEQ ID NO: 238850 - DNA, 218 bp, Gossypium hirsutum
aaattaatgacacaaacacacgccgtcattttaaaaaatcccggcctcccctacaaaaatttttcaatatcaattattaaattattaccattttcaatttaataacaaccttaacctcatttaatttctaatttttttaaacaaaaacacttatatcttctttcacaatattctttttcacttaaaattcaaacctaaaaacttcccatcccatatat

SEQ ID NO: 238851 - DNA, 315 bp, Gossypium hirsutum
  unsure (1)..(315): unsure at all n locations
taccttctaagctttctttantatttttttttaaaaattttacaactcaagttcagacagtattataaacttgggagcgaccacacttacaaattttcatagaaacgagggggaaaacctgaaaatcccacaaacacacctaaatgcatatcaacctttcttcctgaacaataaacaaaatttaatataccttggaggcaaaacacagccttaatctaatgcctgctttcccctgtaaagaatatgtggatctatccctcaaaagctacccgaattcccaaacccctaattctgaaatgtcatactcgtgaatgg

SEQ ID NO: 238852 - DNA, 297 bp, Gossypium hirsutum
ttcactttcaatgatttttatgtctcagatcacaatctttcctttgtgttctggctggctccatgtttagtgtttagatagactctcttttccagtcctttcggctgttccttgcttggctgcttctgcttctctctttatacacatatgctaaccaatatatatatcctctggttttaaatcttgcttcaattgacagtcgtagaaggattgcgatctatgttaactaatttatttagtatttaaggcttcctgtaatttcttttatcaaaaaaaaaaaatgttttgaacattttt

SEQ ID NO: 238853 - DNA, 358 bp, Gossypium hirsutum
gaagaaagctcttcttattagattgcacacatatcatccaaatcgagttcttgaatacaccgcaagtttacagaaattggaatctctcaagccacaagtaacttttaagtacaaaaggctcacctatgttacaatctgcatatccaattagtctcccaacacacaggcaaataaaaaaccaggaaatcgcaaagaaaaatggagtttcatcgttcatgtaggaagcgtaaggacttgtttgattactcttttaaaccctgctgttttctggtaaaggcaacacaccatcgaagaaatcaccaaagtagccacgcggttcgtgtactaaccttgaaatgatgtctctaagtgtgatcac

SEQ ID NO: 238854 - DNA, 326 bp, Gossypium hirsutum
acattccattaagctcatgaaactttaaacaacatttcttacacgtatgtcaacggacggcttaataaatgtactagaaaccacatatcgacattttatttgatttttatactttagatgctattagtattaagcatcggcagaagcagaagattgctgtcgttgagctcgagctgtaaaaccagcaaaccaagcaaccctcatgagttgcacaccaaggatcagtacccaccaacagaccaggcccctgatagtgtgcatcatccatgctggtgcactgagttcaaccccgagtttcaatcccctcattagctgtagcacacggt

SEQ ID NO: 238855 - DNA, 250 bp, Gossypium hirsutum
aaaaaggcggttttattaaaacgtgccacaacacacaaatccatttttccacataactcatattttaaaagccaaccaaaacaatttttgtcaaaatcattataaaccccttttattcccaaccaataacaacatgggcccacacattaatatgaacaccattttttttttcttgatgaacttccacattccacacatcctaagttactcccacttctacttgattaccctaatttccttcttggacacc

SEQ ID NO: 238856 - DNA, 196 bp, Gossypium hirsutum
aagcgggtgttaatcaggtgatcagatccataacatcacacgaccatgaccaaatgttaggccataatgaagctgattccgtcttcacccaacacaacgaaagaaaatattgtttaacactacataaattcgcttaaaaataaacctagacaccttactgatcacctaactgaagcagtactccattatactgaaa

SEQ ID NO: 238857 - DNA, 297 bp, Gossypium hirsutum
aaaaaaaatccacattacattcaagaactgtcgtaccatagtacggacgagtaataatacaaaagatatgagcaaactttggcattagatcgaaaccaatgtatggttaaaaggtgtgacacacataaaatcatacatgcaatacatgaagaatttattgttttcaaacttgcacaatatgtgtcaataatcacttactatgaatcgacaatttggggtttttatagtgaatccagatcaggcagctgccttgagcttctttgggatgccagctatgtacttaccttggaggaaagc

SEQ ID NO: 238858 - DNA, 434 bp, Gossypium hirsutum
  unsure (1)..(434): unsure at all n locations
aaggaggttgttgaggttctattggaaccgtttgttttaatcttggggaaagtgggtgataggggggtggttggaaagataaggagcaatgtctttgatgtgcttgttaagacgggaaggagattgctggagcttaagcagtccggtgatgaggttgatgaaagcgatgatgtagttgtgttcgggacgattggtttagtgatggggttctctacaaagttctatgaattgggttcttcagtagattgctgtcagggtaataaaaaggctgtgttggcattacatgaggaattcttgaagttggagaaggatttgacgtcattgngtattgatatttcgattcccgaaggtaatgaaggcaatgaagaaaatgaggtacctgaattgatacctgttggtggtgagacagatgcgaatgtttcaaatgatgtttt

SEQ ID NO: 238859 - DNA, 303 bp, Gossypium hirsutum
aaaaaactctaaatcttatatataaatgcataattacaccatttaaatttacaaattagcgtcggttatacaattttaaataaatatctcaaattttttacatatgatattcaaatctagaaaactaaatagctatatataaactacaacaaaagcttttaaaaaaacccattcaattcaaaactgtcttatttcacccatgaattttatttccacttcttaattcatgagttggtaaatcagtttgttggtgaaccgaactgcggtggccgtgaccaggtggagggatcgaagtgtgtgttt

SEQ ID NO: 238860 - DNA, 301 bp, Gossypium hirsutum
cttcctttttttaattccaataaccatacaagaaactctccttcgctctatcgactcgtttcctcatttgcaattacacaagggacattaggtgtctctcgagaccattactgcaagcacctgagaccgggtttaaatctttggacacctgcccagttcagtgatatggaagtatgtctgacctgttggcaacacatgatgtattaaagcagcgcactttgcatccatagatgcatttttaggggtatgatatgtttaatggcgttccactcaatcggctttaagttgctatcatacttag

SEQ ID NO: 238861 - DNA, 107 bp, Gossypium hirsutum
tttttcattattgtccggctcaacggctatcactctacagaattactcacgaatcttggcatcaccaggctagattcagctgcaccagactcgggtgctcccacatc

SEQ ID NO: 238862 - DNA, 115 bp, Gossypium hirsutum
ctgtgatcgtaattttcattggcttctactatgcgctgaagtatttgaactccattaaacaaatccacaaggataggtttctctctctctcgatatgtatcacagtcagcttttt

SEQ ID NO: 238863 - DNA, 345 bp, Gossypium hirsutum
cagtcttatcgataccgtctacctctagggggggaccggaaaccatatcttcaggtacagattcgtgatacatatcactggatctccaatgacatgttcgtggctaggatgaccattacgtttcacaagcaaaacccgcttgtacagaacacccgttcgacagcaggaatgtcattgaacaggttcgcctcaatgtccatactgcaggattacggaaactgaaacgagactccgatattgttagcatcagaagggggataaaattccactcaaatgatggataaggcaacggaaattttacccaaccagacaaaatcgatagtatgccttagccctcatcatacc

SEQ ID NO: 238864 - DNA, 158 bp, Gossypium hirsutum
ttcataatcatgttgccatttcaagaatactgtcatcctaggtctggtatccttaaccctgccgtcaacttaccataatctcttctcaaaccacacgtgggccgggaaccacatattgcctaaggggttgctcaacatcttgcaacatcggactctct

SEQ ID NO: 238865 - DNA, 220 bp, Gossypium hirsutum
gcagagtacacatttgctgataatcatttcccattaccacaaacgcgtagtttcttcctcacgagttgtcatcctcatgctcacggaagtgcgtgtatccatgcaatatagccaggtatctatggtcaacaggcacaatcagttgctacatatgtacagtcaatcgacatagccatgtgctaatccatacggccaagctgtacatgctgatgctaacgca

SEQ ID NO: 238866 - DNA, 343 bp, Gossypium hirsutum
attacttgactgtcacaattggtatggttagaattgttaaagcacttctttgggttggttttgcgttgctttttagaggtgtaagaaggaacatcggggatgagatcatcgccatggaagaggaagatcaagacaaggtataaacataaaactcgagatgagagatttgaattaaatttgttaaatttctttttcctaaaaggataaatcaattgaattaagacacagatgtcaagttgaagctgtcttgattctccttttctgttgtcgtctctttttcccaccaacacctgggttcgtttactgctgtcggatcaacggtgactttccccttagaccgacc

SEQ ID NO: 238867 - DNA, 246 bp, Gossypium hirsutum
cacgagattttgtgcctatttacctcctcatcctcgcttttttttgtcctgctggtgcccttgcgttggccgttcttcatatctacacgtcatctttgggtcttgggcctctccctatttttcagagcctcctcctcctgcatcctcttcatggttctggtttatgcccttctgtcgttcccgtctcttgttctctccctccgtttcctctattctctctttccatccggtatcgctctccctctt

SEQ ID NO: 238868 - DNA, 172 bp, Gossypium hirsutum
cagaattttggggagccatttttccttgttattcatgaaactgagggattacctgaagtttcagtgcgagttcacaaaagatttcaagttccatccggggaatttgcagagtgtaagtttgcacttcgatgactgcgtcgtcccaactatcatcaggacacttctattgcgt

SEQ ID NO: 238869 - DNA, 439 bp, Gossypium hirsutum
gacccgcagcctcatcatctgaccaagtgggtggcttctattttattccgtctggtacatcaggccgtaactttcaagaggcagaaaatcctttgtcaactcggttccatccttgggaaagagatcatctttctccattttcgctaaaccaggttgacagagaatcgggttggaatacattccatcaatctgctactggtgcaccagatcccggcataagatccagcagtttccgccagaagtacgggtctgagaggatgcaatcacaacatcattcgtaccttatatcttcgccctttaaacccttattgggtgaagcgaactaccctactatgaatgaaaccaaacatgttttatgtatgctttgagagacgatatatggtgcttgagactgtcaatcttggcatgctggcaaactgagggtggccccgaatagaaa

SEQ ID NO: 238870 - DNA, 157 bp, Gossypium hirsutum
aatgtccacaaataatctcttcttggggtggattccgacaagttaatcaactgttggacatccacattgggttggggactcacatctttacgggaacctacatcacaaagagagtttcacctgtttcggccattcaatgattttacgacgaaacatt

SEQ ID NO: 238871 - DNA, 243 bp, Gossypium hirsutum
cagcgcatgcacagagcacattgtatggtttgcatgcacctgatactacgatgtttaccgcgcgaccccatttcacaccgctgtaccaactggctgcggaagcgaatacgacagaactcattgctaggttgagacaactgcatacaccgactagggcatgtggcacccgtggtgacattgacgaacctgtccatcgatacactccatcagggtgtacacggtgtacggtgggggaacggtatt

SEQ ID NO: 238872 - DNA, 433 bp, Gossypium hirsutum
gtggcaacagcaaccgaatgtagaccatatcacagggaataaaatccggaatagttttatgttttcgagggggaagcttcctggtcctcttaggcaacttcaaatggatttgagaaaattgatgcttccttataccgctctcaaactcaaggagaagaaaaggaacaatttgaaagactttttgaatgttgcagggccaatgggtgtaacccatttcctcgttttatctaaaatcaaaacttcgcctgtccttagggttgcaaagacccctcaaggccctactctcaattgccccctcgttgcccgcatgatcttttcaagaatcctcctttgattgttctgtttggttttgcagcagcagatgaacaattaacggctcacactatggtgttaaaggacatctttccggaaattgatatcaacactgttaaac

SEQ ID NO: 238873 - DNA, 192 bp, Gossypium hirsutum
tcctccggaatgtacgaattctgcaacactcggtcccggctctccttgtcttaaaccgcttctgcaatccgccattttcatgtatacacggaataccccgttttgtaaccactactgtagagacgaccagatggggctggtcgaaccaagagacaacgcgtggaagtcgcctatatctcttagaacgtcaca

SEQ ID NO: 238874 - DNA, 220 bp, Gossypium hirsutum
ctcaaagcgacaggtgtcccaagttgaatcgaaccttggaagaaatgactactgccttccaagccaaagaaaagcacctttcatcttatacggagcaggggaaggaaaactttgcgaacttactcttacgtgacgatatgttcggtggagggaagggagtttcaccagcttcagcacggtctaacggccattcacaagcttgctgctcccgtgtttggtg

SEQ ID NO: 238875 - DNA, 337 bp, Gossypium hirsutum
ctcatgtcgctgaattccgccagctgatgagtgtgcagagcggccagggtttaagcagaacaatgttcttgggggaaaaaaaaattctgtttcccaggtgtttgatgatgaccctctcggcagtgaatttgtgcaccacatcggcacacgggcacattacatagaccacacaccaggtatcatctgcctcagcagcaccggaaacgacagtggtatacacacatatcaatgatgtacacacagtggtaggtctacaccagaagttcgtaggcaactacgagtcaactaaggttatcccacacgttccaagacgacaaacatacaacacggttgaacg

SEQ ID NO: 238876 - DNA, 409 bp, Gossypium hirsutum
  unsure (1)..(409): unsure at all n locations
ggangataacagcatgtataccgtgttattattgtttatcacaacggcatttggcaacaggctcccatatgccatacaacaacatttaacagccaaaatctgatgaatgttataaagaagataactgggttttgcatatattacccactagcattctcaccggaggcatcattcgcctcattctcaccatgctgtagttccgcaatttcagcctgcgctctctccatgatctgcctcttctgcatttccaactccctgtgaaaatccattctcatcttctccaattccaacatctgctgccttttactattctcaattttttcatatatgtcgctgaatttctggatagaatctgcaagcaatttgactgaagaatcgtcgccagattgcctcccaaatctcctctttt

SEQ ID NO: 238877 - DNA, 245 bp, Gossypium hirsutum
  unsure (1)..(245): unsure at all n locations
gtggccactgtttcttcttcttcttcttcccagaaagccatataattttcatcaaaggaagacagtagagagaaagagaggacataattagtgattaggagaactatgatttattttttattttttttacatgtttacttgtgtgttgatttgaagattaatttattctaagttgaagatatatatatatcatttttcattttcattttcaaannnngnnaacnngggggcgcaaaatcacggtc

SEQ ID NO: 238878 - DNA, 304 bp, Gossypium hirsutum
gtcctctcacatccactcagatctcgaatcgtctcattggcaatctcaaaaatacacatcatgtgacataaatcttttgcccccactggaatagctttcgccgcccacataactggtgccgtgaattcattcaacggtcatcaatgggttcatctggtgagaattcacatcatctcatcatagagaacattttcccatttccacacaattaacagccctatcagaacactagccggaaatagcagcaacggttagttccctatcatcgtcacaacttcttcaaacacattggtttcaaacaagg

SEQ ID NO: 238879 - DNA, 327 bp, Gossypium hirsutum
caatcagaataaatcatcattacttgtatgtctcattcattgactggtaaagaacgaagtttaccgattcaaacaaaaatggaaggaaagaaaaagaaaggggcaagagatgagggaaaaaggtagggtaacaggggggttgaaacacatgtaacaacaatttctcaacgtgtttgatccaattcaatttagtataaaaataacattaagaaccaaagcatgctaaatttcctatagccacctacttaatgtactgagaaaccacttgaaaccatctccatagaccattttacgaacaatgctacacatgaatacctcgaggggggg

SEQ ID NO: 238880 - DNA, 191 bp, Gossypium hirsutum
ttatcactggagtggttgatatcttcacggagatatttttctccagtattccatcatccatgaacaacttcacggaatacgtgctcagggaagcggtgcgaccatcacgaccagctggtttcatcagtctacttatgtgcaatgctgtggaccatacagaactgggtccgaacacagtgtggggtgatatt

SEQ ID NO: 238881 - DNA, 135 bp, Gossypium hirsutum
ttcatcatcctcgtctgccatcatcatccactcaaaaggggcatgggttccgtctatcataccgattcacctggaactccgcccgtcaattgtctcactctactctctcacccatgcgttctttttcctattccc

SEQ ID NO: 238882 - DNA, 221 bp, Gossypium hirsutum
gtcagttaattttactcttaaaaactaaaacgaaaattcccctttgcaaatctttcatttccctccttttcctctctctctcagaccgtctcggacccttttcccttcctctctgctactcgatcccacactgcaacataatttccctttcaaagagaagacaaccaaaggacgacaagtatcaccccgggttatggactgtggtgttccgtacaacccac

SEQ ID NO: 238883 - DNA, 203 bp, Gossypium hirsutum
taacacacgagtggctgatcacttcaacgagatatttttctccagtattccatcatccacgaacaacttcacggaaaaggtgcccaccgaacgggtgctggcaacacgagcaggtggctttatgagtccaccatatggggaacgctgtggccgacacagaaatgcgtaggaagacagtgtggcgtcacactggcgctggcacc

SEQ ID NO: 238884 - DNA, 341 bp, Gossypium hirsutum
ggatctcccggaatgcaggtttcagtttggattgggacgaccgtttcactgaagacgtgatccgactaatggatgccattgaagccactcctcctcctcctcctccttcatcttctagcaagaggcgcaagtccgccgtccatcatcaagataacctcaaaaccggccgccaattgcctcattctattctctcacccccgcgttcttttccgtcttccttcgctcgttgtcaatctaatagaaggattacatatccgccgttgagatttggaggtcatactttgtatagctttacggaagattaggtagaaaatgctgcaatggagctattcaaaattgtt

SEQ ID NO: 238885 - DNA, 168 bp, Gossypium hirsutum
aattcggccggataggagtccgcatccttacataccattactgtataagatagatctcgttgtgaaggatcgattacggcaaaatttaccggtatagccgaacggtgtgaactgtacaagttaccacttaaaggaaggaatgaactccggtggatatagacgagctca

SEQ ID NO: 238886 - DNA, 141 bp, Gossypium hirsutum
ccacgaacagatcgtcagtgatcgatgtcctccatgacaaccagcgtgacgatggagaacacctcaggggcgtcctcctcgtcgtcgcagactcaagaggccctcgtccgcgaactcggccctaggaagaagaaggtgacg

SEQ ID NO: 238887 - DNA, 341 bp, Gossypium hirsutum
cacgaaacggccgtacagaggagtggggagaggcgcacgtgaaagaggccgtgcggggaaactgctcgtgggagcccgacccctggcactgttctggcatgttccagaagcttctggtgttctcggctgctgagattcctttcgggtttgggccttttataaattgggctagggattttgggtattgtcctggtctttgagcttaagtatatgtttgggctgttcgggtattacgccaaatgtaattgggttggatttgtttttttatatttgggttagtataagtttggtatttattgaacgttgtaagtggacgatttgggccaatttaattttgggct

SEQ ID NO: 238888 - DNA, 275 bp, Gossypium hirsutum
gaactagtctccagtttttttttcttctttctttttttttctatcaaactttcctttttcatgccttcaattctcgactttctctgatgaacaggaaaagataaacaaaaattcccgactttcccgaggttttgcaactttacataatccttacacacatttacgttctgggaatctccttcaagccgcggtttcatttgacggaaccagcactgcctcatcagtccaaggaattccagttttctttacatgttctcccttgccaactgctccag

SEQ ID NO: 238889 - DNA, 373 bp, Gossypium hirsutum
gagggaaccatcttaatctctttacccttttttttaatcttattttgtttttgtttgctaggcattctctaatttctctttctcttttcatttttcgcgcagtattatttatttatttatttatttttcgcttttgaatcgagattgtttttagggggctttaattttctttatgcttctttcctccctctttatctcgttttctcgcgctttttttttcggatctcttcaattatttcatcaattgtaagttgaaaaaaccttcggctttttttgttgttttcaattccttcgtttctgtgaccgttatttcttaagccatataatcgtaattttaaacgcattagaatctgaatagatcgtttttttgggt

SEQ ID NO: 238890 - DNA, 256 bp, Gossypium hirsutum
ttcagcgagaatttcttgtagagtattagagtagcagtttttttgcacttctaatcatggagacgggatctatagatccagcacttaggaaggaatttaatccggttacctttgttacccaaaaggtggtgacttttatagatggtaatacttttctcgcttgggagcagcatgttcttcttagcatcaagacgcagcatcttcagtcgtagatcgatggctcaattgtggtcccaactcaggggattcttgggga

SEQ ID NO: 238891 - DNA, 198 bp, Gossypium hirsutum
gctacgcattatggctacagcctgcttatcggattccatgttagtaatctggcatttgatgttaaagatttgttgagtgcatcatcatgacgtgcttgggagagagacatttgtcgtgagatagcttccaggcttgtgtgaagccagtaatgcaccacttacgacgttgtgattattaacatcacctgcaccgaagtt

SEQ ID NO: 238892 - DNA, 162 bp, Gossypium hirsutum
gttatcctatgctggtgatattggttacagcagcttccctttgaaaacaccacttcggggaactccgttcatagtgtaacacgttttaaaagcaccagtgtttccggtactaatgacattgctggccagcttgctgtatatggatcgatcacattctatcac

SEQ ID NO: 238893 - DNA, 113 bp, Gossypium hirsutum
gaagaaatcccatacaatgaagtagattcacattttaacgtgtgactgatcgccatcgtcatggcatcttaacctgacaaggatcgtgatccgcttctgattacgatgacatt

SEQ ID NO: 238894 - DNA, 182 bp, Gossypium hirsutum
cacgaactcggcacgagcccagatcgtccccatgagcacaatctcttttcactcgcatggtctcccgacacatccacgatcatgagcacgatcatttacgccagctccaaagggagattcgagcgagaactggaccgaactccagtggaattgcaaccaccagattcacactgagatgggtc

SEQ ID NO: 238895 - DNA, 348 bp, Gossypium hirsutum
cttgaatctaagtctcagttggaattcatgtttgatactcaaagtcgcagatagcagcagatggttccatagggtttgcaggtaacactacgataaccaactacggtccgtcttgcacaacaaactgataatgctccttattagctgggaaaccttgaccatgacaatgcagtcataattcaaaacatttacgtctttcaatcacactctaacgggaatgaatatgctggcgaacatgttagaaatggtttgtcacacattcttgtacaccatgatccacttgccgggcaactaaccatcagctccgaagggactctcatattggactgcaccgaggaaggcgctgtt

SEQ ID NO: 238896 - DNA, 278 bp, Gossypium hirsutum
atgataccacgcctcctgcaatcactgccattgcggcccttctgatctcagaggaattgatggctctttcgttacttgtttcatggctcgcgccatgccgtctccttgattaccgtcttcagtcagtctaatagaatctttcatgagtaagggcaagaggaatcatcagtgatttcacgaagatgattctgtgatcaggtgtgccatcactgcttgttttaatgcaactcagtgtttaacagtcaagtatcgattattacatagacaggcatattcct

SEQ ID NO: 238897 - DNA, 220 bp, Gossypium hirsutum
aattgagttgggggtattttctttgtttacatttacgtttaacccttttgtaaggataagacatagagagggctgaatatagtggcgtgaatgttgacaattgatttacacacataactactactccaatgaagacgttagatcagttttcttgcttcattttcaagaaatcacactcttttagctgacagatcaccctcttcattcgtcttctaaaatc

SEQ ID NO: 238898 - DNA, 309 bp, Gossypium hirsutum
caaacagaccttttgttcctacacctattcttatatttaaatgtttttttcagtttcagctccatactccaaatcataatttgccttgctttgttttgttttcattgttttgctaaataatgcctctggaaacattcaagcctgaccattcctctggtgaacgagataagcatactagattacttgataaagaagtcaaagacatggtctccaccattactcgccgtgttgttggtattcataaatcgggatcgagccacgtcagagacgatggtgatgacgatctgcatggtgttggtatcatcacgc

SEQ ID NO: 238899 - DNA, 128 bp, Gossypium hirsutum
ggaaagcttactcaatggctgccgacgaggacaccgtagactttcaccaccgctagcttcattgcccataacattaaactcgtccacaactttgtggactgcgcccttcaggcttcatgttcagcccc

SEQ ID NO: 238900 - DNA, 424 bp, Gossypium hirsutum
ccgggtcgacccacgcgtccgaaataaaccagcacatctgggccgtctatgtattgatttgtcattccagttctgatttgttctcagcattctgaagattgcccatttgctggttaaatcagtatttctccgggttggaatgcttgatcctttagtggcttactactagtacttgtagtcaataagtagctataatgtggagtagcagtatcttgcagaatgcttttattaatttctacatttagctttatctatctgtgtgctttgccatgagtggagtttcaggttccttcatctctagttataagctagagtagcttgactgcttatggacacaaatttatctaagtttgtaacccccctctattctacagatcatacattcgtgtttgatggtagtatttatgctggatattgtacctct

SEQ ID NO: 238901 - DNA, 205 bp, Gossypium hirsutum
ccaatcgttctggccttaaaacgtcctggcgagcatggattcaggaggtcctcctaccaggaccaattcccgccacattgtcatcggcaagcaaaattggggaaggagacacaaggtttcctgttcaaccgccgaaagccactgctgggaccaatgctttcgctcatgaaagtgggcttcaccaagatggcatgctaaagcacaa

SEQ ID NO: 238902 - DNA, 460 bp, Gossypium hirsutum
  unsure (1)..(460): unsure at all n locations
acggtccgacaatccgggggcgatagcgcgggcggagaggggaaggagacaagtgaactcagagaagaactagcgcggcgggcgagcattgcaagccgagctgcaggggcccggagcggagaccggaggagggagacgtcgcttgcgatgtcaccggcagcatccgccgccgaaaccgccgtcgtcgtcgtcgtcgcaagcgtcccgagccagcagcagagcagccaccgcgccgcggcgccgtccgtcccgtcgtcctacgccgtctgggagaaggagcggtaaggcggctgcagctttacgacgtcgtcgtcgtcgtctgccacctgcctactggctgctgctgctgccaaggggaaaggannaaaagggaanaaaaccggaaagggggaaggcatggaggtggaggcggccaagtgcgagtgctgcgggttcacggangagtgcacgccggcgtaca

SEQ ID NO: 238903 - DNA, 294 bp, Gossypium hirsutum
caatgcagatcgcttaagatcatcacggaatttgacaagtaccaatctcatactttatcaagaaatgactgattaatacagcagctcaaagcaggtataccttatctcttatagggatggggagggtcatttatgatacacgcagccttcaccatgcataatttgcaccaaaaactgtttctgcagctcgaacatgtaaaccaaccattgctacatggaaacattttttctttttgagattaaccaagcttctaaatggcgaaagacaattctccatgttccaaaggtttgact

SEQ ID NO: 238904 - DNA, 282 bp, Gossypium hirsutum
atcgcagacaattcggagcgaagttttacaatggtacaaccagtggcagtgtcaagtggccatgaatcactgaagccactcgtgaagatacctactcgcacaatactttgtaatgcacggcgcgaatgtggaaggtggtcacaattttgattgtgaccaaaccaattctgattacatccaaacttagcagcttgacaatcttttcgccatgcgtaatacatccatggcacataccgttggggtctggtattaccaatccttcattatcgcagctggtcatta

SEQ ID NO: 238905 - DNA, 392 bp, Gossypium hirsutum
agaatatgaggactaatgatatattaaccactatatggatatgatatgtcattaatccgtagattcgtcctaaatttgatatttactaaaagagttgagtgcatatggtaacttcacgagatttcatgacgacaagctgacgcgtgtccactcgtcatccctaggcggcttcttcgacaccttacccgagatcaccacggctcatttaaacgtcacttcactttcagctgtttggtacttgagaaaataccagtaactcaacagtcccatcaaaacaactgtaagattcgtttcttactactattttctttcattccattcaatttctgcagatgatatagttagcttttcgacacaggatgttagcatcgtcatgaatcctagcgaccatc

SEQ ID NO: 238906 - DNA, 246 bp, Gossypium hirsutum
tgtgaatggattgcgattccaatcccttgattttaagatttcagggttccctctcatagatgcccttgttcgccattctgtggcatatcaattcggcgtttatggcgataacaaactgattccttttaacctcttggaggatatcaatcgttgtgaatatgttgatttgcccatttttatagtttaatatccagctatacccggcttttcaaattggtttgtggaccataacgggatatccgacaa

SEQ ID NO: 238907 - DNA, 366 bp, Gossypium hirsutum
gctttttatcatttatttatttatttttatcaacgaagaactttattgactctcgcaacaggtcaagttagcagtgacaccataaacaggtcatctttaccagtgatgtcttacgctcaactcattttccgccgcatcgtgttttaattcaccagcgacatatatgcaacacatgcactcacctatcacacacattacacgtatgatttacagtcaatatactttagggaatatataccccaatcatctagcgcttgtagctataagtactcatatattcgcggatcgactctctgcactatcaatcatcccagtcaccttgatgctgacttctgccaccattcttgcacgaatcgattcatcatc

SEQ ID NO: 238908 - DNA, 192 bp, Gossypium hirsutum
tgatttctgcactatgtgatcggattggcattccaagccgctcattttaacatttcagggttctatctcatacatccccttgtcggccattctctcgcatatcaattcgggggttaggtcgataacaaattgattccttttaagctcttccacgatgtaaatccttggtaatatgttgattttcccattttt

SEQ ID NO: 238909 - DNA, 367 bp, Gossypium hirsutum
atgactttcacttcttaaaactgtgtcaatggagctctccctcttctcttaccatcaaaacagcttcagtctcctccacaaacctttcttctcacttcccatttcagggaagagagttccaaagagagatccatttctattgcaatgtcactgcacgttgtcatcatcttctaatgatgatgataatataaaagcagcaattgtgtctttgcagcatgagggaagaatggtagtgcttggttctctcctcatagctgctgctgcaatgtatatctctgatgtggctgaagcagctagtacaagttgaaaagctcctaagggagctaaaataccttagactgaattcaaaactcttcccaatgggccc

SEQ ID NO: 238910 - DNA, 211 bp, Gossypium hirsutum
aacttccagtttagctctatcatctgccactcattctgtaagtcatatgcatccgttacgggatcatagctaagctcgacgctcagacgggttgacgcatgttggatttcccatacgcactccatatcaacgtcaccatttgcttccaatggaggtaactactcctaaactacttctccggaagatctacaacgggatgctactcccgttt

SEQ ID NO: 238911 - DNA, 384 bp, Gossypium hirsutum
cggggccgccacgcgtccgcacacacgtccgtgcaaaatgtataggtaatcgtatagtagccggcaaagtcatcaaggaaagttatggtaaacaaaaacagcaacacactttcacgattcaagtgttttggagcaaaggacctgggaaattaccacctttgcatctgttgcttgtcaaagggcgcaacctatacagaatgatgacttttcgtcagccttgggcaaatgaagcagaaaggctgaagattctagaagagaagcacaacagaggggatgatgcaaggcgtgttcgtgcattgaatagacctaattctgctggaaacactcttaaaggcaagaaaaaattgcacaaagggggaaacacagtccgatctgaaaccacgc

SEQ ID NO: 238912 - DNA, 254 bp, Gossypium hirsutum
cacgaatcgtctagatttaagacattcttcctgagttatgatatgcatagcctaacaactctgtaatgggttcataaaagctctttagctacttttaatggcatctgaagtttcactgctgacgaacggtctaagatggaaagggtcgaagggcgcagttgagaaatcatctacacattgcttgccagagtggcacacatgggctatgatgaatgccataatggtgacgcactatggcttcattcctctggtga

SEQ ID NO: 238913 - DNA, 217 bp, Gossypium hirsutum
tccatgctatatcttgagccggaaaagacataccgtatacattacatttttctatagcctatataatcagatcacccaatttgcaagcagatgagggcccgagaaggataggacacaagtttacacatcttcacaacgataccaaatggactcttagataatacagaagaaagctttttcgtctccattggttcgcttctcaaaatattcgcgtcga

SEQ ID NO: 238914 - DNA, 245 bp, Gossypium hirsutum
ctgctcaaacctaactttcgttgctgcgtcctctggagtcttggtatactgctggttcctgaacaacacgtctaccgaggcgacaaggtggaaccatatacccatttagtttccattggcctccactaaacccatcactaacatcacggtccgcacaagttggcctaccactaaccttcttgttctcacacataacactatccacgttcccatcacttacacatctcttgaatcgcggttgacat

SEQ ID NO: 238915 - DNA, 243 bp, Gossypium hirsutum
gaggattcgagaggtctagcgtccgccatggctggtttgcaaagatcagcggtgtctttgaggaggctacggtcttcgaggcatgtttgggagggacggtttttgtctgagttgattcaatggagatcggaggaccttcaataagaatgacacactaatcagctgcagaatcaggaaccagatgcatttgcagaatagtcgtgctccatatatctttgacgatgttaatggtgttgcccccat

SEQ ID NO: 238916 - DNA, 222 bp, Gossypium hirsutum
attcggcactagtattatttcactcacacactctgccaaagcttcagatatcaactgtggtccatacaaccaacttcctattggcgatacttcacaatgaaacagggattcgaatgatgtcatagtatcattgccaatggaaccatcatcatcctatctgattcaactcactgacattgttcttcatctccttgctattccttattctcacactatcctact

SEQ ID NO: 238917 - DNA, 342 bp, Gossypium hirsutum
cccggactgaaggtttaaatggaacggttgtacaaatatcctgtctcgaccaatgcttgcagccgattttagcctttccgttccggttgagttttgagtgttaggagatcctggagggttctgcttgctagtttctatacaggcaggcgccaaaggtatggctccgaaggacccgaattctacaagcctgtctggctgatccatcgagccattggcattaggggataatgctttttcagaaccagagtgacggagttctgaagacctggattttccaccaccctgatttattgactgcatttgtgccagatcacggttgcttctctctggtgaatttggctc

SEQ ID NO: 238918 - DNA, 207 bp, Gossypium hirsutum
acaagaactaataacatatcatattaaaaaattaatcgtattaattacactattttactgtattcatactagttgcggacaattgaccaatgaatcatgaaatagggaattggttaagataatctacgcatacgtgaagctatatatatatccttaagtaacttggccattgattctagacttaggagagaccatgagtatctattt

SEQ ID NO: 238919 - DNA, 256 bp, Gossypium hirsutum
ggtcggttcatctttttttaactcagaatctcgcccttcttttcctgtttttttctttgcttttttcttttccttatacaaaaaatcccaatttttgcgcgtcatcatcgtcgagtctccgaatccgagaggcgcttctttttccggcaagaagaacgcggatgcaggcagctagggctaagtcgccaatagcaagctaggatgcaacaacgctttatcctatcatcgcagtcgcttgcttggtcctcagctagag

SEQ ID NO: 238920 - DNA, 218 bp, Gossypium hirsutum
agagagtcttgctcgggaagaactctcggattactgctaggagagccgtacgctccgaacctgaatttattcccgtatcgccggatgatgtgcctgagagggatgagtaatattagcaattaacggggattcatcatgtacgtgatacatccgttgctatgtgttctatacctgttgttatacttattattaatattgtttgtactactggtctttca

SEQ ID NO: 238921 - DNA, 367 bp, Gossypium hirsutum
atgaaataattctctctgaattggataccattggggacttcaatctcaggaaaactgatttaccatagggatctcatattgccaatacggaatctgcagtcttaccggaggatacgaagaccaaggccaatgttgatcagcctgttcttgaagcaagatcagtacaagatattgatttggctttcaagcaactttatgaatggatcgatgttgatgaagtaattcatccaagtatgattgacgatccacatgatcaagcagattacaatccaaaattacctgttgttgacgtaagatctctagacgatacctgtaaccttttcaacaatcccggaatccaaattagccaaaactgccataattcttc

SEQ ID NO: 238922 - DNA, 246 bp, Gossypium hirsutum
gacccaggccggatcttttttttagtcggtgtcgaaattgaataacagagattcaataataacaacataggggtcgttcaggataaatctctcaaatcagggaggcacatcagagatgaaattcaagcaaaaagattattataaagaaaagagaaagaagtagcccatatacgagagatctagaattcgcagcagttaacgcaatcgggattcttaagcctctcaactcgctgattgaactgttcg

SEQ ID NO: 238923 - DNA, 297 bp, Gossypium hirsutum
tcctccgaggattatgttggaagctacggtgttgctaatagacagtcgagtagaggaattgctgcctagggggggggggactgtgatttggatagcagaagtcatgaagtagggtgaataaacaggtgaaggatttgtgaattcgatatacaactgccttattacaatgtcagcttacaaggaaattgatgttataacactaatgagggatattgatttgagagtgagcagttacaaggggaggttttgtgtaaggtttgagattccatttgtttgtttgttcgtttgttttgtcta

SEQ ID NO: 238924 - DNA, 101 bp, Gossypium hirsutum
gcatgaattcggctctatgctgcttcatgtgtattcatggagggtgtattattaatccatcaatctatatatcatatgaacgtaaactctactgctgttat

SEQ ID NO: 238925 - DNA, 287 bp, Gossypium hirsutum
  unsure (1)..(287): unsure at all n locations
tggataaccgaactgcaggtttttttttttttttcagtgancagatttaagactttttctcagacttgtttgccatgcataatgtataacaaaaaggtctttcaagatttttcaatctctgagcactgtaaatccattatcagatagaggtcagcaggtcaccaatcattgctctttcgccctctttcgtgccagaaatcgttctctagcggctgcaacagcattcagaactccttttatgatggtaatttttgggttgatcaattgatggttgtttctctaaattg

SEQ ID NO: 238926 - DNA, 314 bp, Gossypium hirsutum
cgcttcgctccaaggataagatcaagttctcatggttcttatcacgtgggagagcgggcctgtcaatcactttggggattgaaaagggtcttgcaaacaaccggtttgggcaaaggccagagactcttgttccaaggaaagagatagtgatgaagaatgtttgcactggtaggagtaaaagacatgtcacaggtggtacttttagaggacccagctcgcaaagagaggaagcttgtggcgatgaatagcacccaaagtgtgctaaacgcctgtgaagacgttgccaaggtcaggtcacaggttgataaactctc

SEQ ID NO: 238927 - DNA, 157 bp, Gossypium hirsutum
  unsure (1)..(157): unsure at all n locations
cccccgggnaancaaaattcngcacgagcatctagctgttccctttctaaattgatgattacgagacaacatttgatctcgcttttccttacttcatttctcttgtttttccatccccattgatcaataacttgaggggagggtgccgttcattctc

SEQ ID NO: 238928 - DNA, 352 bp, Gossypium hirsutum
ctacacatttggaagaccttaataaaagatataaagatccttacacagatatgatactggttgatggtattactcttcaatgcaaccacttgcagttagttgtttcatggcacatgaaggcccccaccatgtgtgaatattccaaggaggaatttttcactgggttgcacgcacaacgtaaacattctttggagaaatttcgtgagaggataccatttatgccttctgagctgaaagatgaacaaaaattccgtgagatatataactttgcatttggctgcgcagcagaaagggtcagacatcttttggaatggatactgcaaatggtatgtgggaatttgctgtccgctga

SEQ ID NO: 238929 - DNA, 182 bp, Gossypium hirsutum
gagacgttttatgatggataacacatctaccatgatatttgaaccatgtcatcaccatttgtttccacatatctcacattaccatttactacacgttattggggtggcgagggcatttctctgctactattatcgagagcctttatcattcctctttttctctttctacctcatctgtagtt

SEQ ID NO: 238930 - DNA, 357 bp, Gossypium hirsutum
  unsure (1)..(357): unsure at all n locations
acaaagcaatcaaaagcagaggaggtgatttccgctatccactttcctatggtcttttctttccttttactagtatttgctcacatctttcatcgatatatttcaaaaaaaaataaacacaagagaaggaaaagcgaaagaaatctttctttctatcagtatttaccttgcgaatccgtcttcgatcctctgtcgtttcgtcgaaatcgaagctagggggttttgaggtcnaanaacactacgccaaaacccgaaacacaaaacgtcgttctcgatggcgatttggtgtttgaggacgcactttacggtttggctaaaggaaacggataccaaagagtgggagaaggtgggtatggt

SEQ ID NO: 238931 - DNA, 216 bp, Gossypium hirsutum
agtatagtttaaagatgtcaaaagtcacctctctcagtcaaaatttttaacttgtgaagatatggaatctcttagcatgcatgatggatttcttctgggagcttgggtagaaagtgctaaaaacttgtacaaggtgaagaagaagagaaacagttcgagtggaatgcatgaactcaaataatcatgtggtttgacaacacagaggatgaagctagt

SEQ ID NO: 238932 - DNA, 260 bp, Gossypium hirsutum
gaaacgctaatgttaatgagatttctaacaccatcaccgaaagatggatgaacaacatgttagcacaacgactcaaggatttcttgacccgactggttagagaccatgaaagcattgatctggaatggttaacacatgtccccgctgataaagcacaagattatcttttaagcatacggggattggggctgaacagcgtggagtgtgtacggcttttaactcttcaccatcttgcttttccacttgacacacatgttggc

SEQ ID NO: 238933 - DNA, 274 bp, Gossypium hirsutum
gtgtgggcttctcgccacatatggatacagaatgctgcagccacgtcagctgattttgcacagcatttacgctggatgacccactgccgcttgagcattccacaacacgcactctttctgcatttaccagcctggctgaagaaaaggatgcgatgatcactgatcgggagatccacccacttgtgattgttacacagcatagtgggaaaactgagcgatcaaaggccggtgcacaacattcaaccggcatacctagtgagcttgctgctatgat

SEQ ID NO: 238934 - DNA, 256 bp, Gossypium hirsutum
ctagtctcgagttttttttttattttttttattgaccgcacaaagcaaaaatcattgtaactcaagatgtctgtcaaaaagcatcagttaaaactgaagaccaaagatgaatcaacctaaacatgatcctctaccactcataaaaaaacatgctttccatattacaacatgctccaattttgctgccaatcctaataatacacagccgttgccaatacaaaaccaaaaagatgcacattacacatacactttcaca

SEQ ID NO: 238935 - DNA, 283 bp, Gossypium hirsutum
caacacacaacttaatgcatgagatggccctagtccctgggcgatcgcatgggcgatagggagcatgatctttatccttaccttacattcactgccaatatctgagctcgacacattcaccctgcaagaacccttgtttcgttattggcccaagccttaatatctcattaaacacgtagcttacattgcgtcacaacccttgtgcactgtaatagcaaataggattaattaacattttcatgaagagtgcctccagttacactaattgtaagatcaccaccag

SEQ ID NO: 238936 - DNA, 271 bp, Gossypium hirsutum
cagtaaattgacaatccaactccatctttttactatgcgggcggtcactgcaagagcggctaaccttaccacttctttacctcaactacaacgagcataacctcccttgttacatgagactcaccacaggcgattctcatcgctttcaacttccgaagatcgaatgtgtgaatcacataattatgcgaccggctccacttcatcataatcataatcatcatccaacatggatgcctgcttctgctagtactaatattattttatgcaccgc

SEQ ID NO: 238937 - DNA, 397 bp, Gossypium hirsutum
tcgagttttttttttttttttttaaagtctaaaaaagcatttatttgagccgggaaaacaaataaaaaattcactactacatacattccatgcatttacagaatacaaagatgatccacagcaactttaatggcaactcattcttccaagattacaatatctaggtggtgaggtgcaggaagtgttgtgacctatatagatattttgctgggattctagagcagtatcgtaataaacactatgtttacaaacattcctcaaaaccgaactcgaaacagatgaactattggaacaaacttgcataaaataatccttagtagaggaatttaaacgagtgagtgcgtcactcaggatctgcatgatggtagagtgatgccaccacagcaagcaacaatta

SEQ ID NO: 238938 - DNA, 307 bp, Gossypium hirsutum
caactagatctttaaattttgtagccgggtaccgtcacgggaaactggactccctgctccattacctccactacaataaccataagtcctcccgttgattctaattcatcaaattcccatcaacatctccttcaacttcacaagcatcacatgttgcaacaacatcatcatcaacctgctacaactttatcaaagcaaatattatacaaccaacaccattcctacatcttctattgctactaaaatttctaccaccgctaccatatacacgcatactgttccccaaatcaaccctgctgcacaatca

SEQ ID NO: 238939 - DNA, 343 bp, Gossypium hirsutum
gtggctttctatatataacgggtgcatcccactgcctgaattcttcactacaaaaaacccatttttctgtcatcactatcgattccatatggcggctatattaaacaatggcaccactcatcatactttccaatcattcacaaaataacaaagccattcctcaacatatttaaaggcaacaaactttttgataaatactgtgaatgtaaagggtggtcacagttttgttgtaaccaaaccatttctgattatttcctaacttatcaatttgagaaccttttcgctaaacgttatacacctgttgcacataccgtttggttcttaaaataccattctttcatta

SEQ ID NO: 238940 - DNA, 310 bp, Gossypium hirsutum
tacgttgccacccggacggacgcttcgggaaccagatcaggcctctatggccgtttacccacgcgtccgaaaactcgggaaccggttctagatctacagcaaccaggggctgagacaacttcagatgacacaagcgtgattgctgaagataccatttataaccatgacaactacaatcaactatcataaatggacttatatgctcactactgacctaacctgacctagactactcaccactgcactgagctgagctgaactgttctgaactctaatgacgtggggagagctaagctgaactgagctgagc

SEQ ID NO: 238941 - DNA, 386 bp, Gossypium hirsutum
gttcacaccttatctcattagggcgaatacagtgatctggaggacggtgctactgttcacactgaaactcagcacggtgaacacagtgatctgaattctcaacaggatagaaatcctgtcgatgggatcacagaaatggaaattgacaaagataatgctgaagctgttaatgcatcaaatcactttgctctaaatgagtttggggtgtcattcccaactaatcttggtactgagtttttgttggaagaaagtaaagccaatacatcagctgatggtagtatagcagaatgctttgcacctattgaaaatgggactaattctattgtcactttacaaactgctgagtctgtgaatggatctcaaaatgcatatgaagctgaaaatga

SEQ ID NO: 238942 - DNA, 365 bp, Gossypium hirsutum
gttccaccgagttcggcttggtgatggttcaatgggatcactactggatctcaaaaattctgagccagaccctgaacctgaaccattagataacaagtttgatagtagccaaaactcaactggagcactgcctgtacggggggtatggaagaagggaggaagtaaaaagctctttttataacaggcaatcagccaaactcttactggagaaatggtgtttgacaacatttcttgtttagaaattatcttaatagtgccgtcaaaaagtgatcgagttttgctatgagctcgaaaagctgtcaatagatggagaagattctatatatggcctggggtttttttttgggttagccactaatacattt

SEQ ID NO: 238943 - DNA, 452 bp, Gossypium hirsutum
caaaagcgcatgtccttgtctgctgataagagttctccgtgagactccagctcatgatagtgcagcaagaactagcactgaacaattgcccaaagatcagaaaaatggaaaaatacgcaattctcttggttcaaaaagacctgagaacatagatgacgagccaagagatagtgacaacagtacttctcttccccatttcatgcaagccacggaatctgcaagagctaaggttaatgcaaagaactcaccaagatcaagtccagatgtgcaagacagagacatttacatcaagaagagacatcccttacctgctgctaatgggaggcagggttctccaagaatcacgcgatcagtggctaaagcccagcagggtgcaaaagaaaatggtagtaccaatcctattcatgaaaaatggcaaggtgacgggttactcggagcaacaatatgccatg

SEQ ID NO: 238944 - DNA, 302 bp, Gossypium hirsutum
ctctggttctttaacattcatgcggtatacaccacacgaggtattgggcgatacgtactcgtgaggccattaaaacaaacccaggtcattataatgctctactcatctctaccaacttatatcattcacatgcaattatcatcgataaatctccacactgaaccgacagaacgaccaacgtcgaccctgttcaataaaccaggattatgcttctaagcatactgatactctgcttcttggccatatttacaggctcataaccactcattaggtgattaacggattgtatgcaatgaaacatt

SEQ ID NO: 238945 - DNA, 367 bp, Gossypium hirsutum
atggaccattttaagttcatgaaatcatcattacaaacgagacgacgccatcacaacaaatgactcccataatgcaggaccaacaagaaaatctagttatcgacaccaacgctacacattccatcaccaaagctattaatggcgattatactctcaccgactctatgagcctaaatgagacaatcatgaattcatgagcactataccgagataagatcccgaagaaaattggctactctaagacaagggaaagtattgtagaggccaacttggacctaccacctaacataccatctatcaaactgattgtaaaaaagaatacccataattggcattccaactagttatcagagaacatcatgaaatg

SEQ ID NO: 238946 - DNA, 306 bp, Gossypium hirsutum
cacctacatttagagagagacctaccgagatatccggagacatagagacagatagagatagacccttttttttcttctccttcttctccttctttttttttatcccctttttttccacctccacctccaccaccttcttctccttctcatctttcttctccaccaccctcgcttccttttttagtatcaagcataccaccaataccaccttcttctccaccccaaccaaatgcacattcttcaacccaccttcagtagcatttgatccagagttgcattctccatgttctcctttgccaccacctc

SEQ ID NO: 238947 - DNA, 201 bp, Gossypium hirsutum
acgttgcacccccatgacccttcgtgagccgaatcaggcctctttggccttttacccacacatccgatacatccggtacctgcgggattcatcaatcaccatggaccttcacctccttctcaaccgtattctacatattaaccgatgactccacttccactagctgctcctaacactaatcaatctccccacactaccact

SEQ ID NO: 238948 - DNA, 340 bp, Gossypium hirsutum
gatgatgaatgaacaaagattgaccctgttggcagaagtcgggtttttgaaaagaaggcacaagttcctgatgcaagaccaatcttcaaaaccccaagcggaacgacattttttgcaaccacaggatattgtgattagaagcaaatcaaatatgaaagcaaagaaatccactggaaagggtacatcgtcgaaccgagctatggcttttcatctgaaccaaaagggaaagacaaatagtgtaaagggaacctgtttcactcatcctgcccttatgttggacgtaaaccggaagcagcagaaaatttccagtggaaaggaagttactttgcgaagttcttta

SEQ ID NO: 238949 - DNA, 358 bp, Gossypium hirsutum
ctttacggtatctgctgagtagatgttgcaggagaaaaagtgcagttcatctagaccgttaaatgttgcagctgagaaggaccgattgagaagggacctagaaattgcacaaagcaagcatgatgatgcagaggttgagaggattaagaagagactgcagcaactagaggccttccggcagtcacaggagaaagatgccaaggctgttaggttggctgagatgaaccgaaagaacagggttgagaatttcaaaaatgcatctggattgaaacctgtaaatactggtttaaaagcaagggaagcttggtatgatccattttcgaggaggtggactagatcaaggaactactataatgca

SEQ ID NO: 238950 - DNA, 378 bp, Gossypium hirsutum
ataatatcattattagccagtcaaagctatgggagattacgtttgagacaaaaaccggaagtctcaatagttggaaggttgaaggcgtccctataatgaaaaatggcctgttcccatgcttttggcgagcaccaacagacaatgacaaacggggaggtctgagcagttatcagactaagtggaaagctgcctgcattgatgagatagtttttcttactgaaagctgttctatacaaaataagacggacaatgttgtgtaaatagcggttgtttaccttggcttcatttacggcgaggatggcactatagatgagtcgaagaaagcaagagctctattcaaagttgacatgctttacacaatccatgcgtctggtgaca

SEQ ID NO: 238951 - DNA, 299 bp, Gossypium hirsutum
aatttcatttttgaagaaaaccagtctacctcccgggagagcgcatatcgaacttcatctacgcctccggctactatacagaactactgtactcacagcgcacacaaactataaccatggaaggtgaaatagctccagctaatttccaaatcaggacagcaatagagcatattccaacacctcaggtgaaggatatcagaggtgagatcactatgcggcttaatctttccgtgagaaccactctgatgtcacatctcttaatgcatcaacacataaccaattacccctattatcagtcc

SEQ ID NO: 238952 - DNA, 151 bp, Gossypium hirsutum
atctatcatgattaaacctttccatacttatcatacacctttgagaactgtattcttctataacacctcatgataaaacttcaacagatccatcaaaacaccaaaacacttaccatcatcatattgcattcagaggtccccacctcatata

SEQ ID NO: 238953 - DNA, 322 bp, Gossypium hirsutum
tgacactaatcaaatcacttttaactttttcaccataacgaacttgaatagttcatggtaaaaaatctccggcattacccacaacatacatcaactaatcccaacccaccctaaacattaaacactcactccctataaaaatgcaaatatatagcatccctcttacaaaaaaacatgtaagcatagaaatcacaatatcactatatatttctctatcttaaaacactccttttaaaaaaccctgactcttaaaaataaacccatcttctaaagccatgcaaaaagatagctttaacaatccaaaaattacgacccgaataac

SEQ ID NO: 238954 - DNA, 374 bp, Gossypium hirsutum
gaaagacgaagctttgaagaagcaattgaaaagctgcatcgagttgagggtttaacgcgttcctccttgggtgttagagttgctgctacggaagctcttgttggtctttatttgcagttgggccaggatgatacttcatcagtgctcgcagataaatgcttagattttttgcataaagatgatttaagaagtaatggtgggagcaaagaatctttgattgttcgtgctaaagcagtgaaggggctagttgagcttgtcactggtaaccttgagtcagctgaatcattttttcatggagtccaagatattgaagcttggaatggcacttgctgtttatcttatggagaatttctacatgctacacaacaagtttc

SEQ ID NO: 238955 - DNA, 379 bp, Gossypium hirsutum
gatctatgcaaatcatgagcctgaacactgattgtacctgggcgcactagtttacggtaaaatacaaccactccataagtacgaccggatgtataatcctacaacttaataagctatatgctacacagcattacttcactccacaaccatcatgctcagaattttactgatcgccataggatgaatatccatcacctagacaacccatatataagccatcaacacacgaccaacatacacccactattcaagacatccacctatagagaatcctccatacaatgcatacatcgactaaccattccaaagcaatgatctactacaaagatgagtatatagacaaagaagaactgccatctgaagttcagacttatcattg

SEQ ID NO: 238956 - DNA, 352 bp, Gossypium hirsutum
gaaagaacaggatttagaggctgttctgtgagtctagatgtcattgcccaactgtgtaattacatgaatgctgatgccaaagaagtccagggaagagagcaattcttcaatcttgcccctgccttattcatgctatgctagacttatacaaacagttgttccactagagagagaacccaaaaatataaacaaatagggaagaagcaatgacacctcatcaaggaaaacacaaattaactacttcaccttcttacataagtctaaatgattaggcagatgatattatcctataacctatacaagctgagtgccaatttttctgtgtcaaaatgtgattcatgttttactacca

SEQ ID NO: 238957 - DNA, 436 bp, Gossypium hirsutum
tcgagtttttttttttttttttttaaagcataaataatatgcgattctcattataatctatcacaaaaatatgtgagtccattacattaagatagcactaaatatttacaataccatatgggagagagaaatttcggatctcctccataatcgaaatgccagaaccaaatatggcattttgattttacattacaatattatttgtcaacatccagttgaacatgacaaacgaacgatcatcagctctctgctaacaaaacgtttcacgccaaacacaatagaccattaaacacgacatctacattaacaagcttctaaatctgctactgaaagggctcataccgacacactagaccattaaacacaacatctacattcgttaacacctaccttcgttaacgaaaatgaaaacttctaaatataccttagcaccatg

SEQ ID NO: 238958 - DNA, 285 bp, Gossypium hirsutum
gaaaggtgaagtggtaaaggttgtttgagaactgagcatatgtgggggatagaagacaagagtacggcctaagccaaatacacacaaaggaaagaagacatatgacttggagttgcagatgcagtaaactatgattagattgcttagacaaagcaattgcatttggatgaacactaccagatgatgagtcgtttttgctctcataatgtgagagaccgaattcacgcttgtattcacgattatgatacgatccagaaacttgacgtattcattatttacattcaa

SEQ ID NO: 238959 - DNA, 364 bp, Gossypium hirsutum
acatcaaacccgatcatcaatggctacctattatttcattatctttgaatctgttcaacatattaatacaggatcaagtaataacttgataaagttataaaaataaataaataaataaaggaaagcttcaatctcctatgaaggataagccatctacattgacataatttgtggtccatacaaaaatggactcatcattaactcaatacattcaaatatgtaccatgaacaaaccatataggtagctttagtttgtgagcttgtcaagccaagaatccatgacttgagacacagtctccataaatgcagcttcactcatgcctggaagcaacaaatcttgagcttcatctacaatttgctcaat

SEQ ID NO: 238960 - DNA, 287 bp, Gossypium hirsutum
ttaatatcgaagagacaaaggcagaggaagagtgtgaggagaagaagaagcatggtctcctggagaagcttcaccgatcagatagcagcagctccagctcttcaagcgacgaggaagaaggtgaaggagaagagaagaagaagaagaaaaagaaggagaagaagggactggaagaaaagattgaagagaaattagaaggggaaaagaaagaagaggacacctcagttccagtagagaagtgcgatgagccagtagtccagccagagacgccagagaagaaaggtttc

SEQ ID NO: 238961 - DNA, 405 bp, Gossypium hirsutum
aaaatgcagtggtttactttattgatctaaaaaggtagtaattaaatcaatgaaagcatcaaacaccagacaaattgtccacccaaggaagagacacctgacaaatgaccatttcatgataaaaaagcgggactcaacaaaaacgtttctcgtgccgctcgtgccaaatcggcactaggtgttatacagttcacacataagcgtcaatcaaagaactgatcacccttgagcgacactttatcttttggattactctctctctaattttttctctttgccctttgattgattatttcatctgcggttcgcttagagaaaatgaaaggaaaatcaagtgtgaagcaaacacgtccttattaaataaaagtggtagatcgatctcaaaggttaaaaagggttcaaaat

SEQ ID NO: 238962 - DNA, 400 bp, Gossypium hirsutum
tctaaaatgggattctctagatcatcggacagtttcctcacggtgtgcccaatcctacccatgcacgtgtcggctaccccttcatgtcctatgctcaacttacccagctgccatttcctatccatctaatctgcgtgcacgtgcatccatatcggaatgcctgatgctcagctgcgaatattcatgcaacttctacactcaattcgatctagtctccgagatcaaccggcgcatcttatctgccaggcgatacactagctacagctccctaagaataaacacgagcccatgttcgcgacgcttgtcgtcatattatcactgtcggtcttgagctcaatccaattcttactcacgctggtgcagttaatttacgcactagtcacgttcgatctatttatat

SEQ ID NO: 238963 - DNA, 393 bp, Gossypium hirsutum
cacaaaacaaacagacccttcaattccccaagatttcaattcttacaacactacctgtataaagaaactacatactacattttcctaaacatattttttcaaaatttctttgaccaaagctcaatcaaactcgaactcttacatgattttcctttttttaatttttacagatgaatacaagcattcaacaactatcaacagcaatcacatatttttcacatttcagagctctgcaatagagtcgggaccatagtattcaaggcaaacattatgtcacctaggaccagaaagctccatggcttcgagcacaagtgatgattcttctataaaatccgagtaccgttgaggaaggttatcgttatcgcatgatcggagcttcggcgtctttatcat

SEQ ID NO: 238964 - DNA, 265 bp, Gossypium hirsutum
tcaagttattttttttttttttttaaattggaaaccggagaccctgactttctttttccttctatcttacatttcttgtaaataacacccttctatgttacaaatcaaaatttcagtggagttttcattcaccacagcttgtcttcttcttcttacattctcaatttcaaactgccttctcagcctttttaagcaattataataagaattgcataagctttatacctctctttcttggaaggcaccatctaaacctagactccgt

SEQ ID NO: 238965 - DNA, 237 bp, Gossypium hirsutum
agagcccgttgcatcaacctaattacgctaatcatgcgagtaggcgacagtctcagactcgcgtttacagtattagcaagactgattacagagaacattgtgcatcaactcactgtatcaccgacacataatgatccttagccatggcctgcacagaatccaccgctaccccaaagtatgaggctgcatagaattatgcctccaccattgacaccaatcaatcggcctcatattcct

SEQ ID NO: 238966 - DNA, 318 bp, Gossypium hirsutum
cggctgagaattcgacgaggtcttctgttttgatatacaatgaactggggtagagtgaatgtaatttattttacagacaaatggtttaacataattttgggttttaaagcagaggttatacacacacttttttggaaaagaaaccaattagggcaaatacttcttacactgaccttattaagccttcttcaagaaccaggtatacagattaatctcatatgatagctacaaccctttgggctttggcttactgagtgttgtcttatgagatgaaacaaatggatcagacagacagactatgttatgtctgattcaagt

SEQ ID NO: 238967 - DNA, 248 bp, Gossypium hirsutum
ccggcgccggcgttggtggagaaagaagctgttgaatagagcaaacaggtttaccgcaaatttgagattgaagagtacatgatactggatgcacgacatgaaatctcagtccacggaaccaaggattgaatccatgaaagcgatggaagctactgctgccattgcatcagctttaaatataaatattataacttagctattgactttgtggaaaggatgaaactggtgcatcagcgttcatgctatat

SEQ ID NO: 238968 - DNA, 313 bp, Gossypium hirsutum
  unsure (1)..(313): unsure at all n locations
gtagtaaagtaataatctcttaattatgagaaataagagaccggaaagtccaagggtctctcaagggggcgtgcattatgganngtatcgaaatctgatagaccgggtgacaatatgcctgctagtggagccagtcaagtcttgacagaaatctggagggactcaagttcctcgaagggaagtcaaaataataggctttctccagagcaacccagtcattccattaagnncagagagtttttcttccagcaagttcannaagaatcacttggagctangntgcgtaattccaattggcagataactatcagaa

SEQ ID NO: 238969 - DNA, 397 bp, Gossypium hirsutum
attctgcaactttttttctctatttttatttattatttttttttttttttattatcacttttgttttgcttttttttttattctctacccttaacaattctcttcacaatccccctaacaaatacttcatttatcatcccaatcccatttaaaccttataccaactttacctacataaacccttttaaaacctttacctatttcaaaaacatatatacttcctctaacactaaacctacacttaatacaactcatattaaccacactatattactctatcttattttaacctaataatttttacccttatatcccttatttataactcaaaccatcttctttaatatcctttctttattaaataacatcctcactaaccttaaaaaattctcctttt

SEQ ID NO: 238970 - DNA, 359 bp, Gossypium hirsutum
acaacaaaaaaggggaggccccataccttggttaaacaaaaaataaaaatttcatgtcaacccccataaaaaactttgggggttaatcggaaatttcaaaaaattccataacaaaaatttaaattgataaattttcatcaccacctatcactggaaaataatcccattcttaaaccaaattctttgtgatccaaaaaaaataaaaaaaaccctttccaaatttttaaaaatacagttatttttacccccaaactgttaccaaatttaacctcaaattaaattgctcaacattaactggaagaaattccaaacccgaacctggcaacaaccttttaatttttaggggccaaaacaatttt

SEQ ID NO: 238971 - DNA, 358 bp, Gossypium hirsutum
tatgacccggactgaacgatttcgacacgaggccatcacctaggtcctaagcttcctgtctgctaataaagtccttgtggatgtatgcctaatccgccccgtattagaaagaaaggtattccactgctgaggctgagagtcataccatccatgtcgactatcttttaccctcttctgtatgcaccccttatactactgcaaaaggtttgaacaaaaagacatttgtacaagtcatgcacaagcatggtccatgctcacaaccccatgaagagaaagcaaatattcccacacatgtccagatccttatattatacgaagtaagggttaagtcaattcacttcaagttaaccaagaacct

SEQ ID NO: 238972 - DNA, 236 bp, Gossypium hirsutum
cacactattacggcagcaacatcattgaccaaactccgggaatcgttactccatcgtcttgtgaccactgactgcttaactacgatatttttaccatacaatcggaatccgacgtttctagataccaacattttatacttaatctaccatgagatgatctgaaagccttgtatgaactctgaaaccggactatgatcagatcctaactgccttccatcggctgctgaccgattcaa

SEQ ID NO: 238973 - DNA, 362 bp, Gossypium hirsutum
tggacacgcttaattagaaatgctctctcccatttgttcgtgctattctttacacaccaacccccattttcacccgattactaaatcatggactatcacacaccccacatctgctactacctcttatcatttccggatgattaatactacttgccctcaataaaacatactagaaaactatgataccaggcatctattgatagcttttgtattcatacgctgaggaggatctttagccacttacacattcttccctactactcaattgccagcatcaacatcactttaagaaactatatactacatacccacacatgggcatcctaaactatactcctataaataccgatccatataactgc

SEQ ID NO: 238974 - DNA, 119 bp, Gossypium hirsutum
cttacaactgcgcctgatgtaacatttttgaagctatgggaatatttattcgaccattttgaatccaacgaatacttggctacgagattatatacagaacacactactccgatgtaact

SEQ ID NO: 238975 - DNA, 294 bp, Gossypium hirsutum
ctttaatgttcttcacatttgaaaaaagaatccagtgaagcatataacaaaaacccaactgtttttattgtggatttagtagcttcatttatttatacaatggtatttgtttcaaagattcatatcattgatctatatttcaataaaatgtttggaaatagaaataagattccaaatccatcaaattttcatttcttattgatttcaaaaagtgcaaaatctgttgatggaataatcaattacgaatttctcttctggtataaaaacctttgtaatttgtttgaaattgctttt

SEQ ID NO: 238976 - DNA, 366 bp, Gossypium hirsutum
cataaacatgcgactgatctagtaaatttgcagatgggggaatattggtacgatagcttggaatccaaggaacacatcgatgcgagcttatagaccgaacacactgctgcaatgagactagatagggcaatggcttattcatttactcatcagcaaactttgaagacatggtcgaaatgcatgaatccgtcattcatggatatgaacaatccgtcattgggctgcagttggatacaactatggatgatcgctcgatcatcggaaggacatggcgtgacgggaaaagaacccgacaacgaccagtcatccggaaggaatgcacatttctgagtacatatcagcaaagcttactctcggtaccaactc

SEQ ID NO: 238977 - DNA, 305 bp, Gossypium hirsutum
cttactcttgcttctactctcccatttttctatcttcggggaacttggttctaatatttcgaactctcagatgccttcccctcgcggttttatacataacgaatcatggctctgtgccaaataaagctacgtcttacctattctcttgtcaacatacgttatacgcatgaacagaatgcatgatctcgtgaatcatggactttaactttcccacggtgggtgataggaactttaaactatggttcatattgcgactatccgattgtcttggattcaagtgaatgccaatcgactatctaaactca

SEQ ID NO: 238978 - DNA, 113 bp, Gossypium hirsutum
actatcaattcttatctcaccatccacctttcggggaagggtcgcttgaaagttaggctggatcttaacccaatggtgtggcattatatgctcaatgtgatccatttgacaag

SEQ ID NO: 238979 - DNA, 258 bp, Gossypium hirsutum
tcaggcctgcagatccattcaccgccgcatccgatcatgggggcagggcagtcccagtatgaccaggaggccttgcatattctgaatgaacttatggtcactacgtagtattagaatgcagatatccaaacggaacttgagatatatcgcataaaggtgtattatcattatggcctagacataattatgatgctttcaagaaggaatgatgacagcattctaagtccaagatctgcctcttgcactaatgctgaggac

SEQ ID NO: 238980 - DNA, 347 bp, Gossypium hirsutum
cagacatgctaatacaaatgctgagacaagcagggctcatggttctattatacctcttgagctttttagtgggtcaaagcgaggaacagggcatggttcatttcaacatttcccttctcaagcggggtatacgtcttcttctgggtcagatcattccccccctagcttgaactctgatgctcaggatcgtaccgggcgaataatttttaagctatttgacaaggaccccagccactttcccggtacactacggacccagatttataattggctgtcaaatagtccgtctgaaatggagagctatataaggcctggatgtgtggctctgtccgtttatgtgtcaatgc

SEQ ID NO: 238981 - DNA, 385 bp, Gossypium hirsutum
ccaggtcccacctgtccgccaggaaaattggggtcctaaaaagaccatgaagtttcattcaaatgtcgaccctgagggtcatgcatgtcttcaagaaacaactgctgattgtaaactcaatcttccaaaacctagcaaggatgggaagaacaatgttggaaggagggatccttccggtcagtggtcaagtgacaatagaatggaagcccaatcaaataaaaagcatgaagttgatgcaaaaactgctgctgcatgtagcacaaaggggaagactgcccctgagaaaaatgtgattcaggattttgatggtcaaacaaggcaagtagagataagaaatggaatttcaaaatcatccttgcattgtgaaaatgaaagtcagcaagaa

SEQ ID NO: 238982 - DNA, 398 bp, Gossypium hirsutum
ctgagggattccggcccaagttttctgggaaactgtccattctgccaaagggttcttcttactttggaaggaaaagaaggttcccttacaagctgaaccttgttaatctcagtgacaaaccccaatggttcttggagataagtccagaaggaaaggtaccagtggtgaagtttgatgacaaatgggtggctgattctgatgtgattgttgggattattgaagacaagttccctgagccttctttgaaaacaccccctgaatttgcccatgttggatcgaaaatatttggtacttttatcacatttttgaagagcaaggatgcaaacgatggatcagagcaggctttggttaatgaactgaaagcattggatgaacatcttaagggacatgggccattc

SEQ ID NO: 238983 - DNA, 370 bp, Gossypium hirsutum
ccccatgggatcatattgaatgtgaaggaagtacagtaacatcattggacctttcggacatcaacttgaggtcaattagtccaacgttcggtgacttgttggatcttaaaatactgaatttgcataacacatcactttcaggagcaacacaaaatctgggcagcctgcagcaccttgagaaactgaatctgagtttcaatcagcttacatcctttggttatgatataagcagcttggttaaccttcgagttctggacttgcataatatcagattacatggaattgtttcagacatcttgtgagaattataaaatctacatctactgaatctggataacaactatacttaatgtacccttcccctatcttt

SEQ ID NO: 238984 - DNA, 300 bp, Gossypium hirsutum
caagcagacgctctccttatcttttgcaaaacctgacatttatgttcggcgaagcacctggtaagtggaactcccggcttggctctggtggtgcgactggccacgctaacaacgtatcattcacaaactctacagcgctgctcgacgtatcatcatgacatgtcttatgcgcacaacgggtacgcacgcgactccgcctgtgtatatgtatgcgcactctgtataacaacgaagctaatctcgatatcatcctaatggccgctctatgcttatgctttaaagaacgaactttaccctcct

SEQ ID NO: 238985 - DNA, 418 bp, Gossypium hirsutum
attttggcgccgttgccagggatcggtaacgtacgaatcttatttttgtttcttatgaccagatctgctctaggaactcttgcgtttgattccgagactgaaaagactgcgagagctaatcgcaaggaaacaaagctaaggaaaaagcagtcagcggtggttgggactcaaagtaatccatcaccggaaatcagaatcgacgacgaagcagagtctaaggttaacgaaaaccctactcagacttttgaaggagaaaaagtagaagtcgattccccagaagaagtgcttaacgctagggttgacgtaaaccttaatttagcacctcaacctatggctcatacaattcggcaactggccgaagcgccaacagaacaaccgccactatgcatcgcgtatcctactatggatacctgatttg

SEQ ID NO: 238986 - DNA, 434 bp, Gossypium hirsutum
  unsure (1)..(434): unsure at all n locations
gaattcggagctatctacttctataacccaggggtacattggctggtcggtggcttcttccttcaatttatttatgtatttgcctctaaaataacactgagatataataaacggagcctaaataaaatctttcaatccatatttttgatagatcaataaggcttcggttttcctcagctgatccagatcttatccgttggcgatggcggcttcaactgctaatggcacgggatggtacaaagggagagtcatagcagttccatcgggggatagcttggtgataatggccttgaccagtaacaggcctggacctccacctgagaaaaccattaccttggcttctctcattgctcctagactggcccgaagaggaggtgttgatgagccatttgcctgtgacagcanagagtatttgaggaagctctgcattggaa

SEQ ID NO: 238987 - DNA, 336 bp, Gossypium hirsutum
gtgacagccctaaagatatccatgtaaacaagtcccagcgtgtattacttacacataacgttacgtaccactcataggtagcatgctaaagaaaaagtacggagccccgtgctgagatccctattccagtctttttctatgcttacaatggcccggaacaggacttgtgtcgtaaatagtgaatggtgttgaatagcactcagaaagtgattagatcatcttttggtccttgatgcttctttgaatctcgaccccctccagatgaaccttcacctttcttaccgaaaatcatttcatagagatcgtgcatcatgtcatggttgctttcaccgcgag

SEQ ID NO: 238988 - DNA, 384 bp, Gossypium hirsutum
gagagagatgtgaatattagtttaaacttgtgtattttttaaatgttttatttttttccatttcatttttcaagtctactaagcaaaggacagaaagaaaattactttgttctttctattttttcatctttcctaccaagcacatctatggaaagaaaaattatatttttcatctttttatttttctacccttcaattttttatcattctaatttttttctgctctaccaagcaaagatttaatgtttcaataattggaggttttattggttactatttgattgcaatataggttggaccagagtatgcaagatattgcgggatagaggcattggagcctctggggatttacttgccaggcgatcttaattacccgggaggagt

SEQ ID NO: 238989 - DNA, 379 bp, Gossypium hirsutum
tgatcatatcagttctatatttggctttcaaaaagttcatgatctcgggatttaccttggggttcctcttttccatcagaggttgacaaatagcactacgaattttgtagttgaaaaagtttggggaagctacatagttgggactccaaaaaagtctccattgctagtcgtatttatctagctcggttggttattttatccatccctagctattttatataatcaatgatgattcttaggaaaattagtgatgagattgaaagtggtctagagtggaaaagacttcatgatcaaaacatatcctttcttttgaagctaggtatcaaaacatatcctttcttttgaagctgggtttcaacattgtttctaacaaggatgt

SEQ ID NO: 238990 - DNA, 235 bp, Gossypium hirsutum
cgctggaactaaatatgcctgattaactactttccaattaccatgaacgaaacactacagtgatgtggaccttttgcgaagagagacataacataactacttacatatgggactttcttaagctaacaataataacacgctcatccaccacctgagcaagatatgctttgacactctacatgtactagagaaaccaggtttgtatactactagagaatacttttgaaaccatata

SEQ ID NO: 238991 - DNA, 227 bp, Gossypium hirsutum
cgcaaaaccctccttccagacatcttctgcttcttgctccaagcagtctccttagaaacgaatatggctgcctgttctgctttgatctatactataatcactccccaaacggtcttcttctcacccaaatccttctataatcttagacttcttcctacaactaacgtgcgcacggttcgcactgcgaccctagccaccggttcacagtccgccaccggcccccggac

SEQ ID NO: 238992 - DNA, 269 bp, Gossypium hirsutum
ataaatattattggtcgaaaggtgctttatggaaacaaaaagcctttcaaacacttaaatatattcatgtgtaaatacatatccaacgctcagattaaacaacatatgaaatctggatatccatttcatacaccctcgcttctttcactgtcaccgcatttcttaccattttaaaagtcatcttccattcaaaatattaccccatattatatggaacatttatacaagaaggagccaataataaatcaatttttaaaccacacctctcg

SEQ ID NO: 238993 - DNA, 250 bp, Gossypium hirsutum
atctcttgttatattatgccataactgttatcgacctatcgtactttttcaactattcctcgttactgcctcactacaagactgacgagacaccgtctaccgtgcggataaacatgaattccacacacaagcaacccgatacgagctgccacattactcgtacaactacgaacaacacagtgagttacaatcctaacatcatcaatatcgctaaatggacccatgacatggaaatccttaaacgcacaat

SEQ ID NO: 238994 - DNA, 294 bp, Gossypium hirsutum
tctaaactacggatcccccgtctgcggaattctcacgagttacatcttttgttctgggatccttgcaaaagccaagtgctgtctaagcccttcaacatcctttctttcatggttgtttttatgttcctccatctcttcgtcccataatagctgtttctagaactcctccttctgctgatgttagaggaacattggaacagcaatctgttaggaggtattctggggctctgcccaatggaaaattcactggcagtttttcttctctgaaaacaaatgctttctttcacacacgtg

SEQ ID NO: 238995 - DNA, 205 bp, Gossypium hirsutum
aatacaaaagacagtatggaaccatgcatttcttacataccgaccctaaccttttctttcttatgacatgactaacaaagctctaaactaaaacactacctgatactacaaccattccactttaaaaccatacatacactgtttacacttgaataaacacacaataccatcagattcttatgtgaacttgaactcaagccttttc

SEQ ID NO: 238996 - DNA, 239 bp, Gossypium hirsutum
tcgatctctattaccaccgtctcaaacccattaatagcggtacatagttcacatccctaaagtctttcaatgcttgcccgatatccaaactccagcccattctagaattctaaaaattcttactattgaataactctaagacgtcaaaagccctagttgagaaacatcttacttagataataccatacctatatcaactagctcattacactagatattccttctaaaaccagagatat

SEQ ID NO: 238997 - DNA, 430 bp, Gossypium hirsutum
gtgcagtgacttccatctccactcccatttcagtggtttcggcttctaaggcagcagcagtgcgtgtcatacctgcagctcctttgcagttcgaggggactcttggatggaaaggatctgctgccacaagtgcttttcgcccagcatcacctcgacgtaactctgatggtgataagagactatcccttggagggacaagcagtagctcaaaacggaggttggattgccttgattttgatctcaatgttgctgatgctggcgatgaaaaaggtgctgaactaatgtccgggaaacaggttacagcctcatcaggtctctattctgcagaatcttcactgaaagctagtcagagaaaatccgagagacttgagctggatttaaattgtgtcagtgatgatggtgacggtccagcactagaattcagagtcaa

SEQ ID NO: 238998 - DNA, 417 bp, Gossypium hirsutum
  unsure (1)..(417): unsure at all n locations
agatcttctagaggtaggtatcgagctcagagtaaaaatcgtggaccagatcgtggttatcgtataggaagtgggtccaaagcatttgggaaaaacaaccgccagaatatggctccaaaggtggtgagagggagaggacctaggagttatgaacctaatatgaaaatcagcagtcaagcacctccaatacagggcagactgtctggaaagcctcttgagaaaacatcacaagccaattcaggtagagcttccaccctcgcaacaaatgccggtactgtatcagatcctaatccgaaacatatatttgcgtcaagcttgagttctgcttccccacctttttatccagcggcgtcttccaacanagacactgctttaactcataagaaagatgtacatgctgaaagtgtgagcgggaat

SEQ ID NO: 238999 - DNA, 398 bp, Gossypium hirsutum
tttcactatttcattcctttctcacaaaaaatatacattatttctatacacttactttaaaccctcttctccatgctcattcatactataaaattcttcaccttattacccaaaattaacatcaataataaatatacaacaaccataaatcaaaagcacaacacctttcatctccataccacccaaaatccataataacataaaccatctttcattccttaaacccataatgttaatatcctttactttcaccattcaatctcaatctcattcttcacctcaaactcaatcctaaccatttttaccaccaataatacctattaaccctatttcacccctttttaaattccaccctcattaaccctataacaatattcccaaattcttcaacaataaat

SEQ ID NO: 239000 - DNA, 288 bp, Gossypium hirsutum
ccaatttgtattgccttggagatgttgtgtacgcgcctggtgtatcatgagactgtctacagccttctgttatagataaagaaagtaatagagcagtacctaatgcctaacatccgtgatgacttactgaaaacttgtgcagacgatccatgccttgctgatcactggccatatcttgtctgcaactacttcaatgagtccactgtgatcacagatatggagcttgcttctaattaatcccaacgttcaagttctcctagtatcacagatgtaacccaactcacaaca

SEQ ID NO: 239001 - DNA, 228 bp, Gossypium hirsutum
actgtgggcaccagctaacgtatgtgacccttcaattgaattgcatgaaagcttccctttacctttggtaagcgttacccctatcttaccaaatggccggacaaaggtactggggtgaaaaaggcttagtttctagcggaattctcccttttatatataaagctctataggttcaaatgcagatgcctttcgtgcacttttagtataaagaatatataaatacccatc

SEQ ID NO: 239002 - DNA, 159 bp, Gossypium hirsutum
aagaattccattcacttatacctactttaccaataacatagactagtggtaaatattcaaatgtcattcaaagctaaaccctacatagatcccactcctatacatatactacaaattctttataaagacatcctaagtctcaatcatatatctacaacc

SEQ ID NO: 239003 - DNA, 218 bp, Gossypium hirsutum
acttctgagtcatgataatatacactgtcaactttgatcatcatcaaccaatcactctaaatacttaactatgaaactatattaaatctactcgctaattgatgacatatgacaaggccttaaaacattctacattcatgcttctatatccggacttagcacatatattacacagaacctcaattaaacacatcctctatacatcataagctctacac

SEQ ID NO: 239004 - DNA, 260 bp, Gossypium hirsutum
tactttgacactgtgcgcaccagcttactgctgttaccctcctatagatatccatgaaaggtcctttttaccttggcaagattacccctatcattaccaaaagtcaggacagaggtactgctgtgaatagggctgcttttcaagcggcattctcccttttatatataaagctatatcgtttcaatggcaattgccttccgtgccttttcaatcaaaagaatatgcacctacctagccagcttatttaatcttccaaactt

SEQ ID NO: 239005 - DNA, 383 bp, Gossypium hirsutum
ccaagcattgcaaaatgtgcatcatacctgaatgtgctaagttcggtcctcaaaacttcatggcaatgttcaatgtgcactgcacacttttattttcttcagtttggtatctaaatctaaactttgaaactcgatttgatctacacgccaattgtttacggaggacaaggtgttaatgcatactacattcaagcttatatagccggagttagtgcataaaaaaaaaagaacgtgaatcaaattcatcgacatacatgaaaagctctacacatgcatcaacagaacagttaattttagggttgagagaagaaagagttaaaacccacaacgattcctcaaccaatgtctttgccttcgccttctatcaccattctctctacacc

SEQ ID NO: 239006 - DNA, 134 bp, Gossypium hirsutum
aaaaggttgaaattttggaacatgaacgggtttcaacctggctagacacatttggctgatgaaactaatcatggggaagggttcattacaacttattaaacttggaaaggccacaaatgtatttgtttgggaag

SEQ ID NO: 239007 - DNA, 364 bp, Gossypium hirsutum
cccttcctcaaccttatcacgcctctatgtccttcgacccacgcatccgaaagaaaatgtcgcgtgcttcacaaacaccaactcactcacacacactcagatatctacatttagctatctacataatagaaatcacaaagaacatatataaactctttcccactccgaatacaataagcatataactacatcgcttggactcaattcctaggtgctactattcaacctcattcaaacgatgttaaataaatacttcaatctgactaccaacaatcaattatttaataaagcttaagagataatatacacaatgacatatagacttcattccgctcagaatcacttccatgtgcctttttaacta

SEQ ID NO: 239008 - DNA, 286 bp, Gossypium hirsutum
catcagccatatcaagcctcgagttccgtcgacccactcggggcgtaattaaaggagagggatccatagaaatccccacatatgttcaacgacttcataatcgataaatatatatacaacaatccttactattttatacaaaaacaaaatcattccaattatttctttcatatatatataattattaatctttctctgatatcaatctttgtgaataacgccagtaatctcaacactttgataagctgagactatcaaatcactaggtcatgatttctaaaacatt

SEQ ID NO: 239009 - DNA, 355 bp, Gossypium hirsutum
aaaaatccaaaatatatattgaaaaatttaaaaggacgtatacattacatttttctatatcctatacaatcaaatcacccaatttacaaacatattacctccctataaaaataactacacaactttaaaatataaaattaaaaaaacaatatcaaaaagtaataaaataaaataaacaaccaacctttttcttcttcattgtttctctttctcaaaatattctcctctatcacaaattccatttccaaatcttaattcttaaattaaccttacattttgcattaaaactttaatctttctttactcattttgcctttaatgcaaaaactataatcccttcacaaacaacccttat

SEQ ID NO: 239010 - DNA, 406 bp, Gossypium hirsutum
  unsure (1)..(406): unsure at all n locations
cgctttacaatctagaactagccgatacctacacctattcgaatccagcacgaatctaacaacttacacctactcatctccaaatccagcattcgcgnctatctgctccagctttctgaccaatctcacaagctctctaagactataatcaagtacctgccgtgtctgaaaaagtagtaaccggaactgtgaactgatcatgtctgacatcatttctcaaattcaagcttccaaagactcaagcaaattatcatatataagccgtgcgactacatattctctgccaacttcttcatcatactcatgcaagatgacattttataaacaacatccaagatcctttaaagagaatcgttacatcatgaatgccacacgttttacaaatccacatattgaaaggcaatat

SEQ ID NO: 239011 - DNA, 401 bp, Gossypium hirsutum
tttggatctaggagttgaccctccatcatctcgtgatccaggcattgcctgctgttgttccagcttctcacagtctcacaagctctctaggactagaatcaagtacctacggtgtcggtaaaggtagtaaccgtaacggtggtctgatcatgtctgacatcatttctcaaattcaagcttccaaagactcaagcaaattatcatatagaagtagtgtggcaacagagtctctgccaactttttcatcatactcggccaagagggcatttgaaagacaagatcgtggttcctttgaagagaatagtgacatcagggaagccaagcggtttacaaatccacatattgaaaggcaatatttggaaatgccatacagagatgtaagctctatggattcacataac

SEQ ID NO: 239012 - DNA, 393 bp, Gossypium hirsutum
taccttgctagcacgaattaccctccaggatccttatcatgccttgagggccgtctacccacccgtgcattatgacaggggggaattgcattcattctattataatcgggctaaattcaataccattattacatcgatatttacaatctagatctacgaaacgtcctgagtactactaagacaatagtcttggcattaaaactctcattattgctatacttgactaccacatttaccacagaatcccttaatctaaacatttgatttatccagtcggaaatgtcttaaaacacattctaaaaattatatgctgatttaccatgtaatactgcatgcactattgcactacataccttaaaacaactcgtttaaaatgatgccacatagcatatc

SEQ ID NO: 239013 - DNA, 221 bp, Gossypium hirsutum
cccctcctacatttcgacccccaaaaccctccatcatccttatcatgcctcgatgtccttcgacccactcgtgcgcaccatcaatagtaactttcactaatacatattacaactctaactcttacaaaaccatcttattctccatcactactatacatttactcataaactcctagacttctcattcttcataatatttatcttacatacacctacttaat

SEQ ID NO: 239014 - DNA, 273 bp, Gossypium hirsutum
ctaatatccactgctccacactttccatcctcctatctgggcatgggcatttctagttccatctactctgaacaatgacctcttgttaagaacaatcctcattccttactcacagctgtgaatactttaccatttaccatctctagatacgacataaaagtctttcactcttaataggacctaagttctcacgcgattaatgataactattgcctatgctctctagactcactgtccacacaatgctgtactagttcattctgtcatacctac

SEQ ID NO: 239015 - DNA, 440 bp, Gossypium hirsutum
atagaactagcgcatacgacccttcgaagaactatcacgactcgaagctcacttacacgcagctctattagtacagttgaagacaggtgtggaaccattctttcaagcagtcatgtcacttcaactgtgaaggacgtatcggatatacgaccttcagatgaagttgatgatgaacctgaagtacatttctcttcagaaaaggcctcctcagatttaggttctaccgaactgctgaaaaccactgattttaaagcttttaagtctgacgtgcttacttattttccctcaagttactatgatgctgtcctacttacatctattgagaatgaaaatccgaccaaagcatgcctagaaatggttggagagttacatgatcctgcggttgaaagtacaaaacccccagcactatccggtgcaaacgtcatgaacatcatattagt

SEQ ID NO: 239016 - DNA, 258 bp, Gossypium hirsutum
aaccctcttcatcttaagagctgtccttgtgctctttctaaagtaactaatctcattttacatccacaattaacaaaatctcaaaatctttcaaataaaaaaacacaattctaaatccattgccatttgtcaaaaacactggacctgatgaccgaaaaatttagatccacgaccttactgcaaaaaaaacccttcgctatattcaaaccaacatcgctgatatgcataagcaacatatcatgcttaaaacgatcactg

SEQ ID NO: 239017 - DNA, 381 bp, Gossypium hirsutum
catccgacggcctgcaagaattcatcacgactcgcttcgatttcctccattccttttacattgcctttacggggaggccattgactgtacgctgaaataaatagattaaaaaaaaaaaaggttgaagaaggtgaagagtctctgtttcagcttctttatctgtctttgcttaaaaaaattatttcttcttcttattcttttattgttgtgtaaatacgcttatgcgtaaggattgttctcctataatgctgggatcagattctgattcttttttttaactttgtctgaaaaatacgtttcttctccttgatttttgatacagatcgtttcattttcaccatttacaaagatccaaaacaattaatatccctcttttttaaa

SEQ ID NO: 239018 - DNA, 268 bp, Gossypium hirsutum
tttctacccccattaccctccatcaaccttatcaacctctatatccttctacccactcgggctcttttctaaaggtttctctcaacatactttcccccttctcctaatctctcattattacctaacttataacacaaccatcttcaataatactaaaccccaaacttcaatctctcaccctaatttatctcctatttataacatcaaaattacttacaccccctctataactttacactcacctattactattctatcaaccttcctt

SEQ ID NO: 239019 - DNA, 421 bp, Gossypium hirsutum
tacgttgggacgcccatataccctccgtcatccgtatcaggcctcgagtttcgtctacccactcgtgcgcatatatattggggatatagtatactgtaataatttatctgtttgaaaattactataaaacggtgttttctgatcggtttttgtttcctgcttaccatatgattgtaaattgttttatgtattaatcagttaatgctaattatttttgctgatgtcatatgttaaatagctataaattccaacaaccaactggtgtgtaaaaataatttaaaatttcctttactgaaaggtatttcccatttttgttgtgaaaagaatccaaatttattactttgtgttgtggtttttaaaatattaataaatgtctaagttattgtttgcataacaattaatattattttaaatttttaaa

SEQ ID NO: 239020 - DNA, 336 bp, Gossypium hirsutum
gcgacccatacgacccttcgtcagcctcatcatgcctcgatggccttctacccactcattcgcatttctgagtccgggtttatatacttgtattcatatcaataagttacaacatgtgtggatcgactaaccttaccctgattactacactctctgctattcaatacacctatcagtgtaacgtgcattttaatactcaaatattgtcatgatgatctacttgaacataatacttattagtgtggtcacttattggctacagattttaaaaactacatgccgttatatatacctttactcttcaaaatttcttcatgatgcattactcttagaata

SEQ ID NO: 239021 - DNA, 309 bp, Gossypium hirsutum
cactcaaaaactacactctagactattacttacatactaaacatacacgcacatttgcagggtaatataacttttatacacagattacatcctattctattactatcaacgtcataagtaaaaatatttacctcaatatcaaaaaatctccaacctaacagaaactgcttcaacaaaccttcttctacataactcttttgttctcaaaaaatccactaatccttctttaaatcaactgatcgaaacactgttaatcctactattccatccaatcctcatcaaaaaatactagtcccattactaattata

SEQ ID NO: 239022 - DNA, 153 bp, Gossypium hirsutum
tatatattatctacatactattctgcagcaacatattcagaaccaaacaactatttgtcacaagggtcatacaagcctttgcatcaggctatatacttggaaccatatatctcaacgtaggaaatgatcaatgaaggatatctgtacaaaccc

SEQ ID NO: 239023 - DNA, 252 bp, Gossypium hirsutum
ttgatacgctgaactccactcgttccatacttgcgccggggtttggtttcagactctaatcatggtatccaagcacaatccatcaggcaacaaagaaccgctcccactatctatatgtgctcctactgacactgcgagctcgcttctacattccgtatacatcgcatcacattggttttactgtaaaccatataccaaatccttggatgtcacacatcacgcatactgcaatctcttaacacatactagact

SEQ ID NO: 239024 - DNA, 395 bp, Gossypium hirsutum
tctaggcatcggacccttgcacatccggatcaaccctctagagccttacttccacgcttaccatacacgcacagggagagggaaagagaattgttgtaacagagacagattcatatattttaacgtatcataacaattatgaccaataacaatatatcggaaacttaagcagaggcttgtttaaacacaaccacttctacttatctatttggttatcatttcaatcactaaaactaccttgaatcaactactcaaaacaaggatgagactccccttacaaacatacctaatctaaccatccgattcccattaacacacatatcacctaactcatcagcaccgtttccagcataattaccaatattaacgatttcaccatcccattatcataaaca

SEQ ID NO: 239025 - DNA, 344 bp, Gossypium hirsutum
tacactaattccacaccatcattcttttaatttaacatatacaaattatttctacagcttatcttaacagatcgactaaccatcactactatacctccatatcaaccattaaattctctacttcctatactctctactacctcccatcccttaccatcttttaaaccattaccctcctccttcactatttcatctcctaccaactctccctatatttatacctatacaccctcctatcccatctcacttacctttacaatatcctaaacaacctacaaatatatacctacattttctacattattaattcttaaatcttacctcatactctctaatattacctc

SEQ ID NO: 239026 - DNA, 405 bp, Gossypium hirsutum
ttgcgacccccaggacgctccgtcaccgtacaggcctcgagtttgtcgacccatcaggcgaatttaaaaggggataatgcatactgaaataacttatccatttgaaaatcactataaaaccgtgttttacaatcaccctttgctgcctacataccatataattatcaaaacttacatgtattattcacataatgctaaatatactctctgacatcatatgcataacaactataacttccaacaaccaacctgtgtgtaaaaataatttaaaatgaactttactaaaatgcattacccatttttgcggtcaaaagaaaccaaatttattactaggggcaagattctgtaaaatcttaacaaatgactaagttaatgattgcccatcaatagatattattttaaatt

SEQ ID NO: 239027 - DNA, 174 bp, Gossypium hirsutum
cccttaaattatttctctataaaccacaattcctaacctcactctatcctacaagatccacacgatactctataatgagacttgccatcttatcacagatagcctcaacatctcttccaaactccactccatcattgtctactatcacaacccccacatggactcccacttata

SEQ ID NO: 239028 - DNA, 375 bp, Gossypium hirsutum
ccaatgaccctccatcagccgtatcaagcatcgatggccgtcaatacacgcggggcgacaaacctgggctagaaacagtgatggctgagtggacaaacctacagcacctgttctatggacagtatgaaagcatagtcaactctgaggtactctggaagctgctccaacatggcatcaatgcagatgacaaacgagtacaggatattcgtgtgaaggcagacgagatctacagcatggatgagggcatacgaacacgtctaagtcagccaaaaaaccataacgctggacaaacattactttgctgctcaagatactaaagctgatcataaacgagatctgcaacataatagaagctaatgccagatgacaggccac

SEQ ID NO: 239029 - DNA, 225 bp, Gossypium hirsutum
aaactaatcgatcccacccctacaaaattcatcacgactttattccttacacccacaccttcctacctcatgggaacattttttcaaactacttcatttcccatatcaatattatttaccacaatataactcctcacatatattataacttcatatataaacttcactatctattcataccttcctatcaaactacctatttatatcttctctccatctttacta

SEQ ID NO: 239030 - DNA, 403 bp, Gossypium hirsutum
gttgtgcaattttaatttgattgttttctgaaaagaaatgagttgtgtctctacatctgcttcgtctgactcttccgtatcttcttccacttcttggttttccggcattgttaggggccgcctagacaagtcctcttccctaaagatggctggcagctcctcctcaggtggcggccttgcctccaataacgaaggacccatcaagggtaagaaccagttccgtggtgtgctcttcaagtatgggcctaagtccatccaggttgcattcaaaactggtgactataagcaacaagttattttcattggtggactgactgatggatttctagcaactgattacttggaacctcttgcagttgctttggataatgaaaaatggtcacttgttcaactacttaatgtc

SEQ ID NO: 239031 - DNA, 401 bp, Gossypium hirsutum
  unsure (1)..(401): unsure at all n locations
tggatccaaacgatctgcangaatttttctcttaaacaaattaacaaatttatcgaatccttcaaataaaggaattttattatagtgactctctcaaacattacaacatatcaggaacattacatatatattaaccacattataacttacacaaatatacacttaataacactataaatcatcaattctttgcaatattaacaaaacagaataaacattctttattacaatcacaaaaaaataacctaataagtttttcccttaaattacaaaactcaccataaactcaagatacgaaacttatctccaagtcaatatacccattctcctcttatgcaaccaacttacacatcttttcttctttccaaaactcatctttgaattccaaaagataaattcca

SEQ ID NO: 239032 - DNA, 415 bp, Gossypium hirsutum
ttttcttccaatgttaaaggagttgtttataggcataactgaagttccagttatatgtgcaggggaagtctctttgtgggttttggctgcaatgaaagatgttggacttgggttcttaattggagtcggctttgctgctttcagcttcgtttttgccttgggaactatagtaggagcaatgaaaggccaaacgactgaaactgggtcgttcagtgggactggacttggcgctgttgcaggtgcaaccacagaccttcaattgcttgaatcattggctgatggggagttattatcacagatcactgtattagttaggttagtgagtgagaacgtcttcattgcatgggtgaattcagcaatgctaaaagcttttcaatgggaaatggagcaaagggtttgtcaagaagttggattc

SEQ ID NO: 239033 - DNA, 381 bp, Gossypium hirsutum
tagttctaatgatttatagttttattcagaagggaaaagctgggaatttcccacttgaaattccttcataaaccaatttacctaaaacttaataagttgcatacccaattacgtttaaacaactataatgcttcaaaaatttaacatcaaattatagagaaataagctatcaaatataagcataactaacttactattgacgaacccatctaatccattgatacccacccgttaaaatcttcttcccgatccgacacctatacctaacccgatttttagaaccgtaacagcaaccggatctaccttaacaaggccttgaatatcatccatccctataaccgaaatcatatcgagagcttccttatcgactttcatttgatc

SEQ ID NO: 239034 - DNA, 388 bp, Gossypium hirsutum
ggcgcctactgctgcaatgctgattcttccccatctcggggaaactacttcaccggtcgttcctacttcaccgccaccggaggtaaaggcctctgctttgaaatggattgcactgggtaaaagcttttttgttcgaacaaaatctgggtctattagcaaagagtcaaaaatggaggttgaccgttgtttatgtgctgattctggcttggaaaacaggttccttgaagcctttgaactcagctggtggtaaggtaatgatcatgatccatagttgacgggtcgggcaaaggcttgcttgtaaatttatcactctaatgttggttttcattgcaccaactcttgtaattacagccaattttctagtggaaatgtaatcctcaaacttcag

SEQ ID NO: 239035 - DNA, 448 bp, Gossypium hirsutum
  unsure (1)..(448): unsure at all n locations
ggaaattgagagctctccaattttctccagaggatgaagtggaaggggaaattatattttagcancataggttactgggcaatgcagtttcaagaaaccatgttaccgataatttagtttctagggttgctaaaagtctaccacaggaggttgaagcatcaaggataaagatatgggatactatgcttgttaatcgatatctttatgagctaagagaagcaaagaagcagggccgtaaagagagaagacataaggaggcacaggcagtgttggctgctgcaactgctgctgtagctgcttcctccaggatttcatcgagaaaagatggcttggaagattctagtcatcaagagaatgtattgaagctgaatgcttttgttggaagggccggcattaactctcagacaagagcaaaagatgcactttctaggaatgctgtctcaaggac

SEQ ID NO: 239036 - DNA, 437 bp, Gossypium hirsutum
ctgcacgagaaaggaacgaaatctctgaacttttctctgcggtatgcgtttcttttgttaacaagcggaacagtcttcgatcatccacgctatacaccggttattctactaatcctcttctgattcagtcaaatcacttcgcttcctactttctttacttgttttactcttataactccaaccatatgattaacggttaggtcaacacgttcatcatcggcattatcatcggcgcaaatggatgcttcaggtacggactcacatgcttacggaggtgcatcttctaattcaaggagacacagaatactatcgaattcaaatataatccaagtgactgtttcatcccagttagaatactcatgcctactacgtacatcacgttctatccaccaagaatccgaccctcttatcactaatccgaacctataaaataacac

SEQ ID NO: 239037 - DNA, 469 bp, Gossypium hirsutum
  unsure (1)..(469): unsure at all n locations
gtcaaaagataattttctatcattttaaatataaatataacgctnaagttaacataaaatgtcatctgacaaatattacaacataaaaaacaattcattaccttgaaatgctatccatgatcttatcaatcatcataaatcaaacacaagcatttctaacaactataaattaacaagcaaacattactaaatttattacatattcataattttaaaaacctcacactaataacaataaacatgataccctcacactttgaacccatcatcttcaaaataaataatattgctaacatagcataaatattcttcatatttctattcataatcttcaccttcatcaccaacttttacataatccttttcaaaagcagacatatcctaactgactttcgaaaattcaccttattacaatccctatacaacataccaatgcacaaaaactctctttaaattcattatatcaaac

SEQ ID NO: 239038 - DNA, 484 bp, Gossypium hirsutum
gtttgagcaagaagataccatatcaaaagagattgagcgacggcctggaaatggtgatgatttgtattcatatccactatcaaataattcacggtccgatcttgaggatggattctttccatactgtgagattaatgttgtgttgagtgtaacaacttcaactgtgggtcaaccactagaacataaaaagccttcaattagccttgatattccaagttgtcgacctgaagcggcggatgctctctcttttgctgcatcaactctctgttctttggcggagcaggttgggtcctcaaccaaaaatgtacaggggctaggtaatctaggaaacactactgataaacggttctctgaagaggtctcgcgaactacatacaaattgtctgtatcctgtttttcacacgaagattgtcctggcattaatcaatacagcgataatacatgtgttcatgaaccagtgagtaggtctgtagtggatcgagac

SEQ ID NO: 239039 - DNA, 475 bp, Gossypium hirsutum
ctcgtgccgctctcagcgcaattgccatcaagctgaagaaatacctggagagctgagttatataagggcattcaacattttgtaaatagaagagagagaggtactggttcgtagaggtggtgggacttcttcgagcttagggtcctctctcattgcatttattttttttgttggtgcatatgtataattagaacagttgagctttaatggtgaggttttgtggagagttttaactgaagggaaaagcttaaaagataacattatgggttctgtttgttgctgcttgcgccctgaggattttgaggactatatcaatccgaacagtaatgtatatagaaattgcgtgtgcctcagttgctttgttcagaacttcgtacacgtgtataccacattgttcccaaaaggggaattgcgttctggcccttcatccatttatgggacaagatctattatctcttctgcatctctagataac

SEQ ID NO: 239040 - DNA, 288 bp, Gossypium hirsutum
gcacgaattcttcacgataacaaatacactaatattctctatttacctacagtcgatctaacacaagaacaccaggaccaattatcacaggtcaatctcactgttattaataatcacatatataaaatcttattttggtcagcaattcccttctttccacacttgtattctaatcctatatactactaacagcttaatgattctcatattcacgatcactactatataatatgctaacttttaaaccaaatcctttttaccttaacttaacttacctctacactaacc

SEQ ID NO: 239041 - DNA, 337 bp, Gossypium hirsutum
  unsure (1)..(337): unsure at all n locations
gtattgctgataaccatggtgttcaaaactttcctgccttttttcctgctatncgattagtgggtcaacacgcctgcaaccttgatattcctgctgttagcatgacattccctgcatatgttgcccatccgcaacttgcaacgtgaaattctgaaatgacatgactgccaatattgacacgtgcatgctccagctctataagcaacatattgtccaccttatattgcaattgatcgtttctattcatgctcatccatcagcacaaatatctttaactggaagcctaactcaaaaaaatacttctaacaagccaaataaccaattgaaacccttccca

SEQ ID NO: 239042 - DNA, 349 bp, Gossypium hirsutum
cttttctgtgcgcattgctggggtgttttatatgcacgatgatagaggtcgatacaatgttggcggtcggcataggcgaacacgtggtggaaggaatttgtgggaattcaaagatgataggaaatgggtacatgacaagtttgaggagatgactttgcaagaaaagcattatgaggtgggaagatcatctataggcacgtatcgagctcacagtaataaatcgtggaccacgtcatggttatcgtaaaggaattgggtccatagcatttgggaaaaacaaccacctgatcatggtttcaaaggatggtgagaggtatatgacctatttagtattaacttaatattaaaa

SEQ ID NO: 239043 - DNA, 311 bp, Gossypium hirsutum
cagtcttgacggaacagtcatccacatctggtgaccattcaccggttgcggcgaataataagacccaatacagttcactgaccgtcatgaaaaaacgtcatgactcggataaccctcgcttcacacaactcaatcagatttcagaacataccacatataacaacaggcctaatatcattatgacccactccgatcgtacttaccaactattactcacacctaatagcaaatttcaaactgaaacaattaatatttggaataaattagctatttatgaatagagtgacatctcattggataaccaataggca

SEQ ID NO: 239044 - DNA, 317 bp, Gossypium hirsutum
tagggacaatgaaaactttaccaatacgaacgaatattatgtactttataagactcagatagtattcgactacggctcacctttcccacatttactcaacacaactcctcattcaacaaccaaaacctctgtagtttataaatctatcataacaaaaacctacaaattatataagttttctactcattgacaatctaacataccactccacttctaaatctactcattttttcaataccctcaaacaccccacaaatatatcttccttagtacaaaaattcctataattaaaaacttttatactacctaactaccaa

SEQ ID NO: 239045 - DNA, 370 bp, Gossypium hirsutum
aaataactagattttcctcagatttgtacgtgaagcggcattatcaggggcaattgtaggacacaatgctcttatggagaatgcttggcatgatactgagatgcttgccgaggctgagctccatgcacatgctcatgggcgacccacactgaagaacttggttgacgcttgtaacaaagtgttacataatgaggttgagcacaccccatctgcaaaaacagatgctactgctgcatttttggcttctcttgacgagcccaaacttacacgttagtcagaggcatggaagaaacctcctatcgaaatcctcccttcggacatgtctgctctctcagattcaattacagtttacacgaaacctgttccattg

SEQ ID NO: 239046 - DNA, 454 bp, Gossypium hirsutum
atatcactgacgatagttcgacatcagctgagcattatacgggtgaggtgcacaataatactactatactgatgccagattgcaatcgaataaatgtgatgtgattaattggcacttgatccatatgagtacgctaaattttcatgctctatatctcatcatatgatatgtaactacatatactactaatttatgtaatcgctttgaaacaatcgtgtcaacttgtatgaaacatcaacttaagccatacgagttgttgcatgcgcaacctattcataacatgagcgataacggtctgacttggaataatcaggatatgctaacgtttagacaatggctcttcatgttcaatactggacggatatttgattttactttaaagtcttaactgtatcactatttggaaattgtactggagcatttacccccaacaatttagattccagatacttta

SEQ ID NO: 239047 - DNA, 220 bp, Gossypium hirsutum
cttacacgccaactttaatcctaccaaaagcaccataacggtcataagtgttcatagctaatctactaactcaccatacacaatcgttaatactactccgatccacttcttacattctactacttccccaatgaaactttacccaactcaaaccttttacgtttatgatcataactagccatcaactaaggactctaacaaatattgatagccatcactt

SEQ ID NO: 239048 - DNA, 315 bp, Gossypium hirsutum
tttttcgatttcaatctcaaaatctgcagcacttattttatatacagtaacatctcgcgtaaatgagctaattatcttctaacttaacaaccatacctaaataacataatagcatatggctcaatcaaaacctccaaacaaaataaaagcaatccttacaacattttaaacacaatctttaaaaatgattgaaaatgcttatacaagcaactaaaactttcactacatcttccttaatactatataattactcattcaaacgaacaacatgctttcattaatagttatcactttatcgaccaaattcctaaactt

SEQ ID NO: 239049 - DNA, 323 bp, Gossypium hirsutum
tttacatcaaacattccatatttatcttaaactttcattatttctggcaaaatgggaattttttaaatggaacaaggttccagtaaaagtaacaacatatatctaatagttgacacattcatcacatataaataccttacatgataaatcacacatattgtatccttttaaacagcatacaccatatctctcttccaacatttaaccaaatcattcaaacaaaaccaattccaaaaccctatattttatcgatatcttcatcttctaactcaatctaatcatctgcacctaacttatcttccttatctacaattccttcatta

SEQ ID NO: 239050 - DNA, 465 bp, Gossypium hirsutum
  unsure (1)..(465): unsure at all n locations
attgaaattaatttaaaagtattattctttttataatgatgatagatantattacatatatattttttggcccagttggcatacgaaaataaacaataaatatatccatttctttaagcttctacggcattctcttcctctttatagcataaatccttttcttgttcagacaaaatatccttttcaaccctcttcaggaagctcagcatcatctctaatccactttcatcaaatcggggaatagtgaggccctttgggtgatgaatgacaacaggatctacacacgattccaacagctccaatccatatggtttcaggaaatcattctctcctaaaaagtgaagagatgggcagtggatgggagaagaataagtgttttctgccactgtttagttcttgaatttagccccttcaattattatcaaattctttatttggggaacttttgtaagcgccatacccttc

SEQ ID NO: 239051 - DNA, 222 bp, Gossypium hirsutum
taggtaatgttatatacattgaagtttattcataactaaattaaatgatggtgcaagggtgaaaataaattcaaataaatttattttaaataagatttcattatttaattatttaaatcaaatggtatggattaatacttaatctgctatgccactttttcatattataattatcgttttcaactgctttaattcatccccaatgttttcaatcattcacat

SEQ ID NO: 239052 - DNA, 305 bp, Gossypium hirsutum
atcattacacttactaattatgccatgacggcactaattaagatattctatgtgctcccataattcaaactcaacaacttatgtacactaaaccatttactacctaatctacaataaatgcctaaaactcccatcttactatctttactacaataaccattgtaacttaattgacattgcctcattcatacactatttccataaatcctactactatttacccagcacatacaccatattcttccattatatacaacaaataccatgctatttaataccattttcttttctctgaactaccctat

SEQ ID NO: 239053 - DNA, 401 bp, Gossypium hirsutum
gcattttgtaataaatccaaaaatgaaaaacatttttttgcccataagttaaaaaaaaaaaacaatgcgacaggtaaggccatggtatttctacagaagcaattttatccactctgtataatattccaaatgacaatgaacaccacttcccctaaagttcagcttctttatgatctttgcaaaaccacattttctaattctggtttgtcttcttctgcttcttcccaatccatccaaatcctctgctctcttctggacacgtttacccctgctgatgttggacttaaagagggaaatcctattgatgatgaagggcatggacgtgtagctcggtgtactcaacctattacatatttgcacattcacgaatgtgatggttttacgatgtgtatattctgctt

SEQ ID NO: 239054 - DNA, 267 bp, Gossypium hirsutum
gaccaagaggatagttctagtcacaatgtcttcactaagggcagtgtgaaatggccatgtatcgacgaaccgcacattgaagatcggtaaaggccataaactatttgattaagggtgggcatgtcaagggagggcacagttttcttgtaaccaaaccagacatgattattttcgtactgatcaatcagagaaccttcttgctaaacgtatttcaccatgcgtacatgcagattcattctagacataccattcattcattacttccga

SEQ ID NO: 239055 - DNA, 473 bp, Gossypium hirsutum
  unsure (1)..(473): unsure at all n locations
agagcatcagcaccaggcggcaactaaatactcttcccgacgtacccggtttaccaaccagaagccattttcgattaaaataacgaaataaaagcctatttttaatcaactttttatccatttttacccatttaagatccaacatttggcatttattccaaactttatctaaattttagaaaccctttttctgctagaaaaattattaataatggtagaaaaatagataaaaagttttaataaggtttttaagaaaaaaatctttttttttcttctgatattctgggaatccttatccataatctattcagcacttatcgtctntgcttaccttttctgtttattcgagatcgtttcttcttctctttttatttaccccagctccttctctttnttcttcttttaatcccctttccagattaaaaaagtttgggtggttggtttttttggctgggtttagaagtttttattat

SEQ ID NO: 239056 - DNA, 422 bp, Gossypium hirsutum
gtccaatatgctttgagacttcccggtcaatcaatctgctcctcggtggccatgctcaaactcctgtggtttcgttgatgaatggttgaagaggaataagtcggttagtcttggtagtccttggtctcagtttcatcctgtttgtctgtaattctgttgacgtgagtgtgctaccttgtcttgtttatgcgccccctactgtcgagtttgaatggtatgtgttggcttaagtttcactttgttgttgtatactgctgctcgtgttatgtgctgagtcaaaataattaattgaataatatatatatagagtggtgagagagttaattttcattggtgtagtattccatccaccttcacttagcatctacagggatatgtattttcctggtgttttcggaaattgatgggactgctaaacatgt

SEQ ID NO: 239057 - DNA, 359 bp, Gossypium hirsutum
tagtcttcattgcacgttatgctgaaaagctacgttcagaacgggacattgctcatttttaaccctgagctgctcctaacatgaccccatatgatacgaaactccacaatccatatgagacttacacagctctcatataaccgatacatatctcactatactgatgctactaatgtaccttttactggtcccagctctgcgacttcggaaaactatcccacaacttattcttacataaagttattgcttcatacatcaaatgttaacattgtcccctatcttcaaagtacaaaatctcaaccactatcttataattaacatttatttctcattcaacatacttaactcttatcttaata

SEQ ID NO: 239058 - DNA, 404 bp, Gossypium hirsutum
ccaatttccttcattataagccaataaaaaaaaaaatccctggccatttggctaccttcctcttccgttacacgtttccgtttcctctcttatctctctcatttttagaaaatggctcaagtggtggccactagatcgatccacggctcattcttgtgccagggcactggatccgttcaagagcgagctgtcaagcttaagcctgcgagcttcggttctaaagtgctggcactggacgagaagaagaacaagagagtcgtgctcgggaagaactctcggattaccgctaagagatccgtacgcgccgaacctgaaattattcccgtatcgccggaggatgtgcctgagagggaggagcaatatgagcaatttagggggattcagcaagtaggtgacacatcggt

SEQ ID NO: 239059 - DNA, 335 bp, Gossypium hirsutum
ctttttcaacttttaccctaaccacccaaccgatctatggcatatttaaacacaacttctctatccccaaacccctccggggaaaaccaccaactcaacctccaacttaatacaaatatcttaaaaaaaaaaccatcatttttaaagaatatttcaacttaacctactatattaagcattacaacgcccccaagaactaaaaactccagcataccacccttaatattataaaaaagcaatctccgttgcatttaataaaagcccaccttcttattaaccttattcaaagcttctccagtactcttttattaagaaagatctcacaactaaagaca

SEQ ID NO: 239060 - DNA, 355 bp, Gossypium hirsutum
  unsure (1)..(355): unsure at all n locations
gntttttnnnnntttttttttttttaataaactcatgggggaaagggcaangttagaacgtatatacctaaatataatnncatttaaaacattacactaaaaaaccatgtttgaattattgttgtataaaagttcccccctctttccttggaattatagatacaagaagaagatgcttgaaactaattttaatctcatatcatggttgctatcaactaaacttaggtgcaaccaccagttctaaacccaatcattcgtctagtaccatcatatactacttccaatgtcttctgctgtgtgttcccgtatatcagcacatcgaaatcgttagtgtttcctgcaaatgctaggcaca

SEQ ID NO: 239061 - DNA, 191 bp, Gossypium hirsutum
  unsure (1)..(191): unsure at all n locations
cccaattacctattccctatgacctaaaattttancatttcacccacttttaaacattccctacatctaaatatccaactatctcattatcaaatntcaaccaaattatcattnnttaatcattatttccatcacttctcctaacataaaatnattttaattttaacaccatcataatacaatttaacaca

SEQ ID NO: 239062 - DNA, 369 bp, Gossypium hirsutum
gaaatttggtttcatcaaggtggtaaaggtccaaattggatgggtggtaggattcctgatggtggtaaccaaattggtattcaggcttccaatttgcatcctaacgttaatggagttagatcaaaccagcaccagttgtctcagcagcaccaacaccaacaaccaatctttcctaagcaaacaggggtggggtatggagctcagatacctttacaaagtggcggtcagttggggagtcctggaattcggagtggaatgcatgggattggggatcagggaataagtaatggtctgattcaagcaggtgcactgcaaggtggaagcatggggatggttggtttatgaaccggatcacctgctaaccaactt

SEQ ID NO: 239063 - DNA, 125 bp, Gossypium hirsutum
tgcctaaatctttaaaatccctcatatatcaataaaatataccgagattgtttttaattgtctttccattttgtaacaagattccacttataaataacttttacttcaacctcaaattcctaaaa

SEQ ID NO: 239064 - DNA, 355 bp, Gossypium hirsutum
  unsure (1)..(355): unsure at all n locations
ggatggtggtaaccggaggaggcttacgcttttggagcagatttcggcggtcgagaacggccgggatgctctggccggtttaactctcgacgccgttttgggaaacgctaagcggcctgagcaaccgcctgctcagaaccgtacccttctggagattatacgagacgatgattccaacaaggagaagaagagttggaaagcgttacgggacaagctccggctcaaacgactggcggtgtctgctcggacctcctcggttcgtatcccggcttctgatgttattgttaatgataataatagatcccagttctcgcggcacggntcgtttcgtttcactcggctgactcgactggtg

SEQ ID NO: 239065 - DNA, 421 bp, Gossypium hirsutum
cctgaactcaagaagaggaaaatccctaagccaccgcctggccggactgttgcttcacctgcttcaaagactctcaaagatgcaaaaccaacaagtagtttgaggattccaggtgtacaaacaagtgatattaatagtttcagaatccaacaagacaaaaattttgctgtagcacaacaagacggctgcaccggaaattttatgaaatttgattcatggtatgggaattttctggtaccggttgttccatcacgggcagaacttaacagataagtatttcttgtatcatattaattttgatatgattttgtttgcaaacaatgtgacagttgtttaagtccttgcttttgctatatggatcataagattcttctccggctgctggttctcatttgtttgacaacaagagatccaatagtac

SEQ ID NO: 239066 - DNA, 336 bp, Gossypium hirsutum
aaatttccttcttttcccatctaataaaaggaagggggcggcttaatctgctgtgtcgtctgcttgtcaaagtggaaatagatacgattgaatcttcttttatgtctgaacgggcctctctctttttgtcgtcatttggattactcggagagtactgtcccaagtctagaaaaaagaatataatttcctcttctgaaataatctgcatgcatattgaggctaataacacacactgtctcggttgccattgtgcaaggaggctgtctggtaaaaacttttgcattgcgatcgaaaacacaagtatttgatcttgcctttctgattaacgctcaccta

SEQ ID NO: 239067 - DNA, 180 bp, Gossypium hirsutum
  unsure (1)..(180): unsure at all n locations
taaaaaaaaancttnnttnntcctnatatgcaaatacccatatatctntttaatgccaaaaattcttcccggttctctttttttctttccactagagcttatatcttattttataaatctttcaactacttatacctctatcatatattatactgattttaatccccattcttatttaca

SEQ ID NO: 239068 - DNA, 371 bp, Gossypium hirsutum
  unsure (1)..(371): unsure at all n locations
ctcaccaggatagngattagaatctaatcacctattttgggggcgggtttaantacgaggcgggcctgcccacttcttcantaacangtgatttggagcgaactcggattgacaacatgagcacattctacctgaaagagacctcgctggatcaaacaattgaaacagaggctcattttttngatgttggagttgaatctttggatgccgtgtcgtccggggcagatacaataagcaggtcaaaggagccaaacatcgcagaaaatccagtcctacgtgatcggaagggtcaacattatggctcggaatgtggcacctaactttctgtcactttcactctcgactcacctgataaatattaaatttgaacc

SEQ ID NO: 239069 - DNA, 276 bp, Gossypium hirsutum
gcagactaacgttttgttgactcccagcaattaaaaagcaaatatagtaaaattaaataaatatattcccattaaaatacacattcccagtaaagcaaagctcttctctttcccttcccacttcaccaaaagaaattttcgccttttttttatccttgctttttgcgttatctccggtgcagaaaccctaaaaccttcgatcttcactgacccatttcatatctcaacccgacccgatctgggtccgatcccatttctcctccttcaaatgaaaaa

SEQ ID NO: 239070 - DNA, 241 bp, Gossypium hirsutum
  unsure (1)..(241): unsure at all n locations
gcacgagatttatgtgaacttatttcactgnattcaccagtcgagtacactgggatggtgctcgagtcttcagcgactatttctaggattggatttgcctcacagagctgcgatccactcacgctccatgtggattttaatctctgagagcaatgtctagacctccatatactgtaccactgacgcacactctacgagatcatctataccatatgatcgaattagacaattccgtaattat

SEQ ID NO: 239071 - DNA, 359 bp, Gossypium hirsutum
ggggatcttctggttcttggtagcagaggacttggtcctttccaacgggtttttgtcggaacggtgagcgagttttgcgtgaagcatgctgagtgccctgtcgtaacaatcaagcgtagattggatgaaactcctcaagaccccgttgatgactaaatttgtttcacagaccccttgattcattgctcttggttctgttaatagacttgaaactctacaactataccaattccatatatcagtggggataagaaatgaattgcttcttgtttgggggaaaaaaatactatgtggggattggaattggtggttgcaaaaaaaaactctattaataggccggggttgctttaattacctcc

SEQ ID NO: 239072 - DNA, 206 bp, Gossypium hirsutum
taaatttcaacattttccaagtacaatcgaaccattagggcaaccagaaccattatcctagagaccctctcaaatgctcacaatcactatccctacgaagcaacattcatattcagaagagatctgcaccgtcaacatctctgccaatcaaacatacgcactcctactctactatcttcaacacatccactacctccacctcaatc

SEQ ID NO: 239073 - DNA, 319 bp, Gossypium hirsutum
gtttttggttcttttcctagtgatattcaaatcctgcaaaagccagagggtttgcttaatgggaatttgtttgaaaaatcgaatcttgatttatcgaaaccggcgaattcgagtgcatacgcctttcaacatcaaagtgaaagagggaaacaacagcagcaccatgttgggaattacagagaaaccctaagaccaccgccggggttttcaggaaagtctagaggaggaaggaaccgtgatttcggagccaggaggaatcatttagagcacaatgtagataaattaagagcagaatacagtcagttgagtaatgataatg

SEQ ID NO: 239074 - DNA, 396 bp, Gossypium hirsutum
attaacattaaatgaaattactttataatcgaatgattaagtaaatttgttctcaaggtggatatactgacaaacataactaattctaaaaaaatcaagaatgccatttaaagccacaaggaatgaaatctgataatgatgccataactacactgtatatatattaaaatgatcgtatgtgctcgagcctttggttctaaaaagaaaaagctcaactatatctcttcaaaacaaatgtaaatgactttgaaaaattattacctctaaattcaattaaggaaccttccttacaatccaataatttcaaaggtatttattaaaccatatttataaactctcctaaagccctctcttaaaccatcttcatattccaaggaaccattttataccaatttg

SEQ ID NO: 239075 - DNA, 356 bp, Gossypium hirsutum
cagaaactgacaagtctgctatgaaatcacaagtgtcgcacatctggcatgatgccggaatcaaggatttgacgttgcaagtggagtgtgtggaactatagtaactgatcttaggttacactgtcgagaatagagagtagctcattcatctttaggactgagtcttatcatgatcaaaagcatcagatagctccaatctatatgctgtgttgtaaggagtacatctttgtcggtttatcctggagcatgtatatactcgtaaaagttgagttaaccatcgatgtttcctgtaaaccattagaaaagggtgaaaatggggaaatgttaatttttgttacccatgaaataattgttaa

SEQ ID NO: 239076 - DNA, 282 bp, Gossypium hirsutum
acattaaagaaatttctttataatggaagattagaaaatttgtctaaggtgggtctaaagacaaaaataactaattataaaaaaatgaagaatggcattaaagccacaaggaatgaaaattgtaatgcttctaaaacacacttagagatataaaatgatcgtatggctcggcctatggtctaaaagaaaagccgagcttatctctcaaaaaatggaaagtgtcgaaaattggggcttggaattaataaggaacctccttgaatccaatatgtccaaggtttt

SEQ ID NO: 239077 - DNA, 177 bp, Gossypium hirsutum
acttcttgagaattttaaaaccaagtctttaaggggaacagtgatttataaagggtttgggatcttgagtctgataatggcgttctgttctatgacttgttgtgagaaaggtatggctcgcctgattccgaaaggtccgaaacctccgacatttcaaatgccaaatttggtggaata

SEQ ID NO: 239078 - DNA, 377 bp, Gossypium hirsutum
tcaacaactactctatacggattctgcacgagaccaaaatcagctttttccatacctttatcaaattgaacatcctctagtgataccatgaccaagctctctaaccccaacccaatctcttctctttcatcatcttccaaacccagatcttcttcatcccttaaatgcttctttgtattccctaccacacctactttctcctctaatctagttccatcttatacctcgtcctccataaacacccaccctttcaaaacctccttgtttatcagctgttctctttctcatcgaaaccctacttaaccgaagaggactacttttcatgatctctattaaacagaaagtcaaaatccatggtatcacaaccttttcatgcc

SEQ ID NO: 239079 - DNA, 211 bp, Gossypium hirsutum
gtttatgccatactatgtcatatatctctgcctcggggccctttatgtctaattcacatacaaagaatgcactatcacccacactaggaatatcacacagaacgccagccgcttaaagcccatgccactgctgtccctgctcacttgaccacaccctataaggattacgatcatgcacataatcatccagagcctgacgagtaacctaatc

SEQ ID NO: 239080 - DNA, 302 bp, Gossypium hirsutum
gcacgagtgccggacaagatgctttgctgcagcctgtaccggaagaggaactagaggcttatgaggcggatgacgagcacagagatacttgatatgaatcacaatgcgaagtgcttactgatccatggttgattggtgtgctcacatagcagccaagggtcatgaacgctaaaacaaaatgtgacatgtggtatcaaagaagcgttgataatctattgtgtgtgtgcagctgcgattcgaatgcattctatacctggataggaatacgcctaaggcacttactttgctgtctctcttttcac

SEQ ID NO: 239081 - DNA, 255 bp, Gossypium hirsutum
ggcacaaatcgaagaattttctacacatttaacaaaaaacgtacaagctgattcaaattgcgacattaatgcgcaaagcgagcaccatctaaacaacaagaaacaaaatcccaaggcacgacaaggcaagctcctgcaaatgtttccaaaacccaaatgtcaagaaccctaaaggcgtctggcaatgcaaaaaataataaggtcacaaaccatcaacctaaactgacaaaagcaaatcccaattcctcgaaccac

SEQ ID NO: 239082 - DNA, 183 bp, Gossypium hirsutum
ttcatatatagatttttaagaccctaaaatattccctatgccataagtatactttaatcaaccattcataacatccttgcaataacataactacaaacactgaaccaccaatataagaatctagaaaacttacacaaatcacttttattaccaaaccaataatcaattccgcacaatcaacaa

SEQ ID NO: 239083 - DNA, 261 bp, Gossypium hirsutum
aacatttatagctttttgaggcccgaaagtaagccggaggccattagtagaacttttaatgtggataagtacctccttgttgttcttcaacgacaaataatgaaagagcaagatgaggatctttataagttatatgagacaatattaagtacgaatcatatttcattatcagtcaatgaataacttgatctgcaaacccaactaattcattaccttgaccaacacgttgatgtttcttattctttgactgcttaatactcc

SEQ ID NO: 239084 - DNA, 312 bp, Gossypium hirsutum
ctcatcctccatggttatttctcaaggtattgtcggcgtacagcttggttttgtctaggattctgaatagaggaattttgttttaagtcccttgaaataggccgactatgatgtcctttacctgggacacgtaacatttccaactctttccaaaagattggtgcttgtaccggatgggcaactgcactgcagagtatatggtggatagcaaatactagagaatctattaaggtttcctggctgaattatggcttctgcaaacctaggaaatggtgagcatgtagttcaaggtctgtcaacagttcaaaagtc

SEQ ID NO: 239085 - DNA, 237 bp, Gossypium hirsutum
gacaaatctaacatttctttcaacattatacacaatccttataacggcaaccaatacgaccatataatcacacaattcaaaccaacactattacctccactaataacattaataagttcactactttctaaactcctacataccaccataaacaccacatataatctaccaaaatacccatttacactttaaaccaatataacatcacattacataaacatgaatataccacaaatc

SEQ ID NO: 239086 - DNA, 319 bp, Gossypium hirsutum
caataattgcgagcaaacaaggctaaaaacattttaaatagctgatttctcagcgtttgccaccatcacccagatgaagtatcgagtgcgggcaatataacatagtagatgtaaatcccataatttacttggttcagggtattcgcctatcaaaacactttgtttcaggctgaaatgtcaaataacttggatcccttctttagtttaaggttccataaatgtagcaaggagttgagttggggaaaaatcaatgaaaaaaaaaggccagcagaatggtttggtcttaaatccttgcatgtaaggtgaccactaaatcatg

SEQ ID NO: 239087 - DNA, 497 bp, Gossypium hirsutum
  unsure (1)..(497): unsure at all n locations
aacagatatagcttgttggggcccgaaagtaagccggatgccatgagtagaacggttggtttggataattccggccttgttggtcttcaacgacaaataatgaaagagcaagatgaggatcttgagaagttggaggagacaatagtaagtacgaagcatattgcattggcggtcaatgaagaacttgatctgcaaacccgactaattgatgacctggaccaacacgtggatgtttctgattctcgtctgctgagagtgcagaaaaacttggcggtattgaacaggcgaaccagagacagttgttcctgtatgtgcatgcttttagctgtgatcgggatcgtgattctggctgtcatcatatacctactcatcaaatacttgtaatatccacatacaccgtacccaacatactngctccttttgttttgttggtggtagaatttgttttttcaactttaatctcttgatatatgctggaaatttgttcggtttccccc

SEQ ID NO: 239088 - DNA, 269 bp, Gossypium hirsutum
ctgcactagtctaattgaaattttcatcgaaagagtatgtgatgaggatgtcctacgttgcaaaattggtgctggaagtaatcgagagatggacttcgacagttttcttgactttgttctggcccttgagaataaagatactccataatggttaacatatttgttccgttgtcttgatcttaatggtacgggattcctcacaacagcagatattcattctcttttcagagatgtacaccataaatggattgaatgcgtcaactactaat

SEQ ID NO: 239089 - DNA, 437 bp, Gossypium hirsutum
aagagatataaaagtcaaaaaaaatagaaaaaaaagagaggacagaggcattaggagaatagaggggagggctaagaataatggcaaagaaaaagctggaagaagggggcagtcatccttagcgaccgcaagacatttcgtcacctgtgttgagagttgtcatcctgaaattcttcctttatttcttatcttgtttcttcttgagcttaattaatgaaaaaaaatttgggtggtggggtaaaacttaaatttaattggcaaaccattaaccaaaaatggtaagggttaaaataatttgaataaacccttaattttaataaagggttaaaattaaaatttgattaaactaatggttcctttaatgggattttaagaatggatgcattcggtgcattgaccaatggaccacaaggattttaaaaattacctaagtttga

SEQ ID NO: 239090 - DNA, 242 bp, Gossypium hirsutum
atagagggaaaatgttaaggatatttgtggttgagcttgatggaaggtcttatagaggcaagttttgtagaactcacttggctctccctgatgatcttgtttccaggtctttccattgtcgccggtggaaagcctacctcttcaataatgcgtgcaacataccaagatgacgcctagaaatataagtaatgtctaacaatattgctaactgcgactttgatattttgctactcatgtcagct

SEQ ID NO: 239091 - DNA, 330 bp, Gossypium hirsutum
ctctagacctgcgcttcacgggttctgcacgagcaatatccaacattttaagccaatttcaaaaaacccatctaaaaatggcctaatagcaaaactcaaaatgctccacccttcatccttaacaaacatacacactgtgaaacgtacacatgcaataagaccctacaactaagtcctaaaaacctatagcagattctccaaaaattcaattagactgcacctttaataaaatctatgcgacattgaaacagcttcttccctcaaagtgacatattgatggaaactacatcacaaccttccatacagctcgtgttgacacctgaacatact

SEQ ID NO: 239092 - DNA, 305 bp, Gossypium hirsutum
ttccgaattctgcacgagtttcttctaccaatttttcaacttttcaacagagtcaccaaccggggggtatatgagctgtttctagacactaaaggcaacaaacattttcattaaatcagcttctccacatacatcactggcaaccctattgatctcctgcttgatcttgcaaaccgaatcagtcctgatttcatgaactcattggagcaaagtgagaatacataagaacataaatacgtaaaagatgctcttttctcttcttacgaaaaaaacattttcacaaagcttaaaacctaacttttcaa

SEQ ID NO: 239093 - DNA, 212 bp, Gossypium hirsutum
ggaaactcgcgcgcatagagggaggctttgaacggcgggatccttaaaagctcgtttgggagcgaaaaagtcatcggctcagcctcgctattagcagctcttgatcagtaggcaattgtggtaacgagcggcgaaaacgaccaaggactattgctgctatcaactattatcattatcatactttgttttctgatcgaatagtattcaatttg

SEQ ID NO: 239094 - DNA, 216 bp, Gossypium hirsutum
  unsure (1)..(216): unsure at all n locations
ttcacgagccangttttgcctttccttaactctttcacacaaaaagagagacttagaggttttttatagattcccctgtcacttcgcaagataaaggagaagacaacacctaaaaaggaaaaaaagcaccaaaatggacgctatgaggaaacagctcgatgtgctgatgggtgccaatctaaatggctatgtacgtgaagtgaatctcaaatacta

SEQ ID NO: 239095 - DNA, 242 bp, Gossypium hirsutum
  unsure (1)..(242): unsure at all n locations
gatgctttggnntattaggtaaacagcatttgcattggaaccatctggtgcaattgacaagacatttcttgacttacataaaaagcttaataattcatcactattcacaccttcataatctgcaactggacaattactccatactaccccctttttattccaactactgctactctcattgtaattccacgcacttcactgatctctatcccggtcttcgtgacttctctgattcgattctt

SEQ ID NO: 239096 - DNA, 261 bp, Gossypium hirsutum
gttttttttttatttttcctatttgccggtgtcatttcgatgcctggatcttgaaatggcatatgagaataacattttatgtttattcatgaaaggagccaatcgtttcatttcataagcttatggttgagatgagtttgtggattgtggtcaatgtttttttcccctggtttttcttacattcttgtatttggtagctggccagaaggcatttcaatggcttctaatacttgtttcatttgcttgcattaatgcttagtt

SEQ ID NO: 239097 - DNA, 280 bp, Gossypium hirsutum
  unsure (1)..(280): unsure at all n locations
ctcgtgccgttttgatcctggtattgttgttctagttgaaacccgagttagtggctttaaggtagatcgagtaattgggagtattggcatgtcaaattctcatagagtcgaagccagtggtttttcggggggaatttgggttttgtagaaggataatgttagtataacgatggaagtaaaccaatttcagtttttgcatttgaaagtgtggctttcgaagcttaatgattgagtttattttcactgggatntatgggagtcctcggtggacggtcgggaa

SEQ ID NO: 239098 - DNA, 275 bp, Gossypium hirsutum
ccgattcccaagtacctaactggttgcctttgtgggccaattagcaagctgtgaacgtaagcttgaggagatgggctgttggtacccggtgatgtacgatccggatactgaggtgttcatatacgatttcgtgactcatgaatggatacaaggtaaggatatgccttcaaaaagatccttctttgtaatcatggcatgtggatgtcagatttttgttgcagtcgggcatgaccagaacaagatcgtgtcaataaccgcttgggtttaccatctga

SEQ ID NO: 239099 - DNA, 223 bp, Gossypium hirsutum
gaacttctggtgttgtttaaaaacaatgtggagtcaaatagcctgttggattcagtttctttttttatgaagggtatgggataagggttttcgagtgataaaccccagatttgggaaggaaattataatcaattagaggcttttaagacaagggaagtttgaatgagcagtcgccctctggctccgaatgaagcttagtgttcggattggaatcaatgaagtt

SEQ ID NO: 239100 - DNA, 161 bp, Gossypium hirsutum
ggaaactcggtaccaatgtgcccccaccagctaggaggagagagacttcaacacttcacctctctgatgaatatttgagcttctggtacacttgcaagaaacaactagagaaagatgaagaagtttacatgcacagaagtgaaaaggcattttgcaatttc

SEQ ID NO: 239101 - DNA, 304 bp, Gossypium hirsutum
catctctgtgaaagaaggttttgtgtatatagtgtgttgtttggaaggaacgatggaccgctatggacaataattaaacatggtgtactacatcaacaaacgactagacaatgatgaagaaatttacatgcacatacgtgaaaatgcattttgcagtaccgattgctacactgagcacattctcccctacgacgatatgcacaaaacttgcaataattcctcatccgaccgttcttcagaactgatcaatgatcaacatgtctcactaatgcctatgtccattaacatgtcacgtactattgcc

SEQ ID NO: 239102 - DNA, 267 bp, Gossypium hirsutum
aaaaataccagccactcggaatccttgaattgcgtgtctttcttagcaaaacaactctttgtcttgtcttgtcttgtcttgtcttggcttgtctcgtcttggactttaaataacctaatctaaccgcctacaaaaataaaattcctcaaccaagtccctttaatatctcaaaaatgaagctgctttttttctgcttcttgattctcctatcctctgctttctacacgcccattgcaattcatgtgcccgacgcccatagcacctgaa

SEQ ID NO: 239103 - DNA, 118 bp, Gossypium hirsutum
ttactatcctcacattttgtctgctattattgcgcgcctttcttaactagccttcagacatcccacatcctatcttcctttaccaccttactcttatactattctatatcattcccaa

SEQ ID NO: 239104 - DNA, 146 bp, Gossypium hirsutum
tcaaattccaattaatgacatcatcattcaaacactgaaattttttaaatatacatgctccaattatttctgttcactaatcatattatgaccttttccacatcatttatatcaccattttataccactttaaactcacttcatat

SEQ ID NO: 239105 - DNA, 314 bp, Gossypium hirsutum
tagaagattttccttatttcatacacaaaaccaacatcgataatcttcatcttctcattactccaaacacttatacccacacttatgtcattccacacctaaacatcttcttacatcacccataatctactcctattcataacataccttacttaaactctccatacctggatcctacccctcacatataccaccttcttctctaactctctttacatcatatctcattatcccatccacactttaaccacttccctatcccatccataccttttaaactatatcaaccccaatcaatatccaccacttaatct

SEQ ID NO: 239106 - DNA, 422 bp, Gossypium hirsutum
ttttaaatcaaatactataatagtattatactagcggaaaaatacagatgcttcacggtgtctatacctctgaaaatttcttgcatgacaagattcagaagcatttgctatattctttgggttttttaaaggctcaaacattactgaccaaggaactacggttgatgacttcagtggaaatcaagttgataaggtcaaaagaactgaccattaagtaaaacatcaacattttaccttcaccagtcatgatgcatccgtaactttgctcacaatagctactgcaagctttacaatgcttgattccggggattgccgaaaccgttctatcaccgggaacaactccgatgaacgaaggaactgtcggcaatttggatatgcgcacatctttcccagtgagaaaagagctatctttaatggtgact

SEQ ID NO: 239107 - DNA, 252 bp, Gossypium hirsutum
agcgaaatcaaaacacgcccaaaccttaattccatggaataattaaaggaaatagcctacaacataaccaaaattatccgttcgttctcctagttctccatctgatcactaccctactctctcaaccccaaaccataactcccctatccaaactactatacccaacacacaccgaccttatcaactatcgtttacgaaactattcttccctcctccctcactaaatacactcttaaccacacatcctctaac

SEQ ID NO: 239108 - DNA, 416 bp, Gossypium hirsutum
cagccggtgatgaagatgatttcattgaggtcagaggaaagaggcaagtgctgaatgacaggcgtgagcagagagaaaaagaaatcaaagctaagtctcgggttgcaaagccaccaagaaaacctcgttcaatcccacaaagctcaaatagaaattctgcttcagcaagtggagtaatgaacaatgttcgctctgatcttgattgcactgaaggacgaaatctggcaaatagtgaactatcaactgcattcagtgcaactatagtatcccagcccttggctccaatcggtactactgcgactaaaactgatgcacaggctgatataagaacgcaagcagtgaagtcactccatacaagctcccttcaagccacctcaagtggtggacaaagcctggtatcaggattgatgtttgag

SEQ ID NO: 239109 - DNA, 334 bp, Gossypium hirsutum
cgacgttccacggttccccattcccaccttccccccttgggtcaattcctttgaactctttctaaaattcccgctgccactttttttcagtgcggcattaaccccactttctctgcaagaaaacgcattgtttctgctgctaacaatggtttcaacacggttaattcaacttcattggggactggccaagatgaagatgattatattccaatgccaattgttttgattgatcaagattcagattcataagcaacagttgtgcagctgagttttggagatcgtttgggtgctctcattgacacgatgagagcattgaaagaattgggattggatg

SEQ ID NO: 239110 - DNA, 336 bp, Gossypium hirsutum
cataagatgaaacatcacaacatccaatgaactcgaatggaaataccttgccaacttttatggagcaagtaaatcacctgaaaaaccccatgagtttctaaagctttttagcataacccaacatgttgctgatacaaattccaacaatggatcatgaactcattgtatgagactcagtgtatagttctttgtcttggcttaaaattatggacttgaagacacatcctgattatgtggagatccaactcactccaactagaaccagctatctttttctctttttcgtgtgaatagaggttctctcattgtgtcatttcatctgattcggtttatcat

SEQ ID NO: 239111 - DNA, 349 bp, Gossypium hirsutum
cttagtaagggatttgatggcatgatcacgttgttgagggaaaaagaaatcggcaaagcaaaactgttgatcaaagatagtggaagacctaggtttcttgaaatagccttatgaacattgtccgtacagccccctggtaaagtttcttcttagttatgttacttggacttggatgtgccaggattcaggaatgtgtcttatgtgggtatgcttaattttttaaaatcttttcaatgtatttggagaatatgcgattagacacagtgtgagagacagatactttaagaaaaaacgaagtgctggagtaacatagcttcttaggttcctactttcctatatttttttgagc

SEQ ID NO: 239112 - DNA, 191 bp, Gossypium hirsutum
cttatgtccattcccccaagaccccaaccataccatcagcatcactgtccaccaacatatagcatcactacattttatccatgcctctcaactgcgtagctcctaaacccgaacatgcctgcaatggactagtgcagtcagagacgtctaaatctcagaaaaaggcttcccttgcattcccaatacaacac

SEQ ID NO: 239113 - DNA, 234 bp, Gossypium hirsutum
atctattcgttctattactttttctgggtttttttccacctccttatcaaaattccaagacaaaccacattagattgcccaaaaattcattggaacattaaatccagaacccacaaacaaaatttcaacaaaataatttagtagcaaaagaactcaatggaaatattttcctgggctgacattcaattttttttaaagcagactggataacaccagccagggtctacttgatct

SEQ ID NO: 239114 - DNA, 379 bp, Gossypium hirsutum
gaagggttgaaattgaatcacgaggtcactgattcagggtctactgtgaaactgaaagatgacatggatgaagaaaatggttggcaattggattctggagaccttctgtctaatgctgaagggttgtcacaatctgtaagcaagaaccatttgccttcaaatatgccggaattgggaaatactgatggggtacctgatgtgaacataggaatgcctgatgctcatgatcagttgacaactactgtaagtgagaaatccaagtccaccggttcatgcagaagtttagtctccaatgatgtgaaaaggacccctcagctaacaagtgatggaagctctgattcagattctgattctgaatcttactctggctctgaaagtg

SEQ ID NO: 239115 - DNA, 244 bp, Gossypium hirsutum
aattcccgagacacaggtgacgagctgattaggggcgcaatgggactcctaagcttattgaaatcctacaatcagatcaggctcctttatgtagaagaaatctcctctgaaaataaatagaaattttcagcaagtcgtctcaagactgacacttgcggtatgctaaagcacagtgacatctttctcagttgagcgtcaaccggaattaaactgccttactgactagctgaactagattgacttt

SEQ ID NO: 239116 - DNA, 270 bp, Gossypium hirsutum
gttttcagcctcctcttaatactcaacacggaggcccggtttattttgttttctaagcatacctcctatatctttaacacacttgttgcattgtttatacaacatgcattcatcataaaacaccttccacggcttgtagtaatttaatgaaagttgcttactaaacattatcattattagttcttaaataatgttttgctgtttgtcctgatggatacttattaatgagggtatgttggttttctgaacattctgcaactgcttctattt

SEQ ID NO: 239117 - DNA, 324 bp, Gossypium hirsutum
cggcacgagcgagtttttttttttttttttttaaaaaacgagatataccaccaccatatcatatatatttagtgaagaattcaccccaaagtatcccacaattacatggctataccttgttttgaggacaaaggaaaccattgctccctatgtacaatgctccattatcaaaataggtaaacaactaaactcccagattctccctttttctcacctccattaatctcccaatcccgaaccagtcatttcaatggtctacaagtttttattacttcacatatcagaacaagaaaatatacccaccagttgaaaaagacaccgagc

SEQ ID NO: 239118 - DNA, 342 bp, Gossypium hirsutum
gaaaaaaaaaatactacattgaaaaaggcatgtgccaaaattaacattaaagttaaactcggatattgagaaaaaagaaccctattaaaaccaaacttacttaagtaccaaatagtatattaaccctattacttttgtctatcttgttttcccttgtttgtaggaaacttagtaaaatcatatctaaaatccaagcagctgaacaacctaggttgtgtttagcagtgaagtgggtaaggctggaatgtggttcaagatccaagcaactggtctgatttgcaagtgaatgaatggacacgataaaaccccatgaacaaaacataaataacagtttttctaaat

SEQ ID NO: 239119 - DNA, 425 bp, Gossypium hirsutum
  unsure (1)..(425): unsure at all n locations
cgaaagtctattcatatatcagnnnattggttttgggtcttttaccttaatggcaaaagagaaattcanngttgctatttaatgatatgacnccaatatatcanntatcttgaccctgattctnnttggatcccagaataatnnccgaagcganntgagttggttatttagtgccctatagtnntattagcttatactnnngtggtccgcctcattttttttnnttgaatcnnctaagcnctannaaaaacnnccaacganggtcgcaccacctannagcatnaagcaattatttatcaannaatgatcanatnncaaatttttaatttanacncnnttataagaatttaagaaaccctgctcnaatttttttaaatttttaatnggttcaatcannaaaaaatcaaagaaatttgtccattttt

SEQ ID NO: 239120 - DNA, 298 bp, Gossypium hirsutum
aaaataaaaatgtcttattatttccccccttttcacggagctgactttttataaatatatcaaaatctgttcaaatcagctagatttcaactgattttgaaaccctagcatttggatccatttcgagttgtagatgtgaagcgaacttttctctttgaatagatatttctttttttggttgcattttgtgctgtaaagtggtgcgactaagtgtttggatcggagatggaagaggttgccggcgaagcggcggaggtaagaaccaatgtgaggagtgagtcgccgatgaggatgacat

SEQ ID NO: 239121 - DNA, 362 bp, Gossypium hirsutum
aaaattttaatgcacaaggttcatcctgcaaacacaaacgagggtacgaagaaaatggattgcatattctcatccatcaccacacatcctttcataactttgagaggaaaactacaacagagcatttgtgttactaacctggcgcatcccaacacaagaatttgctatagcaagcaacccaagaaccgccgttatccgcgtcgcaccaaactccctcctgactttggcgtttacttattcttggagaaacctagaactgaaaccgacatgtccactgacactgaacaaataaagtcaatttacggtcacaatagtgattcaccctgaagaagacgacaaagaagatcatgtgaatcttgatc

SEQ ID NO: 239122 - DNA, 304 bp, Gossypium hirsutum
  unsure (1)..(304): unsure at all n locations
atggccgccatggcatcagactctgaagattcatacaggagcagtggccatggaaagctcaacaacaaagtgcanagctttcgtccttcaacgccccctccaacttcggttaattaccgaactgccaaacgaagaaaggggattccccatagagccccaatgggaggactaatcatacaatattaagccataaccatacccatagagctcatcctttttgtcctcgagttgaagtataattatcctaatagtatttgccccacagatgcacaaaatcatggtgccacaatgccccctaatgttt

SEQ ID NO: 239123 - DNA, 245 bp, Gossypium hirsutum
  unsure (1)..(245): unsure at all n locations
atattataacactaaaaccaccttgccannctccnaattgatctcaccttttactaaaagctcccctctgtttctcacacaccgacacttacaatccaccatttttttctactaactagaaatcatttcctatatattcttcaaaagaaaatcccctattaataacacaacttcttcttcttcttcttcttcttcttcttcttggatgtgatatgtgatttgacccacattgcctttgncaactt

SEQ ID NO: 239124 - DNA, 186 bp, Gossypium hirsutum
cgacactgtcttccgtgtaaagctatatacataccattagacggggcggagactgattgcataactactctgagtacataaaccataatttgctctaaaaacagaaaatcagcatataaatctctctaaaattacgcttgcctggaatgttatcacgcaacaacagggccttactttatctgatat

SEQ ID NO: 239125 - DNA, 224 bp, Gossypium hirsutum
  unsure (1)..(224): unsure at all n locations
accccaaccccttggaaattttcacagcagcggcataactcaaatggtcaagcaggtaacanaagctcaaataatataggaagaaaccattcctcctcttatagtgctgccggatttactagtcatgattcatatagtcaaagcaacttccagtggggtcccttttctaagacaggtggtacttcaactgcaactcaagctgctagtgtggttcagcaggcata

SEQ ID NO: 239126 - DNA, 324 bp, Gossypium hirsutum
  unsure (1)..(324): unsure at all n locations
ttttttttttttttttctnttttttnnttttcnnnnncnncnnnnnnngnggggntcggtttattttttttttttaaaaaaataaatatcactccggtgataccataaaaaggctttatacaatttttaccccatgaaaaacagaacacttttttgtaaggctattcatgtttttatggaactttataagtaaaaaacaagctttttttacaccaaaaaaatgaccagccaccctgacttaatttattccctaggcctaattttaaaaacctccccccaataaaaaagaacaggattcccttacagggtgaaccctttattttc

SEQ ID NO: 239127 - DNA, 303 bp, Gossypium hirsutum
  unsure (1)..(303): unsure at all n locations
ggacaaacagagcatggggtcgatgtatttcaatttcgaacattanggaatgaaaaaagaaaaagaaaagaaaacaatgaataagcaaattgtcaccttgatatatccacattgaccgcaagacaaaatgcagatttcaaactcaaaaactgaaattgtatataaatctgaacaggcaaatgcaattttaaatcacgcttgggaatcggaattaagtggatctgccttgccatggtggaatcttactacaatgcatgttatattgtcggcactccctcgagtaaacgcagtttctgtcaactt

SEQ ID NO: 239128 - DNA, 359 bp, Gossypium hirsutum
  unsure (1)..(359): unsure at all n locations
aaattcggcacgaaggtctcgagttttttttttttttttttttnnttttgggattcagactttgctacaatnnagaataaacattgaagagaagaatggtgaagcttccaatctatatatatggatacatacatatacaatataaatatgtatattagaaattttgggaatgaaaaattgacctttgattgtatctctgcagaattgactacttaaaactatctgccttcctttgtcatcaattgtgaaaatatttggcctgtcgttaagtctaaactaccgatcggatcatctttctctgtttcgttattaccggatgtaagaataatactaggtgttggatgatccattccattcat

SEQ ID NO: 239129 - DNA, 254 bp, Gossypium hirsutum
  unsure (1)..(254): unsure at all n locations
ttnccccctcanngtttgacaattttcacatgaaaattgaattacaatttcaattattacaaaaaatacacaacataacctttataaacaaaaaccagtaaaataacttgccttttttgcaatcaaccatttttaccactatcttgccacctttccgttccatcttgtttctcaccatcatgaacaatacggtaagaatccctgagatgatacattcacactatactatgagggtccccgatccaattacaaac

SEQ ID NO: 239130 - DNA, 378 bp, Gossypium hirsutum
tagtctcgagtttttttttttttttttgttgttttattggtcccggcattgttagaacatggagggggtactgcgcccctggattccaacaaaagattgtgatttccctcattttcttttttttatttgtacgtgtctcccaagtcccaactagtgacgccacctggtatgactagacctgactatgagttatgtcagtttcggctacgccatgataaaattttagatccttttaatagttttgggtttggttggacttaaaagttgggattaaaattttttctaaactcgacttgaataaaaatgttaaaatttaaatttaatctggttttattaaattttttatattattttataaaaaatataatacattaaaaa

SEQ ID NO: 239131 - DNA, 325 bp, Gossypium hirsutum
gctttttcaatctagctaactacacattctcgagtggcttctaagcggctttcgattgctctctctgttcttgctctcattgcttttggttcacctgctgcagattcacatacactatacactgtcaatattctccaagacactgcacttaattataactattgtgtatatgactcacacatatcaacagactatactgtcaccacatcaatgttccttatggctagccaaccccttgaaacggctgcaagcaaatgcttctgctcacgaaaggttttaatccccactgaatcaagggcctggacacacatccttttcatagtct

SEQ ID NO: 239132 - DNA, 372 bp, Gossypium hirsutum
cggcacgagaatatattggtccccaagcaacaagtgtggtttccattttccaaacggaacccagagtggaccttcaatgtcgagtggaaggaagaaaaacaaggaattggcttccgataactctccggaagaaaaacggcgccggcatcagggaacctctgataccgatgtagcatcgacttccaagaaacatccaaaaccgaaaataaaatataagctgaaagagcttatcgatgagaaacctgtggagacaatcgtgaaagttctgaaggatcgaattgacagaaagatgaagaacgacaagatggcagacatggaatctgttatattggtagttcgaacgatgatggccaataatgcttctcatctatt

SEQ ID NO: 239133 - DNA, 354 bp, Gossypium hirsutum
aaattccgaaactttcatggctgaacgcgaaaagtccattccctacgaatcttccatggcaaagatcacgatagaagatccatggctcatgattcatcatcatccgcacatgataccgattaccacaatcaatcggaatcttacttcaaggaccaggtgtatcgaatctatggaaaataaaagcccgtccaccatgttctctgtgtagccaaaccggtcgacatttatactgaacccaacaccatgatttcagcaagatcccttgcttacgcacctgtgatatgaccctagaacgaattgcttgaatattacctgctcactctaatgtgtcacttggtgctactcactgttgca

SEQ ID NO: 239134 - DNA, 394 bp, Gossypium hirsutum
tacagttgcactagaactaacggatccgtagtgctgataaaatcttgtacgagatgaatttctacatatacaaatatggtgctagataaaaagggtaaatagatgaacatcaacgaggaagagaacaagaaccctaaccctaacactaaatatgaataatatggtgaacttgaagaatgttagatcgcagtttaagaagatgatacgacattctcttctttaaagaaaggtgtcgtctaacagtctgaccagttacagcattcatggaccttttagtatgataacgcttctgctataatcaaaacaagctactttatgtatttctatgcgcgctatttacactttcttcatcttctaacaattctggagtttattcaattacatacatcatcca

SEQ ID NO: 239135 - DNA, 342 bp, Gossypium hirsutum
gtacagcggatgtattttttcatggagaaggtggatatgatcattgcacgtctttgggcatttcttttaaggctgacacgattggaaaaacttttgaacagaagattaagagaacgacatatgaaagagccaaagaaggatgatgaaattaaccctgaagcagacagtgaagatttgtatgttgaacggatccgtcttgaaaatatggacctaagcatcaagaaattggtgagcaagactacaatccaagagcctacttttgataggattattgttgtctacaggagagcaagccccaaaccaaatacggatcgaggaatatacgtaaaacatttcaaaaat

SEQ ID NO: 239136 - DNA, 369 bp, Gossypium hirsutum
ccattgtcaacttccaattgtaattgtgtagcttgcccctcacagctctccccttcctttccccctctctttactttttatttatttattttatattttatggtgttattatgatttttctgtgtttaaaaaagacagagccttgggagcgaaggaatcgaagattgggaagttgatggaacttacagtagtagcagttgtagaagtagcggatgagtgtgtattaagttaatgatgggagttgtggggagctttattctgctgctctgttgcgagactccagtacaagtggaagcgtattcatttagaacttagaaacaatgtacagcttgctggtcatcttacagaacctttggaaactcctctttt

SEQ ID NO: 239137 - DNA, 277 bp, Gossypium hirsutum
gttcttaattacatttttaaccggagattgcaatcaggggcatcatggtgttgctggaacatgtatagtggcatgatattgggatggcataggatcaaagggctgataaacttggtggatacgaactattactgcctggagtacactagattatgtgtaagaatggaccttattgaaaatcttacacactgatttgcgaatctttagcgtacgatcaaacatttttcaatggggtcgatcgctgcaatttcaaagaccataccgattaggacccaat

SEQ ID NO: 239138 - DNA, 264 bp, Gossypium hirsutum
gttaatttgatggtgatgtaaagcttgttgttgtgttatgatgatgatttatattgtggggaggggggggggtgtctaagggtcatgttacgtttgtgttgatctcctcatcccctttggcactgatgtcttacaactccattccatttatttagctgactctcttggttcaatatttcatccatttagtgttcatcacatatagatgtttcaatggggggatccgctttcagtataaaccatgtatgccattcaagttatatg

SEQ ID NO: 239139 - DNA, 300 bp, Gossypium hirsutum
caaaaagccaccggaagatgaagagggggacggatccatgccccgtgttcttcaagagagagttcattcgcacttgacctgtcctaggtgcattcgacttcaccgggaccatcatcacagagtgctcacttgaactaaccgaggaagatgctaagaactctccctttgctcagacacacacgatgcgacccagcctagttcaatggcctatatcgtagcagtcactagcaatgagaggctcaggagataacctcagaacttttaccaagtgaacaagtgtggctgacaccattacatcat

SEQ ID NO: 239140 - DNA, 278 bp, Gossypium hirsutum
cttctatagattacctgcttagcaataggtttggtcgtaagctgatggattcaacccaaaagaccaaacctatccgcatcaagtgcgatccatcaaaaccaaactctgcttggagctggttggagaggtggatgtctgtgtcattgtctaaaaggccatcgacaacagagttatccatagaacaaccagaaagagagaaaagtgacaattgtgactttcaagttactactacagttcctgaatcgtttcctgagtcaaatgagccaaagttatatgta

SEQ ID NO: 239141 - DNA, 327 bp, Gossypium hirsutum
  unsure (1)..(327): unsure at all n locations
tggacatctagagatagcacagtacgtattgtgtaaaggtcctgggggtgcatcatggaccgataagcagggccagacatgctctacatactcctgctaaaggacataatgacctaagtcctggatgcctaactataaggcatatcattatttgataaacatgggtgatgctaatggcaactctgattactatataccatctcatacggctcgactacacatatcggaatagctatttaatgacagtggacttatcctacttctcatctaaaagtctcgccaaacagctcatgactattcanagaaggataaattatctgacattgc

SEQ ID NO: 239142 - DNA, 310 bp, Gossypium hirsutum
  unsure (1)..(310): unsure at all n locations
gaagaatgangaggtttaagatgaatatgaacaattagaagatgtagggatagaagagaagagggaccaagaggcgtaagagaagaagtagaacgatgaggtagaagaatatgaagaagaattacaagaacggaagaacgataagatgaaagacattgaggcgaaggagaagaagaaaggacagacgaagaaggatgaagtacaagaagatgaagatgaagaattataagagggaaagaaagaaaagacgaaataccaataggcgaacgagaataagaaagaatagaagaagaatgatgaggtacaagaa

SEQ ID NO: 239143 - DNA, 214 bp, Gossypium hirsutum
ctgaatgctaactcaggctggacagcgggttctggcaatagcgagacctcgtcatctgaaccataaccctgtcagcgtactgattcttgacgtaagaaacaacatcacagggactatctgcttcagcatgccttcttgcctgcctgttacaagaaccagacggcctgactcctatcacagctgtacttcttgacgagatcctcctacccaaccc

SEQ ID NO: 239144 - DNA, 377 bp, Gossypium hirsutum
cagttatggaggtcaaggaagttatggtggtggtaataactatggcaccggtggtgttagctatggtagtgattttggtcaatctggtgtagatggcgggaatttcaatgtaggaggcagtgatagctttgcaactggtggttcgaccgggtatggaggtgactcaatgggatttggtggtggtgaacatgggtacaaaggagcttatgatggaaatgatgccctgaatgacaactcaagagatgaatatgaaagtggcgactttgtcaaaagggcatgaaataaaggtggttgagctttgaggtataatttaatggcggattttttttggattttggtttaactatccttttctacgaactaatcttctttatcat

SEQ ID NO: 239145 - DNA, 342 bp, Gossypium hirsutum
ccgtaaagcaactacgatggccggtccgtgccagtctcgggctatagacaccatacgaatgcttctaatacatatggtccttcttatgatcatcggcatagcgctagacgtgaactggacacaatacttgaatcataacacaacaccagatcgggctgggcgatgctgtatttcagtgatcgacgtgtaatctctacataaaagaatagtacgactgcgaggatttcctcgacagaatatgtctcaagactattgcgcctacacgacgaccatccgcttgattggcttgagacctataagatggcaattggcccacatttcgcttgagtgtaactggcttta

SEQ ID NO: 239146 - DNA, 131 bp, Gossypium hirsutum
ttatctattcatacaattaaactcctctaaggacaatataaaattctcacacacttttaattcatacttcataccacatcacatcaatccacaaatcactgtctcacaccgaactatatcactacccacat

SEQ ID NO: 239147 - DNA, 443 bp, Gossypium hirsutum
tgagcctgaagatttttggtagctgtgcttatttgggtttggtaaattacaaggaatccctaatacgtttggttgttgctggtattacttaattagctatatgctaaaaggctttcttctctccagcacaatatgcttagaattttactgcttggtatggtgtctttttgtttcagcagttgattccatcatactcttatgaaaatcctttgaagatataccgaggcttccagatcttgttggagagattcttggtcagttgctgcataacgccgcataatatcgatagatatgataaaaagcaaaaaggtgaagattgacattattggtcaaggattggaaatctagactcagcatggaagtatgatcatggagccttattcctggcaatacaatgtaagtactctaaacatttacgggcaatgaactgcatggcgttaact

SEQ ID NO: 239148 - DNA, 289 bp, Gossypium hirsutum
aatatatgcacattgtgcaatgtacgtgagagagactaggggttctttcttgtttttggaggtattaactaaatccagaagcatattatccaaggactcttaccggatcgccaacatgcaacctaaagacaatcagtttgcactattgtacgactaggaatccgaccgatatgtaacttacatgtcatgcgaaaaggtttacatcataggattagatgaaccggactatgattgcttgtagggtcccccaccttattataggacaaagctattgcttttaaccgacccg

SEQ ID NO: 239149 - DNA, 166 bp, Gossypium hirsutum
atgaaacagattagaacgaatcaccatgcttagggtttgagcagactagtgctaaagctacagatgagacttgtgctgatggtactaactgatatgcccgaactcttaacagatgtgtaaatctctgaaacggtgcaagacgatactaaagactggacagctggtg

SEQ ID NO: 239150 - DNA, 395 bp, Gossypium hirsutum
catatatagagatagatagagagagagagagagatacagggagatagggagagacagtacatcctttcccttctcttttaatctttcttgtcttctctttcacctctctttgttgtccatcaattgaggattcttgtcaacaaataacgcatggcacaggaagaacccatgaacgttgaaaccgtaaccccctcgcagcaaccactttccgaagcccccaaagactttgcggaggacaaatcggtaatcccaccttctacctctgaacaaaaacctgctgagttcgccgcactccatactgcggttgcacctactgaggaacagatcacggaaagtcctgtagaccgatatgctgtccttgctagagttgcgactgagaatctaatttcactgat

SEQ ID NO: 239151 - DNA, 249 bp, Gossypium hirsutum
ctaatttttttttttttacttcaacctctatagatttttggggtatattatatattgtctatcttttacaactttctttggacttattatattatctatctacacaaagaaaagaaaatcacaaataaatatacaccaattgccctcgtactgccctctctttttctctgtgcccctttttcgctacgttcttgcctgctacattttgaatttgctcgtctttggcacttactttgtgcataggtttca

SEQ ID NO: 239152 - DNA, 412 bp, Gossypium hirsutum
gtttgaggtcagtttgcgagtcctgcctatatgcccatgggatgattcctgatggcaggaatagctgtaattgaaaggtcatatatggcaatgggggctatatgtgaacacattggctgcgaaagaaaacggataaccccagatacctgattgaagatatgcattgcttcagagaatgattattgattcaagagagagatccattacatcgtaaggatctattcgaaagggtatgatgataaaagactccactccataatgaccattgattctttacgttaaacacggctgtactagacacagaagcattttagaggtgaaaatacttatatataccatgccaggaaaatcgactgtccatttcaactcaatgacatgtaattgtactccttactataggtcggactaatgt

SEQ ID NO: 239153 - DNA, 407 bp, Gossypium hirsutum
gaactttgacaaggttgatcccctgtgttcaggttacagggcacatatcttctctagtgcatcacttgaagatagttttagatgggaaaaatgatgagctccgaaaagatgctgttgatgcactttgctgtctggcccatgcccttggagaagacttcactatttttatcccatctatacacaaacttttgttgagacaccgcttgcagcataaagaatttgaggaaattgaacgtcgtttaatgcgacgtgaaccattaattgtggggagcacagcagcacaaagattaagtcgacgacctccagtggaggttgttagtgacccactaaatgatatggaaaatgatccttatgaagatgggaacgatgtgcaaaaacatcctagaggtcaccaagtcaatgatggg

SEQ ID NO: 239154 - DNA, 396 bp, Gossypium hirsutum
gaacagaataagcccaatgggtcgacgggctgctgaacagttcactcgcagattgtcgtgctgtttccttctaatatggacagaaataggaaggatgtttttacttatccgaatggcttgtaaagctagcggagctgcactggacttgatgaagttattcaaaggtggatcaagcgttgtacgctacgctccatatccggattcagaggtcgtgacgtttgcataagaggactgtgaaatactcgaaacttgccaaagaacagctatcctatacatcagcctccttcggtattctatgcctctgttgagctctgatcgatccttcgaccactctatctgatcgctacaggatccatgatacactctatgactacaattctcgagatactgggatat

SEQ ID NO: 239155 - DNA, 395 bp, Gossypium hirsutum
ctgaaaccaataccctgtttgggattaaatattctttccaaaatacctcaaaaatcaatctgccagagaaatctcacgataaagtgaatacaacctatctagaatgttaaaattgacctttgccctgaccatgtctaatatatggtgaaaacttaagttacagctgctcagtgcaaacttcagtcatctatctaggtgatataagcaatgcatctaatggataataacctcatttcccaatatcttaaaaagaaaattgataaatagctctaagctgtttacctacaggttttactctctttctcaatctcttatttcttcaattcaaatggcaaatatatgatagttatgacctactaataatcatcagagccattgtcaacatataagccatt

SEQ ID NO: 239156 - DNA, 417 bp, Gossypium hirsutum
  unsure (1)..(417): unsure at all n locations
cttgcagagagaagaagagctactatctagtgggtggaaggaatatgctgaatgctgtgaaggtccaagaggacgaagtagttctggcaagaagttggacttgggagaagattcatcttcttccaagggtttgcaatcagcccaactatatgggtttgaagaagagagggttggtgtccctgtaaagggagggctctatgaggtagatttagttaagagacactgcttccctgtttactggaatggagaaaataggcgtgttttaagaggtcactggttcgctcgtaaagggggagtggattggcttccacttcgtgaagatgtagctgaacaattggagattgcatatagtaacaaggtttggcatacgagaacattttaaccgtcaggactttntgcagctagagttgatttgca

SEQ ID NO: 239157 - DNA, 414 bp, Gossypium hirsutum
ctgaaacagaaagaaatgagggggaaaagaaagagaccaggatagtatagccagcacccacattcactatagcacagatgtgagtgagatatttccttgggggttcatacaccgtaaaatagtgatgtgtcagctctgcattttaaacaaattggaaacagttgaaacctctggatttttgctttgctggaactaaaatttgagaaacactctactactagattttcaagctattattctatttctgagaaaataaatgaaattcccatgaatccagaaacctggtcttcactttcacacttagttgagctagtatatggatggttcttgtacttctaacataagcattcctactcgttaataaaacactgttggaaactttaacgcatggatttgcttgacaattatttatga

SEQ ID NO: 239158 - DNA, 339 bp, Gossypium hirsutum
cttataccaatctatattatcacactgtaccgggcaatgggagatacacacttacaaactctacactccttatacaccttactcttgaatctcatactaatacttcaatgtaaaccctatctgacatatctacactttaatcaccacttcttctattttatatctatttgacaaaaactacaatctaacgcactctacatccttctataaccacgtctcttctgactcataacaacatcaatcatacctaaaccatttacatataactctcaccttctacttataaactaccgtccttcatatattaccatatttcaacaaatctatcattcccaacat

SEQ ID NO: 239159 - DNA, 394 bp, Gossypium hirsutum
ccctgtttgattttgatcatttccgccgggcggtttgaaggtttcttttattggttatgaggtgtaagtgagtactaatggaaagtaagcttcaacgccctcagtcttttcgtttaaaccgtagaggagaccgtaataatcaacgcccttttgctaaagatgatgaaagtggcttgttttcttcaatgaggttgccacaagataatccaatcaagattgtgtggaagcaggggtttattcgattggttcttgtagcaggcattctatggatgctacttattcttattgtattgctatttcatgtttggtcatgccaatcttcaatttctttcttgtcagctatgtgtaacaaagatggcatggtgttcatcgcaatggacttgcttggattggc

SEQ ID NO: 239160 - DNA, 421 bp, Gossypium hirsutum
gctaagcaagcagcctttagtttgttgccaatgacatccagccaactgagtaatcacaagaatctctacctgttcttccgcctttacataaaaaaatcccagtaacagtttttcttggtctttaaagtttgacctcaaagtcctaacactaaagctgtataaaggagaagtttcaaatctcttaatggctcaagatacctcttctgttgctgaatcacctcgacggcgctctggtcttctgcgagaccaggtgcagttgattaaaagaaaagactgtgatcgctatgagatcgttccaatcgaagataaactgtccttcgagaaaggatttttcatcgtaattcgtgcatgccaattattggctcaaaagaatgatggattgattttagttggagtaagcggaccatctggagctggaaag

SEQ ID NO: 239161 - DNA, 418 bp, Gossypium hirsutum
tttgagtttgagtaacattctcctcgatcttggaagtacgctcaaccgaggaatggtgatatttccatcattccactttgtttgcggattcaaggtcaatcctttcgattgattggccttattccctttcttaatagaatagagggaatggaagtctttccttgtccttccgagataggagttgagagcttcaggcagcaccacagccctaggcgcactagaataggtagcacaggtcacagcaagactgaaatcagaacggtgggacccgcctagcttgcgtaatagatggattttcccgactactagcatgattcatcctactttcttaaacacggcaaaggctttctggtcagatcagataaaggctcaaggatcgcttaatgaaaaaggcattctgccgggggaaagagatcaa

SEQ ID NO: 239162 - DNA, 428 bp, Gossypium hirsutum
ctagtgctcgaggttttattttttttgactaaaggggtttctctgaaactggtttttgcctaaaacttaattgcatttagggacattgtcaaagacttaacaagctatgcaaaaagaagaagttgaatcaaacaattagaaacatggcaagtgctaagtgctaacatatgaagttggcattaaacaacatataatggatagataaatatttaagaaatggttcaaacaaccgttaccattaattatgagcctcaatctcttatatgttcaacatcatttgttgagccatttgcttccccatgtatagcatcttcagttggtggatgaacctgctactattctggcaatggttcctccacataatcgctctcgaaagcatcagctggaacctcatagatcctaactggaggcttagattgatccttcac

SEQ ID NO: 239163 - DNA, 360 bp, Gossypium hirsutum
tgaagattgattgatctgatattgcaacttgagggagattgagtttgtttcattacaaggatgttcagattacacataacagaggaaatcggcgaattaccatttggggttcagttttgaatctttgatcatagaaattgttaattatcttagccacctccatacaggttctatggtggttgttggctatgtatacttgttaattggttccattactattttgtttaagacccttgagagattgttgagaaatctcttctagaattgaaggatccatgtattcacacgcataatagtccttgcaattctgtgaagaatggaattcaaatttgtgtcctttatggattataaaagaaatta

SEQ ID NO: 239164 - DNA, 299 bp, Gossypium hirsutum
cccacttggaaggcgaacaacaactacaacaacgaaagagggggtctctacttgtgaactacttctttccctttgcaacagcagaattaaccctttttcaagccatttgggggggtttttgttttgttttggtttgcattgccttgacttatcttttttgctcattccgatgctaaaggttaagggttttggtttttctttgcttctttgaatgctcatggaataagatcgaagtatgaatatcttaagattctgatattggatactaaaggctgaatattattttttgactcttcaaa

SEQ ID NO: 239165 - DNA, 166 bp, Gossypium hirsutum
gtataacgatatgtataatgagataaagatgtagggttgcgtgaatgatgatgatgatgaggaagaggagaatgtgacatatacagatatgaagaatgacatggaggcaaaggagaatatgatttaatagatggattaagtataataagatgaatatgaagaaata

SEQ ID NO: 239166 - DNA, 276 bp, Gossypium hirsutum
gattcgtgcggtatgttgttggagatggaacagtctgcagggattacgttgaagccatgacaaacaggagtgtatgaacaagaggaatgatctaaacgtataacaaagccgttgctgcattaagaggacatcttatagggcactattactcccagtagattatgcacaattagtacagccgaaatgtattatggcttcctgagaccgggaacacttgctgaaatgggtctatgccaagacccttcaggctaagtactggatcgacatgcccttata

SEQ ID NO: 239167 - DNA, 413 bp, Gossypium hirsutum
tttctttcttccctcctttctttccccaaaatcggttccggccccccgtcccatagaaatcctaaaatttcacttgaaatttcttctcttttctttcccattttattgttcccaaaccatttctcccctaccccgattccctttattttttcccccaatttccccaaattggtaactccatgatgttctctctctgatatgtttgcttattggatgtattgctcggactttatattgttgtttgaaatatcttcactgaaattggtcaattgaaccccttatccatgcccgtcgatcccaacccctcctacgccttcagctccctccgtgatcgtagtatggacattctcagcgtcgtcgtcgctctcctcttcggcgtctgctgtggctctatcactgccgtcgccatttac

SEQ ID NO: 239168 - DNA, 418 bp, Gossypium hirsutum
  unsure (1)..(418): unsure at all n locations
cggaggagcaattaccggcttcaactacagcgccaaatagtggaggaggatggggtggttggggtttctctgctttctccgttctctcagatcttcaaaaggctgccactgttgcagctgaggagatctctcgcaatgcttctgtggttgcagagaaggctgcaaagagcattgcagatatgcaaattgctgaagagtcagaatcttctaaggcagatgaagcagaagaatctccaagtgaaaaggaaagtgaggatgaggatgacaagctacgaaagtctgctctggataagttagagaaagcaagtggcgattctttccttggtcagggtttgaaggtttttgacaactctgtggaaaattttgcttctggtgcatggcaagcactanggagtgcatggaaagggggtaccaattt

SEQ ID NO: 239169 - DNA, 436 bp, Gossypium hirsutum
atttgactgccatttcgtattagaaagaataaacaaaggggttctattttgggtgtgaaccaaaatgcaaagaagatcgattttcttcgcctcttgaaacaaaaagaaaatcatagttacatggcagaaaatttccagcaaaataagtttatatcctcccatgtagctaaattgctgaacagctaaacatcagaaagatccagtactgcaactcatgaagttactcaaaattcaaaccaagtaatccatacaaaagccaaatctcatcagtcagcttaggatatcagagagaaaacaacatttttattcaaaggggaaaccatacaggctaataaaacccagatttctagctatatgactgcactctagaccctccaaacaaagtcaatctgaacccgcatctaattcaaatttgatggctcatattaaccatagt

SEQ ID NO: 239170 - DNA, 399 bp, Gossypium hirsutum
gccaagtgctttgctgtcttctagtagtgccgaaaatatgcgacagtgcatctcttacagggttatcacaaaagtcttctggttttagaaatccaagtgctgatcatgttaaccactcagcacatgattctgttgaccacaaggtagatacagtcaaagagaataaggctgaaatgccctactctggtggtcacctgcagaaaggtgaagatattacccaaaatgacatttcaactgttcctggtcctcatacagtgttcaaacatccaacccatctggtaacaccatcagagatactgtctaccatggcttcatcgacagagaatgctcagattagtcaagttattaatgacagggaggcaaccgttgaagatgttgtcgagaatgatgcttaaagcg

SEQ ID NO: 239171 - DNA, 381 bp, Gossypium hirsutum
ctgaaagttcctcagccctctgagctccggcccttggggggtttgctccgttcatcgggcctccgtgcccaccctcacacgccgtcaccgactccgccatacatgacggtcggtatctgaaaaacttcgtttttcttagccaatctaaaagctatatttctttcctctattttgatgtattatatgcaaactgtttgtaataaaataatgaaatagaagtagaaacgacagatcacctttgcttctctcgaaaaccttctgatatattattcaagaatattcagtgtacaatatcttttggggtgtatttatctcttttgggtattctctctgtttctatctatgaatgcttttctttctggctctctgctaatggccccc

SEQ ID NO: 239172 - DNA, 302 bp, Gossypium hirsutum
gggggcgtctagatggatcccccgcgaggaattcggcgagtttttttttttttaaacctctacatgggaaggattcgcctgaattccaatacatgataaacttatccggaattaaaaaaaaaaaattgtttatcggctcccatgaccaacaaatgctcagttaccttataactgataaaaaatgcttgaagaaacaaagattaaaaaaggtaattaactgaggtgaattgatcgggagtttaacttaacaaagaccaactaactaaatttaatgtacccaaaggatgtaaattacatactac

SEQ ID NO: 239173 - DNA, 194 bp, Gossypium hirsutum
gggaaaggaagatatatcgagcccgagcgcaccagagcgtgagccagcgcccttgttttactctcgttaagtataatctgatcattattgatatatgcgacatggagagatacatttttatgctacatgtgatccagaagaataactatttgctgtccccagagcgtcaacctttctcagcgactatgcatcac

SEQ ID NO: 239174 - DNA, 261 bp, Gossypium hirsutum
cggcacgagtggtgacaacgataatgatcataacatgggcgtgtgaagttactcttagcatttttttgttaggtattaacttgtattttgtaggatctgcctgaatccaaatttggctgacacctcatcaaagaaaaaattgtggaaggaaccacactataaattgttcatatgttggtttcaaaaatgattttggttgtatgtagtgtttcaccacaagctctgaaggatttgatgaaataggatgtttagcattttttt

SEQ ID NO: 239175 - DNA, 252 bp, Gossypium hirsutum
ccaaaatcttcttttttttttaactcttaatcaaaccgggactatattaatactcccccctttacatatacaacccatccctttatcacattacaataaaaaaattaaattaaacaccccaactatatttgtccaatttattaccaaactccatattcaattctcaaattaccgatcacttccattattaactaccatcatacttaaccctctaaaaccctcaactgcctttactatcaacactacaacatc

SEQ ID NO: 239176 - DNA, 409 bp, Gossypium hirsutum
  unsure (1)..(409): unsure at all n locations
cggcagcctgccagccagccagccagcgagggagcgggcgagcgagcgagcgctagagggtctgcaaattttagggttttggattgggaaggtcaggtcagtgagcgccaaaaagaggagaaaattttcttatacgttctgttaataactaccacaattgatcttctgttttgagaattgaaatttctttttacaaaaaaaaagtggtgaatttgatttcggttttggtgatgattatgtgtgagaaagagcgtgtgcttgttgtatgcaagaagagaaagagccagagacagagtgtgagagatttttttaagagaggatttgggagatcttttgttttgagtgaattanggatttcaacgcttttcatttcttaacttattttaatctgtttactcaatggaacgga

SEQ ID NO: 239177 - DNA, 376 bp, Gossypium hirsutum
tcgagttttttaaaactttttttttttttttttactttaaaaaaaaaaacaggcggtttattcctacccctccttcgttttgtacattctgtatcaacaaatttcaaggcaacttagtttaattgctgccacaaaactctgtagtatgtataaaccacacatgctcaaacaggggagaagaaatgaagataatataaataaacacttttttaagaggggggaagtgttcgggcttaatgcatgtctctctgaaaaatatccacagaatgtcttttcgacaagttccataatggccatggatgccatcttacataggaaccaaacatacaccaaccatagctcattaatcctcatttccgaagcctgatgtgagggt

SEQ ID NO: 239178 - DNA, 316 bp, Gossypium hirsutum
gagtaaaaatttctagggtgtttattattcatttgatcaatatcaagatacaacaagtaggaaagctagtaggtcctaaagctttctccttgggcaaaaaacccatctgtttttcttgtacttgaaataaaaataccaattgtacttactatatgcaaattcttgtacaaacatccttaccaccctccaatcccaaatcaataccccaatcagaaagcaagaaggaccaataatccagagaccaaagccagtaaccccacctcaaatttgcggcttgcagcaccgaaatttttgtcaatagggtacaggttccccg

SEQ ID NO: 239179 - DNA, 363 bp, Gossypium hirsutum
agcaaattgcatgtgcttgaggattttatatctagttatccatatttgtagaatcctcaaaacacagaagtcaaaattttaatacaacaaagtactgaccaacaatgtcgcagagcttgagcaagaacttttgaaaaagaaaaataacttagacggagaagaacatagttgtttccgacttgtaagtttaacagtccatggatacccgtcaagcactaactttcttcctaaggagatggtgcaggtcaagtgtgttgatcttggcagcaagtatgaagtcattttccgtaagtccaccaacagcatgcgtccatatttcaactgttacattgttccatccgaccagatgcagatctggatgat

SEQ ID NO: 239180 - DNA, 410 bp, Gossypium hirsutum
cagcagctgaaatcaataaaatatagccatgcagctatgcgcaagagctctgacaagaatcgaggtggagagaagactgattttgccaattgattgcttacctgctttaccacggttcgaagggagctatgaaaatggaatcacgttccaggttatggatgatgtcgagatcttatggaacttccgttgcaagaaacgaaatggggctgcggatagactagctattgaaacagattggattcaatttgtgaatagtaaaaaactccgttcaggtgatattgtcgctttttacaaggacgacgacagagtttcagggacattgtgtaaaattgaagtgaagaggagaacttctatatataacaaagaattgtagcttagtttttttgtgagtgtgtgaaaaagaaagaaaa

SEQ ID NO: 239181 - DNA, 429 bp, Gossypium hirsutum
  unsure (1)..(429): unsure at all n locations
agaaagcagcattatttttatattaaaaagaaaaaaacctaaaggcggtgttttctcaaattagatgtgacattttctctctctcttataactcatcaaggatatgcaggacctataaatgaaccaatatttagaacagaattgcaagcaccccttttcccctttgtaactccattcattcctttttatcaatgttcagtaatatgcctaaaattggtttgttttacaaaattggacccatgagttgtaagagatgtgaactaaaatttaaaaaatagaagaaaaaaagaatacctttacagcttcctacaaccttgacaatgtcttggtaaaccagtctgatagacgcctcatctttgaagataggtgagcacttctagcgaaataactctccgcatttgaaagcattanttntatgtcatgcttcac

SEQ ID NO: 239182 - DNA, 308 bp, Gossypium hirsutum
  unsure (1)..(308): unsure at all n locations
ggtantattattaatatgaagcttcagctttgcttacgggagaactttaattaacttattcactgcaattgaaaactactgtaacctttcataaataaaaatcccgcttctaccttatggtgatgatgcaaaccaaatcatctttatttgtttgcaagatcatacctttgtttattaaaatacagcagcatgatagatttactgatggatcaataggcttcagcaatggactattctccatttaataaacaaactgtagtgcataactgtatgtataggattattgaatcaaaggccactttttgcca

SEQ ID NO: 239183 - DNA, 350 bp, Gossypium hirsutum
gtcttcacaaaagacctgtccgtggctgatggaccataggggttaacaatgtagatcaaacatacatagtgtggaatgaatttagaacaaacagaatccggcaaacatttaacttggaactgattgatgatatagtagaattattgaatccaatcactgagaactatttacctaatgaactaaatctttttagcaagtaatcctttatcatatacaatgtgcaagaactaaaagagattcacgttagaagaacctgactgacactgttatttaacacttaccaaatgaccagtcttatattatgctttaacacgctgatcttcttcttgttcaatatgatcatgaatatc

SEQ ID NO: 239184 - DNA, 347 bp, Gossypium hirsutum
ccggagtggtgaatgcgactgtggagaatagagtggttggtgaccggaggatcgccgcttatcatgtggataaggtgcttttgccgatggagagttttgggacagcgcctgagccggctcctgcgcctgttgtcccagagaatggtgggttggtttcgagtcctattgcaacggttaagggtactgatgtagctgttgcggggagctagaaatttcatgctttggcgatgggtttttcggcatttgctgtaatatgagctgtagatgggggattctgattatggatgttatatccgcacgcaatgcgtgaggtactgggatgaatacgtggttgtgattaaaaaata

SEQ ID NO: 239185 - DNA, 422 bp, Gossypium hirsutum
  unsure (1)..(422): unsure at all n locations
aaccagctgagatcatcaagatctaaacaataccatcgggcgttcaaggcagtgaagaaaagaagaagatgtctaacaatatcaaaaaaatatcgtctcgtaagcagacgatgcagaggatgtgttgggtgtttgtgtgggaaaaagatgtgaggatcagatataggcaacctcaaccaggggcctgtccctactgtggagggatgctccaagctatgaatataaagactcattggaagctttgctttttgcccgtctttttctggaagaagaggaagatccattgcagcacgtgcgcaaaatagtttgctgatcctgtcaccaacttttgtttgcaactgacccggcatgctgcanagcttctatggcttctctatccttgaagttgccaggcgtttagcgtaaatctttgtttttaaagc

SEQ ID NO: 239186 - DNA, 389 bp, Gossypium hirsutum
gaaaaaatgggtggttttgctgctgttaatgatgatggggttcaaaatatactcttcaggttgccagcttcatcgttcgcttcagctgcctgcgttagcaaatcctggaacaaagtttgcgacagagttttgacttgtcccaagcttgcctctgcactgtctctcaacccttctctccctgatgctgtgaaagaggctcttgacaaggttctctccaagccaattcgtcctcagtttgccattgcctccatcgggttacagttcaactttggaagctgctcatcaaattatcaccgaaagactgggctcctaagtaccagtagttaccaatgctgcatgtggaatcattggtagagatgctatcaccaacacaatgagagaggttcgat

SEQ ID NO: 239187 - DNA, 411 bp, Gossypium hirsutum
tgcaaacaaatttaatggtcatggattaaatgtttttgcgacttaccttgatggaaagtatgacattaaagatgttaatgatgcggaaaaagatacctcatcctctctgaaataggattcagatgatattgatgcactactcagctcagaagaggaggaacaagaagattatgatgaggaagaagttagcacagcacggacttctggtaattatgaaagtgactctgattctcactctgcctatggctcaaaaccaagaaaaaacagctcatgttcttctactctgaaatcctctggtagcggttttggtactgaccccaaaaagcggctgaaaatgaagaaaatggttaaggttctaaggggaattgtaccaggtgctgatcagatgggtactgtagcccgtctcgatga

SEQ ID NO: 239188 - DNA, 382 bp, Gossypium hirsutum
tttttatccaattttttattttctaagggtaaacccgtgagctgaattgaatgtgggtctggagtccggattaagataaaaaaagaaatcatagaatacaaagcttcaacaaacaacactttaaagaaccaaaaaaacaaaaaagggactgtttttagttgaatagtttttacttttgatccatttccaaaaacccagatgttatttcaataaggttttctgggttttttttttgttctagatcttgcctttggatttgctgcatgtttcagatctttagtgggttttgaagcttaaaagctatggcggtttgatcagattcaggctttgagattataagctgcaaactcgtaatcgtacttttatctgaaattttcagaaa

SEQ ID NO: 239189 - DNA, 424 bp, Gossypium hirsutum
  unsure (1)..(424): unsure at all n locations
ggagtacggtaccttctaaatctaatttatccccttgtatggaaatccacgcgagataaaaatgatcacgtagaatacaccagtgatgctcctctgccatggttagctttttaccaaggtctacccttttattacatcacttcatttaatcaaacccatacagaccccagagtcaaagagacaccgaaagagaaggaaaccctgaatgaaagatcttgcaccggttcaaatacgggctcagttagtcaaatagaaaatagggaaaggaattcggattctgtcgattctcaatgccaaaacccttgtcctcggngaaaaatgacatcccanaagtttagtaaaggatttgtgccatacaaaagatgttaaacagaaagggatatgtcatcattcatgggtgtatccgagggtcgagagagggcac

SEQ ID NO: 239190 - DNA, 137 bp, Gossypium hirsutum
ctacgaccggtgcctacacatttcgatgggctcggggtgtctgcataacctgacgacgcagcgacggcggacgtgtctttcgactagtacacagggttcagtgctccatgctaggaatctgcggaaaccgactatcg

SEQ ID NO: 239191 - DNA, 349 bp, Gossypium hirsutum
  unsure (1)..(349): unsure at all n locations
aaatagtttcccttaaaagtcttatattcttcaatcggtctcttttcactcactcattttctcgctaccccaaaccctgatttctttttctttctaattttaattttagtttgtttcctctcttttactcaggccattagatttccggaaagaaatggaacccaaagcctcgatgaaaaacaatcaaactctcgatgacatcatgaaacaatcctcttcctcaaactccgactcactgtctcacctcgactcgccccactcacctctccgatcagaccacggtgactccgtcccacccgatccccaaaatacctnctctccttatgttcctccggcagtcttcccccca

SEQ ID NO: 239192 - DNA, 308 bp, Gossypium hirsutum
ctttagttgaccagatgcagaaaccagggggtctgggaactggtcccgggaaggaggtcggattgttggataactgtggcattcttccaagcaattgtctaccttgtcttgcatctactgtttcatctgttgaaaagagaagatcgctcagctctagcccaccaagtgcaaggaaaaagaatgccttaaaacttccatttaaatggaaagaagggcatcccaatgctgccctattttcgtcgaagaggcttcttcagagaccaaaagcagggtctcaagtaccattttgccctacagaaaagagaatg

SEQ ID NO: 239193 - DNA, 294 bp, Gossypium hirsutum
taccggtccggagttctagagctgacgcatcgcgtcgcgctgcacgtacgtacggctacaagagacgacagaagggttcggtttgtaaacacgggtgagactacggatgcgataggactacacatggacgcggtttcgagaagactacgaagagctccagctgcgatatgaccatcgaaggtgcatgtcaataggcggagcaccagaggtcgttgtcgctgccgaatagtccagggcgatgtacaggatccagtgttacctacgactgcatccgaccgtatagctatcgtatgg

SEQ ID NO: 239194 - DNA, 392 bp, Gossypium hirsutum
accggtccggcgttctagaactagacgccacgcgtccgtccggatgctagaagcctccttatggttccgtttctaaagaatcaccaacaggtatgggcacagctccatcacctgcgttacatccaataccgaatctaacaccttctttcccatgctcacaaccccaaacatggttaccattagggtagtacaccatacggttacacctacgaagatgaaacttgtctattcacatgttctacgactaccaagatatcgtacataaatctccaaggagcttacttgcctgtcatggccgacctacttaaatcatctccgcttactattgaccggatctgttatttatctcaaaccctattggctaatagatggccttcttttcacccccattt

SEQ ID NO: 239195 - DNA, 177 bp, Gossypium hirsutum
  unsure (1)..(177): unsure at all n locations
cccaaatgctttttttagttttcgcagcacaaataccangatgggtatatgcactttcataaaggccaacgtggcattcaaagccaatgcctggtacaatgcctttgcaaggtacaattaatcatatgcctactacaatgccacaaggttattagatgggcaatgaacccatttcat

SEQ ID NO: 239196 - DNA, 176 bp, Gossypium hirsutum
ttttctttcatgcatttgttatttttttgatttgcacatacccttttacacaaagtgtgtttgttttcccctttgagtaaatactctttctacattattgtttcttgaggtgcccaaaataatagaaaatataattaattttttttttatattattttatatagtatattcctctt

SEQ ID NO: 239197 - DNA, 364 bp, Gossypium hirsutum
caataatattcttggaaaggatagaactgtatgtctagagcttgcagtatctgggttggaatttcaatatgacatattcacacctggtggagtatctgtgtccaaactttctctttcagtccatgagtttcatctctatgacaagagcacagatgcaccttggaaactggtgctaagatactacgattcaaaagatcatcctagggaatcctcttcaaaggcattcaaactggacctagaggctgtaagaccagatccttctacacctcttgaggaataccggttacgcattgcccttcttcctatccggttacagcttcattaaagccaacttggttttcttatcagcttttttggtgaaaaa

SEQ ID NO: 239198 - DNA, 271 bp, Gossypium hirsutum
gctgggagaattgactcgtttgcctcccgctcttcattacatgcgtccaaggccaaccctggaggccgatggaggctacacttacagcccaatcaccgtcatcgattgaacagacgaccaacatactattgcagaaagctacttccgttccttcgtgcacggaactaagaacactatcctcttgaaagctgtcatagctagtatcagccaacaactctatgacgcgttggctgccaaattgaagaatgcttttaacagcaagagggggctg

SEQ ID NO: 239199 - DNA, 237 bp, Gossypium hirsutum
gaatggggcagtcaacccactttctatctcaaattattattcgtggcatatacaaccctataaggggcttcagttactacttttaaccccaacatgattgttgtgttcgttacctatcagaatatattctttaagtctctcttttcaacttctctttccttttccttaattcaatactaaattactttacttttaatttttacctaattgttttactattttatttctaattttatt

SEQ ID NO: 239200 - DNA, 295 bp, Gossypium hirsutum
cacattctgagtttcgagattatattgaccagggttttaggaggcctaggcgctattttccccagaaagaagaggtaaaaatcgaagggaaaaagatggtggctgatggtattgatgcatctcagggacacttggatgataatgctgatgattggctgcctgcagtaagtcgaagtactcataggagatatcttatgaggaaagctaggcgggaattctacgaggcattagtggagaaagattgtcaagaagatatgtaaaaaggcttatagaagagcaacagtgaagatgcaag

SEQ ID NO: 239201 - DNA, 295 bp, Gossypium hirsutum
ttagtaaaatagttgaagctttctgatttcgcaggggagttgagagagctgttcaagtgtgcttatgaagcaacgaatacatttttcagattaaagaatttggatcaccaatgtaaattatccataacccaactgctaatatgcgatttgaggagatggtatgtataaatatacctattgtgtgagggtagaatccttttgatacactgtttaataataatgttgttgttaagctcattcctgtttccttcttttatgattttttatctacttttttttataaaattttaactgt

SEQ ID NO: 239202 - DNA, 252 bp, Gossypium hirsutum
tctacaaacatttcgtaagcatacattgagatgcataattatgcactacttttcagagagtgtaatcatacaatgcaaaatggtgcaccgtatcatagatctgttaataataaactgcataatatttctatatgcaactgcaatgctctaattatgaatgtcttacttcatatatggtgggaaccgaatcagttttcgagctggatccagaccgtatttgcaccatcatcttgctccccatcgctcgggctt

SEQ ID NO: 239203 - DNA, 116 bp, Gossypium hirsutum
cgataaacgttttaaagagtttatcatagctagatacatcatggtgattaggctctgtcggatgcgactggaggaaaccatttgggaggttatgcctttacgcgtgagtgctatgg

SEQ ID NO: 239204 - DNA, 395 bp, Gossypium hirsutum
gctcaaatgaggccaacggttgacatttcagtgcaccctgatgctgattttgtgcgaccagagttgcgtcaatctggcaattgagtaggtggaatcttggaacttgagtgggcagctatagtgtgtttaagccaaaactttcacctcgtttataaatgagtgatgtagttttagctatgtctttagggtgtttgaacactaatggcactagattcccttttttttttcttccttatcagcctcttctttgatatgactcctttggatttactcgagaatgcttttggtgaatcttttagactgctttttgaaagttttgttgaagttatatattgagtaagcaaaacagtttattgttggagataaaaaaaaaaaaaaaaaaccttgaggggggg

SEQ ID NO: 239205 - DNA, 250 bp, Gossypium hirsutum
gattaaagtttttattttagagactacagaagacggggtcgtgatgaatttttaaaggactggcgccaataaaatatatttgctaatggtaggaaacctgtatatcatatagtatatgacggaaaaccatagttgttaggaaggtcacctgaactaccaatagagctacagtcattcaatccaccagtggattattattttatagaaattttggttgaaaatgtattctatgtatctattatcgtgcctt

SEQ ID NO: 239206 - DNA, 222 bp, Gossypium hirsutum
gttttacggtatattcttacaaccctatacttgaggcccaaggagacttaataacggtctaaagggctttaataatttttctcacacaaaaacctttaaataaacttgccattttaaaattaaaaaatatctttttttttaccgcactgtttattgcacttcattaatgatcatcttttaaacactaacctttaataactaacctccattatatgggtgaaa

SEQ ID NO: 239207 - DNA, 349 bp, Gossypium hirsutum
gctctgtcaattttttcttaatttttaagttgtatataaaaaaaggttgagaatgtggttggcgatcatctgcggaattatcatttaccagttgttccggcgcttcttttatggtggcaacgatgttttagacgtggaaacctctgattttaatgctattttctccgtcgccaatcgactagaaaagcttttgtggtggaaaagtgtatgtggggcttaacattcctgatgctgacactggttctcgaaagagtatcgatattgttctcgttaccaaaggagaagcagcggttatttctgtcaagaatgtgtcggggtttgtttctataaatgatgatggtagctggac

SEQ ID NO: 239208 - DNA, 336 bp, Gossypium hirsutum
ctttttcttttttttcctaaaacaaaatttgtaggggctaagcaactggaatagagggttctgaaattaacttaaagaacaacaaagaataaacaaccattacttgtaacttcactatgatatggatccaaagaactgtatgattgtgatttaccgattagatttccgagtgtgttctgaaaaatgcaactatatagcagcattcccattactccttactcgaagttcgacactcctcaaatcgcgaagattttgtaaaatctcttgaagaaaatagatccctttatctccttttcttaaggagctgatacaatgttttagaaactccctatctgc

SEQ ID NO: 239209 - DNA, 326 bp, Gossypium hirsutum
cctattcccattcaacaacatatccttcaaatacgcgcaactgttgaatcaaaccaagaatcctttggtttaaatcataactttgacgcaattcttacataacccaaaattttctctatctttgttggcttttggtgctcaaaaaggaagacagtattttttttgatcgcctgtcactgcagattacttgcatctcaagctgattcttagtatttgtgctattactttaacttatttttaagtggccttgggagactgtggttgtgattctgaatgataactggtgaagacaagaaggtgaaattaatcatcattatcaaggaatg

SEQ ID NO: 239210 - DNA, 255 bp, Gossypium hirsutum
  unsure (1)..(255): unsure at all n locations
tactacagggtctatttatcgggtattactccgtcttatacggcgaccaagtgaagctatcactgaagccatnttccagctattgactcatcggctctcctcttgccatctccctctcctccaatccagttctttccttcgaccgggctccttgtctcggcgtgttcttcaccggtgaaccccacaccatttacggtctaagtggcttccccctccgccttgccctttttcttctactcgtcttggtcctgcttt

SEQ ID NO: 239211 - DNA, 343 bp, Gossypium hirsutum
attaaaagaaattttgacttgatttaaattttacaaacaacaaataccattattaatggtattattctaaattttcatttttttttcagataaaaaatttatgtatataattatcaaaattaaagtgaagtttatatatgaaagtttgaaacaaaaaacataaaacaagtgattgaagtgtagtttccggtgaacttctcattcttcacataataattatttttttcatgctttgccaatgaattccacgtcaaacaggagaactgaatctgggggtataatgcatgaacctcctttacagcctgcacctttcattccatatccgagctctggtggaagcctt

SEQ ID NO: 239212 - DNA, 355 bp, Gossypium hirsutum
gtgtttgtttgattcattccgaatccccaaaacatgactgcaatcgattcatcaaaagaacccatggcaaaccatgactaatattatatttcaaaatggccaactgaagtttagaaaaaataaatgctctagttgccactagcgactgcagggcacattttaaaagttcccatcacaacgatcaaattattaacttaatcaattaaacatgccaccaataattataacccttcttactagttttttgcctttttcttcctattgccttaaaaatacattggacaagattaagtaaattatacgaaaacctgccaataactgataacaaaactaaactaagcatgaatatgattta

SEQ ID NO: 239213 - DNA, 339 bp, Gossypium hirsutum
  unsure (1)..(339): unsure at all n locations
attcggacggggctttttttctggtgccaaaagatctaaagtctgaaactgatggagaactccaaagagatcggtgaatcaatggattttagagctgagctgtaaactgaagaggcggcaatgataatgttgaaactgaaaggagggtatcttgaatgattcatctttcaagcattctttcagaggatgatgtntcgggaagactgggcagatttactggccctctgcaaatttgctaaggtgcctactaaaacacgttcttcttgacattgaagaacnaaaaccggactcagttaaccattgggcagaaggtgttttgattttgatctncaatgttct

SEQ ID NO: 239214 - DNA, 354 bp, Gossypium hirsutum
agatcaccttacctcttttttttggataagagttctgcataaagacccaacttttatttctagggaacacaaatgaaaggaatttttttctttttttcttttagtggtggaatgatctcaaagttgtgaatttgaagctggtttagaggttgaagaaaagggtaaaaaaaaaatggggttcttttttttttttggaagaaatgaagaccaaagtttggaattttacagaggaataatttgaaagtttgggtttttcaaatctactttctaggggaaaggagaaaaaaaaagtgaagaagctgatttagaaaagatcaaagcaagaatttcccaaaaatggcgacgcttgtggag

SEQ ID NO: 239215 - DNA, 359 bp, Gossypium hirsutum
tggagtttttaaacagtgataacaatcttgctatagttgaatatgttggtagtcaagctagttcctgtaacaaggaagtgaatggtagagcaggggaatctgatctggtgataccaggtgtgctaatcaaggataaaatttctgatttgaaagtgagttttactggttttgggagaattgcagcgagattctgtgagaatgatggaatctcaaatggtattagcagaatatggagtgaatggctagggaaagaagctcctataaatgatgataggttcaaggttccaaagcatgaatttgctgttgttacttttccttataattgtgatctaggcagaaagggattgcttgatgatgtc

SEQ ID NO: 239216 - DNA, 215 bp, Gossypium hirsutum
  unsure (1)..(215): unsure at all n locations
aaaagaagaaaaaggcgggggggtattctaggaggaagggcgccggactttttgccaaaacaaaaacatngatgtctgggttcatcaaaggaaccctacaaaacataaatagaaccaaacagaccacgactctccactactttgtttaaacacatcaagaattactcgcctatgcacaaaccgcagtccctcaaaagaatacatgagcaaaacac

SEQ ID NO: 239217 - DNA, 359 bp, Gossypium hirsutum
gaaaacgctttcacatctctcttaactcttgtttcaagatctctcgaggtttcttttccccttttttgtacctgttgtgttatggatccagaaactgcacgaactgcccgagaatccctagatctggcatttcacatgtcaaatattcttgatacgggtctcgatcggcatactctctcggtcctcattgctctctgtgatttgggtttaaaccctgaggctttggctgctgttgtcaaggaacttcagagggaacctccaccatcaaccccgttgtcatcttcttcatcacaagtaccttaacttcggattttggtattttctagtaaacttacgagtaatgccctagaagtttgagt

SEQ ID NO: 239218 - DNA, 333 bp, Gossypium hirsutum
aaatcgggtccatgtcagttttatggttcattttcaggttcgaggttatcattctcaacagtcatggtgtttatcgtttattatcttgatacaaactaaaccattgcatcctcatcaaaatctaaacacccataaagcttcttcaataagtaattgtttagttgcctagtattgattctttttacatcaagtctatgttcgttttatagttcatgttcagggtttagagttatccttttcaacaatcatggcatttatcctttattatcttgatacaaacactaaaccacccataaaaacttcttcaacaagcaatcatccatatctatttta

SEQ ID NO: 239219 - DNA, 360 bp, Gossypium hirsutum
gaaagatcttttatcaatggaagaagaaaaagaaggaaacttaaatgtgttaatggatggccctgagttgactcaagtcgcttatagcaaagaggagtctcctgaaattcaacctaagcatctggagttctacatcgaaggggatggttgccatttgattccaattgaattgatggcttctgttggcgtggaaagccaaagaatatacaattttagagaggaagatgaaggtattgctggtaatggagatgttattttggactttgatatgcattgtggaacaccattggaactggtagtggagaatagttgcggttcatgagaaaaagtggcattgatttcaccccatgagagtgggga

SEQ ID NO: 239220 - DNA, 360 bp, Gossypium hirsutum
taaattacccagatttcaaaattgaaaactttgttgttattgggaaaagaaaggatctttaattgactgtaattaagtttttttcttctgacatagaaattcaataagaaagaaggtagaagaattttctcccccaattagcaaccctggcgttcatagatatatttgttgaagaaaataaacaagaagaagatcaacaaggggaaactgtttggctctttcaagaagaagggaaaagtgagccaaatatggtagctgataatggtgatgaaccagatgatgataataataagttaactcttcatgtccctgaaacttcccatcaaattagtactgattcatggttccaagctggttttg

SEQ ID NO: 239221 - DNA, 236 bp, Gossypium hirsutum
gatatcttttctgcttttttttttcactatagaaatcacagcaatttctgatctcagccttggtctattctcttcctgattaatttcacttgatctatccaagtactaacatcttagaggaaacatagaccttgtcctagaatctaaattgccaatagcctgcggtgacatggaaaaacagacaaacaaatccttggttcaaaaccttatagaaagatgccttcaactctacatga

SEQ ID NO: 239222 - DNA, 360 bp, Gossypium hirsutum
ctcgtgccgattttctcaattggtcctttgttcgggcgctattggtattcaagaaatgaaacaactgcaggagagacaccttaccgcagtaaagctgagtacacagaaaagcagctccttttgaatgtatcagctcaactaaccattattggaaaagattatagcaatttttctgttctttttctggagggtctttatgatccgcattttggaaggatgtatcttgttggctgcagggatgttcgagcttcatggaagatcttatctcagaccattgatctagaatcagggttggattgcttgatcgaagtcatagtgtcttacccaccaactactgcacggtggttgttcaacccaact

SEQ ID NO: 239223 - DNA, 260 bp, Gossypium hirsutum
tttttctcacctctgtctcagcgcctatttgtagcatctccttcaaccattatgatgaaaggttacagaggaaagctacccctttcaatcatcactgttacactctgcggttttgctttccttgctctcttatatactgaaagactcagttttctctcttcaagttcttttctcaaatctaaatcctgtgctagaagaacaagtgctgttgttaaagctaaggatgaaacagcagagaagaacctataaaaccccgaact

SEQ ID NO: 239224 - DNA, 356 bp, Gossypium hirsutum
ataacatttttgtttgagcctttgataattttcaggtggcgaatttaacggagattatgttgaaaaatacatccccatcccggaaggagacagattttgctcttgcggctttaagggagattccttcacagtacaaagcaaccattgagcttaatattctgggtcaaaagggaaatgttctcgagagaattccactacctcctcctacatacggtgcagcatcttttaacagctccaaaccatcctattctactagtgtccaatatggttcagcatctttcagcagctcaaaaccttctcatcctaccggtttctcaccaagtgtccctccttatctggaagagagtaatcccatc

SEQ ID NO: 239225 - DNA, 171 bp, Gossypium hirsutum
ccatcccccgaaacaaaccggggcgggcttatttgctaaggcgtcgcctctaattacttattctcctaatacacattcatatctcacttcattattcttttattaatgataacccctcatttttttattcccttaactcttttaaatactctacccttctctaatctcaaa

SEQ ID NO: 239226 - DNA, 364 bp, Gossypium hirsutum
  unsure (1)..(364): unsure at all n locations
tttcaagctcccatggccttctntcttatagaaaataggtggagaatgaaagagagaatgaaaaagataaaagcttctccttattttatgatatttctagtcaaattagtcaccaaatttcacctaactgtgaccttacaaattctntatatctgtgttcagccactaacaaatgtgtggtctagtactcaataagaccttattaatgtccatactttacacttactataaacaatttgacttatgcactatctttaaatacatgcatagaatatacaaattaacctttattcttacataaattaaatttcactaatggtgacacttctgcaataggccacataattgttactaactcatacta

SEQ ID NO: 239227 - DNA, 280 bp, Gossypium hirsutum
tccaccaccaacaccctactagatctaaaaagatcgaccacacaccgttcatattctagtttcgccagcaaaataaaggaaggcgccaagaaggaagggagatttggacatcaaaacagttccttttcaagtccatggaataagggtctaagcattacagtggagagataccaatttgataattaggcctcatgaacttcacttttggtgcatgtacacatgctttattattaggctagaggaggggttttattaatatgttactaatatcgtaaaggct

SEQ ID NO: 239228 - DNA, 196 bp, Gossypium hirsutum
accgtgcctgagacatctcgggctctattttctttgaacctaacgaccttctctcacggtcgcaccgctcaccggacggaatgacgtgccacgaccaaccctcagtttagtcttcgggccagaggcatctacggacgcgtttttcgcgcgtgcgcttacgagtcctactgctgacctttgacgctgtatatgctgt

SEQ ID NO: 239229 - DNA, 177 bp, Gossypium hirsutum
  unsure (1)..(177): unsure at all n locations
ttctctcttcccanatctctcatgaaccagaagacagacccacttatattcggctgcagcaatgccgcacctactcctncactatctcgctgcaatcacaaccgtacatctcaaatcatgttctttccactcccctaaaccaacggcccatattcacctacgctccaacccaacacc

SEQ ID NO: 239230 - DNA, 300 bp, Gossypium hirsutum
  unsure (1)..(300): unsure at all n locations
ctcgagtttatatatcaatatttctctttcgcttccgcatcatatttctntgtcatttgctttcaatttcactaaaagccaataactcgctgatgtttcttttatgttttattnggaaggaaagacaatggtgttcgagaaaacaccgatcttttttatggaggttttggttatggtgagtttggatctgtgtttcgggagtgagctcggtatgtcgccggcgcatggtgaccatgggcatcatcatcattgtgatcatagacatgggcatgaccaccatcatcaccaccgacatgtgga

SEQ ID NO: 239231 - DNA, 190 bp, Gossypium hirsutum
cacaatcttctaacctcgactccgatctcggtttcctcttttcttttacggaggttgtttgcggtgggtggacgacgatcatgatcgcggatcctaaatcttgtgacgtgctgttcgttttcgttttatttgcgattatatcctcttccaacgcctggttcactccctatctaagccatttattaaaaga

SEQ ID NO: 239232 - DNA, 217 bp, Gossypium hirsutum
  unsure (1)..(217): unsure at all n locations
gtgattgatagcctcccattaatggcgctttgtattacgttttatactgacaggcattgtccgttgatggacgaacaacctttntcgagaaatgtagtaaattattttaatcggccttggtggggtttattgcatgtttagctctttttaaaacaaagaaataaccgaaagaatactacgaaacaccatctcgggggggcccggaccaattccccta

SEQ ID NO: 239233 - DNA, 178 bp, Gossypium hirsutum
aacaaacttatatcattaactagtgttttaaaataagatcaatttgtcaaattaaaattacattaatctcattactaaaccatatcataggcaaacctattatttacccataacgacttattccctgaaatagtacccaaatcatgacatgactcatctttaaccacacaaatccctc

SEQ ID NO: 239234 - DNA, 183 bp, Gossypium hirsutum
ccggctgcagaatcggccggcaaaccgatcagacttgcatctatcggctcaaaagaaaaggtctaaatatgggtcgattctcgttggatctctcacacatgaggatcttttgcatcggaaatcgacgcccataaagtacatgcgatgcaacctggtgacacgcgcataaggtcccagttacgt

SEQ ID NO: 239235 - DNA, 259 bp, Gossypium hirsutum
actaaagccttatatatataaactatttaaataaaatacatatacatttttatcaaaggtggggtcccatacccaatcaggaaatcaacattccacattcaatcaatggagttcctggcatagtaaaagccttgataaacttgtttattgaaaataccatgaactggaaatatacccaaagtgcaaaacccaaaaaaaaaaacatgaattaacacatattcgaagggagcgcctgcttgtatatattctatctctattc

SEQ ID NO: 239236 - DNA, 142 bp, Gossypium hirsutum
tttttgcaatttcttattctctttcttcttctttccactacagtgcattcttcaagtaatattatttcaggcgaaaacctttctgtactcataaactgtaaggttcaaggcactattatcaattttctcagtctaccaccta

SEQ ID NO: 239237 - DNA, 334 bp, Gossypium hirsutum
  unsure (1)..(334): unsure at all n locations
gccatccacattnttttctctcttcacattagtacagaaaagtctatatctntatacagttgtggtgctcattgttaatgggaaacgataagggtggtacgatggttatggagcaaagcaataacctccatagccgaccaaaactaggaactctcttcaaatctgaaccttctntgtttcctaccggtgccgaagacgacgaagtccccaatcgcaaaacagcgcataatggaagcccaggtgttcacagtcgacgacgagcgggagggtcgcgatatatgtacctgatcaactctctattaatacatggtataacattatctcaactatatgc

SEQ ID NO: 239238 - DNA, 301 bp, Gossypium hirsutum
acgaaagactatagttccgcccacgcaaggtacagcttccattactgagctagtaaaccaagacatggcaacaacaacaacaagggcggtgccaatccctacacaagaaaccctattttcatctcaagccccattatttatgtttgaaagtacaatgacaccaattgataaggggtctacttaagatgtaatgtaagagggaggtttcatgaacaactaataaacactgaatatataatatattaacagagtcaattaagtcattccctcttaatttttaaagacaaatatattgcaccat

SEQ ID NO: 239239 - DNA, 421 bp, Gossypium hirsutum
  unsure (1)..(421): unsure at all n locations
gtcaccccggttcctatattgttaaggtgaaaaggatgaatagaattgatggtgaacaccacaccaaanatggtgataagttcaaacaaggtcgattgaccccactagcacaaactagataagtctttcgaaacttgtacgagatatgagaggaagcaacctcacaagaacaatgttcattaacaaattgcaaaaagtcctcttacatgaaatgagcaactttataccctaaatcctatgatttggattatatgtacactaactaatttgtaattattaacagcacacaacataattgtatctgaatgctaatgcaaatttgtattatctatttctacaaaagattatatgcgctatctctcttctgcaaagtatgctatctagctttttgtattctaagcctctttctattttcattcta

SEQ ID NO: 239240 - DNA, 283 bp, Gossypium hirsutum
  unsure (1)..(283): unsure at all n locations
ctcatcgacgatccatttctcgacanagagggctcataaaccccacaaatacaaaacctgcaaacccaganaaaaagcttaaaatccgccatggaaatgcttaaccgctaaagcanaagggtttgagggtaatataaaaaaggctttgattgtctatgaagacatttcaatcatggaatgcactggtcaagaaaagaaatgctntagctgaagcgcttccattttatgggagtatctgtaccagtatgttgttcattgcgtatagaactacggattatcaata

SEQ ID NO: 239241 - DNA, 131 bp, Gossypium hirsutum
cgcgcaaaaaggaccccgctgcagaatcgcacgagaacctactgccttttttcttgaaacatcattttaatgatcttatgattccctaacttttgggtaaaaaatggttctattattgacgatggtggtgt

SEQ ID NO: 239242 - DNA, 143 bp, Gossypium hirsutum
ggatccccggctgcagatcgccggtgtatttgaatttcttttcgattttcttagccaaaatttcagatcttgcaagacttaccggcagacatcactgcgggtcttgctcgcacgacgcactgagacaatcagatggaagcatc

SEQ ID NO: 239243 - DNA, 318 bp, Gossypium hirsutum
  unsure (1)..(318): unsure at all n locations
atgtatgtttcattcctcgcacgatgctatcactcagggcggattggcttagangaagctcatggaaacagtcaagcattacaatataactgcgttattggaaatgaagccgttgttttccataccaatgagacatcttctgtcaactctgacaaggtcgaggaagcacttgaaagtgtgagtaggactatacttaccatacacactaatggtgacaaacaaggtgctagtttgcttctgcatanatactgcaccatgacaaatccattgaatggtgcattgcataagttggaatacattcatgttcccgttgatata

SEQ ID NO: 239244 - DNA, 234 bp, Gossypium hirsutum
  unsure (1)..(234): unsure at all n locations
caacagcgctgataaatatgatttactaaaccagaacgcatctagcacgaattccaagtagagcgtgatcaagacaaccgttcccagggctangtgacgatatcttctgtatgttcgacctattttatgattttctttttcgatcagatgcggttctaaagtagatatagatttgacatgttatgctggttggtcatgctggttttgctatggaacatatggaaaatgcggtta

SEQ ID NO: 239245 - DNA, 241 bp, Gossypium hirsutum
  unsure (1)..(241): unsure at all n locations
gggaccccggctgcagaatcggcacagccatattaatctccaacgcctgtattaagctgggccgttgttgccatgcttcactcatcttacactcacgcctgggttcgtcactatggccaactcagtcaatctgtcttgtactnatgtcaccctttggtttttagccacccttactcatgaccgcccggaagttattggtgattcctgtataaccgacctaacgctgaccagaatttatgaa

SEQ ID NO: 239246 - DNA, 258 bp, Gossypium hirsutum
gagaaattgagagagatgacgtgggttttagttatcatgagtgtttactgttcagaatagagagaatctagtgagaatagagggaaatggaaggatgggatcctcaaaatctaattctaccggaggtgggtaagctatgtcgatcccagtcagagtacctggaccaacatttcaagacccagaaggatgtttcctcatcttctgtttcttcttcttcttgtcttttgtctgaatggaccaaacgttgtcctgattaca

SEQ ID NO: 239247 - DNA, 251 bp, Gossypium hirsutum
ggaaacagcagctgtcgggtgagggttcactttggtggaaaaagcaacgccctggcgctgaacggtggccttagatcggctccaacgttcctgacttcatcctatcaatcactcctccacaagtctggcaatagagggtctcattcaactggcgtgaatagaatggggggagggcattgacatgacgaaccgcattaccttcatgctcaacatatgtacaacttggataggatgaaaaatcagaagctgac

SEQ ID NO: 239248 - DNA, 213 bp, Gossypium hirsutum
catgcctaatggtctgcggggggactgttaggacggaaatgcatactacaccatctcccaaaaagctaccattgccatctcattcggtacttatctgacctccaattttggcctcggatacgccattgctataatcctgcatttacatctactactgtccaatattcttcttgattactacatttgatcacaatcttcctaacccgttacacg

SEQ ID NO: 239249 - DNA, 248 bp, Gossypium hirsutum
ataataaagcagggggataatagtatgtattaaccactgtgctcaagattttacatttggccatatcttctgtatcaaccaactggggatagagtgatagtgtatgcaaggcaaaagctgaaatctatatagtctctcatcttgaagccaaagggattataataaaatggaaaaaggccaatgaaaatctcacctcctcttgtgtacctccaaaaaaatgaattagtatggtataagttgggtgataa

SEQ ID NO: 239250 - DNA, 258 bp, Gossypium hirsutum
cttaagcagctacctaaggaggccatctggaatgtttcaatagctgcaaccatttgggcttttccttctaaagttatagctggtaacacccccttgacatcagtgtcacccaaaattccatcaagaaggttttccatcatagagtagagcttcggataaccatttgtgaatatctctttgacaaaacttgatgcagtaaaagcagactttatttgagtagcaaaggccttaacaagagctttccaaactcgatcagtt

SEQ ID NO: 239251 - DNA, 129 bp, Gossypium hirsutum
cactgtcgagcgaagatggaccgccccgggggctgtctgcactccatggcttaacgcctggtgggttccctaaggaaactcgttctgcgatgctcaaactagataagagcatcacccacaagtaaccaa

SEQ ID NO: 239252 - DNA, 274 bp, Gossypium hirsutum
cggggtggggggctctatagatcttgtgtaccccccgctctgcaagtattccgcgcgcggaaatattgagtgaacagggggtgcgaatccaatgtatgtgctctgagtgattcgcgacaacctcaagatcaaacaatcatcaaacgacatgccatgttgacaggatgatgtatttaaggactgatatcacaaatgtgtggtgaatgcagtggctgtgcttaacatccgtcaccgagttagatggactgatctcttaagtcgagagcaagatagc

SEQ ID NO: 239253 - DNA, 256 bp, Gossypium hirsutum
gtggaaatatagagtcggagaggcatggagactgccatacctggtagattatctctctcaccaaacaccgtctttaatcctaaaccaggagagaaacggtcactgtgcagaggaccatgtaccaatcgtggcgttctcatggctatatcgaccacaggaccaagtaaaggaggaggaatcttggagaagccagttatagagagaaccactcctggtcgtgaatctgagttcgatctaaggaagtcgagaaaaatag

SEQ ID NO: 239254 - DNA, 237 bp, Gossypium hirsutum
ggtttgccttgtgctgttggggttgctcaccactggaccaaaaggtgtcagatgtgaaaatattggtaaccctttaatccctgggagcaccgcaatggattcttttctggcttacaaatatttaaaaagaggtgccagacattttacttcttcaatcgactacaaggttttgtcacattggtaccgtcgatcaaatacctcaaggcgtgagaaagtgaatccttatgagagaccaca

SEQ ID NO: 239255 - DNA, 268 bp, Gossypium hirsutum
tctacgagccatttttttttttttagagagggttaagacaggggtattatctgaacatcaaactttaatcaatacagtaactaaagatgtggttcactgaccatttcagcaccacaaaacactgtgttcattcaacaccacatgctactaatgggtttcgccacttaaaacacccacagttccatagaaatgaaaattatgaaaacaagcacaagacacccaattagaaaccaccacggaggcgaatgacaagatgcagagtggattt

SEQ ID NO: 239256 - DNA, 252 bp, Gossypium hirsutum
gcatgcatgcaagttgcatgtattgtgttaccaacaaagaaaaagtgatcaatattcaaatcatatgcatctttggagaagataaacttgtcaaaagatccaccatttcaatctatttgataagcatgtgtatatatgaataaaaccaacacaaattccactaacaaaggaactcaaaaaagtatttttaatcgctggttataaaatcttacatttgtgaagcatgaagcctttcttcggattcctcttgtt

SEQ ID NO: 239257 - DNA, 265 bp, Gossypium hirsutum
gagaaacccctagtagataagatacgaaagggatgggctgaggaatttcgggctaagattgatgatgacctagagagagtagagttttggttaaaaaataccattagggtatttgatgagttatcatgcatgcttgaggagtgcgtgaagtgcacagtgtcactcctacgagactcaacttatcaatggtggaacacccttgtgtcggttggaccaagggaaaggatcgcatgggagttcttccaggaggagttctgaaagaagt

SEQ ID NO: 239258 - DNA, 306 bp, Gossypium hirsutum
  unsure (1)..(306): unsure at all n locations
ccctggcctgcatgtaattcgttcttcgagcgagttntttttttttttttatgttntaattcaatggcggtcgtccacctcatcggatatatatcacccttctcatcacaattcaactttcagaatttcatatgaccaaaagggtctaccaagtgaaatataacactgtcttatgtgaaggtttaaacatgagaaaaacaagacaaagactgccaaatttagaagaattttaatgactaagcatataaaacttgttccacataagaaactcacaaagcagactctgctaagagggcatggatttca

SEQ ID NO: 239259 - DNA, 259 bp, Gossypium hirsutum
agaaaatcgatccgtttcctgtactgttctgaggcttcctttctccactcttcctctcctgaaaacttctaatctggtcctcttctcctatcgtaccgagcttgatccatagcatactcaggaactcccctatccaggtaaatttcttctcctctttttaacgtttctgttgctaagatatgtgcaagattatttgcagacctaggtgtatgttgaaatctgatattatcaaatccatatattttctgttgaatgttat

SEQ ID NO: 239260 - DNA, 137 bp, Gossypium hirsutum
ttttctaggaaagaacaaagcaatgaaagaaatttaagaagccttgtttcgcgttcttgaacttagctttccatatattcatccatggcttttattcttcctctgattgctttctttttacttatcctggtaagttt

SEQ ID NO: 239261 - DNA, 379 bp, Gossypium hirsutum
  unsure (1)..(379): unsure at all n locations
aaaagatggagcaatatggtttatgtttaaaagaggaaagaaaaacaataaagcatcttaaaatctaatttgaatttagcctttcacagagagacgattgatgaggtctggttgcaaaggttcaactcaaactgcatttaggtttagtttctgagctaatgtcaaagcagttgcaacaaaagttttttggcatgttgattaataagacgcatctttttcccttccttttgcttgtctacctcaaatttgttcatgaaacttacttcttttcccccattaatctcaaaacctcatctctaatatcttcccccacccctccattgtctgtttgatgcccataagaaacctgtaacttgttcattntttattttcttactac

SEQ ID NO: 239262 - DNA, 276 bp, Gossypium hirsutum
aaaaaatatacatacttgattacttatgttgaaaggccgggggaagaaccataaaaaaaacattaattttaactttaaaaattaaaagaaaaaaattccagaattcttcttttttttttttaaaaattcttaggtttaaaacctccgctttattaaatattattattcaaaaccgcgatttcctctgtttatttggtaaatgacaattaacgatcaatcggaggaattggcttttattggttccccaccgatcacccagcccaccgagatatacct

SEQ ID NO: 239263 - DNA, 386 bp, Gossypium hirsutum
cactaattctggaggagacaccaccgctaggaagggaaatatccatgggatactgaatactgtgacttgtggaattttgattacacttgcaactattattgctaggtacataacaagctgtgaataccagaaccagcttggttttatctacatgtcctcggccaaatatcagcttatgccatatgaattgcttgctggggaactgatctttagcttggaagcgaattctgtgatattacatattcaacccatagatacatggggattgacctttgcctactatgatactgacaaagtttatgtttatttttatggccataaaaggatcacatgcttcgtttctactggaacatttaccactcacaattttggatacaccatacttg

SEQ ID NO: 239264 - DNA, 333 bp, Gossypium hirsutum
aagtctctactttttcttgtcttcaatcaaatcggtgcgggtacattatatctctatatatctctacctctaaacaagcaactaatattactcggaagccaaccaattacaacaaaagcgaacgctttatctccatactgacagaccatgaacactcactcactgaatctccatagacgctcgatctgaagtctaacttgcttcatttgctaactgactaccaccgtttctatgatttggacaattctaaacctaaactaacatgatcctatcttaaacattcatgaccaagccaactcttgtactgttagagacctttatttgacaatatct

SEQ ID NO: 239265 - DNA, 270 bp, Gossypium hirsutum
ttttattttaagcgatgcgcaccactctggggcgtggatgacacactcacaggggtgttactattaccaatctggatgataagaagataacttttcagttttactatgaaatggatcttgatacgttaattgatgaaagcccttggacgtacaataatcatttactactttttcatccaataaaggaaagaaatgatccgatcagcattaccattggttagggtggactcatttgttcagattcatcatctcccaatggtgtttgtgttt

SEQ ID NO: 239266 - DNA, 182 bp, Gossypium hirsutum
ttcacaaccaaagcttcggtgtcccacatgctctggcctataatattagttattttgatttttttttcctttctggtttctggttgctgagttttcggataagttggcgtctatactacagtgagaaatttgtatataatgattacagaattatagggtctaatatacgagtttcttttatc

SEQ ID NO: 239267 - DNA, 285 bp, Gossypium hirsutum
  unsure (1)..(285): unsure at all n locations
aaaaactacaactattcgatcccctcgactaaangaattcaacacaattttacttttaaaacttcagaatcacacatgctctcgtttattatattaactatcttccttttcctctcatatccaacacattaattctgacttccctcatacccatccatatatactacttttataaatttctatcataacaattacacactcctactgtataatatacaattctctcttatcaaaaaaaataaaataaactctaaactttccaccaccacccaatatcaacctata

SEQ ID NO: 239268 - DNA, 349 bp, Gossypium hirsutum
aacaccatctaattttttttatctttttttcattccttgatcgttttttttcaaacaaatattcccttccatttccacttaattacctaaaaaacaaaatttcttaaaaaccatttaacttcacatcctctatcccctttttaaacatccaaattcttcctgctaacttaacttcttctaacatcgcatctatcctccttcccaaattctccgtaatataacttttcaatcaaaaaacaattctttcaacatctttttaaactaaactttaacctttaataacttacctcattctttattttatcatcccgaactctcttaattccttataaataaaactaatacaccc

SEQ ID NO: 239269 - DNA, 363 bp, Gossypium hirsutum
agttaaaagcagtggatcatatggaagggttacaaattcacaattctgaaagggtaacatgggttgtgtttgaatcctaacaagttttctgtggcctgattatctgtaaaagcactcaggtcttggtgattttttttttttttgcaacaaatacagctttcacaccttttggttcatctacaatacaaagaacatttgttttttcccccacatcaatgggggtttataacaaatgccattctcaagattgcagtttacaagaaaatcattcgcggttgtatttctttcagacgaatcatcaacacaattttctttgtgctcatagtcagaagatacctgctgcatactgatggttctggaaaa

SEQ ID NO: 239270 - DNA, 252 bp, Gossypium hirsutum
tgctaaccgtatttaacgaaccggtccggttccgggtaactgtgcgcactttaacactccctgctcaagataagcgctcccttcctcttcctcgccggttatctgtttttttcttttgtgtatcgtgaatcgttcgatatttgcgaatggctgagctgactcgggccgaggtgtatacgcctcggtcgatgcaagtatggagggcgcttttgaattggcttgcttttttctttcagatcttcgctcaaatca

SEQ ID NO: 239271 - DNA, 218 bp, Gossypium hirsutum
caccaaactccttttttattctacttatacctttcgtggctgttttgaatttttcctaccctaaaataaaacaatgcctttatatacacatcttgcaagcccatatcctacttctaaacacatccttgtagctttactgcctatagcattgaatacaaccctttactccaatgccaattgacataactgcatgtggaagataagaagctacttacacc

SEQ ID NO: 239272 - DNA, 294 bp, Gossypium hirsutum
ctgaaataaaacccaatggcccaaccaatgccatgctttatagaaaatgagattagggtgcttagaacccaaagaaggagattacaagttagagttagacattaattttgggtttccttttgttagtacttgcttttaaagtaaatttccttttgaggtaaaacctggaggatatgggtgggggaaaaaggttgtacaggatctcctctagttagcagctagcaaatgtagcacgaaatatgatgctactatatacagccttttctttttatttatttcttgattgttggcttc

SEQ ID NO: 239273 - DNA, 376 bp, Gossypium hirsutum
acggtttagtcgattctaggactaacatagcacgcgtgagtctatctatacatgccatgttatatatgacgatagtgtgataacttctgacatttgaaaatgtgttttcatatagcgaaagcatcttgatagagctatagctgatgatatcgagagtgtagcgcctactcccgcgcaagggacaatgccggttgattcttaccaacttcgagtaatcaagagagtgaggctaaataagccttttaccaaatgatgaatgactggttgactcaatatatgcagactaatccggctgctgaacaacctctacccctaattaatccatcttcgattcctgttatgcctcaaataagtgatccgttgagattgtgtaagc

SEQ ID NO: 239274 - DNA, 383 bp, Gossypium hirsutum
cagacacggaaaacagatctgagagtcatatggccgcctcttctgtgttaaatcctgttcatgaaaatttgcctgtgaaagaactacaaacaaaaactgtggaagaaactgcttcccatgaggcctgcagtttagcagattcaaagcaagaaaatattgaagcttcagatgctatgacagtttcaaactctagtactgtggaacatgctctagtttcgtctaatgctggtgttggaacttctctggaggttacaacaggacacagtttccatactgatactgaatccgataggtttcatgtcctgaattctgttgatcttactaatgagaggatgcatgcatctgagccaaaagaggcaatgtctgatgtggctgttatgaat

SEQ ID NO: 239275 - DNA, 321 bp, Gossypium hirsutum
caaatttttaatttatatcttatagtcatatggcgtgctgttgtgtgttaaataccctcatcaaaacacaaatgtgaaagaactacaaacattacctgagtatgaaactgtttgctatttttcctgcgcaaaagcagattcaaagcaatgagaatatttgaccttcttgtgctattacagtttaaaactctaatactgtaaaacatgctctataattttctaatgcatttgtttgaacttatctgaatgtttcaacagtacacatttggcatactaatactgaatcctataggtttaatgtactaaaaacaaaaaatctta

SEQ ID NO: 239276 - DNA, 256 bp, Gossypium hirsutum
acaatttccgatttgctgctgcagaaagcggggccgtttgccttatagcccgactcgaaatctacgaaactcaataaccaatcttcaaaacagattctaagaaccgagcttaaatcagacacattgctgacaaatttgatgacagaaaagctatattctacagaacttgaagtcgaacaaatgccacccgatgtggaacacactgtaagatgtaatgatatccttcgatgccaattacagaatgcaacggacaaca

SEQ ID NO: 239277 - DNA, 277 bp, Gossypium hirsutum
ccaaagtctgcgatgaggtttgccagctaggatcatcactccttgagggagttttagttggaattgtgttgcttttaatcttaatatcaggcctttgctgcatgatgggcattgatactccaacaagattcgaggcaccccaagaaaattgatctgtctttttggtacaacctaacatctttatgttgtaataaggctactgtccttatggtatctacaaaatggttctttgaaactgcacaagatcatccatgacgtgaaacaagcaccacaagct

SEQ ID NO: 239278 - DNA, 227 bp, Gossypium hirsutum
attgatatatatatagatatatgtgatcaaagggggttaaagtggaggagatttcaatagaggaaagatcatggtgattttaatgtttttttggggtttggtttttagagtattttcaatgattattagtagtaggggaattgtgcttattggggtttaatttgtataacctatccaatgcaaagcaaaatattattaatgtattttgaggttttagtttttttttt

SEQ ID NO: 239279 - DNA, 248 bp, Gossypium hirsutum
gcgggaacacaacatgcagggtggtgatttaaggggaggacgggctaccaaccatacatagaccacacagaaatgcagactctaaatgaactcatggatgagcgggagaatgaggatggggcattcaacatacagacagagaactttagaagggcgggacttgacatggataaccgagacaaccagacattgctgaaagaacggaaacacgatggttctaggagagcgggttcagcaactggcgccac

SEQ ID NO: 239280 - DNA, 251 bp, Gossypium hirsutum
gattccaatataaaggatccatagagttaaattgaatgttattgaaacaaatggatgtttcgggtaaaagcttacattccactaatgtgtaaagtaatagatgttcctccaaataacaaatatatatacacacaatttcaaaacaaaaagctgattctcagatgttacctacatgctaactagttggtttcctcccaaaaattaaacccacaactcaaacaagcattaggttttgtgtgtgtgtgcgtgtg

SEQ ID NO: 239281 - DNA, 269 bp, Gossypium hirsutum
cgtgcgaggaaaatttgctcaggccttgttgaagatactagaggtgtacttcaattatcatcatgatgcatacagcacaaaaggtgtgtaccttcatgatccaacagccatgcttgcagccattaatccttcacttatcacctacgtggagggtgctgtcagagttcaaacaaatggcatcacacggggactaacactattatacaacaagcagaagaggtttgctgaaattacgaagtggtccgatcaaccatcggtgaaggtggcgg

SEQ ID NO: 239282 - DNA, 282 bp, Gossypium hirsutum
ttctactagcaaattctatacttcaaagtcggcgatcttagggagaaaacgtaacacaaattgctatcaattgaggatcaaaatgagagagatgcttcatgtgtcaagggggacaatgagggaaccaaatcagtttcaagattagggagattgttcctatgagcgcttaatatatccaacctatacgaaccaaagctccttatatctagatgttggaggcggttaaagtttactttaacgaggcttcatgtggtcgctttgttcctcgtgctgtgctcatgg

SEQ ID NO: 239283 - DNA, 272 bp, Gossypium hirsutum
tttactagtctacccccccctcctttgacggaagcttatctatatgtatatattaggatgcgcaattgcataggtaacccaaaaatctccacatgctttccaataacacctaagcttaccttaaagcaaatatggtggtgaagagcatcaaagagaaatccagttcctttttcctatatttctgctcaaaagggttcaaaaaaccagcctctacacaacaaggaaccaagggaaatgctgtgtcatcagagcagaaaccgcccggaggatgg

SEQ ID NO: 239284 - DNA, 268 bp, Gossypium hirsutum
acgagcgagcaccaaaaaacatcgcaggaagcgagacatcctatacgtctaagccaacatgggaggaaactacatttgttgcaaattgtgctatgtatttatctgccaacatggaataaggctctaaactaactacctatgcactaatcaagtttagcttgttaaggttgatgtttagtaccatggagcttggcttatccgtccctgccactactaaaccctatcgatcatttaccatgatcaagcctgcgccaattttccatccttt

SEQ ID NO: 239285 - DNA, 257 bp, Gossypium hirsutum
ttagcgaggcatactggactggggagacactagtttcgaccccgtttcctaacaagtcatttcctaactcccaaccgagaatggtatacttcttgacaacagtgtattgcgtaaaagatttggcattggtgtagctcacaagcgcttaccgctgaactcatcaggggctatagttcgaccagcgagtgcatttaatccaaaactaaccttagcttctgctttttgaaagaatgaattaaggtcatcccatctattca

SEQ ID NO: 239286 - DNA, 274 bp, Gossypium hirsutum
ataaaatccaaacatttcgaaaatgcaaaagcaaaaatggggttatcagtccaaacagtggcaccatctttagccttaatcagtcatcaaacaagcatcaaattcctcatatctcgggaatcaacaatcttcattttcttattccaaaaagatggacccaatatacaagtagttgttttgttctcagattcccctttcgctcttagaatttctccccagacttcttttccgctttgccctcgtttttctcggtctcaccctcctcttccttctt

SEQ ID NO: 239287 - DNA, 262 bp, Gossypium hirsutum
ggagattcttggttgaaagaacatgaacagaacaaggagtattattctgctgtcttctttagagagagctgggctaagctccctgttcattaaagccgagaagggttaattatgttatcaggcggccgggccaatgctcgcgatcttgcaagaaaaggctaacgacttttaatgaacctgctgaagaaactgcaaaaaagcaccctgggtccgttatcccaagaagagatttgagggagaagacatgccaactaatagtgca

SEQ ID NO: 239288 - DNA, 247 bp, Gossypium hirsutum
ctagcgagattttttttttggggacggaacagagaaataacattatccaatcatgggtgctacatacagttgctctagagtgttgctacacaatctatataacatgacagtacgacaaaaacactaaactcatgttgcagcttaaatgcacctaaacacagaactgagccaaaacattgtatactgggctggcttaacagactacacaataatacctgtggaccttgagaaaaatgagaacgagatg

SEQ ID NO: 239289 - DNA, 229 bp, Gossypium hirsutum
gttgcctggaataggcaacagataactgaagcttctacaagggaagtcattcttggtacagagaatggtcaactgtatgaaattgctgtagatgagaaggacaagagggaaaagcatataaagcctttatttgaattagcagagcttccagaagctatcatgggtttgcagatggagacagctatcgtgagcaacggatctagatattatgtgatggctgttactccca

SEQ ID NO: 239290 - DNA, 249 bp, Gossypium hirsutum
ttacgaggtttttctttgttgcagtttaatacttgttcattcataaaaaaatcccatcatgagagaaatcctccacgttcaagccggcagtgtggaaaccaaatcggggcaaattctgggaagttgttagcgacaacatggaattgtcccaaagggaactacgtcggtacttctcggttcagcttgagagggttaatgtttactacaacgaagctgtgtggtcgtacgtacccagagctgttttaatgg

SEQ ID NO: 239291 - DNA, 246 bp, Gossypium hirsutum
ctggattttacgttctgtttggatcaggtctgatgctatcatttattctctcaatctatatcttgcagtcatcaagggacaaattagcaaggttcgtaatggagactgttgcggaaagcagtgcacctggagttggagttgcaaaggtcgagtgattccttcagtttcgagaaatgaacaaaaatgtggtggttaagtgatgtgtattatggcaaggatgttggaaccccacgaattgagatagtt

SEQ ID NO: 239292 - DNA, 271 bp, Gossypium hirsutum
ctgtcgcgagcgaagaaaggagagggtggtggtgctaaaacacgaatgccgccctattgagcacaagagcaccatccgatgctgtgcacaaatctcggcggctcagaagtagatccatcaataaatgcaaacagatcatagtcattagcaataaacctaacctattgcttacattgaaggaatgttccttcatcaagcttcacaacttcatgccgaggaaaggaattcaccacccgatcagtagcaaagaccgagccatttaattcaacag

SEQ ID NO: 239293 - DNA, 269 bp, Gossypium hirsutum
ttcgaggacaaatctcccaaacaaaagcggtctctgccaatgatgtcaagcagggtggaagtccaatttctagaatggaatcaacttcaagctgtgagggaagtgttaccggaattcagatttctagaagggaatcaactcccacttctggtgggctcattactggcgatcaacttcctagagcggaattaacatacactcctgctaaggtcattattggaaaccaaacttctagaagggaatcaactcccacttccggtgggatcgtt

SEQ ID NO: 239294 - DNA, 224 bp, Gossypium hirsutum
tgcaaccgatgggcaaaagcggtgacgaatgtggcgcggcgtttgaagaaacacggatgcgatttgaaatcgttgtcaaaaacaaagtcttatggcgttccgggtcggaaagatgggacgaggtctacagtcccatacgttactcatgttcaaggggttcttgtaaaccaagattggttgctgctttggactgagacagactaaaattgttggaatttggaaag

SEQ ID NO: 239295 - DNA, 274 bp, Gossypium hirsutum
ggaaattgcttgttgatgcttgagctcatggcagttctcagcctgttcatcttgaaatagatattagtaactatgttggagagaatggaaatggaaattactctgctcagtataagaatttagataagttggtgagtaatttggataaagaagttatatccaagttatatggttcggtttcgacttcgggttcatcaagcaatccatctagcttagaaacagggtcaaggcgcaatgtgaacggtgatggtgttagaataaatgaaccgacagg

SEQ ID NO: 239296 - DNA, 268 bp, Gossypium hirsutum
tactagggaaagcacgcgtggaggggggatcttatgagaggtggaacactccaccccgcgcaataaacacacacttctgctcgagaaagactgggacctcaaagaggctatgtgagttcaagaagatgaaaacagtgttgccctacaagaaagaggaagcccttaccacgctctctctcattcgagagacctttggggccgaaaaagccgttgaaatcacaaaaatgcgagaggcaaggggaccaagaaacaagctgaaatctcggaa

SEQ ID NO: 239297 - DNA, 202 bp, Gossypium hirsutum
tctttagcgaaatccctccttgatagtggtttttataaaacgtgtcacccccttcccttcaaaatacactttcaagtctttcacaaccatcattgaatagaaaattgcttaactcagtatcatcatgtaaataaagacatcactcactcacttaaacacagcatcttcttaaaactaattatctatacccttatcaccctta

SEQ ID NO: 239298 - DNA, 153 bp, Gossypium hirsutum
  unsure (1)..(153): unsure at all n locations
gacacacnnggagacggcggggacacgacacaaagcncananaaggaagnnagaanngannacgagacaangggacaangangaanngagnccagagcaaggcaaagacgngaaagacnncnnggangannangnggaacgnaancaggagga

SEQ ID NO: 239299 - DNA, 274 bp, Gossypium hirsutum
aaaaaatggtttttgatcggaacaacgtttcccggcacttgcagtcgaacacgttcctagtgtcaatctccgactgaaaaatatggggaatgcaaacggaagacaggacggagctaacggcggtgtcgacgatctatccggaagatccaatggcggcgaggccgttgttcctggagccgctgcagttggaattcgcgtgccatcgtctgattcaatggtgaatactccgccgcagagccctgggcggtctcgatccccgcttttattcgctcct

SEQ ID NO: 239300 - DNA, 155 bp, Gossypium hirsutum
tttacgtggctcgagattgttcgcgcggagcgcaaatgatgggctgctgttgctgtacgatctgatcaccctcaggggggttatccctgcccaccactcaagatcattattcttgatgaagcctattcgatgacagaagatgctcagaatgcctt

SEQ ID NO: 239301 - DNA, 215 bp, Gossypium hirsutum
aaactacagattcttggggctggttttaaagaaacacagatatcacaccaccattgtcctcctcttcctctgatgttcttagaaaagctcgactgttttcctacgtctgtacggtgttagcttaccttgctttcgggactatgccttatggacaagatctcatgtgcattctaggacaactggaaccaattacaggccgagccatgtactaaacc

SEQ ID NO: 239302 - DNA, 188 bp, Gossypium hirsutum
  unsure (1)..(188): unsure at all n locations
aattctttctttaagcagtagcctntgcgagggttaatattcgctggtgtaaaacataactcaaatagctccggcgccgtctatataggcacacaacatcactttcattcttgaaaaaggtggccaattcaccaatgatatcaagctattgaatgccacacaccgtgctaaccaactaaacaaccagc

SEQ ID NO: 239303 - DNA, 246 bp, Gossypium hirsutum
ggttttccttttcgtttgggcttaaacgtcccagtactcaatttgttattcccatactcgatagaaaaattgtcaagtgaagaatccagactccaaatcaattgttatgtcatgttctcccaaaaaaaaaaaaaatcgaatgcgcaattgaaaattacatgcaaaaccacaaaaagatgagattcaaatctcacatcaatccacatatgatagtaagcatcgggctgcattacccaaagctaaaaa

SEQ ID NO: 239304 - DNA, 159 bp, Gossypium hirsutum
  unsure (1)..(159): unsure at all n locations
gagccccccccctgcacgaaancattactttccgagattaaatctttgtggtggggttcaatcgcgggaggcctcaagctattcttcatatattccacggacggaaacaccaaaaacgacacccacaccgagatcaacaggtacaaaatgggggccccg

SEQ ID NO: 239305 - DNA, 151 bp, Gossypium hirsutum
  unsure (1)..(151): unsure at all n locations
ataatactaantttggacacaaataatttatgactacacaaagtttcctgtcatatcttacatcccatctcaaatatttattgttatttatctactcttgcggattgacccacttccacaagcttcttctaatttaatatcatccaaccta

SEQ ID NO: 239306 - DNA, 250 bp, Gossypium hirsutum
aatagcagaatttaaccataaaacaattacaatactatgtcaaaattcataaaagtttaattatagtcaatttaaaggattaaattccaccattcaacaagcatataacacaacatgagtaaatggaagtatccagcaacacataaatgcataaccataataacaaactaaagaggcattgcaagtgtctttttgttagattcagtcatgcaaaatcgaactaaactaccaccattatacggaaaatgac

SEQ ID NO: 239307 - DNA, 383 bp, Gossypium hirsutum
aagaatcagcaaagcttcttccggatcggatctgaccaaagctccaatccctactgatgttcaaggcatgaagaaatcagatagcgaaaatcgactctctgaggtggatattagtggtttagtatctcaactaaaggacttgcagaagaaaaatgcagaattagaagaaaataaccagatgttatctgtggagcttcaagctaaggaagctgagcatgaaacactgcaaacacggtttaatgatctggaacagaatactgtaccatctctaagaaaggctctgaaagatgttgctatggagaaagatgctgctgttgttgcgcgggaggacctctcagcccaacttcgcatgctcaagaaacgcctgaaagaggcagaagatg

SEQ ID NO: 239308 - DNA, 267 bp, Gossypium hirsutum
atgcaatctactcaggcatgaaaatatcatcttctgtttatatatcaaaatgagtattgaccatcatctatgaccttatacaaaatgagtatcatattcatcatatgagccaacacattatggctaactaacaaaacaataaataaatactcgagtccctatacatgccagaaaacaaaacaatgaaactagctataccaaggtcttgagtgatagtgtaaatcgaagcctttgatgtcactagatccccgatgctagcttggcagc

SEQ ID NO: 239309 - DNA, 198 bp, Gossypium hirsutum
  unsure (1)..(198): unsure at all n locations
tttacgagcaacagctctctccgcaagcattctaatattatnnnatctatctatactaaaactccaatagacacacagggatgaccataaacatactgagcttcctccccactatacgaacccacacatcctggctaatctacaaaaccttaaacaagctctcgggcccatattcacgccagaaaacaaaccaatgaa

SEQ ID NO: 239310 - DNA, 318 bp, Gossypium hirsutum
ctattttttaagccactctagtgccaacggggggggtgcaaaaaattgatctttatgaaatacaaaaaaccacataactcaaatccagagagaaccaacttcacttgggatatatacacatggagggcggattctcttacattccaatggtaataaccgccgtggtgtaaaactaaaacattttttctcataagggcaacgggctccaatgaaaaaaccatgctcgaaaacctataaccatgtatacatatctatgtctatatataaacctatcccatatattactaaaagcatactaccaacacatcatttccaaaa

SEQ ID NO: 239311 - DNA, 383 bp, Gossypium hirsutum
ctcctttttaccattgctgtaagggaagatccattagattatgttcgtaatgctaaggccatcatcgaccgaaagaaacgctcccttgaagctttttgcactttctatattgctgactgggcactcaaccttttcggcatcaaggcggcaagtgcactgtcccacaaagttatatctcgcacaacaatgtgcttctcgaatatggttggacctgtggaggaaattggtttttgtggtcatcccatggctttccttgctccaagttcttatggtcaaccttatgcactaatgataaacttccagagttacatcgacaaaatgaccattgttctgtcagtggatgaaggaaccatacccaaccctcaccagctatgtgatgatat

SEQ ID NO: 239312 - DNA, 278 bp, Gossypium hirsutum
caattttatataataaattatctgttcatgtgattcgtttaaatgttacagaattagaagatgcgcgtgtttcttcacaatcatctaataaaagaaccctgctcatcctcacatatatctcagtatgttcaaaaaaaaaaaactcagtatatatataagccatgtatgtatgtagaagtttcagggtcttgttaagtccacgtcgccttttgggcctctccgtcgtcttttttacatacgacctacctccattttcttcccacaaaccagaaattcct

SEQ ID NO: 239313 - DNA, 165 bp, Gossypium hirsutum
tttttacaaaaaccaaacatttcagaagatttttaaaaaaaatagccctttcaaaccaacccttatcaccatctttatcctcaatcaatcttcaaacaaacatcaaactcctcatatctcctgaatcaacaacattcattttcttattccaaaatgatggaccca

SEQ ID NO: 239314 - DNA, 390 bp, Gossypium hirsutum
gagaactcgaagatgcctaaattcagaagtcctcttgaatgagttattatatctaacgattacaaacctccgaaacaaaagtgggtgcaggcaacggcaccgattgccagggtcataaggtggcatagcaagacatgggtctctgattctcatttgctgcaaaagtcagactctcatgataccatgtgctcatcgccacatcagaatagtaaaatggaattgcgatctggatagagcataatgactttgaggttccccatgcagtgagtcttcgcaactggatgggtctttgattctcatttctcttgggaacacaatatgtgaagggaatccaagatgtctgccacatttccatgaattctcctaatatgctgagccaattatagcctt

SEQ ID NO: 239315 - DNA, 222 bp, Gossypium hirsutum
ttttaccagcccctacctctctaagtagttatatttaaccctttacccccctctccccacacatatacaaacaaacaatcatactcccttaatcaaaatcctatatccctcaccacacacttatcacacaattaacaatctcatctcctatttactcttccaaaattccaacaattacatccattacctcttatacaacctcaactcattatccaacatttt

SEQ ID NO: 239316 - DNA, 260 bp, Gossypium hirsutum
gttgcaccaacaacaaaggtttaccaacatccatatacaaatattccaaatgtctatttgccacataatttcttcaaaagtaacaccataacatcaacaaacccaaaaaaaacaaaaaaacagtaaccatagcatctatattctaaatgggactctagtagttctcaccatcttctttcatcatgagtatgtttgaaaaccaaataattggtgccccatttcatttaatatgttcatcaagcctttattcggataacaaa

SEQ ID NO: 239317 - DNA, 384 bp, Gossypium hirsutum
taacattttgctacatgtcagcttgtgcttttctgagttgcgtctctattgtgtgcatgaaacttgtccctcttcaacctatcaaatccaggcctcagttcctaaagattgcaactttaagtgttgtcttttgtggttctgttgttggaggtaacatttccttaagatacctccctgtctcttttaaccaggctgttggtgctaccacaccctttttcactgccttatttgcttacttcatgacattcaagagagaagcttgggttacttatggtgctcttgttcctgttgttgctggggttgtcattgctagtgggggtgaaccaagttttcactggtttggattcattatgtgcttaagtgcaactgccgcaagggccttca

SEQ ID NO: 239318 - DNA, 327 bp, Gossypium hirsutum
caatttaaatcttaccacactccatcaaaaaacggctggcttctatataccaccatcaccaaccaaacacaaaatccaaacaacgaaactcttcatatcatccaatctacatcgcaatctaacacttacttttatcccattttctaactcaaactcttcaaaccccaacaatatcttacataacctaaaacctcagaatataacaaaaaccatctctcaaaaattccattctctattgccataccattcatgcctttttcaaatataacaaaacgataattttaaaaaaaaaaattattacatataacatatcactataacaaacct

SEQ ID NO: 239319 - DNA, 270 bp, Gossypium hirsutum
ctcttacttgttgaaggagtaaggacctctgctgtctatctctaagccctctgtaattctagctgtcttaagtgctctaatcgctgaagcctaagtaagccctaaaggcctttacagaccagtaacagcctaaacgccactattcctttattaacttcatagtctttttttgcacgagcacgaaagtaactagcttacatgttgatacttccttccccgcctatcactctggattagtggatttagatacctcgtccaatccagattttg

SEQ ID NO: 239320 - DNA, 222 bp, Gossypium hirsutum
tttcacgagtttttttttttttgatgtctttaaatcagccgtcgcctgcaatctcctttcatcatctccgatggagaaatcaccctccttcctaattaaaagatctatctacactttccttcaatactatcactactttactgcatctgctcaaatcctaggttttccatactccctttcggttcttgtttctcaaaaaattgaaccactttctcctttttt

SEQ ID NO: 239321 - DNA, 270 bp, Gossypium hirsutum
gttattgggtctagcgaagaacaatacgccaagacggtcaatgtgagcctggtcatcaggcggcgtatggacacggtggatggaagacttgaggaagttgcctgtcagagcttgcagcgcatcgcagatgttgattgtgatggtctcgtcttgcggcttgacccacttccactgctgctccgaattcaagatctgcaaagcggcgacaggctggcggaatagaagtgtgatacttccgagatcagtgtgacctggtgagtaaagctcgcc

SEQ ID NO: 239322 - DNA, 375 bp, Gossypium hirsutum
catcttttcaaatcgagggaaactcattggataggtgaatatgcatgagcatctgaccgctaaaactatgaatacatgacccagaggaagcctagaaaagcacctttttcgcaaggctggatgcaatcacacttggtcaacagggatcatgaatgatctaaaagcaccataaaggctagcacttctacatggggtcgacactcctattatttcatatgccataacacacatgaaacattttattgcatgcggactctaatgcatagctcgctgactgaccactcgcagacacactaccaacggtaaatccttcccacgtactaacacaagggaccggcacatacgcgcatgctactactgaatatataatgactg

SEQ ID NO: 239323 - DNA, 131 bp, Gossypium hirsutum
  unsure (1)..(131): unsure at all n locations
tgaacaatcanattgtcaggttgttcaaaaggactatctaacaggtgttttatctaaaaccagtggcgaggattcataaccaaaccataacagagagcacgatcatcatggccatggatgctctcaaagtg

SEQ ID NO: 239324 - DNA, 379 bp, Gossypium hirsutum
gatcattatattctatcacttcccaagtttcgtccgaacgtaagttttctggactttctgaccatcaactgtacgatgactccaacataaatgaagttgattcgaaccttgaaaactatgaaaaactctctggggtcactctcaatcattcgaaagaacttttagagaacggttgaattgatagcttatttgggacaaaacacatgtctactgctgatttcacctgtcagggtgcaatggctgctgagggctcatccattgaactggtcaatgcaatccaaccagcatgcaacaatagcccatcagctgattctgtgatgagcaataaaacggattcaattctgtgttttacgacaaagcatgcacattcaagcctctc

SEQ ID NO: 239325 - DNA, 270 bp, Gossypium hirsutum
taacgaatggagatgtcgggtagaagaaaaggattatcgaacttcgaatttgtttaagcagtcttgcagtaataacttactttgccttagccatgaatccaggcttctttgccacaactcatgaccatttgatgctgatattattactggtaagttagcccggcatttgcaggccaagataaaatagtcctgaaacagctaataatgttattcgtattcctctaaccatattttcatctatgtgttttgactagtgcttaagaattaact

SEQ ID NO: 239326 - DNA, 375 bp, Gossypium hirsutum
  unsure (1)..(375): unsure at all n locations
taaaaggtttgtttttgagtaagtacatcatantgggctggtgctgtgcagacatcaagccgtgtggctttttcgtgtgatgagttcttgtggtattgctttgtattccttgaccaagttgttctagcccaaatggttttacctatacttaattctgctatcccactattaccggctgcatcttgtcacggaatttattacagattttttttgcattttttagtcagctttactgctttccagagaccatttgtgaataatagctattaagccatattttatatgcatagatttcaaaaaaaggagaatagcggcattcactatgccaacccatgagcatgaatcatcatctggtttggatgctttggccaatgc

SEQ ID NO: 239327 - DNA, 334 bp, Gossypium hirsutum
ttctctttctattttttttaaccatggctcataactgggggcggtctttcttgcttgtcccacttttactcattactgtctcactagtaaatcgtttgtctcaccaactattcagcctcttgaccttctactctatacacaaacatacctcatcagatctctcacagctggcttcattaatactaaatgcaccaaagtgtttgaaactttcagaccctatatcgcgaaaggtacccgggacatgaaaggtctatgattccctgagacgattctcatttgcccttctaacttctatcagagtcctcaaagtccgcttcatcgttgttcacgaaat

SEQ ID NO: 239328 - DNA, 383 bp, Gossypium hirsutum
cccacttcaccattggaacacttcatccaccgctctgcctttccccaattgcccttacccatatgacaaaagcctaggacaataatttcccttctttcttatcttctttctctctcaaaagccaaataaactaacataatactttatccatttcacgatctttccttttcactcctgtcccctcattattacccctttgcccccacttcttcataatgcagttcaaaacctctctctttattttttaaaaataatatcagattgatttatttactttttaaaaatatagtattatataatttacctagaagacaacaccctcctcagcgtcacatccaaacttattgccacgccatcctcattctatcttctgagttgtatca

SEQ ID NO: 239329 - DNA, 327 bp, Gossypium hirsutum
ctacccccttttcgggaaaaatctcaaaaaaattattttttctttttttagtcgaataaaattaaatctaagggcttcgatcttataattttaccggcccctttattcatagaaaataccaaaaactcgtacatcatccgaggtattcaaccctgaaaacacctatcccaaatcaacatgtaaattcttcaccgttgccaacggataacggttcattccttaatactcctcctcatccccttcgtctctctcaccagactcagcgcccacttctttataatttttttccagcgcagctagaactttacgtgcctcaaaaaacttttc

SEQ ID NO: 239330 - DNA, 389 bp, Gossypium hirsutum
gagtccttttttttttttccttcattttcttagcggatgtcgggcatctaaaaataaactaccacttttgttcacttctttataccaaagttttgcttccttgattttcaacaccgttttggatatgcgcttttcttttagcttcaaattgagttggatttgtagctaaaaaagaaaagaaaatggcatatgatagtaagcaaaaaaggaacgttgagcccgtaaaggttcaaacttctccatcatcagaagaaagatcatacatcaatctcccaaacttttttctttcagtaatgctaaaatatgtgaagcttggctaccattacattatctctaacgctatgtatttgaagttggagcctctcctaagcattgctttagttcatttt

SEQ ID NO: 239331 - DNA, 346 bp, Gossypium hirsutum
gtccgcgttatcgatggactcttttagtgacgccgggagcgctaactcgataattgatcaaggcgatgatccggagacggttaagattaagtcgcgtcaatgggctcaggtggtggcatgttcggtgcggcagttttcacgcggaccaaagtgatttattgtggaggttaacatttcttgagtactttttgtttagaggcgataacaatttttgatatagtaatgagtttttagttctaaactttaattttgtattctaagacatgatttacatttagggtttagaaatactagaaaattttaaagtgtgctggattggattggtgttgaattttaatatttttta

SEQ ID NO: 239332 - DNA, 328 bp, Gossypium hirsutum
tatttctttttcttatagagatagagctttattgtgggtgggaattatcccggcagctgaaaacccaaattttttgctcgataaatcatccttagaaaacctttccagattggcaagcacccttgctttgcttgcccaagctgttttcgaggataaaataaatggtgcttttggcctgggaaatttgaaggataatgtttttgattcctgaaccataataaaaattgggacctcctttcctgtggccaatgttaaatgcctgcctaaacttaagcaaattcgtctgaatcctctgcgttgccctctacacaaaggtcaaaaactattt

SEQ ID NO: 239333 - DNA, 381 bp, Gossypium hirsutum
gctagatattactttttcggaaagtgatctggattcgatggattacattaccatgcctacaaccacacagttggcttcttatatgtcttcatatcacagaagacaagcttttgtgatgtatttgcaagccaaccctgggggcattactatatttggatggacggttgatcgcggacttatcaacacaatatttttccttgaacttacactggtgaccttcgtacttggacaaaccgtagtcttcaattctgcatgataaaatctccgatcatcaaatcagttttttccagagatcacaccttcaaaatgaggttttttttttttcagatttacagaccgattgattgttcttagatcatagcattgttgaaatgactcgac

SEQ ID NO: 239334 - DNA, 371 bp, Gossypium hirsutum
aaaaaccaatcaaaagcaaacttggaattgcttatctattttaatttacatcccttaaatttacacttaaacagcaaacccttttacaaaatgcaatcactcaaatcaatccactaattttaacttaaaaaatgaaaaagaaaaatcaagaaaaaaatgtactgcaaacttagattaccaagagaaatatgaaaatgtaaaaaaatctcaccaactccaattttgatggtatgcaaaacatgtcagctagcaatttacacacagacatgacatgaacatgtcacacaacctctgcaataatgttttaaaatcatgtcctatattattatgttctaaggagaaaacaatctctggaatactttacaattcat

SEQ ID NO: 239335 - DNA, 407 bp, Gossypium hirsutum
tggatccctctgctgcatgaatttagctcgagcgtcttttttcttgcatattgaatccattagagaaggtgaggaacccattatttttgtcccttattctgttcttgtgaattatggcaatggttggaatttgcaaactgtttctgaaatggattttcctggcattggaaaaggcaaacatgttcggggatttccgacacatattcctaatggaaagaacgttgatcttactaattctcgcaaaatggtttcaaaaccaggaataagttttctttacattgcaaaagtttcactagcttttgttttgatatttatattgcctgtagttttcatgttggctcttgacaatcttcctaaactaattttgctctttaactcttccatgtaactatgtcagatttgaaaaa

SEQ ID NO: 239336 - DNA, 366 bp, Gossypium hirsutum
tcgagtttttttttttttttttttcttttacaactgagtcatttacgtaatttatgacttggaatgttacagaaccaaaaaaaaaaaaaacaatatttcactggctgcagccttgagcagacaccgtctgtgggtgaagctggatagacaagcagatggatcatcaaacagaagaattttatattgttttaagaaaatgaaaatcttgagaaaagagaaagggttggtcctcctgatgcttcatttgctgggcttgatggaacgtcggtataggtacggtaggcttgttgacacttctgcatctctttaggactaaattgaagaagcattcctacaacaggtagtagagcttccacttcacctgtt

SEQ ID NO: 239337 - DNA, 279 bp, Gossypium hirsutum
ccataaatgatggtgaagaaatcattctttctccaaaaacaatttatccatacaaacaacattctctcaaacaggggtcccctaatacaaattccactagaaaccatattccaagttaataaaaatcttcttattttatctagtatcaagataatattttctgtttataaaaaaatttctctattcccaaataccacaagaattatcattctttaattcattcattttattccgctaaaaaaaatcacatttttcactattattaacccgattaattaa

SEQ ID NO: 239338 - DNA, 185 bp, Gossypium hirsutum
gttgagatgaagaaacctgagatcaaatccgttgaaatctctggttaattgtgaaaaacgtgtttttgaaatctgtggtttcgtttgttatttttactttttgattgatgtctctgtcccttttgtttggaacaaggtttgattatgtaaatcattaattttaatgtctgagactcttggttttt

SEQ ID NO: 239339 - DNA, 380 bp, Gossypium hirsutum
gaaaagtctcagaattcattgaattcttcagcttcatgtaaaggcaaaaacgaagatgataataataacaagataaagggtgataatcaccatggagctggctttaaaggcaaccgaagaaataccaacagtttaaagcaacaacaattgatgaaaattcccatcaagaaacccaagttagaagagaaaatgaagcgaaaaaggatcataaagaatgcttatttagaagaaaagcttagaagaacaaagttagaagagatatcgaagaatggggtcattacaagacattttttcagaaacaaggtaagaagatataagcttttggatgaggtttcaagttaaaaacattaacacaattatgaagttgggttaaatgagtg

SEQ ID NO: 239340 - DNA, 356 bp, Gossypium hirsutum
atacattcttcttacgagcgctgcacgatctgcacgagggaagaaatcacactgtggtcaaaatttacattcgctcaaacatttggtcgaaacatcactgttgaacgcagccatatacctaaaagacattctggaatggcttgtgatgctattgaagatgatcctcaatggcagttaaaagtacatttatacgatcttcctaccaaaaccaacaataaaatctttcaaaaagaccttaaaagtttatcacatatgtgatctaaatacatctacatgcacaggtgattattatataattctgtcaccacccaaagttcacaggaaactctatggttttatacatgtctatatgacac

SEQ ID NO: 239341 - DNA, 388 bp, Gossypium hirsutum
gtaacatcgatcctggaatccctgtgctcctttactgtggtgctatgtcgactcagtctttaacagaaatgagaaccaaatgcatttctggtggtagaaagcggctgcctcatgggactgacaacctcagagaccatgtgtgccggttatctagaaggatgagagccgtaacaacttatcacaccataggccttcgagacctgttatgctgataccggtacttttgtatttctataatatgttcagtttatgaattaaattcgacatatttataaactgatgatatggtagatagtaatattttatggcttactacaaatagatgatcttaaaaagtaaaaataaagagtatttgtcttcaattaactggtgacatttaaattcatat

SEQ ID NO: 239342 - DNA, 357 bp, Gossypium hirsutum
ctgtatctttagatatgtgtgaggattgcttgtcctggtcgccgtcggagaatggtgatgatgaagtgatggaaaacggcgatgaggatttcaagtgttcttgttgtggtgtcatggtggagaaaaagtggaatcttccttgtttcatgattaaaccttcctgggaggatttggattatccccaggaaggaaatttaatcactgaaggtggagaaaaagttgagggttttattgcagatgagggttatgcttcatatggaatcagatcagattttgcggctggtgatcataaagatgaacagatgattgaagaaaacaagagagttggcatcatttctgatgatgaaggtattgaac

SEQ ID NO: 239343 - DNA, 373 bp, Gossypium hirsutum
gtatcttattttttctctctcccactttcttctatgggttcttgttcctaatgttgctgttgtttgttcaactctcgactgtcagcaaactcatcagtgattcaaaggaaacaagcattctttagtgagggtgttgtggaaattcacgagaattgaatcttttagaaccaaaaggagataagtctatacgctgtaaattataatcagatgctgaatgaaggttcaaatgagactagcaccagagctagttaccactccagtaatttacctgaacctgaccttgagaagcaaggaaacaaccaagtgttgcctcaggatgaaagactgccaggctcagttaggggttcagcctgtgagtccagtcccacattgt

SEQ ID NO: 239344 - DNA, 106 bp, Gossypium hirsutum
acaagtttttaccaactccttataaacaagcatctgttgtgttgattgcactagctgtggggatgattactattgagatggcctataaacctttattagacaaggc

SEQ ID NO: 239345 - DNA, 140 bp, Gossypium hirsutum
catcacattttcttgtcctgtatcatgtcctataaagagcgcatcaggtcggctcagcggtcctacaggccaattgtcattgcctgcgatcagcatcggatcggtgtgaatggacacatattgtctcaccatatagctta

SEQ ID NO: 239346 - DNA, 219 bp, Gossypium hirsutum
ttgtatctcgtgatttaaaattccattgcttacataatttcttttataagaggctagactcaataagctttaatttcatattttattcattctctaattccatttctacaagttttggtgatttttcaaagttagacttctgctgctgtccaaaacagttttagtgcaaaatgatgatttccattttgccccaaatttcacaattcatacaattcagtc

SEQ ID NO: 239347 - DNA, 379 bp, Gossypium hirsutum
aaagaacaccataattgtggtaaaatgtaccttaattacaagcaaaccatatttgaatattagccaactttatatattacacaaaagatcaacaccaaattacaaaatgtcaataataagaaaactgaatttctaacacaaagtattcccatcttgtttgctaacagaaaatgcactggtgaaagaaatgacacttaaacaccaccgggtttgctaacaccaccgggtttgctgctgctcccacctaaacacgaccgggtttgctgctgctcccaccaaaacacaaccaaccaccctgcttcatagatatatatttttaaatccctatcaagtcctatgtaagctgaaactaaatctgcaatttggctcacaatttttt

SEQ ID NO: 239348 - DNA, 347 bp, Gossypium hirsutum
gagagtttgagagagaaagagcaaaacaaaaagaagaagaaaaaaaaaaaagcagaagatattgttgggttattgaagctagctagctccacattttctatggcttcaaagcttcttttgattgctgtctttgttcttgatctcattgcttttggtttagctgtggcagctgagcaaagaagaagcactgccaagattgtccaagacagtgaagttaattataactattgtgtctatgactcagacatatcaacaggctatggtgttggtgcatttttgttccttatggttagccaagcccttgtaatggctgcaagcaaatgcttctgctgtggaaagggtttaaa

SEQ ID NO: 239349 - DNA, 208 bp, Gossypium hirsutum
gaaatcccttctctccccattgaagcaactctgtttccgggtgcatccaatccatatgaagagatcacgtttataccttttgcctgacgatgtgcaatcatgcccttgcgtaaatccgcatgtgatatggcccatgttgttggaatcaaacgcatcatccatgctgcctgcctggcagtgaaacatgtcaaaggctatatatccactc

SEQ ID NO: 239350 - DNA, 348 bp, Gossypium hirsutum
attcaatgagaaagcagccaaatcagcaagcaaccaatggcataaagtaaacaaaagacagaaaaaaaaagaacaggtaactccagcaaaccttgccatatactcttccttttctccatttcttcccaaaaaatagatactaacaattaaagaaaaacccagagagaaagtttttttggaacaatttactgcccactagcgttacctttggcatcccatatgaatctgctgcttagaaaaggaaactgaagttgagcaattaaagtacaaagtataaatacaaattttataataataaaaaaaggtctttgaaactgcagggaagtggtttcctttgagacagaaggc

SEQ ID NO: 239351 - DNA, 254 bp, Gossypium hirsutum
ggtactggctttatggcggagtgtactagaactgcttatgttagttctggaacagaattatatattaagaggaagaaagacagattacctgttggacaagtagtagatgtccctcctagagagtcgtctatcagactaagagttggagatttactaattatttcacgggatagtacatgtggcgaggataattcctatgggcacgcaagtggtgcttatagaataacatgttcatcgggctatctctttgatgc

SEQ ID NO: 239352 - DNA, 380 bp, Gossypium hirsutum
  unsure (1)..(380): unsure at all n locations
gaccgtcgcgtactcagcagcttaagaacccaaaattgaggatgaagctttctgtctcttatgatttggataaccctgatgtgaaggatgatgagaaagatgataatagtaggtctaacaaaagcaagaggaagcaccggtcagattcgggttctagtagtgatagtgaggcttctgttttcgagactgatagcggtggtgcctcatctgttacgggatcaggttcttcttcagcagtgagtagtacggattacagttcgtcatcggagtccgaggaagagaggaagcgtangagaaagaagaataggaagaagaagcagaagaaggtgagacgcagaaggtacagctcatcttctgagtcttccgattctgaatcaaca

SEQ ID NO: 239353 - DNA, 390 bp, Gossypium hirsutum
catgatcttaaccttttaacctacttgaattttcttttgtcctaacaaatttaaaagcattccataagtgtttccccttccttattttttgtgcatcgaggagcacataaagaattaactcctccatgtctatttctcatacatgagagatcaacaaaatacaatcagacaacacatacaacactattcatcatgaatcaagaaacgcaaaggagaggataaaaataaataatcctaccaaacaaagaattaaccatttcatccattttacaaaattaagggtgatcacaaatcacccatctttgctaacatccattccagcattgtagtatagaacatacaatctaataaaaagtagttcaaaatcaaatatacataaaatcaaacaga

SEQ ID NO: 239354 - DNA, 359 bp, Gossypium hirsutum
aaaattcccatggggaagataaactctagcaggaaaagacttcatgtcttgtaaagcaaaagcaaggaagtaaaaagagaacatgggtttaaaagagtaaaagtaataaactaggagacctaagagagttagcaaggtaaggagaacaagaacaagaatcagaggtcttttgggttgggggtataacatgaagtaaagtaagcaaatcacacccttgttagccacatgagtgagtgcccaaatcattgcatgcttagaatgtgagctctcatccactgcaggcactctcttccttaacaccaacccattatcaaccccgttgccatacatgttaggcccttccatctgagttaaaactt

SEQ ID NO: 239355 - DNA, 252 bp, Gossypium hirsutum
gcatgatgcaccacatggagcacaccacatctaaaatgcccttcttgcattacctcaaacatgcgtagagatatgccgcaatgcagatagtggggtctgtctgctctagaaatggctcttggtacgggcgttcccattgcctagctattgtacaacagcaggctgcctggcgacaaaatatgtatgaccatgaccacaggcttgccactcgcactggctggacgatctcgtgacccagcacaccaaggaata

SEQ ID NO: 239356 - DNA, 302 bp, Gossypium hirsutum
cttgcgccgcgcgtttacatttctactctgcgatcagtcataagcggtcaccgtcttcggcttgttctttgggttctacgtttcgtctcatactctcgccggatcaagattctgcccttggttgttgtaccaaataattaaagttgagctaaaccttaaaggttagtggctgcaacaatagtataaaggtgaattacgcacgtcttggatcagttaatgctagacatacatggatccggtggactgggacgaaatttggtagtgctattgacaatgcctgcttggtcatcgtctcatattta

SEQ ID NO: 239357 - DNA, 373 bp, Gossypium hirsutum
aagcgatcaaaaggtactttattatcaacgctttacaaacaaatccccaggagggtaaacccttaaatggaacattatcagtgtatgaagaaaattgtttaatcaaaaggggaaaccccaacaaaagaacgtgggcaaggggaagggtgatgccatgcatttttctattactcaagttaatgccacttatcgttacgacacagctgccatataattcatcttctacatctttcagtcacatcagacacaaggttataaacagataaaacccagtggcagtaatcatgcaaagctacaaactcaaaaaggcttgagaatatgtatgtgtacattcaattcgagaaataactacctgattgtgcctctaccagtg

SEQ ID NO: 239358 - DNA, 390 bp, Gossypium hirsutum
  unsure (1)..(390): unsure at all n locations
aaaaatgtctgttttgattcaaaagcaaagaaatttcttattggtgctgagccctctgaagatgtcacattcagcacttctacctcactggcaacaaatggtgtggggcatgaaaccccttctgagaagtcagttaatattggaaatgtgcagccaatcccgcaacctanaatggttgaggaagaggatgatgatgatgaagtgattgttttccagccagctgtgagcgagaagagaactgaagtggttggtccaaactggcccccctctgaggctttgaagcatgatcgaagtagcgctccaggtgatgtcaaattttatggcagtaccatgtctggtcctcctgctagtcttcatcagcataatacatttgatgttagttctccactg

SEQ ID NO: 239359 - DNA, 388 bp, Gossypium hirsutum
cttgaatgcaaagcctcaaagctttactttgtctcaaagttcaagcaataattaccaagctttaagtcttgcatctagcacaaatgatgaaaattttgagggctctattcgtaatctgaaatttgaggaagcagaggaaacagttgtagcttctctagccaaagcttcagaaaatttagaagtagatctgtcattaactactgctgctgctcccaagaacgattgtatcgagtggaacgaaagtagtacagtaattgatactttaacctctgagctattagaggacaattcagcagcaccacttcctcccaatgaagattgtgtttcatatgaaaatggagatagcttgcctagtgatgccaggattacctcaagtgttgaagcatta

SEQ ID NO: 239360 - DNA, 399 bp, Gossypium hirsutum
taatttcggctctcatttttatgttcatcccttttaatgatataaaccctttgctcacttcatgaccttcaaccaagttttggctttctctcaatcacttcaaaccattttcttctgaaaaatggcttccaagattaaagcatcaagtgctctatttttctccttcaaccttctcttctttactttagtcaactcttataatatcgatgatgattcaaaagattctaaaaaccctgtttttattcgtcctggagctgtgtactcaaacaatcaagaccagttagcctcgtttcgtgtctggggggttgggtgctggcggatgttaatctcgaaaacgcacctacaacaccatgttgcagcttgcttgcaagaatggggaatcttgaagctgaagtttgg

SEQ ID NO: 239361 - DNA, 359 bp, Gossypium hirsutum
gtcattttcccaaactgggaaattcacaagccacccccaggatcgattcagaaaacccaccacaacataagcccataagtacaacaatggcaatacagatctgtgcttattatgagacaggccgggacacctgaacaaaaactttgaaatgctaaaacccaacgcgcgatcattgtcttacacagagaacactaataaccgccttagatccacaaaatcgcacttgtcttatgctgatctggatcgagattgtgaggggaaaagaaattgcaaaacaaaatggggagattgggagcgctgacgaaccatccagatgatgagaagacatggatgaaatcgctaatggcgcgcagaaatgc

SEQ ID NO: 239362 - DNA, 339 bp, Gossypium hirsutum
  unsure (1)..(339): unsure at all n locations
ccataatgtactatgcaagaaagtatctaccaggtctgggccgatggcagagcacgcagggtggcaaagccagaacatttgcaagttttagcctgactcctgccactgttgatcagaaagttttattggaaagcattgaaacacttcttccaaaaaagaagggcaagtccttctgccggttnttacttggacttcttcgtgttgcatcgatattaggtgtcaatcaaacatgccaggattctttggagaggagaattggaatgcagctggaactggctagcctcgatggtcttttgattccttcatactcagattctgataccctatataaatactgat

SEQ ID NO: 239363 - DNA, 352 bp, Gossypium hirsutum
ctgctttggaatcggcggctaccatatcaaattgaaaaaaaaaaaaagtgacaggttcatttaaagtttttttttttggcaatataataattgcttatccctttttgtgttgttgaagtcattgatgagatttagtttagtgtaataatggtttggtgtttatgaatgtgatgaacatttagttagtgttaaaactttttttacttttgaatcatgtggaaatgtttcaaagctgcccggaattaacttttctttggggacattatggtatttttactcaattgagtagagaggcctaattatgaacttcatcatctactttacggaaattgagaaaaaaaaaaaaaaaata

SEQ ID NO: 239364 - DNA, 318 bp, Gossypium hirsutum
  unsure (1)..(318): unsure at all n locations
gacattattattgtagtttcatattcatgacttacaactttaatgtcttttcttgatcatcgngatgatatggaagaaaagacagatctaagaaacgattgcaaaggacgacaggcagtgacagagaaacatgaaatggacaacaaacccaaaagcatttacatggtgaaagaagaaaagacacatttctaaattaaaaattttacaacataaggagaccactgttaattgtctctctgaatatttttttttctgttgcanaaaagatgctgttgctgttttggttggtagcaaggcagattggttcttcaactttta

SEQ ID NO: 239365 - DNA, 403 bp, Gossypium hirsutum
atgacatgaaatatgctataagcaagcttgatgactctgagtttcggaatgcttttagccgggcttacatacgggtgaagaaatatgattcaagatatgattctaggcgcagctactctagaagtcgtagcccgtatagtcgaagccccagtcgtagccgcagttatagtagtaggagcaggagcaggagcaggagcaggagcaagtctcctcgggcccgatacaccagtcagtctccatctgtatctagatcggtttcaccatgttcccattcagtgtcaccagcccgctcctattcaagatctggcaatttgcggcaatctggggattggatgttaggaacttgatgggatgtggtgcttgaatgcctgcaattcttttcttgttgagatctcgctccata

SEQ ID NO: 239366 - DNA, 364 bp, Gossypium hirsutum
gccaacgctgcccaagaatcacaaggccatcattgctgcagctgtgatgggccttgtgattcttgttgccaacgctgcccaagaatcacaaggcattgcagcttaagtggcagctcagcatcaacaatgagaagactggtagggtgctcgattccataaatcgtcttaaagaagtcatcgttggtggccaccgtcgaggttcttttgtgaggggcaccttccctagcgacagctaaaacttgtgatgatgatgataaaaaaaagcatagtaagagagaagtgagatggagattgtttgggtgttaatgtgttggtttgatgtttgattaacttatttggcttaatctctcatgataagctacat

SEQ ID NO: 239367 - DNA, 315 bp, Gossypium hirsutum
gggggcgaatacagaaaccattattaaataccaccacccaagaaataacattcacacaaccacacaaaccagcagcatccacgacatatatacattaatacgcctgtcaaatcgcattggagcaagcagcaaaattataaaagagggcaacagcaagaccaaattatcggactaattctctacaaagggatttatctaagccattcaactttaaatcaaaaagtccatatggaagcggattatcccatctacaactattaatttcagaaggtcaaaaggaaccaacaggattcagaggtacatttctcccttaga

SEQ ID NO: 239368 - DNA, 360 bp, Gossypium hirsutum
ggtatgaagcctaacaaataaatagcagcaacatattattgtaaaactgtcaaaagtactacaaaactctgattgagagaaatgattcaattcttctcatctacaacaccaaattgccctttttttaagttcccttctctgtgatcatcattcggggaaaaaaaaacaaactgaaaatcttccattctgcaaaactgaaagttctgatgcagggttaccccagatttggtctactctctctctcaaccatggtttcaatgaagttagagcttcaaagaccgagtttttaagcagtaaccggttgcttttgcacgaaagcaattcccttttcgatgctggcccttaattcaggcttaagcg

SEQ ID NO: 239369 - DNA, 369 bp, Gossypium hirsutum
  unsure (1)..(369): unsure at all n locations
gagtntttttttttttttttttttttttttttatcaaggagtacgtctgtcattatttgcatcaaaaccacccgttagtctaacaagctgcaatatatgttctgtttccagagtttcttctgttcaagcaaagcatatcactcaaaataaacacttcatatcaacacattttgtaaccaaaaatgaaaaaaaaaaaacacattaatgaataaattaaggccacttgcatcatttgaatcaggttcctccgttgagattttgggcagacatgaggctctttgtcaaccaaattgctgtttctctagatgaggcaacttcatccccaaacggtcgtagaataccagcaagctcatctattttgtcttgctt

SEQ ID NO: 239370 - DNA, 387 bp, Gossypium hirsutum
gcacaccgtcggttgcggagatagttttgttgcagctatggcattcggttttatacacaatattcctttggttacaacattggcatttgcaaatgctgtgggggctgctactgccatgggttgtggtgccggtaggaatgtagcagcactgaagcaagtagtagaactaatggaagcacccaacctcaacgaggatgatggattttggaatgagctactgggtgaacatttggactcccaagaggttacttttctgtcgaaaatgattttaaatggaagcaatggcaggatgaatcgtgttacatttcaaaaggcagtttctgaattgctgcctaagcttaaatcaagtcaactagagggcacactgtcatgttgatggattggagc

SEQ ID NO: 239371 - DNA, 366 bp, Gossypium hirsutum
gagaaagatatcaactttgcacctgcattttattcacaacccacacacaaaaaaaaagccttcccgtccccccagcattttgcatatatcaaatattcaggaaaaaaaatacctacaacactgtcggaccacaggtgaaagggggtgcaggaagtacacatataatgaagtgtgtcctcacaaggtttcagatttaacaaaacagatgttaaaaatgatgatacaacgacacagattaaactagttttgatcgtgtgaggtttttgaagaactctgcaaagaatgtggcggagaaacaacctgttcggacgaatcatctgaactcttggtctccaagttttgatgtttcttgctcgcagggtcggt

SEQ ID NO: 239372 - DNA, 374 bp, Gossypium hirsutum
gcgttgatgaggttgaaaggaaaagtccattttacttcttgatcagggtcccaagatatgatgatgaaaatttaaaagaaaaaatcaggcttgctcaaattagagttgatgaaaaaactcaaagtcgggatgccattccgattgaaatacaaaagatgagggctggttgcaagaaatatggcgatcacattgatgctgccatatcccaagaaaggagccgtccagatttgcataagtccaaacgtcaagaaatagactctattcaatctatgatgaacattgaggatattgatgctcagatacgaaacatggagcacatgatacaacatgaaaccatgcctcttaaggatgaaaaacagtttattcatcaaatc

SEQ ID NO: 239373 - DNA, 373 bp, Gossypium hirsutum
ccttatttttttttttttaccaaaaaagcatcaattcatttaactgggagaacttaatgatccataataataatcactggacgtaaattaaataaacgggaaactagcgaacacccttcacaaaggacccctaaggttaccgcacctgaccactatgtatctgtatctaattagatccatgtatccgacatggacaagacaaaaccaggctcaagacactgcatatatgaacggccactgaattcctgtgcactgctacagaaacagctgcaggaacaactgcaccgaactgggactgagcctggagaacgataccatctatgggtgatcttggctcaggcatagtcagagttctgaaatagggggggctggt

SEQ ID NO: 239374 - DNA, 370 bp, Gossypium hirsutum
tggatgtctactactgtgaaacttgatcaagtttcaggactgcttgttattttttaacaattttcattcatggtaagtgatgaattggtactcaattgcaagtccagggagtagcattgccggcaagaactcaaaattacatataataccttttttgtttttgcttgtccaataatctggcatggcaggctcagcttgttgctaagcgctgggcagcttctgaggggaataggaatttagcattgtcaatgagttgttttccttttgggcgtataattttagaattatgtactgatcttatgttttttaagtgcttggtatttttgggtctcatttgctcatagtagcattttccattgtattttgttct

SEQ ID NO: 239375 - DNA, 388 bp, Gossypium hirsutum
tttaaaagtaaagttggggaaaatggggacatcaacgagcgtatctctttctaactctttgagttctaacagtgcctcttagatagcccttcgaaacctcatgaaaacacacttattcttatgctgcacactgtattaataaataccgcccatcaccctaccattactagactcccccacactacttctactgtttatatatgctacaccgacactaaacatgagatgctacttagtccaatatacttgctcaccaacttatgtttacaagtattagtctgcatcaccttcaacagcataaccatccatgcatacttacaagtacatagctacttcaactgcaccatcatcacaattcaagcatacgtacacgttctaattttcaaca

SEQ ID NO: 239376 - DNA, 391 bp, Gossypium hirsutum
tacaggcaaaagcgcaaggtaacagcagatgaacagattggggagattaaacgcttgaaagaggaaattcaacggttcaacgttgagaatggaatgttgaaagcacaacttggattgctactctttaatgcgcaattccaagcagcagctcaacagagacaggatggttacattacccagtcaaccggcaagcagcttcaccctcaaactgttaccgtccatggaacaaactctgaagctgttgacaagatgaatgagatacaaaatctgcagggaacagttcctgtaaatgtagttgatggtaatgacggtatagcaaaaaatcagacgagttctgaagttgaaacatgcagtaataatgaagcagccattactgacattcttatgaaac

SEQ ID NO: 239377 - DNA, 359 bp, Gossypium hirsutum
gagctgctgtttgcatgcatttgtttttgtgttggtgcactagtgggagcgtgttatgtcgtttgagatgggactgcatatctgactaccatttgtatgcttttgagctataaaagctgttagtattccaggagttatctggtccaatattgaactccttacggagatgatgggacaatagtttttttttttttttggggggggggtccagaggacgcatctaatctttgggttgtgtccacaatctggtatggtccaaagtacagtgtgaatggtagcgggctggcttggggttaacaatacagccaggtttatattatgcattacggggtaatggagacataatttagcttggacag

SEQ ID NO: 239378 - DNA, 388 bp, Gossypium hirsutum
ctctctctctttctctctccctgcatattcttcgcatgatctgatcgcatcttctaagcagtaagcactgctgctttgcggaaggattttctgattgaatttaatttctcttccgcatccgatatataaatctggacgagacttagagaaggggtagaattacggatctggtagcgccatttaaagctcttctggttctggaggacaggccttattagaggaaccttggccaacaataacgctcacacattaattagttattaaagatttggggcaaaccaatgaaaaacgggacgatagaatgcagtgtctgccattcgaagttggtttccccaactacccgaggtgtgtctagggcttaccaccgccataaaagcagggtatcatc

SEQ ID NO: 239379 - DNA, 398 bp, Gossypium hirsutum
cctcttttcttctttttcatttaaagaacaaaaatgaaggctccactttcttcatcaacatcatcatcctctggtattcttagaaggtctcgtctctcaacttacttatacactttattagctttcattgttttcgttgctgtcatccatggagaatactccatcgccaattttggccgagttgacccaataatccccagcccagttttctccaccacaccagtgaagaaaagggagaaggtggtggcgcagctgccgtcatttgcggtggaggaaagtgaagaaggatgtgatatattcagtgggaagtgggtcaaggacgagttgactcggcctcactatgatgaatcggagtgtccatacatccagccacaattaacgtgtagagcacatgggag

SEQ ID NO: 239380 - DNA, 354 bp, Gossypium hirsutum
aaaatcattaaaagtgaattgttataattataattataattactatgttttacaatgagttgtgcgaatttgaaaaaaaatcacgatcgcgatacccgcagtgaccgcaatagcgtccgttatgtccgcgaccgcaatttaaatccctgtttgtgattacatatttctattttcattaacttcaccaggtttttcaaataagtattcgtatatcttgtctcattcttcacatgaagaatccattctataaatagcatatctgtaaaaagataaaatgggtcgagctttgatcgataccccttacttaccagcgccactttccagctcacagaaaggcatccttctcgagggggg

SEQ ID NO: 239381 - DNA, 391 bp, Gossypium hirsutum
tacaacagaggatccacaatattactagacaaagagaggagctattgcagatggaggttgaactccgagcacaggcaattgcaagatcaagggtcctggaaattcagagcagctgtgatgcaaaaataacagcccatgtcaatgctgttgccaagcttgaggagcaactcgatgaaagagaacagaccatacatgaattcgaaaggaaaatggaagagaaagacagagagttgcattccatcaaagttgataaagaagaggtctgggcaaaggaagatcttctcagagagcaaaacaaggaactggctactttcagaagagaacgtgatcattcagaggctgagagagctcaacacataaaacagatacatgatcttcaagagcatgttca

SEQ ID NO: 239382 - DNA, 297 bp, Gossypium hirsutum
gcccgagcttaagtgtttctatagggttttaattcgctcgtcacgtcccctctcttaaaccctctcttttttgcgcgcgctctttgtttttcgagaactgcgcggcgtcttcttttcaattagcttcttggaagctttattttcttaaaaacacgaaaccgctgtagagatggcgccacccattgagactcctaccacgtgctctgggtctcaccacgcttcacatcctcctttgaaggaaaggaggcttttttcgatgagcagcaggtgtgttgctgctcacccacggcgggatct

SEQ ID NO: 239383 - DNA, 368 bp, Gossypium hirsutum
acaattaaactgtgacagttatgcttgtgaaaagttctctggtaatctcatctaggagtccattaagcacatacttctccacatctttgataacatcatctttctcaagaaacccaaacatggcgttattccaacccaagtcccacatacaattcagatctggttccttgttgttgacatcagcctcaagcattttgggttggtagtcttcaaagggagaatcttctctgccgtcctttccatataacttcaacttatcaaagtccttgcacatttgtttgaccaactcatccaaggattttgctttgtttgaagtgatgggtacctttagaaatgggtgaacacttagttcctgccttcttcctttc

SEQ ID NO: 239384 - DNA, 375 bp, Gossypium hirsutum
tgacggtggtgttggtggtggccccattcattcacatgataatggtctttatggaagccccaactctgacatgaaaccccaagatgatgaccatggcattgacaatggggaacagttaaaggacttgtctactgaaagggaaatgaatatgcaattagcaactgaacttggtgataaaaaccctaatctatgctttgataactcagggtcagacactgaggaagaacaagcagcttttgtgaaggaggttgaagccttttacaaggagaagaacctggaattcaagcaccctaagttttacaaggaggatctaaatttacttaagttatggagagctgtcattaaattaggtggctatgaacaggtgacctcatg

SEQ ID NO: 239385 - DNA, 384 bp, Gossypium hirsutum
ctcgtgccgaaagaaatgcatttagtagattgtgtaaaaaaatcggatgaagaaaaaacatatctggaaaaggaaattaataggctggtaaatttgctgaaacaatccgaggaagaagcttctgtatctgaggaagaagctcagttgaaggagaacctaaaggaagttgaatcgaacgtgatttatctgcaagaagcagtaaaggaagtcaagattgagagcatgaaaatgaaggagagtatgttggttaaagaaaccgagttgcagagtgtcattcaagaaaatgaggaacttcgtgctagggaagttgcgtcgcttaagaaagttgaggagttgtctaagttgttagaagaagctatgataaaaaagcaaagcgaggaaaat

SEQ ID NO: 239386 - DNA, 385 bp, Gossypium hirsutum
catgctaatagacctaaatcttctgatggaaaatcttcaagtaaagatcagtcatcaatctctaaagttccatccatctcagaattggagaatagaggggcgactatacttctgaaggaggatcaagtgagtaaagtgtttcaagagtatccatacatgtttgctcatgccggtgatttgacagtaaaagacgttgaagagctgctaaataactatacacaactggtgttcaagtatgtttgccttttgaaaggatcagatggtgcttctgcatcttttcctttgtctaagtcacaagctcaagcccagcaacatgttgaaacatttaaggaatctcaagatcatagggcaatagcacaaaatattgggctgcaaaacgacactg

SEQ ID NO: 239387 - DNA, 372 bp, Gossypium hirsutum
tggactccataaagttttatcaacttttcatttcagaaggtctgtccattctgacgatagcgttttcccttgaaaaatctttacttgctatctgtttttgaatcatttcctctcaaatgcatcttcaatctgcgcttcttgaccatctcctttcctaatcgaatgcatggcggttcaactattctctcgtcagagatgagacaatgtgaagggtcatctttgaagccaaaagttcacccatcaactctgaaccaccaaacctgatgctgatttggagtttcttttgtcgaacattgcatgaaattgaatcgtcatccttggtagtcctcctgatgcttgtggtttttgttcatatttaaggttgagccatgt

SEQ ID NO: 239388 - DNA, 256 bp, Gossypium hirsutum
gtatttttgctttttttattttcttttaacatatgtggagtttcatggttgtgtatgttgaatttttttcattttttttctctggtagagctaaaaaaaaaaaaagccccccccgaattttgtttttattttgtgggaacctgctacggtccggtttgttgtaaaaaaaaaagggtgttttttgctttaaaattgggaggtgaagtttcaaattatttggggggacacaaaatgattcaactgttttccctttttt

SEQ ID NO: 239389 - DNA, 369 bp, Gossypium hirsutum
  unsure (1)..(369): unsure at all n locations
cctcggactctgctgctcttaatgtaaaaaatgcatcgttgagaattaaagcaatgggagctggtgtccttcaagataatggtagtcacaatctttcggttaattctggtccctcttcttctgcagcattttgcttagataatgataatcatacttcaccagtaaacattccacctgaattaccacctaccaaaaacccacattcacccgcattatcaaccgctgatacggagctttccctctcattgcccaccaaaagcaattcaactatagtgcctactgtttctcattccgaggctagtagttcaagctatcctggggtgctgtatgggcattgggcccctcangataagaaggatgagatgattc

SEQ ID NO: 239390 - DNA, 200 bp, Gossypium hirsutum
taagctctatcaccactcatcgaatacacggatctccaacacaccaaatgactcatagtatcgaaaatatcccaaaaacgtagcatatagctagcactctccaacacaccaaacatgtcccgtggaatagagcttagcttacattcccttatctccaaaaattatctcgggccttaacgccccaaaaatacaacaaatgg

SEQ ID NO: 239391 - DNA, 312 bp, Gossypium hirsutum
gaagcatcaaaataattctttatgattgcattgcatatccttccactatcaagattacaaacattaattgctgcatggagtttctccggttccaaaaaagttcaaatgtgaacccggatcacgcgtcaaacgcatccaaagaagtgttccaaggatggacaactgaagacattaggcgcagtcctttcaggcctggtaggagaaacgtgaagttgatatttgatgaacctagctaactgagaaactatttcaggatttgtgtcaatatgccaatctggttctagttgccgaacaaaagatgtacgcccattt

SEQ ID NO: 239392 - DNA, 242 bp, Gossypium hirsutum
gaagaattgaaatggcatataggagaaggcatggaataagcagatcggcgacgttcaaggaagagattgaccactcatcacctgcagcagcagctgtagctggtgacaacgacttcaaaaccaaaacattaacttcctcctattctttctctaaaacgtctaagggcttcaatacctttgaagattcaagaaatgattccaaagggttctggggtgttcttgctcgaaaagccaaagcaatt

SEQ ID NO: 239393 - DNA, 300 bp, Gossypium hirsutum
ggctgagaattcgacgagctcgtgccgttttttttttttttttgaacaaaagatgtttattgctataggccataacaccaaattatcacaaatagcaatgcatgcccacaataatgaaagcttataatatacgaggccattttatcacgaataataaagtgaaaaaccaatattaaatgaaaaacactacttcttttatgccactaaataaataagagcatgtgtaatggaaccaagaagggagtacatgtggcctgaatataaaattgattctcatgaatgctaaccctattcatggac

SEQ ID NO: 239394 - DNA, 164 bp, Gossypium hirsutum
gttagcggccgaaaaatgtaatataacgtcactgcgactctgatcctgatcatccttgcaaagattacaacgtccccgacgccgaccacttcacaggcgacttggatttcgctgtccaggattttaaattatcccctcctaccagtgctatcattaccgacgac

SEQ ID NO: 239395 - DNA, 156 bp, Gossypium hirsutum
ctccgaaaggtttctgattttttaacagcaaatattatttgaggcttggtgaattattatttgggtcaacatttacatgtgactgccaataatggtgtaatacaagattatgtacatggaaaagcttctgttgtagcatcttaatttttctctcta

SEQ ID NO: 239396 - DNA, 346 bp, Gossypium hirsutum
gagacattttaagcactgagaagcctagattggttaattctacttattaatgtccctggctgattttagcaaatccccacctaaacaattatattggttgcctgcgattcgttctattccaacgacatatgttatgtaatagacacccaaaataaagcctgttattcatctgtattgaacgctaccatagaaaatgtaagattattaactccagccacaccaaaacccttggtcatcgtaacaccattgcacacttctgatattaaagcaacatttcgttgttcaagatcaaatggactgaatctttcaataccgagtggtgataatgattttgaaggcccttcac

SEQ ID NO: 239397 - DNA, 111 bp, Gossypium hirsutum
ctcctttgtgttctcgaagagccaagtttatggcacatactctcgcttccgccaatcttggtcttactcagcccgccaacatcgaaagccccaagatcgcatttgctgcaa

SEQ ID NO: 239398 - DNA, 371 bp, Gossypium hirsutum
aactagtctttagttttttttttttttttttaaggccagaaatatctaaggcaaagtttagaacaaacaaactgaattaatcaatttatcacaacgattattttttttcgtgcatgttttaaagttcaaaatctattgatttacactcaaatttactcacaaacacttagaaacaatgaattttttaatgcacttaacccgctcacacattctatttaacccgtttcttattttcaaagcaagttctatttatttactccactaaacatattaatctttaacctaatagtgcccacaaacttccttcaatcttaataataatccccttcttcccctctacctagtaatcgccctttgcattttattttctc

SEQ ID NO: 239399 - DNA, 391 bp, Gossypium hirsutum
gtgttatctgggcttacgttaactctgccaccaaagattttgttccttttctcatcactctccgccggcttcccttcactttcctcccttcaactccttgtatctttttctttcgctatatcttcatttcattgttctaaagaaactatatttactgcggcggccagaacaagcggaagcaacattaattgtttctttgatatggcaactaagcttcttctaacattcgctatttgcagattgattgttactgtgggattgaccttggaccccacggagcttctcctcctgggagttgacgctcaactcagtgtcgaccccaccgacgttaaagccgcttctctcgatttcggcttgctcacaggagctcagccgccgcttgctgtcatgc

SEQ ID NO: 239400 - DNA, 384 bp, Gossypium hirsutum
gaaagctttttcggaattgtgtaatcagaaatgtatacagtctatgcagaaatgggtgctttttgctgctgctcatgtggtgatgactgtgaagaatatgcttatcctagcaattcaatatataggcactgcatctgcctaaggttcttcttctatcagctattcactgggtatggtgctctgtttcacagattggatgggcgacctgcatcccatatccaaggagcttctttgtcatcaaccacaactgttactgcaatatcagataattcagccattgaaactcatgttacaatgtccagaccggtcccttactatgctgagcaaaggtactctcgtttgcagcgtgatggcttggtctctatgcgtgataagtttgtgact

SEQ ID NO: 239401 - DNA, 250 bp, Gossypium hirsutum
  unsure (1)..(250): unsure at all n locations
caacgaaattataaacaaaaacangggaaagcaccccaaaagggggaccaaangggcaaagacaccggcggggaaagcagccaagagagcccaccccgaagcggaagggaacaggggggaggacacggacgccagggaaacagacanggaagaaaaggcacccaaagaaagggacaaaaaccacaacaagggcggacaggggaggcccaaaacgaacaaagagaagaaaaancggaccagacnaaaagcg

SEQ ID NO: 239402 - DNA, 198 bp, Gossypium hirsutum
gttttcatttctctgggctagcacaaaagttctgatttgctcaaaatccatcctcttggtcgaagcccggcctttcatgacgaaagcacctccctgtttgagtcacgggcgatttgtacggttgtatgttaaaagtctgtatagatggggaacatgggattgtttgggttcaaccattcggcgaaagcttctatttat

SEQ ID NO: 239403 - DNA, 197 bp, Gossypium hirsutum
  unsure (1)..(197): unsure at all n locations
cagcannncgnccggcagacaancggacaaagggcnaggaggggaacagcaagcagcaacngcggccgcnnanccaaaaaangcccccgnncncagcnagacacggaggaaggggcganaggaccaaaagggaggcanaagnngcngcgaacaagaaaancncacaaagggnnancgagggganaaacccagaagac

SEQ ID NO: 239404 - DNA, 235 bp, Gossypium hirsutum
gaagatcttttttcttttttcttaagaaaacagttaacatcgtgggataatatctatcagacaaaatggctttcaaatccaatccttgaaaccaatatcattaaaacaatatcaaaagaaaacaaagacttaaaatccattaaagctttcaacaaggcttcttgccttctttacctacatagatcttttacttctcagaagaatcaggtcccctttttttgtcaaaactaacctc

SEQ ID NO: 239405 - DNA, 119 bp, Gossypium hirsutum
aaaagcagaagatattgttgggttattgaagctagctgctccacattttgttggcttaaagcttcttttgatgctgctttgtcttgattcattgctttgggttaactgtggggctgagc

SEQ ID NO: 239406 - DNA, 352 bp, Gossypium hirsutum
agtaaatcccacgtatattaaatgagacgcaacatttatatctaaattactgacgcttggcgggcccagcctcataataaaattgctaaaggaagacaaagctatttaacaaaattaagatcttaccatagtttgtatgagctggggtcttctctataactgatggtctcaacttttttttcacattgatttgcattgaatttaaaagtaatcctagtggcaatagagcttgattgatgaatcagcaccacagtgaataaccagggctgccttggatggaactacagccattactcctttccatataactagatccctctcagaatttcaacggtacaatagcggattctgg

SEQ ID NO: 239407 - DNA, 276 bp, Gossypium hirsutum
  unsure (1)..(276): unsure at all n locations
gntnnnntttttttttttttttttttttcataaaaaacaggttattgtatttagattgtatttctatttgcagaaccgacgagaaaacgagtctaatacaacccacatcaccttggagccaaagaacagtaatatcttagctaaatcataaaattcccagaaaatgtcaataaatcgttaaaaattaccacatccatactctacctaatgaggcaaatccagaacccataattgcccacttaccaaaatcatattattgcaaataagggtcattca

SEQ ID NO: 239408 - DNA, 296 bp, Gossypium hirsutum
atttgacccataacttacgcgaaatcttgaagcacaactgtgggaaacagttaatcagattggggatttgcagaagcagatggaaaatgcaaaggcttctgatttggagtctgtacgaattgttactttggaactggatggagctaaagaatcactacaaaaagttgctgaagaagagaactcgttgagaagtatggtggagtctctgcagttggaactcgagaatgtgaagaaagagcattcaaaactgaaggagaagaacgtagaaacggagtccattgcttggaatctgcacg

SEQ ID NO: 239409 - DNA, 352 bp, Gossypium hirsutum
ggctattgctttaatcattaaagagaacatgctgggacagtcttgctaatgaatggtgggttgaaactttaactaatgaaactggtaaacattttaacgtacaagacgctgtttcaacatcttatggtcattcttcccaaagtgacagataaaattcggatggctatccaacctgacagatcgatgggcaataatctgcctctatattttaactatggctgggagaggatcaagtaactgcataatcccactgccaagactctggctgttagtataatgagtccatggatggttatgaagaagcctctgagaggcactctgatgatggaggcttgagcaggactgcacatga

SEQ ID NO: 239410 - DNA, 385 bp, Gossypium hirsutum
cggaaagcggaggagaaagcagcagtgatcagagctatggtggatatcagatcaggggtagtagatgggttacaaaggactaaaccttaaatgaaaaattgtggttacatgaacacaagacaatgctggctggtgtgattgctttggcagatatgctgctgaacattatctctgcatgaggcggctgaagatttgtttcaagtttcttgctgtcaatattctcatcaatggggtagttgtttattcagggcatggccattgcataaaatgaatcaagtattgctttttttgtttgggagagatgtccacgtggcaagtttttttccggcctaaggtattccggcggaatcaaagcttgactaatgtctataaatagcattttgta

SEQ ID NO: 239411 - DNA, 208 bp, Gossypium hirsutum
cttacaaaatcacaaacaccttggcggagggggatattaaaacgggggaaagagattaattcccaacgatttcaccttattgatcgaattcacgccacttgtacactctaacaatctttttcattgaactgtctattaaattatctccatgaacaacacaatggcactctgccacagtaaataagacaggattccatttaattatgat

SEQ ID NO: 239412 - DNA, 271 bp, Gossypium hirsutum
ccaggccgcggttaaaaccacctgtacattctccaagaagctcaagcgagggaactcacaacacctagcattgcatcaaactataacagagggattcacaactcaaactccgagcagtaatgaaaaatttcaacgagcctgattctgaaacaaaatctatgctctagaaattgaaaacataccgatatcatatcacagtgtatcaagaacaaattgctcaaacatctacacagtctgcgtattcaacataagaaatgtgatcacagcttac

SEQ ID NO: 239413 - DNA, 275 bp, Gossypium hirsutum
gtagaaggtggcgaaccggaagaggaagacgacgatgacgacgacgaggatgaggatgatgaaggcgaagatgacgacgacgacgacgacgacgacgacgaaggagaggaggatgacgatgtgcaggttcttcactcatccggtcctcctgtcctgatagctgatgacgacgagggcgaggatgttaaagacgatgatgacgacgatgaaggcgaaggcgacggcgacggcgatgacgatgacgacgacgacgacgatgatgacagtgatgacga

SEQ ID NO: 239414 - DNA, 303 bp, Gossypium hirsutum
caaatgccccgtctccttttcctaaaaatcttgtggcaaccgggcagccaatccagctaatcctcctcaatggaaaaattttgaagggccaactgcctttaaagttccttttcattcctttctttaacctcatcaagccttaaaaatatttcccagccaccagcccggccgcagcaaaaccaccccgggattttttttaccagttattcttacttaacaccaagtccacaggcttcttataacaccccattcccctcttcttcgatggtgggtggcttttccaccaccttcattttcaaaaat

SEQ ID NO: 239415 - DNA, 373 bp, Gossypium hirsutum
gcacgggtttttttttttttttttttttttttttttaccaaaaaaattagcattatacgtattaataaaaaattttagtacatcaagctctttttcttttatttatttatttttcagcccccttcattaatattcaagtttttgtaagactccatgggcttgctaattagcagtaggcacaatggcagccttattgaacctacggttaatgaatgaagcaagtatataacatgagcaaatgaatgaataataaaagctatacctgagcctggccatcatgttattcaactatcactattggcttcaaatacatatgatcaaataatgtaatagccatgggaaatcattttttatctaaaaattcccccccccc

SEQ ID NO: 239416 - DNA, 366 bp, Gossypium hirsutum
aaatgtcacatattacaaatatttcaacaccattataaaacgtcgagtcgccattgtagtctgcaacaatctttcctaaagcattctaacccaaattaaactttgcacagagtagttctgcatcatcgatatacatatatatactatgcaatgcacctaaaacccgaaaacaaaaaaagaacttgcaaaagttcacaaacgttcctaaatgcagcaacaaaaccggcataccacacatttgctatccaccgataatatatttattttacagaccagctcagtgcaaccaactcaactcttcttatttcttgcatctgctttccaatctcttcggccgagcttaggtttcctagtttcgtagttctg

SEQ ID NO: 239417 - DNA, 235 bp, Gossypium hirsutum
actttatcttttatacattggcgatcactccacaggtatgttttctattaatggtcagaaaccaactttccacactgcagcacactacttccttctaaaccaaaaccatatcatcactccctattttaattcacacttaaccctctcattttattttaatcaacaccacaactaaccattccatttctcttactgtaacttttctcgaacctatcccatgcacgttttccatcaa

SEQ ID NO: 239418 - DNA, 356 bp, Gossypium hirsutum
ctccggaaggggctgattggttaagagcaaatagaggttcactctcggttaatttggatatgggggaacatttagatgtgactgccaatgatggtgtagtacaagataatggagatggaattcctcctgttgtggctggtcaaattggagctccaggcattgcttcaagcagcaccgctcgttcaacatcctttaagctttcagggcttttgggtgggaggagtttcatggcttgcactttgaggaggttggcaagtagtaacggcagttcccggagttaacttggatggacgacatgaagttgcaatgaaaatagtgggaaaaaacactctgggtcttgaactggttacattata

SEQ ID NO: 239419 - DNA, 375 bp, Gossypium hirsutum
aaacaagagtccacatcacatgttacgatcaaatgatggaatagtggaggacaaagaaatgagtccttcaactcagacagtgcatatagatgcccccgcaaaatgtaaaacattgaatatgcacaacactccatgaaggccagagctaaaacaagcacatcatgattatcaccagcactatgattagaccaccacaaacgccaaaattgaatgctgtgcatatattgtgtcgagctaaaatcgcaatcagaggttgcagatgtgaccctaaataattgtttaccttcttactacactttctggaggctactactatttaaaacgttgtatatgcagagcggacacgcagcattgatgtgtaaccacttatctaca

SEQ ID NO: 239420 - DNA, 165 bp, Gossypium hirsutum
tagctaatacattttttcattattcctttcacattacttgttttgttgctattactagtatggtgtactcctaactcatctcttcttcaactcaaaaccttccattatattccccaccactgttttatacttttaatttatccacgacactaattttggcaaacc

SEQ ID NO: 239421 - DNA, 306 bp, Gossypium hirsutum
aaacggagccaaaacaaaccgttgggggtgttttttatttatttaatttccactacaagggggaaagtgtttcaggccccccccttaactccaaaattttaaccgccggttaaaacaaaccttctaaccccacaaaatccccggtttttttactatggaaactgtttttggtttctgagtcaaccccgattccaaattcaaaccgttcgtaaatcggaatttgaaactttttccccattatttccccaaattcaacgccacctgacccttcacctttatccacataaaaggcggtcttaaattttt

SEQ ID NO: 239422 - DNA, 290 bp, Gossypium hirsutum
gcaattaaattttgactttatatttatcaattatgaattatttagtaatggagtgaatatactaaatgtatcattgtaagtacccaaatttgcccgagcctaatttgcccaattctgacaaaaacaaaattaaacaaaaaccaaactaaaattaaaatgtccatttaaaacccaaagcccaatttcaaacccaacagacttacccaacttgcccaaaacttttaaaaaacctacgggcccgataggcccactacctaaactagtttcagcaaagttgaaaccctaaccct

SEQ ID NO: 239423 - DNA, 299 bp, Gossypium hirsutum
  unsure (1)..(299): unsure at all n locations
atcctccagttgtnatttttcaaatcaatgaagacccccactctcttatcaaagaacttaatccttatttatctataacttaaacatacactaatacccttattaacaaaaaaattaaactctttgatatgggatctctattcttttaacctacagcctatataaatgtttaccccacatcctctatatctaaccaatatcttttctatcactttataaaaacaataatataatactgatctttccaatcttcactctattactttgttaaacaaacaattgaagtattaactcaaact

SEQ ID NO: 239424 - DNA, 257 bp, Gossypium hirsutum
cttggttatttaaaaagaaaggtttcctttacttgggtggggcaatgagcttaccagggctctccaccatctgtatgctccaatccataatcgctattacttgtggaactccaatgatgctatacactacagaagtcacaatttcttggccacggtcatgaaatatcaagcaaactgcatggttcaacgcctcatgaacaactcttgatccaaacctcaaaatcctttgctaggtagctttggtatcactattgatc

SEQ ID NO: 239425 - DNA, 357 bp, Gossypium hirsutum
ttttctttagccaaaaataactcacattgtaaagagcattctatccgtgaacacgttctccctaaacttctatatctcctaatccctattcaacttttaaactaaaattcaaaatccagaacatttttccccatacagccaacttattcactataaataaaacattttgattacaaccaaaacttatcactcatcatcatccaaatattaaaaactaaacaccttatatctcacctaatcacagtaaaaaaaattttatataaaacctctactatcaatacaatcactctcaagaacgtaatttcaaacgctatcatcattctattttcctcaaacattctacaaaaaaataaattt

SEQ ID NO: 239426 - DNA, 400 bp, Gossypium hirsutum
cttctgagtaggtcgaggagtaggcctgatgaccgacggcctataaagagagaagcagttcctcagatgaacattgatgcccctaggcggttgcttcagtttgctgtgcgagatgcagttggaacttcaagggcacctatttcagcaaaggagccatcttccaagcgccttcgatctgttgtgtcaacatcttctggagagttgccagctcgtcctaagagaattcagtctgttgcaagagtgccaaatccaatggcgacagtgatcaaggctgtggcagaagctgctgaagatgtgacaaaggtaaaaaatgcgggaagtgtgtttgacaggcttgtcctggaatggatgttttggagacccgtgacctacatccagaattcagagagtctcttactga

SEQ ID NO: 239427 - DNA, 374 bp, Gossypium hirsutum
gagagagtgagagagaactagtctcgagttttttgttggtttttttaacaccaacaaaaacattagagaaatctttcatatatgcaaatcaaaaccctctttttatctacataattgtgaactagtaaggccaaaaccttctttttcaattgaatccaacaagccatgagagaaaagggtacctgtttttttcttgtctcctaagctttgtcacacttcaaagatatgcatcaacacatatgccataacttttccattctttgttcatcgtaatattgaacagtttggaaaaaaaaatccaacatcatgtaaggaaattcatttcttgctcttcttgactttcccatttcgtaaaaaggatcctaaaccgaaca

SEQ ID NO: 239428 - DNA, 302 bp, Gossypium hirsutum
ccccccactctcatatatatattttgaaaagaaaaaagaaactaataatccagtcaacatttcagttcaacatcaattcttataaaatacctaaaaaacaaaatattaaagttctaaccatatactactgtaaaataccttactcatagtataggacattttattgttcatccaaagacactcacaaccttaaaatctgtatatttgaataatctatattttagaattcatgatctttttttatttcatacattacttacttcaatctaattgttattcaatcttctatttcctttcccaca

SEQ ID NO: 239429 - DNA, 268 bp, Gossypium hirsutum
ttcaacttgaggcttctacaacgagagccttcttgcaggaattatcttcaacaaaatcgagccttcaacaaaatataacatctttaaagcaaaaggtctatttcataaacaaaatggttccagaacttgaaacaaaaaaaaaagttgctgctgcttcgaaaaatttcaaggaagctgcacgattagctgctgaaacaaaatctttaagcactgaaaaagaaagtgtacagatcgaaatggacaaagctgtgttggatcttgggaaact

SEQ ID NO: 239430 - DNA, 306 bp, Gossypium hirsutum
ttcatgaattctgtacgtggttatgatcttaagaaatttgggaagctccaacgaactcatttaatttacttgctcgaaaaaacaaaatcttcacgaactgcagataaaaaaaaaactgttagttcaccaatcgattctttcacccgagtgtaacctttaactatgcttaaactgcaagcggtgacacataaaatattctccgcagttgtcaaaaaggctatttatatctgtcgtccttaatgtaagtgggagatccagcatccctctcttaaggctctaaacatggggaattgattgaaactcgtg

SEQ ID NO: 239431 - DNA, 392 bp, Gossypium hirsutum
ctcttggtctctctctcagcccaccccttggtcggccatggtcgccgccgtggctggtggctggcgttgcgcaaaaagtcatttttagccctcgtttcgcagctgccttgaaagcccagccctctcgacccaaaaaaatgaaagagaggactcccgaccccctctaagatccaatggcgacaatagagaaaagccctcctacggcgcggtcacggggcatcttccacacgtggatggtcggtgataggcgaaccttgagcggcggcggcatgcggcacaagtggtcatgcggcgttgaaagcttatggggctaggggtttttttgttgtgtttaagtgttgagctaattgggctacggttagttttgggttattgagttttaatttgtattt

SEQ ID NO: 239432 - DNA, 273 bp, Gossypium hirsutum
gtatattcattctaatgggtcttcaacactgtggggtcacatttattgggaattggcttccatcaggaattagtggtggggagaagatgtgacttatctattgctctcgtgatccacacgatgcccaaaatgttattcctggatgaacctactagcggccttgacagtgcctctgctttctttgtggatcaaacttatccggaacatatttcgcgatgggaggacctttgtctattctattcaccagcccagttattgaagtatttagcactt

SEQ ID NO: 239433 - DNA, 365 bp, Gossypium hirsutum
ccaaagtattcaaactatgattcacaatagaaatgggaattttagccgaaagttctacactcaaaaaattcctattaactatcccttcgtccattataaccagaccaattccaccaaatgatccagttctgatgcaattttgttttctgctatacaacttcattacacactgttaacaattccatgtatttacatgcaaaagaccagaatagagattttttcaaaagcaatatccccctgttgccaaaaattcaacaaaagagtcccttgttattccaccatcgcaatggagagctcaagccattaaatgctttctaattttcaacataaattataatatgcaagattggaggaaattttcccca

SEQ ID NO: 239434 - DNA, 275 bp, Gossypium hirsutum
  unsure (1)..(275): unsure at all n locations
ccgggacacaggaaaagagggcgcaaaacnnggaccaaacggcgganacaggaggggaggcgcggcaaaacagcacncnaacaaacgcncngacagaagaagagccaaanaccaaagggggcacaccaggcgcacacacaagggcgcggaggaaaagggcacagcncggggaacacaggaagaagacncngcaggaaagancggcgcnacaacggcaaaggaacacaaggcagccgccggggacgcgcgaaagaccaacancaccacagnggggc

SEQ ID NO: 239435 - DNA, 130 bp, Gossypium hirsutum
gtcctgttaataagtctttgctttaatttttacactaggtttgcttgttaataatgttgctatggcatatgctctagtgtatgaccattctaacactaccgaaacggaacctcaagatgtgaaaccgtat

SEQ ID NO: 239436 - DNA, 391 bp, Gossypium hirsutum
agccagtaactcaattaatagacaaaataattcggttaggcatgggagcaaacacatggcacaccctcacaaagttcaacaatgcagaatttaaaagagaaaaaaaaacccacgaatccagtcccaattcagaacttatatcacaaaatcaattcaaaacagaagaaatagaaatgaaaatgaaaatcaaacctatcatttaacttctctaacaattccctcattagactctggtgaggtgtcaagtatgactgaatcaggagtaacaccttcttgatgctgttgttgagcgctcattactttctccatgtctgtcagtctagtccttattacatttgtaaccaaaaaggctacggtgccgatggttcagacccagatgatctttaaaggg

SEQ ID NO: 239437 - DNA, 353 bp, Gossypium hirsutum
  unsure (1)..(353): unsure at all n locations
ggcacanggagaccccagacccagncaagaggaaaagcacgggggggagagccaagagaaaagacaaaaggggcangcccaaccaagcgaacncgacaagggcaacaccccgaccgagacggaaaagcgagaaganacgaagcccgagcacagaaaaangacggccaagggacagcgagaaagaccggggccccagggacaggacgaagggcacaacccncgaagcacgaaaacgagagagagaaaggcaacgaagaaagacgagacagaacggaggaaaagggacccagggacaaagggccagaacaaccaagcgagaagaagaaaacacccggggccacgcaagaccgaaa

SEQ ID NO: 239438 - DNA, 399 bp, Gossypium hirsutum
cgatagtgtaattttacggttcaagttgaagaaaaaaggaaaaagagtaaattcgcggttcaccgagttacggtaagtggggttggaaaaagaggcattgaaggcattagcgtttcacaggtgtccaccctgtagaagttggttacccagtcagagatattcttgtcttcatttccactgttcctttgcccctctctgtatacccatttacataaaccaaattccctagtcgcttgagccatacttcaaacccaacccaacccaaccaaataccaaaaaaccagagatctaatctaccataacaaaaacaattaacctttgtctggttcccatagagacaaattaagaatgagggaaccaacgatggttgttggcgcagacagcaatgctgcttgtgct

SEQ ID NO: 239439 - DNA, 258 bp, Gossypium hirsutum
  unsure (1)..(258): unsure at all n locations
ccccgggccgcgaggaaacggaacgagaaaacgaancacacaccagcccncnaacaaaanccacngggcgcggaagaagacaagacggggaagcaaaccnggggaaaaaaccaaaagaaacagcnagggggggggaggcaaaaccagaaacaaagcccnccccaggcaacagcacagagaggggagcagccaccaaagagacagaaggccgnagcccaacacaancaaccangcanaccgaggaagcaagggaaaaca

SEQ ID NO: 239440 - DNA, 332 bp, Gossypium hirsutum
acgtagtgagtgaaaattgactttcacaaaatgtgtttattaaacatacaaactttaaaaaaacaaaacaaaagggggtcattagatacatatacagataaactcttgctctagcaagtccttgatgagtgcaagggccatacctttaacacgagtccttatcctatgaattttttcttctcatatggtgaagaatgagaggtgatccttcaaataaatccaatagataattttccagatcctctggggtatacttaatgtattttccaaaatttcttccactctctaactgactcccaaatcttcccatgaaggatcgataagcaggaatt

SEQ ID NO: 239441 - DNA, 380 bp, Gossypium hirsutum
gtggagagacttgaaaacagcagacaaaaacttctaatggagattgataaccaatcttcggagatagaaaggcttttagaggaaaattctaatctctcatcttcttatcaagaggcaacgaacacagccaaacagtgggagaatcaggctaaagactgtcttaagcaaaatgaatagcttcgtagaattctagataacttgagaacagagcatgctactttgctatccaaaaacggctctggggctatccaaactggttcacagggaaatacagctgacattctctccctctatggacaacttgtgcacgatcacaacatagcccattcactatcagctgaacaaatgcatctttcagcgcgtctacaacaagcgacgct

SEQ ID NO: 239442 - DNA, 388 bp, Gossypium hirsutum
ggataccccggacttaatttttttaaatcatattatatatattctatacatatcttctaacttcgtcgggatatttgatatgtatatatatatacattttcaatcaactaattaatgccacctttctcaaatcttaatatactattgtgaattaaatataaatctttttattcatgtccccgagccataaaaagtgataacatctttgtatccacccgtaccatttccggatgaattttaatttaaccatcacctcctcctccacaattgtaatccaaacaattccacccgatgtttaaacacttctttacacacttttttacttctttttctccgctttttctgccaacaatttctgccttcattaaaaaccacaccattctaactc

SEQ ID NO: 239443 - DNA, 300 bp, Gossypium hirsutum
  unsure (1)..(300): unsure at all n locations
ctctagtctttctttngttgttacacatgaagagtgggtagtgtatatattgcgaaggggatttataaatatacccatggaagtactggccccaaattaatatttaaagtttttatggcaaaagtaaaccttattaatgtaaaacttaaccatggaaaaattagaacatgcatacctttatatttatatgtatattaactaccggaaggatttatacatattaacttgaataaaactggtaacctaataaaagtgttatgaagcccgggttaaagtaatcttaagggggtgaaaaagccc

SEQ ID NO: 239444 - DNA, 248 bp, Gossypium hirsutum
tcccaacaggtgagaagacttaactaatttggtatataaaacaagctatgtacaggcgctattttaggattgtttcttggctaaaactaacaataacattaacgctgtgaaaataagcaacatactacgaatcacatatcccctgttattactaagagaatgaacatattaactgctctattgaacggaggcctaaaaacacagcataccaaaacccatatgcagccaaatggggcaaaagaaaaccg

SEQ ID NO: 239445 - DNA, 383 bp, Gossypium hirsutum
ggagagtctagcttacacaaaaacaccactaccaatgggcgccggtcaaagtgactggtatttataatcacataaagaaaggcttagtttggtggcaattccctgctttccacacttgtattctaatcctatatactactaaaagcttaaggattctgatattcacgatcaccactatataatatgttagcttttaaaccaaagccttcttccctcaggtcaactttctccggcactgccctccggtcacctccacggctatatggggttccggtgctgctcttctttttccggactacgaagtcaaggcccctggttcgtgccgtcatcagtgaatacaaggctgtggaataactaaaaccttttcacttgatcaaaaacac

SEQ ID NO: 239446 - DNA, 187 bp, Gossypium hirsutum
cgcgcctgttccgaattctgattccctaatactgcgtggcgcattgaaaggcaaggggttcctctactcaacaagccctcaagaacatagttacctgaggcaagcatcgcctcatggtctatttaaatgcttccaaacatgatcaggaatttacaatcaacaagaacttggaaggtctttcaataaa

SEQ ID NO: 239447 - DNA, 151 bp, Gossypium hirsutum
actgggcccgctgcagaattccacgagcctgtactttaatcacaccgatttggcgtattgattcgatttgccccaaatggccttgcacactacgcttattaactgtgcttaaccaaccagattagggcctttctataattaccctgtaata

SEQ ID NO: 239448 - DNA, 251 bp, Gossypium hirsutum
gcaagcttgtttactttcgaatgacttattccaaaacaatggatgagatttgttttaaggatggggtacaaaatgatcatcttaatgttaagtaatccaaacctcccaaggttcaatgcaagaccaataatgagaagccctctagtcccacaaatgcttatatcatatttaatgaacaaaagtccagatggaataactgcatacgtgatgttgacagcatcaaatacatgatctgaggttacatattcaca

SEQ ID NO: 239449 - DNA, 378 bp, Gossypium hirsutum
ctcgtgccgctggatcaggaagttcgatcctatattctttcttttgtttactgtcattctttcactccaagaaatgtatcgagggaagttagcatcgtcggagctttttacaatacttggaggattcatcagctccctcttgtttcttgtgttactaacattcattgggaatttccaggaagcaagtggagtgaagaccggctggggtgctgtcatattagcagaagctgtagcactgattgctgctagcactgtccaccgagtgtgtatcacaacatgtttcttgttctcggccgggttactttatgaggtcaacaagatttcagcagtgactatttctaaaattgaatcgaaagcaaagaggcactgagctaataa

SEQ ID NO: 239450 - DNA, 146 bp, Gossypium hirsutum
gatccccccggcctccagaattccgccccaggattaattgaggataccccggcctttattcttaaaataccttcctttaaaaccccaaggtggcaaatattttcctaaaccgggggggaccattctttgcacattaacaggggggc

SEQ ID NO: 239451 - DNA, 389 bp, Gossypium hirsutum
catcactgtgtttgccctgttgttgttgttaggtacccgatgataaagatggcgggagtggtgagcctgtggttaccattaaggaggctgaggtagaggaggaagcttccaaagatgcttagcaagtccttggtaattgcagcagctttattgcatcagtagcagcatggtagaaggcttccagttgtgaagagaactcaagtaaagtggattgtagggttctcattcccctggggtatatcctctttgtataaactcggttgttgaggttcttggtttcatttttatggcactgtgaggagatattgttgtactatactatgatataaatataaagataaatccagtgtcaacatttgaattttagcattttacgagcttttatgttt

SEQ ID NO: 239452 - DNA, 137 bp, Gossypium hirsutum
  unsure (1)..(137): unsure at all n locations
cgcctgagctcaactccgcttatttcacaatgcctgaggaantggnacaaaggtgcccttcttgctgaaaaaatttctcccgatctggcatgggatgtgggtggtatccctcaaatgattggcaagggcggggattt

SEQ ID NO: 239453 - DNA, 180 bp, Gossypium hirsutum
ccgtctaaactcgaaatacatctttagatctggtagaacaataataagggggggaaaagaacgaaagaaagaaagcaaaacgatgcgcttgttttgaagatcgaatttccctcatttccatccgctaaaaaaagtgtcagtttctctgatcgttcgagaaaaggagcaagaaatggaaaa

SEQ ID NO: 239454 - DNA, 160 bp, Gossypium hirsutum
gctatcaaactatggcaatggcggatcccgcacttcaccatcaaatccaacccatcaaagaaatagccctagactacaccccggaggcccgcacccactggcctggcttcaactccatcacactcacccttgatcctccgggaggcccccgggggccttc

SEQ ID NO: 239455 - DNA, 281 bp, Gossypium hirsutum
attaaacagctttcacgaaccccaattactgaataatatctcgttagaacacgtatttatgtcggtgtatattgctgaacgtgcacgtgtatacaacataaaaatgatcaatgaatgaacaaaattttcttcatgactgccaaaaccaatcatagttttcatacccatcctttgccaatgggggatttcaagcaccgacttacagtgagttgcaaaaatttatctttgcttacctaaaggagatcttcatgtgtgaaaatggtcgatcagatgttggatta

SEQ ID NO: 239456 - DNA, 373 bp, Gossypium hirsutum
  unsure (1)..(373): unsure at all n locations
ggaaaaagnagnggaaaaggatatcactgtcnnnnnnttgctgatttcggcattgttttgggttcaaagaccattgtttcagttcgtaaagagacttcatctcggtggtcaaaggtgttttcagtgcattactcacgtaaaccatttgctgttgtttttcgggtagctgtgatgttaatcttgtttatagttttgattagcacaccaaaggccttgtaacttgatgctacttatcgcgttttgtatagttaacagtagcacatcaccctttttttgcccccatttcgaggatcgtatctagttagggctgcagctatgtttttgagtgctgacgtttatgtatatgatatgagtacatctatttagttgttgt

SEQ ID NO: 239457 - DNA, 219 bp, Gossypium hirsutum
ccttgtttttgtatgcctaattgtgttgtcattgaaagaaaggtatgccactgctgaagctgagagtcataccatccatgtcgcctctcttttaccctcttctgtttgcacccctcctgctactgcaaaaggtttggacaaaaagtcatctttacaagtcattcacaagcatggcccatgctcacaaccccatgaagagaaagcaaatattcccacaca

SEQ ID NO: 239458 - DNA, 329 bp, Gossypium hirsutum
tttcatttgttcactggctctggcaattgcgcatataattgtggcttatagaacaagttgcagagaaagaagaaaactccttgtctacaaaattgacattgaagcaatttcagcttgcaagaatgggtttccaaggtatccaaagatcgtgaagtaaataatagaaaagtggtgacaaatctcccccctcttttgcctctcccttgttaggtttcagattcctgtaaacaagttggttgtatagaaataggtgatgatgattgtgcaaatggaagactatgagtttgaggataaatcatagctcatacatctaacattctttttattct

SEQ ID NO: 239459 - DNA, 259 bp, Gossypium hirsutum
aggaaggagtacataaaatatattatattacaaatgagggttaaaatcatgatttggaaaacaatatatgctatgttttatttatttacacatgtattagtgtattaccaatacagtgacacatcatagaactataaagtacaaatcgtagaacttccataagaaaaatatagagagtagaacatctattttaagtaagaataccttaactttaaaattttaaagaagaaatatagaatgggaattttgtcgttatttt

SEQ ID NO: 239460 - DNA, 343 bp, Gossypium hirsutum
ctaagcatcctttttaagtgcattacagttcaaagaaaataacccaaagtcactacaattggaagcaacatctgtaatcgttatcgcatcatcttttttttatcatcatcctcgtcaaccatctaaggcctagcaaaaaaacaaactggaaaaagaaaacagcccccaactttacaaaatcaacccacaaaaacagaagaagatagactattgaagtgaatcatggtcatggtttttggccgagtttgtttgaaaaccattgaagtaaataacaataaattattcaaaccctaaaacaacccacatgatgatggtgatgatgatgatgatgaaaatacttttc

SEQ ID NO: 239461 - DNA, 334 bp, Gossypium hirsutum
ccaccattattttctaaacacccctacaagtacaagtccggagccttaccatcaccacccaagcacccttacaagtacaagtttccaccctcaccacctccagtttacaagaataagtctccaccacctgaacctgcatcatcacccatgctcccatacaagtacaagtctccacccccaccaccttcagttaacaagaatatgttgtaaaaactttcaccttcataaacacccaagcactcttataagtacaagtaccaaccacctcctcctgcatcttcaccaaagcatccttacatatacaggtttacaccaccaccaccatccccaccta

SEQ ID NO: 239462 - DNA, 369 bp, Gossypium hirsutum
ccacactctaataacctcgactccgagcttggtttgctgttgtctttcacggcgggtgttcgccgtgggtggaccactatcatgatcgccggtcctaaatgatgtgacgagctggactgatgcaaccaatttgcaaatatgtaccttccaacgccttggtgtccactgcctatactaaggccatgtgtgatataaaagaagcagtagcgaacggatggggattccactcctgctattggaagagatcaaggatacatctcaaacatgcccatgaaggccatactggggcatatgaatccgacatcgagatcgataacaaaatgaatcctctgaagctcttggacgatgcaaatcgatgggaatatgatc

SEQ ID NO: 239463 - DNA, 150 bp, Gossypium hirsutum
gcgaaagattgtctcttgttattgtggcgaagcttggcgtaccaacgtaaagctgcacggattttactacatgtgttccctctgatgaatgccgatatgcagagaacgactttgattttataacagaggtgaacgtccctgagagcatat

SEQ ID NO: 239464 - DNA, 367 bp, Gossypium hirsutum
gtgggtgccgcttcaaaattcactggcagtggaggagctgtagttgcattctgccccgagggaccaccgcaagtgaaacgacttgaagatgaatgtagaaaagctggatttagtattcaagcaatacaagtagttccttcatgtctaaatgatgtggatcttaagacattgtctaagtagaacattttagggattgtttttgtttggattgattgaggtttttatagaattaatgaaaatgatgagtagctgtcctgtctctattaatgtctaccctactgaatttgctctgcacattcctggcaaccagaagtaaacaggaagacaagggatccactgtctaattccgtgtgtcccctttacaata

SEQ ID NO: 239465 - DNA, 374 bp, Gossypium hirsutum
tactttcgccctttttcttgtctctgtttttctttttttttattcagctccaaatcagagaaggaaacttatttattttgaattttttaaggaaaggaaaaagaaccaggccagtaatggagaaaaagcaaggttttctctcagctctcaaagaagatatagttcgcgggctttcaccttcccgctcgcggtccaacagccctgcaagacccctttcactcatgtccactacgttacgtggaaacaaagacaaccaccatggcggtgctcacgtggtgaaaccggaaccgttgatggcgagatccgggactgtaaggccagtcggtgaagcgttatctcctctcatggaaggtccggagccggaccgagggaaa

SEQ ID NO: 239466 - DNA, 350 bp, Gossypium hirsutum
cccctgttagcagagattcacgaatgggagctgctccagcagcaattgttgagtcgacaacaattagggtcatggaaataagggggggaattgaaagactcacaatttacagatctatccttgctctttgaaatttctatcctaaaaatggtggggctttagagtgatgaagccccccaccaatcaaacgacaaagagtaacaactaagaccactcagcaagggagcaccggacggaggagcagaaaacagaattcacagaaatagtaaagccctcttgagagaattacagctagaccttttcaagctaaacacccagcaagagcctaaacacatcactcaatgaaatga

SEQ ID NO: 239467 - DNA, 375 bp, Gossypium hirsutum
tttatatctccgctgctgattttggcttcgcaaactatttacttaaaggatattacgaggggaagagagctgctgagacagagttactcacgaaatttccgtatggaggagtgattttgaggcctggcttcattcatggaactcgcactgttggaagcatgaagttgcctctaggcattattggttcaccactggaaatggttcttcaacatgcaaaaccattaaaccagctaccactagttggacccttgttcactcctcccgttaatgttacggcggttgccaaggttgcagtgagagcagcaactgatccagtttttcccccaggcatcgtagatgtctatggaatacaacgatttagccagcaaatgtcaa

SEQ ID NO: 239468 - DNA, 307 bp, Gossypium hirsutum
gggacttatacgaatacttaagaaaggttaaatgttgtatggatggaaaacgaataaaatggaaccttgacccactatcaaagatgataggaacctcggtataacttgaacgccacacttttgggattaaagtgataagttcggatagaaagacggttgactccacaagggttacttgataagtcagacgagtctttggagaacaatgagagttgaaaacaaactcacaaagtgatcataaatcatataagattcaaaagtgtattgtctaaccccaaaatgattacaaaacaactctttattatat

SEQ ID NO: 239469 - DNA, 266 bp, Gossypium hirsutum
  unsure (1)..(266): unsure at all n locations
tttattcaataatggtggtcccgacgtgggatgatgacacattaggagtggtgaattgagaaaggaaaacacgtgggggaacatgcagatgctcccaagtcccaacgccaacagatgaaaggcagagccaggtaggaaaaatgaacactttagctcttttgttgaccccaacaaatcgacggtaatgaagatgatgattcaagtgggaagattctcgtgtcagaagatcatcntcccgggacccactgatgggaactatccatgtc

SEQ ID NO: 239470 - DNA, 257 bp, Gossypium hirsutum
tgcttatctccaatctatctctctgttgtggtttgttttgtttgctgcagtttctgcatcaaacatcttccgctgtctggcataactgaatcctcgccgggaaaaatgatatcccggcggcatcctgcttcggaggaccctgcttactctagacaatcctacagccatggcagcctacacagcctagtactgatacatacggccagactaatctagcccatcctaatccatatccccaacccacacagtctgtgtat

SEQ ID NO: 239471 - DNA, 328 bp, Gossypium hirsutum
aaagtaatgggaaaccctaatttcaacatccaatctgaaactgctgaattgaagaaaattgatgagaaagttcttcaagaatctggcaatgatttaccaaaaacatgcaccccacgtcggcttaatctccccaacgctttcaatttccctgaaagaagtccaacagattcagtggtgtcgcctgttacaagaggtcttcttgcaagagacaggaaagctggcggttctctcttgccacctagtattaatcaagccaagattcatgaattgcgagttgaagaaataggtcttttttcagagttgaagaagtgatctgtggtatggattg

SEQ ID NO: 239472 - DNA, 318 bp, Gossypium hirsutum
ggatgaagaatgcagtgagttggaaggtactggtaaccttctattgggtctggctcgatcgacacattcaaaatcagccttatctgattctgagagggtgtccagacagtctgaggcccttcaggccttggaacgggcttggaaaattacaagtatgaaagaccctaacattctttactacctctgcctggaaaatgctgagcagagaaagttggaagctgcgctatattatgcaaaatatttgctaaaactagaaggtggttctaacattaaagggtggttgttgttggctcgcatattgtcagctcaaaaacgttt

SEQ ID NO: 239473 - DNA, 327 bp, Gossypium hirsutum
tggttttttttttttttttttttttttttttttttttttttttttttatttaactaatttgcttcaatcctggaaaaacttccaagttctaaaaaccttttactggcaatatacccgggaaaggggcccagaaaaacattaccaaatccctaaaaagagacccctaattattgggggcaaaaaccccatttcaagtataaaagatgaacacgaaactatttcaaggtcctttaccaaaaggaaatatctgcttaaatgtatacagaaagctcaatagtacaatcttctccccattcaataatttagtgcttacaagaatacaatata

SEQ ID NO: 239474 - DNA, 329 bp, Gossypium hirsutum
cctgtttccatggagatctagggtttccagtggttccgcaactcaaaatcgtagctcttcattcgcatttttcaattgcttattaaaagaagagaaaatggaggcaggtgttgttggagatattgcgtgtttggatccggagctattgcagctccaggagatgtctccgttagctctcaaatccaaatcctgaattcacgcaaacgcttttcgaacagtggctttcgcttcccgatacttacaagctggtgacgcaattggttagtgatgcaaaggcacgcaatcccttgaatgttcctggaaatgcttcctctggaagtacagcagca

SEQ ID NO: 239475 - DNA, 285 bp, Gossypium hirsutum
gattaaagatttttctttgatgaaaacacccaagttctacattggcgcatgatgaaagtcacatttcaatgctaaaaagtctcaaaaccttagagctatgcaattattcccttctcaaaccaaacttgagtgaaagctcatgaccaactcaaatacagaaaagacttcaatcgaacaccgattcaaccaaatcacatcatgtttcgactaatgttaaatcgagtgatgctcgcccctaagaaacactatgagaaaagctaacggatggtcaacatgaacattatc

SEQ ID NO: 239476 - DNA, 326 bp, Gossypium hirsutum
gttggcctattgctgcccgatttttgctattctgttctgctttctcttctttgtcgtattgtttgttgtcgcaggtataacgtggcatgaagcggcgcatgttggggagggtcgtggtgcgagattcgcggcggcgagcgaggacgagcggtgccagcttgctgcggcgctaagcagaagctagggtttctgctagtctgtttttttgtgggctaggtttaggattattgggttgaaaaggtctgggccaattgggccttattacaaatatattttatttgattttagtttaattataaactcgattgcgataattattcctaaat

SEQ ID NO: 239477 - DNA, 252 bp, Gossypium hirsutum
caccggggcgcgtctagaactgggatccccgctgagaatcgccgtgagtggtcctcacaccaggtgctagttccctgtaaacctacagtcgctcctacatacgcaaaagggaagaggacatattgctggtgagactatgcttggcagaccacactaatcagtgcctagggtgacggatgtcaccctgttgagtacattacaggtctatcaaccccatctaacaagtgcacacagtgctatgcggcgttatac

SEQ ID NO: 239478 - DNA, 306 bp, Gossypium hirsutum
  unsure (1)..(306): unsure at all n locations
cncccctcttttcaaaanccacgnncaacgcaggggggaanngaaatnggtgtgatatttcttctcttttcttattactcgatcctaatcaagtctttccatttttgccctagactcgcttctcctaccccaattgttaacttcgattaggtcaatccatgattttcacttttcaataatttcgtatttcttcgcttttctttttctttataatcaagattttctgtgctccttcattgagcttagaaggatttggcgtctcgttacaagggggttgttgggtctgttttcggcaatgagaactct

SEQ ID NO: 239479 - DNA, 327 bp, Gossypium hirsutum
tgggacctcggcctgctgtgtctgaaactaacgctggaactggtctgaacaaatcttctagcataaatggtgcacttcatctaaacacatgaaaacagaatcagcagccccaattggtcttgaggaagcctctgcaacctaataataagaagcattctgatgatgatgaatcttattctgttacttctatcactttggtgtcttcccagactgccaagccgaagtcaactgttgcatcagcgcctacatttcgatgttctgaacgcgcagagaaaaggaaggagttctattcaaagctggaggagaaacaccaagctctggaagctg

SEQ ID NO: 239480 - DNA, 326 bp, Gossypium hirsutum
acaggttcataactgaatactgattcatgtgttctataaattccatattacagagtgaaagtatttacagaagaatcaactaattgaaatccccatccaaatttacagaaataacagcaaaagcttgtttcttttttaaatgcagctttttggcaggtagatagttgatagttgatacatgtcataattacattcttcacaaggttaatttatctgatctatttacctgatgcagaatcaccagaaatcaactccctttcaagttcatcgaactcccaatcacttatctcctccgaagtgtagtcttggttaaccttcccaaactc

SEQ ID NO: 239481 - DNA, 330 bp, Gossypium hirsutum
attccttgtgcctttaagagccgtggattgtggaagctatacttagtacgtcaaccttgtcttcttgcccttatttgacctgagtgcaagccaaataacaggtggaatgcaggaggcatttaagagctaataggctctctggatttttgttgatcaactggttaagtgaaagaatcaaacatggaattccttccaaacttggtcaattggcctttctcaaggttcttcatcttttccataattctcttagtcaaaccacaacttgctttcatccgaccgtcctggacctttctttaattgaactttctggtctgatacctaatctctaac

SEQ ID NO: 239482 - DNA, 302 bp, Gossypium hirsutum
atctcgggtcagatgctcaaagcgttgctatagacgaaatgaaaaaaaaagggggggcttaatacaacgtcttcctaggccttacatgaatctctcaagcgaaagcaaggcgaacaaaaccgatctagtcgtttgccgttactacgatcatgtctttgttatggctacccagattggaactatgggaacaatactacatgcaagaatggtggaaggctacacggtccagccaactttcaatgtgaccgtatacttggcatacgagacgagccactgctaccgtctattacccgcgatcttat

SEQ ID NO: 239483 - DNA, 326 bp, Gossypium hirsutum
tagattttcacccatggtaaattttggagaaggtttagactccatcgtaggtccttcacctcttatgccatcaattcccaattttgtgggttactcatctcctagatttcctgctgtagatattcccattgtttctccggcatctggagcaggggctcctacactgactggaaggcgatggttgcatcgccagattcaaaatcttcgttcaatcaataggatgaattttatggctggtaggactgatgggatattaagcgccaatatgggcactgattttgtgaactctcacactgatcagagtacggaaacaacagttcaacaag

SEQ ID NO: 239484 - DNA, 292 bp, Gossypium hirsutum
tagttttttttttttttttttgtttttttttttttttttttttttttgtttggaaatgaaaatttatcaatcagattaatagagggcagagcaaacaattaaatttcaataaagtactctattgtcactgaccaaacaaatgagtgattgatataataaataaaactacagcgcaatacaaagtgatttgggtgcccattttacttgatgaagattgaactagatgagaggtttgtttgtgtgccgacagccaaccaaaaagttaccccctacataaaaatgaatgaaaggg

SEQ ID NO: 239485 - DNA, 328 bp, Gossypium hirsutum
gttgctactcacagtcaactagtgaaatctctaccacgtgagctttccaagtctgaccagcttcaagaaattttagatagggttgctgtatactctaatccatcaggctttaatcagggaatgtattcattgcgttgggcctattggaaggagctggatttataccaccctcgttggaactcaagggatttgcaagttgcagaagaaagatacttgcgtttctgtggtgtttctgcaatgactactcagctgcctaagtggacaaagatatatcctcctcttgagggagtcgctaggattgctacatgcagagagacacttaagatta

SEQ ID NO: 239486 - DNA, 318 bp, Gossypium hirsutum
gagatgaagagtaggtatttagaaggggaatgtagacgactgagccgtgtgcttcagtgcttcattgctgagaatcaagctcttcgtcttactttgcataagggttgtgcatttgatacatcctcgaccaagcaggagtctgccgtgctcttgttggaatccctgctgttgggttccctgctttggttcctgggcatcatgtgcctcttcaccctgccaatactgcccaggtctgttctggaggcagctccaatggcaaacgaggaaacacaaggtcccgaaagagtggctccaagaggggcagggagtaaccgggtc

SEQ ID NO: 239487 - DNA, 285 bp, Gossypium hirsutum
gcgacgtgcgattgaatcggctgggttgcttatgaaagggtggggctgacgcccggtcaaaagcacctactgattatagtacattgacggggaccgggtcctgttctatattagccagccctgacctttgacatgtcaggcgcgcttgcttgcctggtcaccccacttaatgatggctgcacttctcttgtggagttatttgaaggcagaccgcacgggagtgtgcccaatatcttcctcatgctgaagaagtctaatagcgtgtgagagtcttcgaccctcttc

SEQ ID NO: 239488 - DNA, 322 bp, Gossypium hirsutum
taaaagtaaaccaaagttgtggagccgaacccaagttcccagttgtttcatgttcatcttctcggatctgactgcgtttccttgctgttctacctttgattcctatatatatttttttccgttttccttgtctttttttttaatttcaaagagggagacgcaagtccaagtctgatggttagtatctgggagaaaggagaattcagatctgtgattaccatgaagtaaaaggctgaaaaggttgaaggcggtggttgctttcacttctttttaatttttttatttgcttttacgagatgatgaagcgttaagctgggatttg

SEQ ID NO: 239489 - DNA, 391 bp, Gossypium hirsutum
gtttgatcttagtttataatggggagatacccatattctatttagtcttaaattttatgggttcacttcctatagaaaaattaatgcatgtttttgtctttcaatataggaagcaggaacaggctgctttgctaactttgttatttgattcaccattctaaagtaaggtattgttcagtaaggcctaaagttaaatatacgtaagtatgggcagtcctgcagagccaaagagaagagtggcatttgtgctgattgatggattaggagatgtatcaataccaaggtttgggaataggactcctctgcaggctgctgatgttccaaacttggatgccatagcatcagctggagttaatggccttatggaccctgtggaagtaggtttgggttg

SEQ ID NO: 239490 - DNA, 391 bp, Gossypium hirsutum
caattgattttgaattatggctgttgtctgagcaaagaagccaggagatactttgtatcattcaaccggctttggtttctgaacaaaatcgacaaaatattattgcttactttcagaggctaatcaaaggttactatggaattgaggtaaacttaattttccttcatatttttagccgtggttgtgtaaaatggtctcatttctgtgtgttggtgctccttgtataactggacaaattctagaaattgttggttcttgctttgtcaaatgcctttttaggagagatgacttttatgtgaacgttacacctagggaagttcaattctcaaagttttccacattgaagcataataaactagcctctgaaatcggtgccttcataaaagattgg

SEQ ID NO: 239491 - DNA, 392 bp, Gossypium hirsutum
agaatttcttttcatgcttgcttccagtgtagctagactgctagatctgattgttggaaatgtcaatgatcgagggctactttcaactcttcctgtcattgacattctaatacagtgctttcccacggaagtgcctccgttaatcagcagtactttacaaaaattggttgttatttgcctatgcggaggagacgacaaggatcccttaaagacagcagttaaagcatcttcagctgctatcctagctaggatttgggtgatgaataccaactatcttgcacaactaacatcagaaccttctctttcttcactactgcagcagactggtgtagctattgaagataatattcttctttgcctgggtgacatatggcttgacaaggtagacaatg

SEQ ID NO: 239492 - DNA, 389 bp, Gossypium hirsutum
aaaagagccaatctgacctggaaaataatgggatttttaagtactttattgggaatttttggttttgggattggaacttctattggactcttgattggattctttctcttcatatactctaaacccaaaactgtaaaggaaccagttcctaggccgctttatgagctagataacgatcaattgctggatattcttcctgatattccgttatgggttaaatgtcccgattatgagagagtagattggctgaacaagtttgttgctgatatgtggccgtacctcgataaggcaatttgtgctcaaataagaagcgctaccgaaccgatgtttgccgagtatgtggggaagtatcaaatagaagccattgagtttgataatctaagtctcgg

SEQ ID NO: 239493 - DNA, 383 bp, Gossypium hirsutum
  unsure (1)..(383): unsure at all n locations
gtcaaattggtcttctttcctgtagtagttcatctgatgagttcatcgcgcaatttgagtttaagcatcaggctcctgaaagctatcttctgtagggatctccgatcgccttgtataactatcgatcaatggctttcgcgctaggagatcatcagcttatggcaggaaggatggatgagctccctattgatataataaaaagggatggaggttaagtctgagcctcggatgaggggggaatatagacactgngaaaggaatcatgggagtcctgcccaagattggaatgaaggaaagactggtgaatcaagcaacccctctaccttgaattcataacttgcataatgaattgcatcgacatctttgcccgtgatcgaatgccc

SEQ ID NO: 239494 - DNA, 353 bp, Gossypium hirsutum
cgacggaagtatctcattactgaccaaacgtaagataacagtcacattccgatacggacagagaggttacattcccccctcttagacacctgaacaattttcttcctaaaactttagtattgttcatcaattaacaaaagagaaaaaaaaaattgcttacaaagtgaaattgcttcaaccccaaaagtccatgaccagtatttaatgaatctccagctgttcagaaactgagctgccaactgggtgattgtttgggtggttctctatgcacttgaggagatacttgaaggtctcgatctcacaagggagcgtaagtccaccgttgtgatcgtacccgaattcctcctcagcct

SEQ ID NO: 239495 - DNA, 289 bp, Gossypium hirsutum
ccactgcggggaagtggtataaaaatataaaaaaatctgtcctaaaacaatatatttatgtttatatataattaggggaaacatgaatgaaatgcttttcaatgaaaataacatttgcttttacaaaggccttcaaaacgaaataatacccatcaacatgcatcctgggggtaaccataaaaagcttccgtttctgcacaacaaatttgaaagaaaaacgaatccgaacaaacatcactttttgtcttcctcctttggggcctgtgcctaattttgcttctgctggggc

SEQ ID NO: 239496 - DNA, 349 bp, Gossypium hirsutum
aaacaggttcaatcaatatcattatttggacaagaatcaacatctccaaattacacctctaaaaacacagggtgctgctgctattttcttttttctttcttctctcttcactttacattacaaacaaatcctaaatttgggtttttgaggcaaactttgattttaaacaacttcaaaagatgccaaccatacaaacaaacaaaaaaaagagaatctaattgaagcttgatgatctgctccatctttcttttaaatattcatcagtagaaaagttactgctttgctccatgctactaaatgatgtacaatcatcatcaacatcaagcattgccacacttaaatgtaactc

SEQ ID NO: 239497 - DNA, 276 bp, Gossypium hirsutum
aattcaagctcaatccattgtgcaatgtgtgagaaagaagttcatggagatcaatctctctgctgtgggcgatgtcgagcagtggtctactgcacttctctctgccaaaagcagcactggaaggagtcacataaaagcatgtgcggtctgtacaaagctatgatggaaagggaagaagagcttgtaatgaaaatcttcatgttcccttgctctgctgcccaaccttgtaaatggcttgaatcattgggaatccatcagaaagggatgtggagaagg

SEQ ID NO: 239498 - DNA, 276 bp, Gossypium hirsutum
gtgagggctctgtactgacacagcatatgttgaatgccaagaacatgatgtgtgccactgttcctggacaccgatgatgatcgacgatattgctggctcggaaaggcaacataaaccaactgttggattacaaggcaggaagacaggtcggtttggaggtaattaggattcatttgcagttcatttatttatttacttttgtcagacaacaaaaatccgttgtcatttagtggttaggatatctggtttctatttattgttttcggccgaaggaac

SEQ ID NO: 239499 - DNA, 275 bp, Gossypium hirsutum
cttcctttcacaactggttgttcttctcaggcaagtgttgcagttggcaaaagtcctccaaggaaacaaaaaccagaaccgaactgtcaaaatctaataagtaaacaagttgtaggagaagagtgttcatcaaaggaaaaaaaaaaaaattcatttggtcggttggctctttcaaagcccaacatatcgaatgggatacatagattgattcgaattactgtaagaagcttctctcagttatttgtttacaaagacatagaggaagtgacaaccga

SEQ ID NO: 239500 - DNA, 323 bp, Gossypium hirsutum
ggcgtcgttatcaactagatcccccccctgctgaattcttctcgttataaaaccccttattctgacatcactatggctggcatatggctgctattttttacaatggccgcactaacggcagaggcaaacggccacaaatcagggaatccaccggtgaatatcgtgacagggcctacacttggtgatttacgatgggtgagtcatggaaggccactcatttggagatacccaaccaaatatgggctcttacttggtcatttatgtgccaacatgcgggcttaaactcaactaagcagagaactttcggttaaactgaaataaac

SEQ ID NO: 239501 - DNA, 234 bp, Gossypium hirsutum
atccatcttcaaaaaactactaatggctttgccgaaccatttttctctaaatctcaataactaccgattttgttttgccaaacatctcctgccatttcccccgctatatcgttcgccgatatgaattacaaagatctcaagactttaaaccctatgcttccatatcctaacttcgaaaaatgcccattgcatccgaaccacttataggtaaaaaatatgatatgggtgtcgaga

SEQ ID NO: 239502 - DNA, 279 bp, Gossypium hirsutum
atgaagtagattgcccattctacctgaaaactggcagttgcaagtatggttctacttgccggtacaatcatcctgataggaatgcattcattcctcctgtagcactaggccattcccttatagcatctgccaataatctgaacattggagttgttaatccagcttcttctctatatcaaacaattgaccccagattaagtcagacagctctacttgctcagcaaacaatgccaacgttggtagggactcaaactgtgtatcctcagagacctggacaga

SEQ ID NO: 239503 - DNA, 238 bp, Gossypium hirsutum
gggggggaatcataaaaatggggcacattttaaactaataacatcaaagaaccaacacaattccaacttcaatcacatacgccaatgatatatatagttcaaggcaagaaactttgtgataaagggtgggaatgtaaagggtggtcacagttttgttgtaaccaaaccatttctgattacttccaaacttatcaatttgagaacctttttgcttaacgtaatacaccggtggcacatt

SEQ ID NO: 239504 - DNA, 280 bp, Gossypium hirsutum
aatatgacaatagcttattaaccttatgtaaaacttcatatggacaacgatatagagctccaatgatcacaagaacctagttttcctaatacagcatcaaatttcaggcagaaaatatataaacacaatggggacaatggacatattcaaactatcaaaccactcagaggcttgaacaagaaaagaactggatggactgtaatagaaagagcaccactttcatcttattgagattgaaattcaggatcagataatcctgccatgacagctataagaaccc

SEQ ID NO: 239505 - DNA, 256 bp, Gossypium hirsutum
aaacataaataacatactcatattcataaccatttacagagtattgtaactgagcaaaattcaatctatacagaatttcccatgctgcttatctcccaagaacaaatatcaatcaataccctaccaatagtaacccacatcttacatatatattacaaaaagagcataattcaaacctttcttcacaacacaaagtttgttctgcctctccaccttatcttctcttcaatcaaactacttacaatggctactagca

SEQ ID NO: 239506 - DNA, 278 bp, Gossypium hirsutum
gagagcgagaaaaagaaaacagaagaaaaacagagaaaaaaaagaaatctgtaaaaaaaggtttttttttgtgggttttagctgttctgtttagagagatggcgcagattcaagtccaggggcaaaatgggagtgttaacaatggagctggaggagggaataaccagtttgtaccgacgtcgctttatgttggggatctggattcaagtgtgacggaagctcagctttatgattactttgcccacgtgggtccagtgcttacggttcgggtttgcaag

SEQ ID NO: 239507 - DNA, 233 bp, Gossypium hirsutum
gggaaccatatgatgtgccaatgcgaagatttcttagaggtcgagctttagatgtggataaagcttctagcgtgtgcctaaaggtcccagaatggagacgaagctttggtcctaaaggactcatccatccatgagaactcacacattaaatgcaacaaaacatgatgtcctagcatggatgatacaagaaaggacgacctatatgagtgacttgttagctgcaagacattgtc

SEQ ID NO: 239508 - DNA, 280 bp, Gossypium hirsutum
ctagtgagctggaaaggatgaaaaatgagaatctggttctttcaaaagatgctcatcatttcgacaccaagtttccaggtttacagcaagaattaatgcagttagataaggtgaatgaagaactgggaagcatatttcctatgtttaatgaatattcagaaactggaaatgcattagaacgagtacttgcattggaacttgagcttgcggaggcactgcaaacaaagaagtcaagcatcctttttcagagctctttcctgaaacaacacaatgatgagga

SEQ ID NO: 239509 - DNA, 277 bp, Gossypium hirsutum
gatggtcttttgttctcttcaaggaggttttttaaaggaaaacaataagtcgaggtttacttggattctcattaaaagcataagaacaacaacactttgtatttgtcatattttcaaaaaccatgcatcctccatagaagctgtggctcacgcaaagcttatgacttggcttcttatttttcggttctttaatattatcattagattggtgaataatgcttttcatatttatacactaattattttctcaccaaacaaaccaaatcaaaccacaatt

SEQ ID NO: 239510 - DNA, 273 bp, Gossypium hirsutum
ccaccccacatatcttcgccaactgcaatttttgcccccattcttcctcgtctgcttgcttacataatctatttatttatatttccatgctgctaacactaattttcagtccttaataaattgcgtgaaatgacacctgcttggtctatttgcttcaattgatacactcatttggagctctgcaaatataggcttattataagcatctaggtgatcatccatgggttcaggatactggcttacatcattcatctgattaaagaaatataaacc

SEQ ID NO: 239511 - DNA, 256 bp, Gossypium hirsutum
agggttattatctttgaatttgctgatttgatttactggaaacgattttcctgattttgggtaattagaattggatttgatccatggtatttgtggattgtgaaggtattgattcaagaacaaagcaatcaacctagcttcttttctttttttctttttgttcaaaatagtgtaaattaattgtttaagattgtaagcctatgagtaattgaaaccaaataatccttgttctagccaaatattcgtaaaattctcc

SEQ ID NO: 239512 - DNA, 282 bp, Gossypium hirsutum
attttcccaataaataatgaaggaattttatatttttatcaataatttattatctcaaacccagacaaaaaccatggactagatccactctctggttccatttttacaatctaatctcccaccttcaatttcgtgcaaaatcaaaatccctaatttcatccttttttttttgcccctttcgatttcttcgatttcatgggcaccatatcagatcccatggctaccaaatttgatttctttcgtcccatgctataaatttgtttcatttatattaggattttg

SEQ ID NO: 239513 - DNA, 179 bp, Gossypium hirsutum
tcgtgtcttcttctgttgctctgaacttatggtctctatttgaggagcaagttttgaggttgcggtctaaaaagcgaaaatggtgtaaatctggtgcattgacgctgcttatgttgtcagtccttgccggccgggaatcacgattggttgctgatcaactaccaccgctgttgctgata

SEQ ID NO: 239514 - DNA, 285 bp, Gossypium hirsutum
tcgtggttagtacaagccaaaaatgtctactgctacattgctctctttgattagtctttcttactaatcaaaggatgagttacatgttattccctaaatcactgaagccttggtttgacacgccgaccattaacatcagaaccatccaacgatccttctttccgatatccacaagaaataacagaatgctccccgattttcgcaacatattgcagcagttcagtaagaacacccgggcagctttccttcaaatactcaaatccatctgtttgcatcacagctttt

SEQ ID NO: 239515 - DNA, 277 bp, Gossypium hirsutum
cagaaacacgagagaaaagaatggggacggaaaaaggaacagcttatttattatcctcttttttcttctccattatcttaactattgtctgtgaacggaccgtcaaagctcagtctttgccgccggcgaaacacgatgggttcttgtacaccaaccaccgagttgactcggacacgattatgatcgaagctttcttcgatccggtctgtccccgatagcagagacgcatggcctcctctcaagcaagctattcatcactatggttctcgcgtttcgc

SEQ ID NO: 239516 - DNA, 188 bp, Gossypium hirsutum
ggcaacagctgttgaacatatctacttaaatgcggaaacctaactagtctatttcaaataagacgatttgggatgtgatattaatgctagttattaattaaatgaaactaccatgcatgttcatgatgaatcaatgtcacgtgagtagttaaaagagtcgaaattctgaatgatggaagtattatctc

SEQ ID NO: 239517 - DNA, 389 bp, Gossypium hirsutum
cccgatttatatcccaaccactcccaccctcctccttcgttaaagccaaaacataactatgacaacccaatatcacatgttctaagtgactgagttttctcatggcaaacaaggatttagaatttgtgaaagcagctgcttgggcatggtaccagcgtggtagttccggttcccctatggccataccagaatttgatgtcatacggactcgacgagctcctggtcctggcccttcacgttacaagttagaagccatgagaaacaacaacaagaacagcatgggatcttccaccaccaccacccataattctctactggatccttgggaagtccaaagcatttcaaagagacttgatcatcttattcagctgagtgggatccaattttta

SEQ ID NO: 239518 - DNA, 338 bp, Gossypium hirsutum
aaacgtgaagcttcaatcaagttatatatacttctggatttgagcccaaggcaaagcaaaatacatggaatttattcttgttcctctcttacgtcggggggcttcatcagctatcgtgcatacaatttctctgtttttaacaaataccgcacactgtaaaccaaaactataatctaaaagagggaaagaactttactttacaggggaagaattgaagaattcatgcttcggtaacgtttggatgaagagaaaaaccttccaccacatgagaacgatcttttcattgtaactgggcttaaatgaagatgctgaaatatggatgaattccccattaccct

SEQ ID NO: 239519 - DNA, 374 bp, Gossypium hirsutum
atttgagctagttgtggcctgattctggcggagatggtttggtttcaatgaagtttaaggatgttgataaagatgctggcattgattttggtgattgtatggaaaagggagcggagatggagaattcaggcgagcttgataataggaatacctcaactttggatttgggagtagggcacggtactactgctggtaatgaaggttctaccattgatgaaatgaagttaagtgcgaagtcagttaatgagggggagaagaagaaggtagtatggtggaaagttcctttcgagctcttgagatactgtgttttaaaggttagccctgtttggtccttctctgtagcggcggccgtgatgggttttgttatattggga

SEQ ID NO: 239520 - DNA, 406 bp, Gossypium hirsutum
aattttcatttaagtcacttaactatttgggagtttttatttaagtcactaggttgttaagtttttcttttttttttaaagtttgatgatcgatatgatggatcagtccctgttaatgagtagaagaacataatttagatccaggtcgatttgatggccaatgttagagaccagaaaagaaaattgtttggaatttagttcacaaatttttaaatttgtgatgttcaaagttgtttcatgaaaaaatttgtaacaactcgcctgacgaagtctctgtatctgattattgtttggtgtgttattggtaaaataaggatagatatgagtaagtaaagtgtttgttttgactaaatataggattctgtgtgatgcatcatttgacgaactctttgttttagcgtgtttt

SEQ ID NO: 239521 - DNA, 368 bp, Gossypium hirsutum
aaccaaataatatatcaacaatacaaataaggggagatgaacagcctcattaatatttaattatgcatttaaaaactagctaaataaatgtataaaacaacactgagatccttgaacttagtccttaggcttaagtctatcctgtactactatgggcaaacagcaaatcactaattacaactactaattaaattaaaataccaaaagataataatagtttagatgaaaaccatgaagaatttctccatggccatgccagatgaaaccagttttgaatgaacgaaagaaaatcaaacgattttcagttaaccagcatgtgatcgaatcctgcaccggcctgaagcgttggcactcgattcactccaaca

SEQ ID NO: 239522 - DNA, 390 bp, Gossypium hirsutum
gtgagttgttgattttgcttgaggacaagtaaatgcttaaatgtggggatatttgataaaccataatgtatacatattttttaccccatgtttaacatatttatggatgatttttccttagtttcattgaattcgatgctcctaatcctttaaattcatgttttatacttaggtaaacataagaaggcaaaaagagtaataaatgggccaaaaacagacaaaatgggcctaattcaatattttacacgactcaagcacttccacacgggtaaaccacacgcctgtgtgtcctggccgtgtcgactaaaaaccaagttagaattgcacacggcctgaggaccttcacacgggcgtggcatatggtcgtgtccctgtcgagcccaagtcaaa

SEQ ID NO: 239523 - DNA, 294 bp, Gossypium hirsutum
aaaagggccaattaaaaacatgaatcctttttttaggaaaagcctcaaaaattttttttcagggctccaactaaaacaagtttaacctttaaatggggttgggggggccaaaccccacaagatacaattttggacaaaatcccttcggttttccaatagccaaaaaccttaccaaaatatggattttttttaaaaaaaaaaaggggggttctaaaacattttccagccttgaaaaaaacccctataacatcctgccgggagagggcctttttattccccccggcaaaatttttt

SEQ ID NO: 239524 - DNA, 320 bp, Gossypium hirsutum
aaatcaactgcattatatattgataggttcagaaaatagtacattcactctcacattcaattacaaagcaatccagctaaaactgggcttaaagacctatatgctatacacatcaaacgactgtgatgctatcctatttgatcagtttgagacccgacaattttctacacaatatgattacacataagccaaaaaaaacaagtcatgaacacaacacagacataaacatgtcaaaatctatatactactttagaacacaaatctgatgcgaaaaagaaaataataaaataggtcgaacatacagaagatatcgtcacctg

SEQ ID NO: 239525 - DNA, 336 bp, Gossypium hirsutum
ctttcctttatcttttcacgcattaagccccttctgaattttgtccgcaaaccagatttcaatggcggaagcgccgctggaaccacaaatgggctccgaacttgaatcgctggccattccaccaatggatccgttgtatctctcctcagatctagggtttcctctcgacgaaaacgatgatttccagcttaccttcgacgatttcgacgaattgtacttcccttccgattccgaccacctcatcatgcccgattcttacgacgcacccgctttcacatccgaatcgtacgtggaaaggtacctcaattcttcctccccgggacttgacagtttcag

SEQ ID NO: 239526 - DNA, 367 bp, Gossypium hirsutum
ttttacttcaaaccctttttttctctctctctctctctttctaggatatatctcccaattaacacctctctttaaattcatagatatataaaggaaagacctaatacttattgttgaaccacaaacagtgggaaagagtaggaggagtgattaggagagtggaagtgattgtttgggtgttaagaaagaaaagatggagctattcccagatttatccttgcagatcagccctccaaaccccaaacctacatccacatgtaggacaagggaggaagacatagatttgggtttctggaagagacctctggactcaaggaactccatatcttcaatggctaaacctgataactgcatcgacctatctttg

SEQ ID NO: 239527 - DNA, 469 bp, Gossypium hirsutum
  unsure (1)..(469): unsure at all n locations
gaactagaactagccggatgccctcggacgtagtacgaattcgacgacgagcactatgcttttgtacattgttgatctgagatacacaatgtcttgtacantgtacnatatacagtacatgaaatatnnaaacatgttatacnnaaagaacttgcacaagganagaggaaaaaaaattaccaaaaatctattaatacacaggttgtgtccacaagcgaagtagcattcttatattaccatcatcatcttgctgtaagtgaccaatgaaagatggcatacttaaaatcccaacttcaatggccttagtatctcctatgcttctttggtaatgactctgcttgtgcttcattctaaaaacacacactaaaagattccatgtcaattagagaaaaataaaattttcgtgaaaaaaggtcaaatgatgtatcgagaagtggaaagagacctatcaatantttgagttggatca

SEQ ID NO: 239528 - DNA, 399 bp, Gossypium hirsutum
gttgtcttatgaaattgggaggagaaggcaagaatggaagcattgaccatgcatttagaagactttgaaaactccgaaacagcctcgattatgaaggagatttctcatttgatctcttcttcgtcttatttctctctctttctttttcattattgactttgatatgatcaaaacagtatatcaaagcagcggcagcgactcttttcttcattttcttgaaattttcaaatcgaccaagatcggttttggactcaactaggagtttttcagcaaaaagtaaccgacacagtccggtttgggctcaaaatttccagttgagaaatagagaaaaccaagtacttgaagaggactcttggtatctattacagcaatccatattgagcttttttgtatacaatt

SEQ ID NO: 239529 - DNA, 379 bp, Gossypium hirsutum
aacatgaattccacaatttattctagtcccatttgccactcaatatagctgataaatacatttattcaaagataaaacaacacagacaaatattattaaaaacaaaaaccagacaagacaaaacaaaacaaaacaaaacataattccagttcaacatccttatccttctggtccctcacctttaaagctttaaagccactgcaattctctttttcctgaaacagattgaattgaaagctatagagcactcaaatgatatggagcaggcctaaccccaacactttgatcatcctcattccagctgcatgatttcagaattgacctaggggacacacacatgtcacccccaccaaagctgtagtacatgactgaaccccca

SEQ ID NO: 239530 - DNA, 309 bp, Gossypium hirsutum
gtttactgtttttttttttttttgggggcccgccaacgagggggggcatccatctttcactgatgggtaaatcaccttctcatcacaatcaacttcagaatgcatagaccaaaaggtctaccaagtaaatctaccctgtgttttggaaggtttaaacggcgaaaaacaagacgaagcctgccaaatttagaagaatgttactgactaggcatataaaacttgttgcccataaaaaactcacaaagcaaacgctgctaagacggcatggattacaatgtcttccttcgtatgactagaggatacacattc

SEQ ID NO: 239531 - DNA, 366 bp, Gossypium hirsutum
gagaactagtctcgagtttttttttttttttttcagtgcttttcttcggatcggccacatctcctgtgtccttacccgcgtcgacaagggtgttgccttcgttcagatggtgtaagagctgctgtaattgtatcacttgagaggaactgttgcctgacttgattttgtaaatcttagtccccctcatagcatggacaacaacagcaatgatgatttcaccttttgtaaggttgggttaccgactgatcaaaatggtgtggaggaaaagaatcttgcagctgatattggtggtattgccattaaagacgaaacctcaaactgcagcgatagtagcaagaatggtgattttccctggaaagataaaca

SEQ ID NO: 239532 - DNA, 234 bp, Gossypium hirsutum
  unsure (1)..(234): unsure at all n locations
ggcacnaccancgaaccacatagagggggggctctcatctgcgcaacgcacattgccataactaaaggaccgtcccggcagatctaagccgtgctctcgcgatggcgtttaccgggactcaacagacacgcaaggcttggcagaagaccgatgatcccgtctaaccctcgtcggccgctgggaacccccaccaaacgcctggcttgaaatgccagcatcgcaaaaggacactaa

SEQ ID NO: 239533 - DNA, 342 bp, Gossypium hirsutum
  unsure (1)..(342): unsure at all n locations
aaaaataatataaactgggattggttaaaatataaaaacataaaaattaaaatagagggaaatatctagaaaataagacaaaacaacatacacaaataaatgataatataaaaattaacccaatccagtgtaatttttaattgataaaaacattaacccacgttaacttaaaatatatggtaacacttcttaattaccactttagccctgcaaattacttaactccatctcttcttaaccctaaccattaaccccttcttcatctgataaaatgcactgtatttgggaccaatagtctgccctttcaccacatngaacgttgagttatgaatgattgctggt

SEQ ID NO: 239534 - DNA, 163 bp, Gossypium hirsutum
agcatattgttttaaacgcgatggtgatgagggcttcgaggccgatttctggctaaaaaagaaatccccggatgcaaatcccgcggggtcccagcttactaagcagccccccctttgtttgatgaatcaaagcccaaaaacagcggatgaatttgctgccagc

SEQ ID NO: 239535 - DNA, 325 bp, Gossypium hirsutum
gtcctaactcataatacctttgcgtagagtatcttaggagggaacttacttaccttaacaagctaaaagctcgaaaggttgctcttggcgaggataaacgaaccttagttcgtgataaaaaggatgccgctgaaaagcatggaaggaagaaaacacaaaattggttaatgcccttggagaagaaaaaaaataaaaccattgatcatttttaaaataaaaagtttcagagaaattggatttgttttcacagcattcatccgggcttattaaaacaatatattgtggggcaattcaagcacttccttttagttttaaccttaagaaa

SEQ ID NO: 239536 - DNA, 283 bp, Gossypium hirsutum
  unsure (1)..(283): unsure at all n locations
ggggggaaaaaaacacggaggaaaggccaancnagggagaagcaaaaagccnnggnccaagaagaacccangacngaaaaacgcaagggggcccagangctacaggaattacagcaggctaaagctcttgaagaacagtttgaggctagattcaaacaagaagaaaaggcgaaggaagaaatacttactcgagctagtttaatacgaaaggaaagagaagaaattgaaacctcaacaaaattaaaggaggacatgatgaagtcaaaagccgaaaccagtttac

SEQ ID NO: 239537 - DNA, 389 bp, Gossypium hirsutum
cagatcagtttagtttgaagaaaagttctgataattggcgtgctttctaattggtaatccaaaagttaaaatgataagaaaaaagataagtaattttccctcgggctcttatacaccttttcctgtttttgttgaggttttgttgggttgcctacctttttactatgtgctgttgtgtttaatattctgcagcatggaattggattgttgtaaagttgtgctgtattttttgttatatggcgacatttttttgaggggtgttggcatgccagaatagtgattggaaaataataaaacacacacaaaaaagtctccttttaagttgctgatcatcatggtaggtttgcttttgtaatctgcatggtgataattttatgttctgttagaaa

SEQ ID NO: 239538 - DNA, 300 bp, Gossypium hirsutum
gcttatattttttttttttttttttttttctttttttgcgtgcgggttttttgtttatgaactgccggccttccaattttttattaatatcctccaaattaaaatttcaggccatctgataatatttactttcatgaggaaacagaaaaacccccccagaaagaaccattctgtacttaaacaactgccgttctttggaagagcggctaccaaaaaaaactgcttcaagtatcacatggcaatgattctgaggcaggatcacgcccacccccgggaaaataaaaaaaaagcggggggaat

SEQ ID NO: 239539 - DNA, 350 bp, Gossypium hirsutum
aatggactctttattttaataccaaagaacttttcaaaaggcttggtgtcacagtttaattgtcaaaccaaaaaaaaaaaaaaaacaaattaagcataattgcctggttttgatgtttctgtttgtatcactaaaaaaaaaatttcgatagctatttctttccctgtaaagtacctaaatctgtgattcttatttgcatatttccagtttccaattgttttgcatataaataatgattacatcaaaacaaaaaaaaaaaaataatatatgataataatttgggaaaaaaaaaattaaattttaattgcattaaccactctattaaaataaaaaaaaccccttcggggggg

SEQ ID NO: 239540 - DNA, 236 bp, Gossypium hirsutum
  unsure (1)..(236): unsure at all n locations
gntgtttttttctttcatgggttacatatgtnnctcccgggaaggctnnntattatgcagttcaggtggagaaattttttcttaatgtttctgagctgttttttttgaaaaaaaaaaaaaaataaaaaaagaaaaaaaaaaaaaaaataaaaaaaaaaaaaaaaacagaggggagtccgcttggctttttacaaatcgaaatgttaacttaaaaaatcaattccctgggggggggc

SEQ ID NO: 239541 - DNA, 286 bp, Gossypium hirsutum
agaagacgattgagaccggtccagtagtttagccgagtagaggatgctcattggcttgtgtagatcagctggagagcttacatatttcatttctgtatctcagattatcctagagcgtataccatttttactgtattaacactcaattcagattctgataatctatggacaatcccatcgccatatttgctcctttccttctgaatttatgtacatgaaagatgacactgttgcctttcttttgtaattccaaattattttctcaataataatgctaaatgtaccg

SEQ ID NO: 239542 - DNA, 215 bp, Gossypium hirsutum
  unsure (1)..(215): unsure at all n locations
taggttnnnntttttttttttgaacaccaatggggagctatgggggcattgcttccgaatttgatctgccaaataccccatagcaacctaacacccagttttatgttttgggttttgctttcaatcctcagccttttaaccttgaactcagttctggcttctcctttagcttgtgctaaagcacctcaagaaaaagaatgggctcttgtgaaatc

SEQ ID NO: 239543 - DNA, 215 bp, Gossypium hirsutum
ggacccccggctgagattcgccggagatcttcagggtcaccaaagaatcttgttttactatatggcttttgtcttcaacttgacaatatgtgaagctggtcacacaggtcttgttcgaggaatggcttcgagacatctttgacatgaatatttttgtccacagtatatgcaccacacaggctatacaaagagatttgatggaactgtattattat

SEQ ID NO: 239544 - DNA, 384 bp, Gossypium hirsutum
  unsure (1)..(384): unsure at all n locations
gtaacaggacccgcgagaatcgacaggatcttctcttgaaacacctggtgaaacataagacgggatgtacattggtggaaacaaaacaaaagaacacttatgaatgaaatgactaacatgatcgagcaactgaaagatcagaaggaaaaagaatctacgttacgggaacaagttgagaagctacagattaaggcaaacaaggaagaaaacgagaaggagaatctgatgaaatcggtgaagcaactggagaataaagttgagttgttggagagggcaataaaagagaaggatgaaggtatattaggcttaggagaggagaagagggaggccattaggcaactntgcacgtggatagattaccaccgaagtcgctgcgatgatctg

SEQ ID NO: 239545 - DNA, 380 bp, Gossypium hirsutum
  unsure (1)..(380): unsure at all n locations
aaccaataatanannanacctancctatctacatccatcccttatctccaaccataatatatatactacttcatacacaacttcaacatctcctaccnnnnttaggcctttttttttcaagaccccctttcggaaaacgcattggctttcactcaagttcgagatccattaaataaagcaaaaaatgcacgttacagacgaaaggtagatgttcattggcgaataaagagaatgcaagctatgcaaaaacggatttcactcattttcttagccggaatgtgccctcaatctctttctgacacagggctgagcgctctagaagcgaaataattaccctcgcggggttgatgaacctgcctttttggttggcgtggggtgaa

SEQ ID NO: 239546 - DNA, 332 bp, Gossypium hirsutum
  unsure (1)..(332): unsure at all n locations
ctaatcctatcccccttcttcttccttgtctttttttcataccctctatttcctccacctccttcttattttttacaccacccnnnnttttgaggtccggtattttgtagggatgtgggtcaacatagatggaaccggggttgtgcgaacaaactcctctaaagaaggcaaaagccgtgtggctcttagggcgggcgcgtgtttgttaggtgttgactgcttaggcttgtgtaactccctcgggttgttggggtgccgctgagggtgtaggcttcacaccaggtggctgtgcaaggggttagtgtcttttgggcaactatttctccctgctg

SEQ ID NO: 239547 - DNA, 394 bp, Gossypium hirsutum
gaaggttgtttggaggatggaaaggtcgctgcggaagaaatgtctgagaaacacttgggatctcatgcagtaaatcattcgatatggacgttatcatccgattcgagtgcttctcctggccattctcctgaagggaagcagaaagtgtctctatctcaagagagtggagaggcaagtgatccagttctgactggcagggccaacaggtctccactaaagaagacttctaaaggaaaatctccaaagaagggggtaaaagcaagggttcagactcccaaaaaggagaagaatgtgaaagatgatgcgaagataaaagaaaatgatgttaatgtggaaactgccgaggaggaggcttctgaaaagcacatagaacctcatgtttctacctcaaggt

SEQ ID NO: 239548 - DNA, 323 bp, Gossypium hirsutum
  unsure (1)..(323): unsure at all n locations
ctctctctctctctctcctctctnccccccctttttntnnttttnnnncttggtataacaaatgcaggtgtttgatagaatgactattccaattcgcagagtttggagcggtgtcgccacccgcttcggcgttcgtaaaagtgctcatatgaagcttcgaaaagatataagctcttgcgaatacgaggatgtgcgagtgatgtgggaaatgctgagcagaaacgaagcagaaaccattcgatccccaacaacaagtaaaagaagatgcagaaagagaccattgtggaattgctttgaataggcaaagcgagctcctttttttt

SEQ ID NO: 239549 - DNA, 379 bp, Gossypium hirsutum
  unsure (1)..(379): unsure at all n locations
cttattaaaacagaaaatcattggtggaatttcaaatacaaaaaatggcaccacctttgctacctccctctctaaaacaatgaaaancnnnaatgaatagctataacataaatggggtgcgtggatgccgccgaccctctggttgccagcatcagctttggggtagaaattacctgttaggagactggagttaatccgggctccgagcactctgaggctacgcccaacccatacaagctcgccatacagaggaaggtatttagaagagtggatatgaatgcttgtgctataagaagatgatgtattggaggagaagagcatataagctctgttatggtgggaaagatcgccaacagtgggtactatcctttagagagaa

SEQ ID NO: 239550 - DNA, 266 bp, Gossypium hirsutum
ggacacaacacttcttttaccagttcatctatcaaagcaacatttactttggtacggctatgataggaagaacggaatgcattctctttgtccagcagtatggtcaattcataggaggtggctattaatgtcaatgctctgtcttaatcctttagcttgttcatttgtagatttgcaatttccaaatggacagtttacatatgtatctggtgaagggctgacgacaagtgctttcttacctatttgtgggggacttcttcaggcac

SEQ ID NO: 239551 - DNA, 341 bp, Gossypium hirsutum
  unsure (1)..(341): unsure at all n locations
cttcttggtgtcccatttgtattgggaggaactccttctagccagttggttcttactatctagaaatgcctcccaacctgagtcttgctnnnttagtttgttggcagtgtcaaactatttgccggcctagatacggaattcatttttgtgatgtcagatgtatctacagtcagacacagggagaccgacagaacttcctgtgtggtatttttgagccatacaagatggttgaatgtcgtgatcacccgacccaaatgatcgcttatgagtgacggacaatcactcatagctaggatggatccttactgaaaaaatctgttttgtcattggcatgtaaatta

SEQ ID NO: 239552 - DNA, 369 bp, Gossypium hirsutum
aatgaaacaccttaattttgcaatatatattggattgtctcaaatttcctgttatcactctaccggtcaagaatcttttcatgcaaccagaagcacatggaatcaaaactcaaaaggcaggcatgattggtaatcaattgcataacccttacaccacgtatggtacacaattgcctaggataatcccaccacaagctacaccagtatctttcatggaaataaaacataatcaagaatccgataaataaaagtttcaaacgtctatctatccagtcccaatcagcatgcatgatccttaaccattttcaaccacgacaatccaaaaaagtgaagtccgttcatgacaaaagaccgaagctttgaatttag

SEQ ID NO: 239553 - DNA, 336 bp, Gossypium hirsutum
  unsure (1)..(336): unsure at all n locations
ggttacagtaatatttggcaacattttagctaccaattgctgctttataccttctctggctgnnncttccttgtgttgagaacaagttcttcagctctctgggttttttttttttaattatcaaacatgtctgctaaatccaaatttgaaactccaagcaaggtttcaccagcaacacctagaggggcaagtaaactaagcaagtgattggctaaatcagagcctgattcgccttctcctttgcaaagtactcgccatttgggggatcgatccctgcgatcatcgcttaattcgaagccgctaaattcgaagccttcgattgatcggaaatcgccg

SEQ ID NO: 239554 - DNA, 283 bp, Gossypium hirsutum
ccctttcatggctggaacgaggcaacaagggaacttttttgtgcataaagatgaagagcgatccgtgaacgatttccgaggacagcttaaagaatatttagaatacatgctctttgacccaccttcgcaagcagtttgttggaattggatgaagacgatggaaaagatacacgatacctatccgtacaagaagatgggttatggcatggcagatccggtgcatcagtctatgtcgaatgggggcaagaaaagaaatctgaaatttgtttccgatgacttgaga

SEQ ID NO: 239555 - DNA, 292 bp, Gossypium hirsutum
  unsure (1)..(292): unsure at all n locations
caaatttctttcaatggtcattcccacacttctaatgattacgctctctacgaacggtggcttcctcactcactctacaattaccatttctatttacttcaactnttttgcttcctcagtgaggcagaagacgatcaacattaaatgcacgagcagtcatgaaacacaaaggggctctcgtgcgtacatacaaaaagaacgatgccggcgcaatcatattaagagagaggagccataaaccttggccttcttagtgcatgagccggcatactattaaggactacaaaaagat

SEQ ID NO: 239556 - DNA, 285 bp, Gossypium hirsutum
  unsure (1)..(285): unsure at all n locations
agctacccttttttttcttttcttgagacccttacttcaggggagctagcataacaaagaaacccctttaacgtctcactacctctggtttggcctaacccnnnccggcaatggaaaatataattaacgcccatcggcaaaaaatggggaggacatgaaagcggggaaggggggatttgcagctaaacaaaaaaatgtgagcaaagggggaagaattgggggcccaaatgaatccaaagaaacgcctgccaaaaaaaaagaaaaagggctattgggcaggtaaaa

SEQ ID NO: 239557 - DNA, 162 bp, Gossypium hirsutum
gatgggggcagctttcaacaatggaaccctgcaacctacactttgtcacatgttcacattaacagccatggagcaaacctaaggccaatttcaaggttggtccggaatcaacctgactacaatggttgcggctttgaacaagtcataggttgcaaataggac

SEQ ID NO: 239558 - DNA, 390 bp, Gossypium hirsutum
tagcatctgattctaaaatcgttgggaagatttcacgacgagtttcccttgtacattatatgagtcccgacgaatacgaaaagctcagttccgacaagaagctgttgcatcagagatcctccggaactttaatgactgattcttccaatcctttttcaagtccaatgcaaagtaaagggcggaaaggttcacattctatggggcgcactgtcagcacacatggtagtcaacataaaagtactgtctctggaatcaatgaacaatctaagccttcaaaaagaaagcatgatcatgaatctacgggatccatgaaccagcccacacacagtcatgagacaaatccaatttcagggtcctcagagcattctcacaaaagtaaatcgaagaaga

SEQ ID NO: 239559 - DNA, 265 bp, Gossypium hirsutum
agtgacaattggtgtgctttacataaaaaagtgagggaccctgtgggataccgaatatcattcggaaggccaataattacataagccaattacatttgaggagcattatcataggaatcttaccccccgggggagggcttactttacgcgaaccattgcaccaaagacaacgaaagtgtacatatgaaaattacacaaccgttattcataaaagaatctgtaactgaaagattctgacaaacactaatgttctctaaaaacactg

SEQ ID NO: 239560 - DNA, 309 bp, Gossypium hirsutum
aattcattgctgtgcttcatcaaatcatcctaggtttctttcatctcccaattcgatttttttatttttggatccaacgccgggtctaaatctacaccagatgctcctccgctcggattacagcttcggagccaccgctataatccagttcgaccccacacaaaaagattcatcggcttctccttctcgatccaaggcttccccagctcgctccgcaaagaagcctccccctgactcacccaacccggatgattgctcactcgataacccggatctcggcccttttttgctcaggttagcccgagacac

SEQ ID NO: 239561 - DNA, 209 bp, Gossypium hirsutum
cccaattcctaaattgtcattaaaaggcaatgagggcatgagaggaggagtttggattttgcaggagtaaacctcatataatcatattattgctgctattgcattaaatagaatagggtaaaatgtttttttttaagctttgcaaagctcactgtcaatcaaagcttacaacagacatgggaaattacaaaagatggcaaatacatgtc

SEQ ID NO: 239562 - DNA, 307 bp, Gossypium hirsutum
ataactgttggctttttaagatgaaaacaaaatgatctaaacccgaaatcacccaaaattttccaactttttaaggaaggtgatgagagataaccaacatttggcttgccattgtttactatcaaacaggtcaagcaacggaacacaatccaaatttttggagtcatattcacataaagctaaacatgtgccttccttaattaaatgtcgcgttgttttcaaactaaaaaaatctctaactgggaagatgctaaaaaaccgaatccttcaaatccaatttatacatcggctgccttgaacgggactt

SEQ ID NO: 239563 - DNA, 187 bp, Gossypium hirsutum
gtctttaaatacggtcttaaccatgttacctaccttattggcagaaaaggctcaatggttgtattgctcatgatgtggatcccatgaattggagtgtggctcctgcattatgcaaaagatggagtccttatgattgtaaaaggaatctcgttggatcgattgtcacaaaaaactgctgcgtttgtgc

SEQ ID NO: 239564 - DNA, 418 bp, Gossypium hirsutum
  unsure (1)..(418): unsure at all n locations
tttttattcagagacgcttgtcttttttgttgtcaacgacnnatgtttttgtcattgaggtttgatattagtggtagatgcgatgtttacaaaatctattggaagcttgttttagtgaaacanaaaaaaccacggggatgatgnaattggagggctcttctttattttttatcttttattgttagggagtgattttggatgcttttgcaagtttcaacgctatattataagtatgttgaatcttgcaaggttgaatttttttagcaatggctggtttgtggtgcagcaatgaggaattccttataattgaatggttttaccatgtagcacactggtttttactttttggtgatactattttttaggttgaattgcgtgtatgctgcatgtttagcattcttgaaagatttattaataa

SEQ ID NO: 239565 - DNA, 387 bp, Gossypium hirsutum
gaattaaacattctctgctatgataaaaaaatggtaataataacaaatgcaaggtacaatgttggtcgtctaatacaatgcttcaaattcattttactctaccagctcaaaaagtccacattccatatttcctcaacatcttatacctgaaccggactgtcaaaattactatcaaggctcctcaaagttcatcatgttcccgaggttgttctttgttcatcaaatctagtttatgttgcaactcctttagcttatcttccagacaaacagctggggtggacagtatcgctacgtattcgcatcggctgggttcgtcaacatcagtgatctcattcttcaaaccacatctcaacttcaccttcatacttctatcagggccattccagc

SEQ ID NO: 239566 - DNA, 303 bp, Gossypium hirsutum
ccgagtgatgccttctaagatttattggagggatgagttgaaaatgctcggtgggctttggctctcttggtgggaaaggtccctttgaaagacccatgcgggtgagcagctttggctctcatatttttgcattattcctgatggagcttcttcctgcctagctgtgaagcttctcaacttgaagactggagcgctggaccatgtgctagctgtagcctggcttgaaaatgcgtttgctcaagtggtcttaattccagatatgttgctgaagctttcacatctgatgctgtattgaggagaagc

SEQ ID NO: 239567 - DNA, 304 bp, Gossypium hirsutum
atattaatatatagcgactgatttgattattaaaactacgaaataagataggtgaccaaacatgagtaaaatgacgaataccccaatcattttcctaacccattgggttttctcctcatcccatccccaagttttttaccaacaaaatttgaaacatcctttcctgggtagtccaaagttcatcaaagacattttgctttttttacacgtttaatctttttctcaagaaaaaattaaaaagaacccaaggaggcttttttggattatgctatcaattcatctttctttcggcttcctttttttg

SEQ ID NO: 239568 - DNA, 385 bp, Gossypium hirsutum
atgcacaacgttctagacatttctcctgaactatatacatataaataacctaaaaacaaaccccagctcatgggagcgctgtaataaagaattctctatgatctaattctaaaatcaacaagatatttaaaatcaaagcttagaaaaaaaatcaaaccaataaaagattttttttttttttttagatatggaagggaaaaatagtctaggatgatgtgggagcctgcctcgccaaataacttgcctaagccattctctttccacatcaacgaatcagtggaagcattctataatctttgtgtattttgcaccttattccgacatatgcattaagccaataactttgcaggaagagtaacatcagaatccttttccggctccaaaa

SEQ ID NO: 239569 - DNA, 391 bp, Gossypium hirsutum
tgctgcggtatacaaagatcccagcgatgcttgtgctggaattgctggagactcctataaacgttggttggagcttgaaaatcgaaccaatgatattacaatcataattgtacagatcaaaggcctatcaaattcgggtgttggcacaactgatagtgaactacattccagaccctgccaaattggcggttccatgaatcaaagcactgccattgttccaccactgatgcatcagaggcctttggaatcggatgtaggttagccgaaaagagcaagcagaagtttttggcatacaagattctcatggcgaatgatttcagcgcgccaaggacatcttgctaatgtaacacaatgaaatttgtcaaggtgaaggtactttagctctgatctt

SEQ ID NO: 239570 - DNA, 391 bp, Gossypium hirsutum
cggtatcctattacgaggaacaaggcttttcttctgcagccattcaaagttatcattctggtaacgcaggtgaatctgatgatagctgccacaggtccgagccgtctttgcagaggaactttacggttagaccatcagaagaaagtgaaggtttcggaaacagaagaccacatcctgaggagttcgaagggaatgaggatacagttgcaggtgaagatcaaaactggttgggtttggaaggtgttacacgagtgaactcactcatccaacttcctagattttccgaggaaaggccgaacccttaaagattttgtgttgtctggaaagaaactggactgttttttagtgcagcctacattagatccaagggaacggaacttgtttgtgaatc

SEQ ID NO: 239571 - DNA, 310 bp, Gossypium hirsutum
caaaaaatttattttttttatacaaaacgcaatatgggggggggggaacgatgtattggggaaggggaaaaaaaaagaacaagaataagaataaaagagagagatagagagctagagagagcgatagagagagagcgacagagagcgagtaacatacatttccttgagaagatgattggaggggagtataaggatgtattgatcttcaaacagggtgaggaaaacgatgcataatataaaatagattagggggaagtcatatggaatgagacatttatacatggcaataaagaatgaattatatgatgta

SEQ ID NO: 239572 - DNA, 395 bp, Gossypium hirsutum
cttctttatccctcatcaacaatgtcgccaccgtctcttctcggcccaccggagctccgccaccccactcctccaaagcctgaaaccactgtcgccaccaccaccactaaagttccaagcgatccattcatggatctaatgttggctaatttcaataaagccaaaaacacaccttcgatgggattcaccgaaaataattcagccacttatttagccaccggcaacccttgccttgacttttttttccatgtggtacctaattccccacccgattccattagagaaatgttgggtcgagcttggaattttgatccattgatgactctgaagctaatttgtaacttacgtggtgttcgtggtacagggaaatccgacaaggaagggttttatacggc

SEQ ID NO: 239573 - DNA, 367 bp, Gossypium hirsutum
gcaagtaaagtgcaaaaacaatttaatggcaggctataagaacaaacatcaaaagcaacaggtagatataatgcatgtctgtggtagtatatatacactagagatcaaacatctcccgaatatcacatattcagcttcgacgaagtagcataaatatgaacttaaataaatggagctccgcaatccaccaaggaacatagtagtactatgctctgtcaactaattcaataggctgctgcatataaatgtaggagttgttgccaaggtttcttcacatgtggatacatgtatagttctataaaccatgattgtatcaaaaatattttaataccgttttgaaagaactgactataactttttacaaaca

SEQ ID NO: 239574 - DNA, 143 bp, Gossypium hirsutum
  unsure (1)..(143): unsure at all n locations
gcccccggctgcgagaattcggcttgaggaacaccttttctttcccccaccgcccgacacnaaacgggaagtttcttatttacatggggcaggccaaacaccacacatctttttctctctgtaaaagaaaattgtgtaacact

SEQ ID NO: 239575 - DNA, 300 bp, Gossypium hirsutum
  unsure (1)..(300): unsure at all n locations
ttcgagccacaatcccaggctaaccacttttaagntttgggcaagctggggggcaaaccatggttttgaatggttgccaataaaatgggcaaagttttttactatgtagaaagccttgctactctctgaacacatattatttttcttcatagcttgtaaatggtagacctgttttttgaagatataaaagcgtttttactttgtggtacaacagaaatgcatgatctgaaaatgggaatttccagctctatgaaatgcaatctattgacaaggctatctagaaggatggatttgtaaatg

SEQ ID NO: 239576 - DNA, 293 bp, Gossypium hirsutum
gttcaaccaccttttgacagagcttgtgtatgaggacctaaaagcagctctggaggaagttaaaacgcttggagaagagcttggagatatttatgattacgtagctccgtgttttcctccaagatatgaaatattccagctcatggtaaatctgtatacagagagatttattcaaatgcttagattgcttagtgacagagccaatgaactgacaaacattgagatattaaaggtaactgggtgggtagttgaataccaagaaagtttaatcgggcttggtgttgatgagactc

SEQ ID NO: 239577 - DNA, 275 bp, Gossypium hirsutum
gtacatttacgcgggtaacgggtgaccaaccaaaaatgacacgaaggaaaaacggggtcctacttttggttacaccatgaacgttctatacggagattacacttgctggctaggcgatatcgatcccgtgaacatcatgatattccattacctgcattacctagacttactaagcgttgtggcgagaggaagcaaggccacacgaggagctaagctgagcctaacataaagcattcaacccgacccgagctacacctgctgccaatgctacatga

SEQ ID NO: 239578 - DNA, 295 bp, Gossypium hirsutum
gtaatccatgcttatctgcatgtccttcttcttctactaattgctctctacttccacctaccgttttttttttcccatccaccttcctactacaaaatgatgtcgttattgtcgtcaattctccgtcgaaagcccgccgtgcttctccaagtacggctactatcttcgtatggtcctcctcccggaacgacgtcgcagcagaaacgcattgagaaaatcctggtgggcaaccgaggcgagatagcatgcaggatcgtgaggacagctaagcgtctagggattcggacggtagccg

SEQ ID NO: 239579 - DNA, 308 bp, Gossypium hirsutum
tgcaagtgcttgctttcttttaactcaattggagaagtaagctagcttaaattagctcctttcttgcttctttctctgattccatatacaagcaatgtcggaacccccagtgaaaccggttctccaaaagccacctggatacaaagacccaagctccccggccggtcagcgtcggttcaggccaccgccacggaaaccggttctcccaccttctttccatcccaagaaaagaaagactagttacggtcgtgcttgttgttgctgtttctgcatcttctttttgatcttccttctcctcattctcattt

SEQ ID NO: 239580 - DNA, 292 bp, Gossypium hirsutum
gcttgtgcttcattagtgtttgaagcaaagaactacagttcttaaataacttattacccatgccaaacccatgtgtggattggccttcaacttggttttttccggtttatttcaactttttggttcttttaagtgggaggaacctattttttggcaggcaaaacctcagaattatgataaaactgatttgccttaggcgtccttttctccttctccaaattttcatttgcaccctgactattttccaaggcagaaatattcaactgattcaaaggccttgatttcttaacag

SEQ ID NO: 239581 - DNA, 291 bp, Gossypium hirsutum
cttaaatcgacctccaccctcgccctgcgcaacatcaatagaagctgccagcaaagtcacgtccaccgattctcccacgtttcccttccagagaatactgactttataggagttgataccaaagcttgatcttgctaagaaacatatatcatctcaactccatgtaaatttgccagatatcgaaagtaggccattagttggcaccggccttaatttggaaaggactagggctatttctggtggaattgggccatggatccggaccctaactcctgtttgtctacttgttag

SEQ ID NO: 239582 - DNA, 297 bp, Gossypium hirsutum
ctgctgggaaggaagtgaagcgggagaagaaggtttatgatttgcccggtcagaagagggatcctcctgaggagagggatccactgcggatattttatgaaacaatgtaccagcaaattccccatagtgaaatggcacaattctgtgaatatacaccaaggcttataaagaaattagagggtatcagggtcaaaagagttgcagctggcttgttgcattcaacatgcattgatgatcttaatttgtctaggtattgcagaaactgggtctttgtttgtgtttggggataaagtggta

SEQ ID NO: 239583 - DNA, 293 bp, Gossypium hirsutum
ctagatgggctgattattgggccaatgtcttgattcctcctcacatggcttctcgctctgatgttgttgatcacttcaagcgcaagttctaccagcgctatatcgatcctgatcttgtggtagaggctatgtcatcaagtgcacaaacagggtcagcaaaaccaacttcatcgtcagcctcatcatcggtagcaaatggtgaagctcgagcgttcagtgcaggctcaacagctagaacttcagggccatcagcaggttcaggttcaaatgcaacttctctgcgctgggatcgg

SEQ ID NO: 239584 - DNA, 150 bp, Gossypium hirsutum
tttgagtcagatgggctcattatagctgcaaggggtggattcctcctaacatggcttatagctatgatgttgacaatcaattgaagcgcaagttataccagcgctatttggaaactgatcttgtggcccaagctatttgattaagagcac

SEQ ID NO: 239585 - DNA, 295 bp, Gossypium hirsutum
gtcacgagcgagtttttttttgttttggtttttttttttgttttggatacaaaaagacactcaatttaacaactagaattgatggataccaacaatcaataaacccgaatgtcaataccgagactgctcaatagcttcctagatgccttttgttccgcacggcaacgtaaccataggcaagaaagcctggtcatagctgcttgactagcaaactgcaacctgccagctaggcttccctcatccaacatcttgctacttaacacatttgtgtcaaagctagcatcatacccatcaa

SEQ ID NO: 239586 - DNA, 309 bp, Gossypium hirsutum
ataatgaagttgctggcaaggcaacaggttcatcattctcattaaaggggatagattagatatcggcaaacaagacaacaatgacactcagtccaagtttcaactttaaaaccatgaaccagtagaccaagatcagacttgcaaagtcttataaatttttcacaataaactgaaagaaagaagtgttataaagttccaacaattcaaaaccaaaaaagaaagactattcctcgtttcggaataaaataaatcatattccaaaaccaaatactgctcgtatcttattgaaaataaggtctttccaacccc

SEQ ID NO: 239587 - DNA, 310 bp, Gossypium hirsutum
ggaaaaagtgtggataattgggagcagaaaagaagcaaagtttgtgtaaaaagttgagtaaggaggggtttattggtagggaataggaaaggaaggggcccaattactccattcttttttggagactttaccacccttttgctcaacttcatcataacaccaccaccccttccccttctgccgctgtttctgcaagaaagctagctgcttcactctgggagttttaccaattccttcagcctcctcaacctaaaatgcatagaggtgctaacaacactaatggccgctaccatcaacgccatcacaacaa

SEQ ID NO: 239588 - DNA, 243 bp, Gossypium hirsutum
gaaggagaggagcccccgggccgcatgtttttatttattttttttgtaaaagctatttaggggttagtttattgttaggagttaaaccattttgtttttatttttgctttttaaaccgattgaaataaacttatataggttttgctccttttttatgaaacttaataagtagcacctaaaattgttatgttatgtaaatacagggcccttttgaatttattaaaaatgtcaagacttttgttt

SEQ ID NO: 239589 - DNA, 263 bp, Gossypium hirsutum
gaagactttttccagaacacagtaccatccctccaggttgcagctgctttgcctcctcctggatcttatctttcaaagttggatcaaactcctcaaaaggttgaagttggtggaaaggtaccacctgaccatgtaaatgcacctgcggctgatattggtctccccggtggtggggttcctcctcagtccgctgaacaacctattcctcctgagtctcttgcactttctggtggcggtattcctccacaatactcagctccagc

SEQ ID NO: 239590 - DNA, 299 bp, Gossypium hirsutum
tgggagtgccgtttctaatgtgcagtctggaacttttcaagaccaagttggccccattgctgcaatggagaataagctctgttctaacccttttgaagcagacaagaaaatggctgatccttcctctgggattgagatgcataaaccaatccatgcatcggggtttccggtaaatctgatgcatttacctccccagcaaacacaagtaattcatgaggatacccgttacgtgcagccgaacatgcctgggatgcagcccgttacatcatattacccagtctattatccggtgccacagc

SEQ ID NO: 239591 - DNA, 295 bp, Gossypium hirsutum
gttcttttccatatctggcaggggaggccacctttggagttctttggaatgattcaggctagacccctaccacgtgatttgtttatatcttatgcaaggtgctataagcatgaatttttgaaagatttctttctttcgactggacaacttcaagaagttgcatttcttttgtggaaggagtcattggaacttggaaaaaatccaatggcaagcaaaggatccccgcttcatggtccacgcataaaactaattgacaaggcccagcatctttttgcagaaaccaaggaacatacct

SEQ ID NO: 239592 - DNA, 118 bp, Gossypium hirsutum
aattcgagtttaactctaaagctaactacgacaaggtggggggatctaaaccacaatatttcttatactatgacgcgttacaacatgctggctaaggttttacaaccagctgaactgt

SEQ ID NO: 239593 - DNA, 348 bp, Gossypium hirsutum
atctaacaaatacttcaatggtttatagagggcagcttcatgtgggttgaaagaacaactctccagcacaaaaagaataaggaaccattacggactccaccacgattctacctcaaacctagccctatgaatacaccaagggttcacaagaatgatctcctagttgtcaaagaaggttctcacagaacattacctatacaaaagattacatggtcacatccgtatcaggagggatcatcaaatcagcggatgaagctgataagaaatatgtttacagcatcattgatggggatctcctgaaatactacaatactctcattggccagatcattgcggttcccacaggac

SEQ ID NO: 239594 - DNA, 275 bp, Gossypium hirsutum
  unsure (1)..(275): unsure at all n locations
tagctacaccttttcgatgaatgacccatcatgggggggggggttgttctagaagctctccagccctcaaacccacaacatctatgcaaggtcaccaaatcatattataacagacccctaccactcctatagtcataacccaacagncacggccgcaatcaacaacaactgaaacttctcattcatcccaaacaaaaaaacacatagnnagctgactacgactggccaaatcttgctatgaaattatgctcactgtaatgaagatagctactagc

SEQ ID NO: 239595 - DNA, 366 bp, Gossypium hirsutum
ctacagcattgccaggaatgggggatcatggggcggtgggctgttttggcagctcttgagccttggaatggataacatgggggatggttaccaagttatattggaacagagcccttccactgcttctgtcattgctcaacagtctcgattgctatcatctctcacttgaacttcacaatcattccttaataaaaaatacattgttactttaatacgacaggagaaatctttggatgagattaggtacattggaatgaagatagctactagctctactactgttttgtcagagatggaggctgttcatgcaaatgaggactttgaaaccagcaattttttataattacatgggatttacattaagag

SEQ ID NO: 239596 - DNA, 323 bp, Gossypium hirsutum
tctctacgttttcggtctcctcttcggccacatcacttacagtcacccttccactctctccgacaagtccgcccaatcttcctccgattctcaactcgttgccaccatctccggcttcctctgcttcccttctcttttctccttctacgactcactcggccgggtcgactcctgccgactctctcctactcacctcaaccacaaacccctcatcggctggttctcctctcgccggaaaactcccctccgtccttcaatgcgtgagttctccgtcactcgttctctttccttcactcccaatctctctcttcctatccaaaacg

SEQ ID NO: 239597 - DNA, 164 bp, Gossypium hirsutum
  unsure (1)..(164): unsure at all n locations
cgcngancctaaaaggnggcagggnnccaaagggagaggccngaaggngcgaggggangaaacgacnacaanaccncgnccagagagaggggcnccncggaaaanngaacangccccgcccccnccngcccaaaanccccnaccaangccccggccaaaaaggc

SEQ ID NO: 239598 - DNA, 227 bp, Gossypium hirsutum
  unsure (1)..(227): unsure at all n locations
gaaaaccctaacgctaccgnacggcgccaggggaaacaggaaancgcagagagggacccggcaaagaaancacccgagagcccnnncacaacgaaaaagaaaagagggcccacncannaaccagggncggagcggggcggcacggccccagaaaagaaggagggcgaagaccaccccagcaaggaagaggcggacgagagaccgcaagagcggacagcaggacccac

SEQ ID NO: 239599 - DNA, 280 bp, Gossypium hirsutum
ctgggggcaaacgctttttaataaaaaaactaacctcttctctcatttgctgaatttatgataaaaaccaaccaggtttatcatatatgcccttttctttctcactcaagtttgctctccccagatcccaagggcctcaaaggatccccagatatgattaatatacacattcagattttcagactatactagggggatcccccacccaattacataccgcacgaggccagcgtgttcttatgcactccaccaacggtgcatgttgaaaaggttcgggttt

SEQ ID NO: 239600 - DNA, 239 bp, Gossypium hirsutum
aaacggttacttcccagaggagcgggaccgaaagaaaaacttcacaaacttaaacgacgagccactcatcaactcaggacacttagaaacatcggaagccagcccttagaagttccaccatagaacgccgagcaaccgctcggaatacttgaaaggtctgatcggttgaattgaaatcgacaccatgcgaataagaccgcatagaacgaaaacaggtattcaacagcccaaaaagctgc

SEQ ID NO: 239601 - DNA, 234 bp, Gossypium hirsutum
gaacgggacctgtgcaaatcacagggagcaggcaaaattggctgcatccatgtatgacatgaccctcaccatccgacatgatatggctccttctcctgcaacgcctaccggagcaagctatgctatggcagcctccgctgattactaatgctatggcatgacggaatctttaatcgctctcttggtgcatagaatgcaaagctcttcaagactttatgacattgcctaccctta

SEQ ID NO: 239602 - DNA, 265 bp, Gossypium hirsutum
aaacgccaaaattcaagcgacctttattagaattaattaatattgtgcacttaagaatcagaacaggaaatgaaactagcaaatcatgtctattacaaaaatcttgcttaacttcccctgtttggaactttcagatagcatgcaatttatcaccaatagtacctaaaacctacccgacataaaaccatagcaaaaacataaaagagtgaacacaaacagaagagaacaaccgcactttatataggaagagacgtgaatcaagcat

SEQ ID NO: 239603 - DNA, 271 bp, Gossypium hirsutum
cctccttggatatggagggggcaggggaggaaatagttctatctcaaacttagcaggtcgaaatatgtggggaaatggaggtcttaaccatgctactaactcaaactctagtcctattgtgggctctggaagtgggaattcaggagtgaattcttttggcagcattggagcactttgggattcctctcctacttcaggtcaaggtggagctgcttttgcttacaacagtggcaatattagatatggaagtggagacattgaggatggatca

SEQ ID NO: 239604 - DNA, 289 bp, Gossypium hirsutum
tgctctagctcgcgttttttttttttggtgggttttttgtgggtgggcgcttttttttttttctttttttttttttttttttaatttttttttttaaaccaaaaatctttctatttttttctttgggcttataaattggtgtattacccacaattccttgcttggtaaattcagaattgccaaaaagggctttttttttccccacacggtcaaatttaccgcaaccttgttttattttaatgaaacctttcccaactttgtttaaaaaaaaaaaggtttgctttttccc

SEQ ID NO: 239605 - DNA, 191 bp, Gossypium hirsutum
cttcctttctattttttaggggggctaatggaaggcgggcgttcctttatttaaatatcattgaccttttaggaatactacacggaaatgcaaaaaaaatatcatctcttttacgaacaaataacatagctttcatagacgaaaactttcattcatctttctacagatgaccaaatggacctaatgccttt

SEQ ID NO: 239606 - DNA, 284 bp, Gossypium hirsutum
gaaaaacaaccgactccacccgggggaaaaatgtatagctggcgctcacaattcgtctgcaacattgacgatggaatcttccatgattattacaaaggctcacccaagcttgaatgaaccgtgtgggatttcaaaaaacatatgagacggtttttcggccaaactcaacactacattggagtcactgcacgaagaagaactcatgcggcttgagaagcttcacacaactggtgaagaattgacaaatttatggcgcctaatgcatacatactatggagatcgct

SEQ ID NO: 239607 - DNA, 304 bp, Gossypium hirsutum
  unsure (1)..(304): unsure at all n locations
aaaaagttggaaggcagaaggcttggcacgtttgcctggaagtccggacancgagctagatagctttgagggcggagaccactccgcnntgctctggagctaatgggtgaaccgcgatgannggagttagaggaacctccgagctgatatnntgtagacctgaaggangatgtaccagagagcanagttaancttgcttgtgaataagatccaaagaatgaattcttcagcggttaacaactcgtaagcatttttcttattatttttggtggtattccaagacgcaatgtgcatggtacagctg

SEQ ID NO: 239608 - DNA, 156 bp, Gossypium hirsutum
ttctcgaggacttacaaatgccctaggggggtttcctaaagttagatgaccacattttctgtatctacctaattttttttatattaatctctctccatcaaaaatacttgtcggtcatgttacatctgccaatgttgcaaatatttgctctaaact

SEQ ID NO: 239609 - DNA, 237 bp, Gossypium hirsutum
ctttatcttttcacttccaggggggtccaggtgtgggatccctacactctcttcctctacctacttttaaaatcaaatacggttttgcatccttaaatcctcactgagataaaccgccaacctacggctctgtgtttgcctcgtgccttataccaccgtaaccgaacaatgagaccggtgccttcgactcctcgccatacatacaccatcggcgaagcaggggggtatctaatcagc

SEQ ID NO: 239610 - DNA, 287 bp, Gossypium hirsutum
ttttatgctgaaatctaccgaggggtttattaaaatattcgaaaaaaaaaaaaacaaaagtatgtaataatttagttttacattgatgcaggtatccaatgtatatattacattatgcatttatagtttagaattatggtcaacttgagccaactgctgcctcaaaacccttctcataaccttattagtagctgttcttggaagagatgggagggccacaacatgagaaaccttgaacaatggattcagattcctctgaaccgctaaattaaaagatattctcaatt

SEQ ID NO: 239611 - DNA, 225 bp, Gossypium hirsutum
gttatgcgctctcattgaatcgggggtcaaccgtgagctagccactactactgcacaaacatcactttccttacattacactatgcccaccaaaaccaccactcctccaccttcaacttcaccaccacctacaacttccgcaccaatgaccttaccaacccctccacctacaactacagcaccatctgcttcatcaagaaacaattcacattgcaccacgcccac

SEQ ID NO: 239612 - DNA, 136 bp, Gossypium hirsutum
tctttttcaaccacaacttcccattggagggctttttgagggacagcctctctttctatatctgcctaactatttatacatcaatttatcttccgaaaacttatttgtcattcaatttacatatcgcgctcaaaca

SEQ ID NO: 239613 - DNA, 282 bp, Gossypium hirsutum
gtcaaacagaaatgaccactgggtttcctattctgtgataacctctctttctctatctgtctttctatctatctatcaattcatcttccgaaaacttatttttgattcaatttagatatcgtgaacaaacaaaaatttgtggaaatgagcagccagacgttgcctccggcgtcaacaacccgccgtgattctcaaaaaagaagatcaaatagcactaagaagtctcattccttcaaccatgccaagcccatgtctccttcttccatccctggtgagaggacg

SEQ ID NO: 239614 - DNA, 261 bp, Gossypium hirsutum
  unsure (1)..(261): unsure at all n locations
gaggaactaacaatttattggggtagcagaagaaaatagcagaacacgtaacaggcatcaaaagagttattcttagctcactcttttctcggatcgtttttaatccccaggcattaagaacacaaaactcatcatcagctgatcacagattatttacatacatatttataaaaatataccccaccatcatcgttgtagctaaaaccaatcaataatccggatgacggtaatcactataatcatncctgtcccttgatgcga

SEQ ID NO: 239615 - DNA, 115 bp, Gossypium hirsutum
ttctcgaggccacctcttttctctaagggggcggaaaggcgcttgcctcaaaatcccaattcccggaatattggtaaacctgctattcatccaaatactgtaaatattaattgca

SEQ ID NO: 239616 - DNA, 284 bp, Gossypium hirsutum
tcgtgcgagttttttttttttttttggggttttttttttgttttgttgtttttttttaaaaaaacaaattattttttgcttcacaattgagttctatgcaaagaatcagttttttttctacatctaatttcaatggggttttacaattttaccgtttaaagacccaaaaagaaaaaaagaattgaatggttcatgaggttgagcttgcctcaatatccggagaccacaactcattggtaactaagctattctcggtttcattccatttaagaatgggcctgcag

SEQ ID NO: 239617 - DNA, 290 bp, Gossypium hirsutum
ttgtggtttttattttttttttttaggtggggagtcactaacaatgcgggaaaaactggacaaataggaaataagagaaacatcagtgttatcgacctcatgatccaaagtatcagagctaacttcaaaggctacttactcatatggagacagcaaccataagtagaaccaatagtccgatactatagaaaataaacatcatagcatattgtggttgctcttacctgataataatttttccaaacttgaatcatgggtaagtaggggatgcttcgttgttgaatttatat

SEQ ID NO: 239618 - DNA, 236 bp, Gossypium hirsutum
ttcgaggtttcatgcccctcctgaaggggggaattgtgggttgatagaaacttcatatgtatatatacttcaagagtggcacatgatcttgactcaacttgaatactatccgtcacaaagagagaaggaactactaaaattagaacacgagtgtctgggcgactaccaaaaaaaagcagacctagcaaatctgtaaagagctctactatatcacgaactggccatatgtggagctg

SEQ ID NO: 239619 - DNA, 285 bp, Gossypium hirsutum
  unsure (1)..(285): unsure at all n locations
gaaaatctttggtttgtgcttgtggtgcgtcgctctgcttatgcatccaaaaaaacgggtcaacccaattcaaccaacccaatttcctgttctccctccgatctctttcgcaccaattcagagcgattataaggtcataaacttggatcaatggatgggctttttttgattctgcaatgaggttagaagggagaaaatcagtgaaagaatgaagtatctgcaagatttatatcagggtgtaacaaaatcacangcaaagttggtatgcttgatgaaatcatcaat

SEQ ID NO: 239620 - DNA, 177 bp, Gossypium hirsutum
gtaattttcaccctgccatccggggggcatacagacgatggacgcatttcctgcacatgcatgaaatccagtcaatatgaatgtagcccatagaccaatgcgtctaattgcttaattattcggataagaccatagtcactcagaatgaacttggaaaccacatgctttgctgtgata

SEQ ID NO: 239621 - DNA, 296 bp, Gossypium hirsutum
ttgagagaaacgcaaatggaagaaaagggaaagaagaagaagcaaaaacatgaacaccccaatgataaaaccacaaaaccaacctcagaattctcattcaaaccaagttccgaagtgaaaggtctaagattcggcggccagttcatagttaaatccttcacaatccgacgagcaaagccactggaactactcaagctcctcgatttcaccccaccatcacacaaaccccccaacaacaaaatccctttcccttcaaccacagcttttctgccaaccaatttcaccatcttagctca

SEQ ID NO: 239622 - DNA, 243 bp, Gossypium hirsutum
aacaccccaatgattaaaccacaaaaccaacctcagaattctcattcaaaccaagtttggcatcctactcacggagacaaaaaccccgggaactaacccccgaatccataacatttgtttgaagtaaacctgtgcatctccacagcaccatgatttttatggacatcacacaaaccccccaacaacaaaatccctttcccttcaaccacagcttttctgccaaccaatttcaccatcttagct

SEQ ID NO: 239623 - DNA, 225 bp, Gossypium hirsutum
ttttctaggttttttttcttttttaaggggggaactacatgggtgcggggtacctaatgtccatttacaagattccttaacaatttactcccaatacagacaacaaaaatatcatgtttcaacccaaacacaaataaaacattaaaaagcttaacatacagtaaaccatttcaagtctttaacatgcttaaaacaataaacacttgcataacacgcaagcaacaa

SEQ ID NO: 239624 - DNA, 251 bp, Gossypium hirsutum
ggattagacacagtgatgaaacgatggtaagggcaaggcctcgttcacaagttctgacatatagagtctgatatttgatggtcactggattacgttggccatgttaatccttgattatatgcatgttcctagccaaagctgtgcggtcgagcctagaaaagagtgcaggtaaacacaccgcccatccaaactcacccttagttgatgcagtcttctggaactggctgttgaaacctccctatgctgcgtca

SEQ ID NO: 239625 - DNA, 236 bp, Gossypium hirsutum
aaccgaatgcagctcaatttgtgtttgttcattaaacgaacataaaaattttgttcatactcgtttatttaacttaataaacgaacataaacgaacgttatacaaacgattcataaacaacgttctttccatctacacctgtgatacgattttaccgtaccatccgattaaaaaacctcttaaaatccatttgaatacgtctttttcattattataataagagtgtgaattaaact

SEQ ID NO: 239626 - DNA, 397 bp, Gossypium hirsutum
aggaatctgtatgtcgcattcataaggcaaaggaagaaactgcagatgcagagaaattggtcgactctctaaagtccgagttagaaactatgaaggaagaaaagatccaagctctagataacgagaagcttgcggcttccagcgttcaagttcttttggaagagaagaacaaactcattaatgagttggaaaattctcgggatgaggaagagaagagcaagaaagcaatggaaagcttagcttcggcattacacgaagtttctgcagaagctagggaagctaaagagaagctgttatcgagtgcagccgagcatgaacattacgaggcgcagttagaggatctaagattggtcttgaaagcaaaaaatgataagtatgaaaccatgcttgatgatgc

SEQ ID NO: 239627 - DNA, 391 bp, Gossypium hirsutum
ctgaaacttacttcgatcaagctgttaaagcagctcctgatgactgttttgtgctagcatcatatgcaaggtttctttggaatgctgaggaagaagaagatggggaaaattttagtgaagtaccagagccaagctttatccatggagtttcttcaatgcctccacctttgactgctgcttcttaagatccttctctgacatggcttgtatatttagctatttttctgactttttttgttcatatttcctttttctttgtttttaagtagaaatgatatgagtgaattatgtgtagttattgagaactctgttttgccttttctcatccttgttggtaccatataatgtaaaagggaatataaataatatatgaaaaataaatcttccagtg

SEQ ID NO: 239628 - DNA, 406 bp, Gossypium hirsutum
  unsure (1)..(406): unsure at all n locations
cttggatccgttgaaaaaaaaaaaagcttcttcacatgcctaagtcttatacaactttgtttattgtgtctgctttattcaaaaacaccatgtcgaagaaaacaatcctgtcagtggagctgctgtgtccaaagtgcaggcagaaggtaatgcatgtaatttcagagctagtggggataacgtccatcaccctcgatccatcgaaaaatacggtaatggttaccggcgaagctgatccgtttaagatcattaagaaagtcaggaagttccgtaaacacgcatcgatcgtaagtataggggccgcanaagaggagaagaagaaggatgagaataaggatgagaagaaggatagccggaaagatgtagtgatatactcttcaaagacatgccagagatgtgaagtttg

SEQ ID NO: 239629 - DNA, 393 bp, Gossypium hirsutum
atttggattatatgtcaagactaagtttccttattcatgaaggtattcccgtgaataccttggtaattccatgaaatccaattctttgcctaggaattacataatttcacagcttttccaagccagaaaatccagcaccaagtcagcagattctagtcttgactttggaaatgaagaagtaccggttgaacccaaaacagatcttgggctttccccttcatttatttcctctagtgaaaacctgaatatgagttccgaaagttgttgttcagaaaatgcaaccttcagtactaacagttcacctctgccaattggcagacctttgcaagtagataattctttggtaagtaaaccaagttcacttcctatactcctcagccatagcatggtgtc

SEQ ID NO: 239630 - DNA, 410 bp, Gossypium hirsutum
  unsure (1)..(410): unsure at all n locations
tctaccagaagctttttcatcagagttgcagaagaagtttgctggcgagtacaacagtggcagaattgccaggtaagaaagggcttgaggttcttatccaaggtggggtcattgatgatgttgcgagacatctgcttgagcaatatggaatcccaaagagatacattgaagttcttgataaaaccaggaaataagaagtgataaatggttttgcgagttaaatacatcgatggtgttgagataagatagtacggtataagttagcggcattttttatgtcgaaatctctcggaagatgatcattgtggcgcttgttgcaactgcaaaaggagctttgattttgtttcatcatatnttgtgatacaacagtaatgggaagaacggcttgaaatatcaaaactactatcatc

SEQ ID NO: 239631 - DNA, 388 bp, Gossypium hirsutum
  unsure (1)..(388): unsure at all n locations
gtcgcgttttccggggaacatgttcacttaaagagaggtgttgtcttttggaaggacaggctgtacataagttggttgctctcttggatcacaccaacgcaaaggtggttgaagcagcacttgctgcactttccaccttgttggatgatggtgttgatattgagcaaggtgtgtccgttttgtgcgaggcagagggaattaagcccatacttgacgtgttactcaagaaacaaacagagaatttgaggagaagagccgtttgggttgtagagagacttttaaggaatgatgatatagcctatgaagtttctggagatcaaaatgtgagcactgcacttgttgatgccttccaccatgcggactacaganacccgcagattgcggagcg

SEQ ID NO: 239632 - DNA, 388 bp, Gossypium hirsutum
  unsure (1)..(388): unsure at all n locations
gaacagatttgtaaagccccaatgtttctatatgtgtggtggtttgttaaattatatcaaaattaagtgatttactctagtaggtggctacttcagtatggggttgaggtcactggttcgaatctctgcgtgggtgtggggtagttttattttattaaatgactttgtgtactattcagttgggggagcttgtgttgtaattaaactctactattccattgctcccattttgcatacattcctttgttttttttggcacttctagtgaaaaaaaacacacaaaagataaatatcttaaatttgtttcattatcttttttccctttctctaatctttgntattttcactcggcttttggttttggtcttattcattctattttttttgg

SEQ ID NO: 239633 - DNA, 318 bp, Gossypium hirsutum
cgtcaaactagccataaccattcacgccttcattctcgactcccttgattttctcaagctacctaatattacattaatcaacttatccctgtcattaccaactgggtctgcaacaaaagaatacttcttttgcatcctttgcttctttccatagtcctccaaatatttttcggtcttcatgctttctccagcagcaccagacggcttgacatcatattcagaacaatcaaccaaaccctcagagttcgctgaattatctgttttatccttaactttcttactactgtaccatgaatcaaagatttgcagcaaagagct

SEQ ID NO: 239634 - DNA, 342 bp, Gossypium hirsutum
gtctggtcttaagtcgtatggttctctgccgaagcctcggcctatctaaactgatcgagagaaaaacactacacgtgtaacgctcttaacgcctactgaccgatttttactcatatattcgatttttattgagatttattttttgcatgaattttcattgaaaatggaaacatcacctttaatatttagaatttgtgatatattcggtatttactttccttttggacaaagatccctgcttattggatagcttgctttaagataaaccttggggctcatatttattaaatagggcctgtgattggtgatcatcatcattagaaaaagtagacaaaaagaaat

SEQ ID NO: 239635 - DNA, 293 bp, Gossypium hirsutum
gtaactgtttctatggcatcggaagctcaagataatcgggcaaatgtgtcttcatgtctgggtgaattggatgaagttgcaggatcttctgcagcagatgggcctgtttcttgtgattcagaggcattgatgctttcttctgtattaacttcaaattgtcagttccctgaactgactaatggtatcgtttgttgcacattaaatactgaggacccagaaattccttgcaatgaagatgtgttctccaaacagctgtgcccgtcagttgtttcctcaacacaatacgttttcaa

SEQ ID NO: 239636 - DNA, 399 bp, Gossypium hirsutum
cttccagtgcttatttttttgggttcgctgtcgaagcctcgtcctatctaaactgatcatacgtataaaaccttcccttgaaaccctttgatacctcacgatcccattctaattcgatctttgctttagcttgagattcttcaggtgctgcaaggagaatgtggctgatgctgcataaatggaagcaggaatacctttgcaactataaatctatcacatatcttttggggattaatgatacgttcttgatggtgaacccaagaatccaacatcgtcctaccatctgctataggcctataaagccatctgatttagagaccttagaacgaatccacagtgacgtattttctatcaagtatgagtctgagtttttccaaaaggtcgtgaatggatgtgatg

SEQ ID NO: 239637 - DNA, 146 bp, Gossypium hirsutum
gttgcatcagactaaatatgcggtggtgggggtaatggactagagcatgcggattaattctccaagcgcttctgatgaatgcaactatatcgcaacatccccattactccatacttggatttcgacgcttctcgaatcactgacat

SEQ ID NO: 239638 - DNA, 387 bp, Gossypium hirsutum
  unsure (1)..(387): unsure at all n locations
aagggataaactggaggagaatataaanntgccacggcccatattggnnggatcaagaaacaaaaagnnttaagcttgtctcntttaaaagaaaatnncagttagcccgcttaaaacaaacgatgtataacccgccatggcactttaatcannccgtacctctcgnnactgaagaaagtnncgttgatccctttaagcccnnctttgccatttcttagtacgaaccacnccaagggtagactcggacacacaaaaacactcagtttcaaggggttggagaaanntattttattggaaggcttatcacttagttttgagaagagccaaggtggttcccgatagaagcttcgattggctttatacatnagaggagaaatatgctgcacc

SEQ ID NO: 239639 - DNA, 320 bp, Gossypium hirsutum
  unsure (1)..(320): unsure at all n locations
tggcataacntgaatcctttgccgggaaaaatgatatctccggcggccacacggaagcattaggaccttgaactcctctgacaatcccaaagcttggatttttgatgattatcgtttgacagaagacattcctgtccctggcaggtgatcttccctcactagacccttcagccccaatctggtcatcttctttccttacttgctctactcctcttagaggcgaactcactgtatcgctagcgaattcagacaatgcttaatgcaacacgctcccgaaaacggatgacgactggatcatccagtgcatctgggtccaaagc

SEQ ID NO: 239640 - DNA, 359 bp, Gossypium hirsutum
tcgtgtttttttttttttttttttttttttttgttttttttttttttttttttttttttttttttttttttgggaaacaatcaaatctggcttaaattatgaacataaaacttcctaaccactgctttactatacacatacaacattttcatctccttgtttaagatagatacatacaaaagccccccccctacctttaacggtccacattaatcgaaacgaaaattgttgcggaaaccaatgctaaaacttgcctctcctcctgtatgagtttcaatgtaatcccagagcatggattcttctaacaagtgacaaaaaacaagcatttttttctttccattcttcactaccctccttcc

SEQ ID NO: 239641 - DNA, 276 bp, Gossypium hirsutum
ctaatttgttgatactcacaccaatcgcctgagcacgacgcgtactagaatgaaaatacctccttttctccataagggaaaagcctagagggcacgagttacatttagccgaatattcgtcctttcctgtgtggaacgggcaactcactgaggataacgcccatctacttgagatccgctagcatgattattaacaggataagatacctgagaagggctttatctactgagccgattaaaatgcctcaatgggctatgtgcatgtctactcagagt

SEQ ID NO: 239642 - DNA, 303 bp, Gossypium hirsutum
ccgcctctcctcatcgctatcttccctctcttcagcttcatctacctcttcatcctccacatcatcaactatgaatccatcattctcatattcatcttgcccctcgtcgtcttcttcgtcgtcgtcgtcgtcagggtcgcggccattgagtgtgtctccctcaatgggctctccatcttcatcgagttccaactcctcttcttcgtcagataccacgttcttgcccatagttcagaaaagagaaccaatgcagagaaaatcagagaaagaaagacttcaatctgcgagtgggattgaaaccac

SEQ ID NO: 239643 - DNA, 363 bp, Gossypium hirsutum
cgaggatgaccagtgggaggtcgaacgcagataccgtgatttctgtactctctatcgtcgcttgaaatcaatattctctgaacaaggttggaatcttcctcctccctggtcatccgtagaaacagaatctagaaagttatttgggaatgcgtctcccaatgttattgctgaaagaagtgttcttattcaagaatgcctacgttccatcatatgttctaggttctcttctaaccctcccggtgcattgatttggtttttgtcacctcaagatgcatttcctggcatccctccatcaaatatccatttgtctcagagtacatatttttcaagagggcaaggcacagaaaatatttctcctttagg

SEQ ID NO: 239644 - DNA, 262 bp, Gossypium hirsutum
cattggcctccgaatgtagaggattcaagccttgcttttggttgggaaccggatgatcgtagaagtcataaatcatcttctaggagaaagaaaaaatcttcacaaagtaagggagatgaatccactgagtctaatgattctagctctgagagggaacccgaagagggagttccttagaaaaagccccaaaaggagtcattacccttaagaaagggtggcattcgcaatattaattacctttcttctaagaagaatggggatt

SEQ ID NO: 239645 - DNA, 366 bp, Gossypium hirsutum
ggatactccataggcaggatgaagaaaatttaactggtgaaaatggtgccgtatctccaaatgggcagactgtaaagttccagcctttacacaatgagcaccagatgatggaggtgaacacatcaccgaggcgggaacatggcgctcctccttccagtgcattacacagcagtagctcctccagtgagatttcggaagtgactcttccagaagtctcaccagcttcttggcggtcatatctgcaagcagaatcaggggttcccgactctagtctgtcaactgctgctgctcaattaacaactgagacaagtgtgcataaatcacagaaagatgcaattttccgtagcgttcctcaaatgctaggat

SEQ ID NO: 239646 - DNA, 281 bp, Gossypium hirsutum
cccccggctcggctgaaataattcacgacttttgctttaagctcgccaccttgaatgtgcagagggcccattactgtgagggaggatatgcccttcccggatagtcatcgaccaccgatctttgatcctcgcatttttcctccgatctggtgatagaacccgcgatctcatgcacttaccgcgacatggatcatgaatctgataacacactcctggaccgacttctaacgcattctctatcaatatcccacatgggttcctactactcgcgaaacttacct

SEQ ID NO: 239647 - DNA, 349 bp, Gossypium hirsutum
tcggtgcttgattagatatcttggatgttattctgatgttttgcctaggtttagggtttttgttacaatttcttccaaatacttagcttttatatttggttaatagggaaggaggagatggtgaagaaaagaagcaagaatctggttctttaccaagtggggttgtaggattaggaatgggattacctgacttgaagagcaagaaaaagggaaagcaaaaggtgtcaagtgaatcccatgtcacagaggctcttgataagatgagagaacaaaccagagagactataaaaggattggaatcaatgtcgaaacctggaggagatgattttggagaggatggattgatcga

SEQ ID NO: 239648 - DNA, 281 bp, Gossypium hirsutum
gagtattgtaaaggcaccgctccaattgctcctatatcaaactactggtacggacacaaccgttgatatggacacacaatatgcaagatccatacatgaacaactgctcttgcatggctgcccactgaaataattaaacctttaagctactctgtgattttgaatgatgtatttgaaattactacttacaacaagctcaaactcatacgattttaaagggatgagtttatctatataatatgaaaacagtggctcagagctgaaggttaacttcgatggca

SEQ ID NO: 239649 - DNA, 268 bp, Gossypium hirsutum
agggggacgaggacgttcttttagacaatattatatatatattataatctaaactacagaatctcaaacagtccaatataaaactcgaaggcatttccaaataccttataattactacaaactttgacataaacacaacgaaaatctcccaagattgatgccaatgaaccccctcgtacagatgccaaatatatgtactttcaaatactgttgtatatggtgacccgtaccggaacctttgatctttgatgctatgtcctgtaatgac

SEQ ID NO: 239650 - DNA, 373 bp, Gossypium hirsutum
  unsure (1)..(373): unsure at all n locations
gctagttgaagggtgagagtagttacaatgagagcccaaaacatgaaagccatttcgagtgcacaaacaccagctgcctcaccttccagtacgccaaccaccaccaccaccactccaccttcaacttcgccaccacctacaacttccgcaccacctccttcaacaacccctccacctacaacttcagcaccacctccttcaacagcaacgcctccaccttccaccacgcccatcgcgccagctcaaccacctgcaacaactccccctcccactgttgcaccagctacaagcccaaccgtcccaccgncacaaactccaccacctcaaccacctcaaactcctccaaccacagctccagctcaaccgccagcat

SEQ ID NO: 239651 - DNA, 366 bp, Gossypium hirsutum
cagcatgcttttgtttatcaaagtttttgtttgttgaaaaggttggtgaaatgacatttaaataatggtttgctacgcaaataagagctattggttttcattgttatttccctaccatggaatttgttgcttatataatatcagagtaggctttgtggaaggcatatggctagtaggagttattgatgagttgcgaatgcctgaaaatggaagtgatagaaacccgatattagtagacacaaagactcgtgtacgagacactcttcctgctgaaccacaaagcagaaatggaaggttggatattttactggctttctgtataatgcaattattatcaagatttgatatatatacaatgcatcagaa

SEQ ID NO: 239652 - DNA, 368 bp, Gossypium hirsutum
tgtcttttcattttgttatatagaatacaataatgtcatcaccaccaccaggggggactccggcgccgtcatcaccaccaccatcaacaaacactacgtctccgccgccatcttcagccggagctccgccgccgagtagtcctccttcccaatcgccgccatccaccgcaaatccgccgccaactaccactccttccacaccatcaccaaccgcagcaactccgccgccaactaacactcctacaccaccaccaaccgcagcagctccgccgccaactagtcctccctccccgccatctggtaccccatctccacctccagccaccccatcagcttcttcttcttcaagcaccacttctttccccttc

SEQ ID NO: 239653 - DNA, 338 bp, Gossypium hirsutum
  unsure (1)..(338): unsure at all n locations
gcactaggttttgccgattttttttttnnnanggttttggtttttttttttttgggggggttnnnnaggatcattttgcatttggacgtgatatacaaataaggattaatttgttcggttgccaatctgactcctattacagcctgcgacaattacatattattttcatgtcagcttttggaatttggaacataattacatgaatacaaagactgatccttttgtctcggtttgcagaaaggagcataagcttagacataacttgaaaacaactcaaaaaggacatcttcaacccaaaccaattgtatggtaattgcagagccattgcaataagactt

SEQ ID NO: 239654 - DNA, 261 bp, Gossypium hirsutum
  unsure (1)..(261): unsure at all n locations
ctcgagnttttttttttttttttttttttttttgttttgttttttttttttaagaatttcaatgcttcagcaaataaagtataaacccacaggaatgggaagctaaacaaacctgataataaaaaaataccttttttatttgtgatttgataaaaacaccggtatatattgcctttttttttactaagttgcttcccaatcaaagggctaaaggatccccaattattatatacactttgattttaatatctgggggatccc

SEQ ID NO: 239655 - DNA, 232 bp, Gossypium hirsutum
acggacgagactgattgagaactatgccattaaaccgcaggagtagagacatagcattcttggtacatacaatggcgtaaggacttgcaggtcagagcgagatttgtctgccgtaacacgacacttgttcgcaacgaagaccttgttttgcgcaccgacatgatgagaaaaaagaatcattaagccaacttctgggcaacctcatagggatctagttattggcgttcatacc

SEQ ID NO: 239656 - DNA, 354 bp, Gossypium hirsutum
aacggacgggtaattaaattttttttaatcacaaccacttttttcatcttttttcccaaaacacaaatcaaaatttttttaaaaaaaccaaatctttcaaaacagtctcaaaaacatctaatgacaaaaaaaaaattgaaaaaaaaataactctcaaactccccgaaacaactacattaaaccaaaaaccctttgcataggaataatatatcaaaccacccttccccgtaacaaacgacccctaaccctttttttgggatttaaaaacaaacccccatttttttagaacaccatccccctgatacaactaagatccttctctcaaaatactcacatttaaaacacacctttttc

SEQ ID NO: 239657 - DNA, 350 bp, Gossypium hirsutum
ctttctttccgttgaagaagtagaagtgaaagaggatatgaagggaaaatgtcaagagaaaaactaagaagagccgcacttcctcctgttcaagagaatattgataaattagagaaagctataaatgagggtaatttctatggagctcagcagatgtacaaatcaataagtgcacgatatgtatctgctgaaagatattctgaggccttggatctgcttgagtcgggtgcatgtctccagttgaagcatggccaggttacttgtggggcagagctcgctgtcttgcttgttgatacacttgtcaaagggaaaatctccttttatgaaaacatctctgtccgtgttaggaa

SEQ ID NO: 239658 - DNA, 378 bp, Gossypium hirsutum
  unsure (1)..(378): unsure at all n locations
tagccataatcttttctgaccctaccaatttctaaaggcctgttctttttaaggtctggtctagattttttaaaaaagagtgtaatagtcttccaacttttcctataagcttttttagtaaacacatataacccctctatgagtttgtcatttaatataaacatttaactcctctgttcttcatttaaaaaattaggttcttttccttctctttttttcatccctttattcattattttcttatccgattcttttatntaatctcttcttttttcattatcccctattttctctcttttgtaatatcacaaaataatcccatacatttttccctttattataccctttttatatttttttctttcttctttattattt

SEQ ID NO: 239659 - DNA, 328 bp, Gossypium hirsutum
atatcatacctttatgggtgggagacttaaagtgatgcgagaatgaatgttaccctcattaatgtcctgcaaattacccttccttaagtgagaaaaaaccctccgtaatcgtactatattaacatttcatggacactctccactttcatggctccgcgtaaaattactagagaaagtgccccgatcttatataaaacaatatcccttctagagataattattatgcagctacaagacattggtgacaacataccgagttaacttttatgcaaatatcgaccagatgcaacgattttgattggtgtgttgcataaaccaacataatttt

SEQ ID NO: 239660 - DNA, 270 bp, Gossypium hirsutum
gtcatagcttgtggtgttgtcaatccaaaaaactggagagtctcactcttggattgaacggaccaaaaaccctgaaacaaattgtctacaacagccggtgcgcaatccacacaaagtacaagacaaaaaaatcgccttgcatcactccaaacatagctctcaaaaaaaaagatgctatccgcaccagacaaagctacacaagatatacaatgtgttagacaacacatggggcaccgtgcattatataatgcagcaactttctcatatttg

SEQ ID NO: 239661 - DNA, 357 bp, Gossypium hirsutum
  unsure (1)..(357): unsure at all n locations
ctgaaattttggatttcccttgattctaaattcaaatgattttgctctgacagaattccaaatcatgttctctattctttttcctatgttttggtattttgcatcaatgtagagattcttatggcaatgcggatgttgcgattgaaatgtgtagctcaatgggtgtagaagttacagacatctgcatggagaagcaatcagattgtgctatagtttactcgaatggtgtttcaaatgatgaaacatttcatagtcatcacaatgccatgcagtcgtatacggatggngatcccaagctccaaggtacagatgaaggcactgaagcaaaagaatatgaggtgaaggaatgcactactg

SEQ ID NO: 239662 - DNA, 401 bp, Gossypium hirsutum
gcatggtcaatatctcgggaagttgaatggtcttcacccgtcaaccacagtaaagcctgagcagctgcatccttttctgcaagtttcttgctgctacaaggctgcccaacaaaatccagcccattaaagatgactgtagatcggaactggttgttctttagttgctttgtcttgtaagtgggtggaaggtaatacccctttagaggccaaaacttaagtgaaagatcccatggaggcagaagctggagaaaatggccgatttggaaagggtgttacctttgtcggctctcgttcaaggtgagtgctattacttcatattttgttgctactggtttagccataagttataaatcaaaattttttttatcgaaactaggagttgacaatagttatagatttat

SEQ ID NO: 239663 - DNA, 265 bp, Gossypium hirsutum
ccctctcatcccaattcttaaccataaaccaacgtggcatgggggttatactcgaatttttgtgatactctttctctatgctatgttctttcatacattattgctaatctactttcattgtctattgacatggatcaactatattatgctgtttcaacatgtatggaagtcttaaataaatatgcactatgcgttctatattttgaaatgggactactgtttgtgtcaaaaataaacaacattattcctgtaagtgaatctgtct

SEQ ID NO: 239664 - DNA, 261 bp, Gossypium hirsutum
cagcttgaattcatttcctggtgaaccgtatcatgtggggagtgggatccccccagcacctgttcctgcaccttcagctgatacaacatcaggtatgaattggtaaatctaagtgaacgaagtaaagccatgttacttggaccgaagtgtgagtgttgaatataagtatgtatgagtttgacatgggcatgctaaattatcccatgttattatgtgtctttagcgggtcatatgctcacatgcatgttcgatgggtacaac

SEQ ID NO: 239665 - DNA, 228 bp, Gossypium hirsutum
gctgagctctttcccccggcatgtgcatgtcatatagggtataccccaaacaagcgacaaacgggaccaagggcgcatccaacccccaattccccccattaaagcacaactatacagatcctcccgccctgtctaccaaccacaaccctgacaaaaccgttaccgtccctaatttaattcttgctgactaaataccactttagctatcctggttattatccaaatagc

SEQ ID NO: 239666 - DNA, 396 bp, Gossypium hirsutum
tctttctttaattttaagctttgggggtctcttttgtctgttaaatgttttcaaccatggcatttgatggtggggtgggtttcaagttgttcatggacagccaagctgatttgtcattggagattaggaagaagaagcttagtggattgcaaaagagagaggcacttgaaaaagaggtttccatgcttcaaaatatgctaaatcaagaagaaaaaatgcatgagattcttacacaatttcagcttcaagaggatggctcttccatctctatcccagatttcctccctccgaaaatgaaggagctattaacagagctggctatggtagaaagtgagatagctcatttagaaacccaaataagccagcttaaacatggtctaaaccaagaacatgaag

SEQ ID NO: 239667 - DNA, 251 bp, Gossypium hirsutum
ctattgcttgataaaaaacactggtagggaaaaccgaaaccaaaatctcttttctcttcaatgggtgatgcttatgagttaattatgagccgcatcaggagtaaccccttacactgttcctttgtgtattaaggtgaaattaaaaggtaattacacattgtcgccatcaaacatttgtaaatataacatttatgatgttataattcaccgccattgatcaagttcctctctttgttaaattaccatgaatt

SEQ ID NO: 239668 - DNA, 325 bp, Gossypium hirsutum
cccatactttctgatgatactaatgggaccattgcggcaggcgaatatcttcataaaggggtttatcgtcccaacgtgtacattatatatccctgcaacaacgccatgcattccttcaatacaggaatttatggcgcatcgcataaatgttaatactactcacttattttacggtactggatacaacgctccttttcttatttacaatagactgaacatgatgctgcatatttacttggacctattcagaccatctagtaattctatcttctttgatacattggtaaagaccctctttaacataaaactggaacacatctttact

SEQ ID NO: 239669 - DNA, 288 bp, Gossypium hirsutum
cttaaaggtcttaaattggcaaacaggtgaaaaacctttcggtggaatgaaagaaaatgggttggattttaaccgaatcaccccaagtcttattatggccggtaaggggcttgaattaaaagggaccgaccttatggaagccaccacttaagcttaaaactttttactgattttagggaaatggatgtagcatgccctaccttattgacaatagatgaaaaggtgaagcctttttacttggaccaattgaaaccatttggttattttatttttaaggattcctttttg

SEQ ID NO: 239670 - DNA, 402 bp, Gossypium hirsutum
  unsure (1)..(402): unsure at all n locations
gtcgattccgatatccatggctggaaacttccatcaaatggatactcaatcggcggcggaaaaggccgtttcggttatcgggtatgggtacgatttatgtaatgatttaaggttatcggcttgtaaacctggtccttccgggtctagattgattgaacttgactcagtggtgagtcgggaactggtttttccgggtggggttgctgttaaaaacgtgcccaattcgattaaatgcgataagggcgagcgtactangtttcgttccgatgttctttcgttcaatcagatgtcggaaaagttcaaccaagatctctcattatccggcaagataccttcgggtttattcaatgccatgtttgagttcaagggttgctggcaaaaagatgccagttctacaaaatg

SEQ ID NO: 239671 - DNA, 396 bp, Gossypium hirsutum
  unsure (1)..(396): unsure at all n locations
gaatctctgtaagataaaaagggtcattggtgggtgttttgtcttgaattttgattganaggaaataattgtttataaaaaaattgtgtacaaagttacaaaatagcaaaggaaatggaagatgctttgtgaataaataatttcgccatcatttgacttggcaaaagagcatgtttagttggtttccaagtgattaaatttcaagattgaaacagagtaggccccaaggaaaagcttaatttcagtagtttaatgactttgtgcggcctaccgacaagaaacaaagcatatttacgaggaagtatatgattctcaaagagttggggggtgacaacattattggggagggggggttctagaaaacttttgatcaaaaactgacgtatgggtattgat

SEQ ID NO: 239672 - DNA, 328 bp, Gossypium hirsutum
ctagtctcgagttttttttttttttttttttattaaattaagataaaattcggttcggttcggttcggctcttttctgttctgttttaataatatttgtggttttttttttttttttaagttatgaaccgagaaccgaatgaatacattacattgatattattaatctaatcaaaaaccgaagcgaaggctaaattcgaatcggatttctgctaattttaggcatttttctcagcccttgtagatatcacacatcagcaaacacatggtattctttggaatcaacagctatgagcctcaaagatgcaatcgttgctgcaatggacatg

SEQ ID NO: 239673 - DNA, 400 bp, Gossypium hirsutum
  unsure (1)..(400): unsure at all n locations
caacagtgagaaggaggtgaacattgagcagccagtgcggagaaccaggaagatagcaaaatccggccccctggattatagagtacaagagaagttgcttgcccctcctaggagcctaaaattgtctgggccactagacagaaaaatgcaggagaaactggtgttcaactataagagccccgtaacatctggtcctattgatattgcaattgcacaagagaggttgattctcacaacaaataggagcccaaaactatcagcacctcttacttatgtaagacctccaagcccaaagattcatggtgactactacaaggaaaagacaggtggngactatggtgatcagacattgtgggctgcaatgtttcaggacatgaaacccacttgacttcaccacatg

SEQ ID NO: 239674 - DNA, 410 bp, Gossypium hirsutum
gaagattcagttgtgaaatctgaacaaagtcaaattgagaatgcgaaggaagagcagagcatgttaaactccaatctatacgctggcctgcctgaggatgaggtcaaacatgaaactgccagaacaaagaataataaaacgagagtatccaaacatgtatcaaaacctgctgcagcaaatgttcgaacgaagcacactgttccgcagccatttgcccttgcaactgaaaagcgtgcttcatctggacctcgtcctgctgtgtctgaagctaatgctggaactggtttgaacaaatcttctagcataaattgtgcacttcatctaaacacaagaaaacagaatcagcagccccaattggtcttgaggaagcctctgcaacctaataacaagaagcattctgatgatgatga

SEQ ID NO: 239675 - DNA, 140 bp, Gossypium hirsutum
ggaaacttagaaggggcgattaattgactgggaaaaaaaaatatccattttaataacactgaaaaagttttgggcttttagatcacaaccccaaacagcagggaatttgagattataaaaacaacctcatgccttatctt

SEQ ID NO: 239676 - DNA, 399 bp, Gossypium hirsutum
agaagatcgaggcatcgtttgacacctggaactgtcaaatttgcagcttttcatgttctctcactggagggaagcaaaggattaacagttctagaacttgcagataagattcagaaatctggacttcgggaccttacaacgagcaagacgccagaggcttctatttcagttgctttgacaagggatgcaaagctttttgaaagaatagctccttcaacttattgtgtacgacctgcctataggaaagatcctgctgatgcagaggccatactagcaacagcaaggaaaaagattcggcaatttgagaatggatttttaggtgtagaagatgctgatgaagttgaaagagatgaagtggaaagagatgatgttgagagagatgaagactctgaatgtgat

SEQ ID NO: 239677 - DNA, 394 bp, Gossypium hirsutum
atttttagttagcaggtttattttttatttcaaatgctaaaatttatttttattatcgaatttatttatttttaatcatgtaatattaaaaagttatatataagttttttttttcatctaagcaatctggaatgcaatccaaaatttcgaataatattttcagtttgttaagagccccccgcggtcttgatcttagcagagaaacgagttcgttaccatttcattattgctagccaaatcgtaccggcgccttctcataatcttatttgccggtgcatggacgctccgtggatccatctctagtgcacgatttcattcataactaatggcttcgtggttcaaagtcgccgaagatttatttgaagttgtagatcgaagagcaaagctggttgct

SEQ ID NO: 239678 - DNA, 184 bp, Gossypium hirsutum
ccgccagcagtggttggaggattaacacgagcttgatctggcggaccatctcccttctggaaaaacattctcaaattacaacaagacttcaacagatcgttctcacatttttaatcaaccgtgtctggcaccatacaacactattcgcaagagaactcactggctcatgcacatgattcaccac

SEQ ID NO: 239679 - DNA, 312 bp, Gossypium hirsutum
aaaagttattgttttgcatgggttaacctcagcccatgcaaaaatcaaagtaaacacgtaagcttaaagacatgtttcaagtggaaacctctttttcatatcacccactcgaaataaactttttttttttttaaactttgctgaaagcattcccttcagttcttccgccgttgttgccgccgttgttagagttggttgagttaggaatgacggcgtttacatccgagccaagcttggcaacatcaacgacgacgactgggtggtccgataattgaagcttggggtctgattcttccacttgtttcttgggat

SEQ ID NO: 239680 - DNA, 199 bp, Gossypium hirsutum
gcgggatgtggcaagcttacgtgactgcaaccaataaagctctgacatggaatgttgaagattggatccctcccgctgaaaaatacatattgaatttgagttcaaaagaggagctcaaaaaacggcatatacattctgatgctgaatgcgtatggtcgtgggccgctacataggagatcatagactatgctaataaatc

SEQ ID NO: 239681 - DNA, 367 bp, Gossypium hirsutum
caaaaaccaaatcagggctatttcatgcatattgaagggcgttacccaattctcatatacctaacaaatatttttctctcctagcttttacctttctcatatatgccccttaattacagaactcattcagaactcaacacagattcatgccagcaaaacaacatgccaggaatggagaatacaaactcattcaatgtttttttgcctcctcagcttagctttaacaaacatcgcacctttaattctcctgacagcagttcccttactaatctatcttgtagactcaatcttaacgaatatcactccatgcaaagctctattatatccttcttcttattcttcaaagcaacaaatgtattttccccac

SEQ ID NO: 239682 - DNA, 207 bp, Gossypium hirsutum
tagaactagagcatccggatgcctgcggctgttcggatccagaacttgtctaaattctatctaatgcaacacccgggtcgttttcgaggaaggggctcgtctatgattctggcgcgttagcttgaaaaacttaactggccgatttatatatcaatgcagtgcccctgcttcattgcttagacaccaaatgcgctttgtcccaaatgt

SEQ ID NO: 239683 - DNA, 141 bp, Gossypium hirsutum
aaaatgttggtcaaagagtcgggtggttacacctgcgatctttccgaggaattattgctagtattaccctccgacccttttgatcaacttgatgtggaccgcaagatcaccatcattgatttttccacccgcgcgttttta

SEQ ID NO: 239684 - DNA, 206 bp, Gossypium hirsutum
ttttctcacaacaaaactgaaaatgtcttgctgttcaggaaaatgtggttgcggccctattggcaggggtgccagggctggtaccggtgccgtatgttccctgaccttattggagaggcctccacctgaacttttggtcttggtgtggccactcaaaaaaatgcactttgagggatctgaaatggaagttggggttgaggttgatt

SEQ ID NO: 239685 - DNA, 286 bp, Gossypium hirsutum
cacaaatggggtcttgcgattgtcactgcgagctttaagggacggatgctgacctacctaaagcacgggtggccaatgctggtataagagcctcttgatccctgacgatacagcgacacatcccatttacacttttgggtttgactgggcggcttaggttataacacatgcatgattttgaacactcatgcaagctgtgatggactcattcgaacctacactaatgataggctaccaatgcgcgtgtaagaacctatccgcccctaaagatacagcggccaacaca

SEQ ID NO: 239686 - DNA, 352 bp, Gossypium hirsutum
  unsure (1)..(352): unsure at all n locations
gatttgggatttatttattaacaggtcatttgggcgtcaaattatcaggctcatgactcgctttattgatnntncctctttcatgttttttaaattatataaaacccctgctttgatggttaatatttttttttgaaggagggggatcaaaaaaaaagaggaactctgtggggggctctataaaaaaaatgaaaaaaaagaagccgacgctaaaacataccgacccatagacatgtgtgtagacccaaaaattctgtgtataatacaaatatgatcctctgaaacataacgcatgacaaaactagcgccattggacctaaactgtgtgataaaaagctggactataaaatca

SEQ ID NO: 239687 - DNA, 257 bp, Gossypium hirsutum
ttcggtcgcgaaaaaccgggactcagattaccggttagatgaatatgattgctggaaggactgttattttggttttagatgtggtgttatttgacaaacgctttatgaaagagcaagtgtcattcctttaacgtggtgttaaccaaggatgcatccacatgtggggttgagggaagcagactatacttattctttgatcgagtgaggcagatagaacatagaatcggggttgcacatccggcttatgataaagaaaa

SEQ ID NO: 239688 - DNA, 307 bp, Gossypium hirsutum
tcgcaccagagtttttaaacttgacaacagccaaggtatttcgtgttggcttgatggcaacaatggctcataattatatatttgatgaattgaagctttgtaaattcacatgttaacgacagggtcactgtatctttctactttgcggaaaattccaaagggtcactggcaaaaaattggtggcttgaatgtacaaagttccaagctgtaatctgtgatggggttcaattgcactgctctccattgtattatcatgaaatcaaattcactttaaaaactaacatttgagaaacatgagaatttcacg

SEQ ID NO: 239689 - DNA, 379 bp, Gossypium hirsutum
cgagttgagtcgagcccagacagtgaccatcttctctcacatagagtgggcgataattgcggcacacatgtttgtggtgcacgggtcctcagcgctcgatattggtcctgggtctgcgatgtctgccggatcaggaactctgttgcatgcatggcgttgttgtctatactgccaacatgttaccaaatttacaagatggatagctgcataggtttccaggcgattccgtacttgattacatttgtttactgcaaagctaaggatttactgtgcgctggttagtaaagattcaacttccctcatttctattaacgcttgctgcgatttcattcaaacttttcacattggaactaactattactactgcccaaaaaaagaa

SEQ ID NO: 239690 - DNA, 259 bp, Gossypium hirsutum
cttttcctttttgcatggataacttaactatgcatttttataaagaagtagggcaacatttaacacaaaattcaacttgttttgtatatagtttatgcgcccaaaaaacttacttcatataatttatccaatagagttgagctcttatacaatcattctttttggaagcttttttatttcctttaaccttcaccaatgactttcttacttacatcatactctgtgtcaattgtatcttcattttattctcatcaaatta

SEQ ID NO: 239691 - DNA, 147 bp, Gossypium hirsutum
gggagaccggttacatctcaatgggacactacgctgattggggaagcaacaaatacaaagggggcccgtatgggtatgcagaggctaacaccgaaagtgaatgtaatgaccaaatccgctagctcacccatacgatgtttaaacccc

SEQ ID NO: 239692 - DNA, 131 bp, Gossypium hirsutum
gaaatgctttttttcacgcctaaatttgctaatttactgaggcaggaaattaattttgcatggctcataccgctcaatagcttgagccatatggtaagtgggtatgggaacactggtgacttctataaaat

SEQ ID NO: 239693 - DNA, 317 bp, Gossypium hirsutum
ctgctgctcaccatattgtcaaggcattaggaactacaaaaaatcttagtgatgatttgaggaaaatccttatcgatctcgatgcgcacttgtcattgataacttcaaatatcgatagcaagggaggaaagggattcgttgaagttgaggagcgactgaaacgagtagagaggaagattgtgatttgggagtcggatcgaataatgatatgggattctggacccaaggaagctttcgattatctagaagccgtagatgaagttcagacactgatagacagtttacgcggcttatccatgaatgaaaatcagaagcag

SEQ ID NO: 239694 - DNA, 401 bp, Gossypium hirsutum
tcaaaacagagtaggaaaaaaaaagaaaaaaaaggaaaagctaagggtttaaggtttaaagcttttattggtaagtcaattaagcctttcttatttaattttaatgttttagaagctttaaaaaaaatttgttgaaataaagttgaggttttggaagttcataagtttttaagcatggttcatgttgaacaaattgttgaattagggatttaattgaatgaatttcaagttagaattgattaagggattaaattgtaaaagaagctataagttttatgttagagggattaaattgaaagaaacttgagattagggttttactacgaatatttgatggttagggtgaatatgataggaaattgaataaaaataaagtatgaatcgagttataaaagtaaatg

SEQ ID NO: 239695 - DNA, 339 bp, Gossypium hirsutum
gtttattttttttttttttactgaacaggctaggccaaccataccgtgtgcagataagcaactcatgaatcttaagaaggtcaccttacataattctttttaaccaaacataaactaacagggcatagaaacttatcctgctcttaaaccaaacacaaactaagacaggcataaaaacttatcctcctcttcacatgtagcaaaactaaattaagatttactgcaaaacaacctcgtccatgagaaaatattctcttccagtctagctagattggcgcaattcatgccgaacaaaatctgcttctgggggcactgatttataaacagtaggtcttagct

SEQ ID NO: 239696 - DNA, 148 bp, Gossypium hirsutum
ctagtgatccccggcctgatgattcggacaggtggaacttaaaactacagagtctatttggcccaggcggaagcaccctaaaaggatgttttaagggaaataacttaaccagctctagtgtttgataaagtttaaacataagcttatc

SEQ ID NO: 239697 - DNA, 284 bp, Gossypium hirsutum
ttcagattgaatctccccacttctcttgtattcaattgttttccatcagaattttcaaactcatttgggtgtttatagaaagcttgattctcggttgttatgcatggaagaagtgggagtttgtttgtttgatgtaatagtctcagatatggcattcatggagagcttgtcactgaaattggatagaacaaactggtcagtcttttcaggacttcaattctatggttgttcataaatatcgctctgggttttctataatggatattttttgggtttggtgatat

SEQ ID NO: 239698 - DNA, 121 bp, Gossypium hirsutum
agacatacataacctaagaaaaagaccttgttgaaagcaagctattttttgggggatatttccggcaaagtacttcccaacctcagctaaaacttgggaaaccattgcactcagttaaata

SEQ ID NO: 239699 - DNA, 407 bp, Gossypium hirsutum
atcttgaatggatctacttcttttgtacaacttttacagatggttggatctgccaggctgcatgaagttcagagtcatcagaatatgtctcctaatgagaactcaaatgtcagaacaagccaattccagaatcaccaaagagaaaactgtgacaactcaaatggtcctaaaagcttcacaagggaagaccttatgccatcagctaattaccatccatatcttactctaaactcagaagtaagagaaactggacagtttgagacgttaaaagaagaaacaagagtgtctgaggcttccaagacgatagatgaaaacatgataaaaagactaagtccattaacacaagaatctgcatctcaatcaatggatcaaaatgacaaaaccaggtctgtacaggtgacccaaca

SEQ ID NO: 239700 - DNA, 397 bp, Gossypium hirsutum
gggaactggaaaagatcttctctgctattgcattgaagtgctgccctagtactgttagctcatctcggactagatcgcagagtctattattgacttcatccaatgatgaagtggttgttcacggttcacctggtatggagctcaccagtgaacaaactaaggcgaattgtcactgggaaactcttgagcactatcttgagaagtacaaaaactttcattctagattgccagtaatagttgctgaaacgcttcttcgtactgatcctcatattgaattgcctttatggctggttaaaatgttcaaggaaaatcagagggaaaggccttggggaatgactggtccaaagccaagttcagcatccttgtttcgactatatgttgattatggtcgatatac

SEQ ID NO: 239701 - DNA, 375 bp, Gossypium hirsutum
ggcaacccatttttactatgccctattagtaaagcatttactttttgcatggcttgctgagcttcttgcccagacaagcataaaaaataccatcgggcaaacaatctttgatggagggcatacaccaagaatacaaggcatataccccgcctatgtacagagaacaacatgtgccctgtcgtgtaaaataccacccccaactaacaaggatttaattacccttctttggaacccccaaaaaatacctcttagttaccttgggaactcacaagatggcctacctaaccaggattggatttcaaaaagaataaaataaaagagctttcactatcctttggggataggaaaatattttacgcggaacccacaatctgg

SEQ ID NO: 239702 - DNA, 385 bp, Gossypium hirsutum
catcttttctttcttttgtaatacagctgctaagggagaaagcaagcaaagcaaacacttgaaactaaattctgcattcaactcttgaggtgcaactaacttactttgccaaatacaaagcaacaaaaaaaggaagtgaagttcttgaggaagagtaatttggagtttttgagagtttgagctttgtaaacagttattcgaccgtgtatataaacaatggatgattatcttgatcagtatttctcatcatcatcatcgtcagatgtgaatgtcaaggaaagatcatattgggtccataatgaacctgatcaaccaaatgaagtgtttcctagttcgcgcttcaatagcatcgagtgtttagctgcacaaaatacgccacctgtag

SEQ ID NO: 239703 - DNA, 145 bp, Gossypium hirsutum
  unsure (1)..(145): unsure at all n locations
gagccgggnncgaggggacgcaccacgnggaccgggggagagcgagaggagacagcgngaacggggacgaaaaaaacnncaccggaaggaaggagaacgacangcaccaaggcgggaaccccaacaacgagcgcaaccgccacga

SEQ ID NO: 239704 - DNA, 350 bp, Gossypium hirsutum
gtttctgagctagaaaattgcagttctaacagtattaatgatttggatgttaaagaaaaccatgcaagtgcaatcacaatgcctgattcttctctatctattgctgagcagcccaagaaacttgatgatgctaaaggtgaatctgtgagtttaattgttgcagactcccctcaaatagggcaggagccactggaaggcacatctgatctgcagagagaacttgattctgagactggtaatcaagcatacgggctatccccagaagcatcgactgggagccaaatgattgtaccagcatctcaaggaacaccttctagtgacgtactagtgtaagctaaaaagaaaagaac

SEQ ID NO: 239705 - DNA, 405 bp, Gossypium hirsutum
cttacacttgtcacttaactttcccacaccggaaacaagctgaacaaaatgttttgctaaaattgctcttcaagccatcaagcaagctagtgcaatcaaggataaagattataaacaactcacgatttctactatttaccaggatctaaaatgttgcaaatcaattcataacgagtatgctcttagaatgaatcacgtaagtcctacatacacaactacccaacaggataaattccgccctgtttatgtatcttcattggtttttgatggtaaaacttatcgtggcgaagttgccggaagcaagaaagaagcagaacagttagttgcacggattgccatcgagtctcttcttggtactttttcaagagctagttttcacatgtagctttgagctttgtccttgta

SEQ ID NO: 239706 - DNA, 324 bp, Gossypium hirsutum
actgaacaatgataattttattaatcacttggagatattgcatttccaagcaatgaaactttattttttgcaaacaaggggtgggatttttttttttttttgacaacaaaaagatgactgcaagagaagccaaacaaggggggggaaatatatatatatattcttattcttattcttatcattgggggcattttcatcttttgcaatgaaactttatcaagcccttccagagatgatatatcttcatattatcttttcattaaaaagcaatcatcctcatcccattcaaataatgccttttaagtttcctttttcgaacgttac

SEQ ID NO: 239707 - DNA, 200 bp, Gossypium hirsutum
cggcttaggtcttttttttaacaaatgatttccattactaggatgatttaccagtaacttgtttgggaaatttaggcaggattaggaaaacttttatcatactcagtttgttgcttgttaacttttttttaacttgatatcaacagaggattttcttcagttgtgtgcgggaagatcctttaatttgctattgcttactt

SEQ ID NO: 239708 - DNA, 392 bp, Gossypium hirsutum
gcaacaaccattctcttctctccagatgcagatctacttgggcggggtgaaattatgatttccaattatatttctcaacaagatgactcgctattgtcagacgtctcaagctgttgaagccttttcaacagccgaagagctgaggaacgcctgccctttaacattagctaaaagctattgcatatgatccatggcaacatgttggtaatccaaatccctttttgtttctgcacaaaccatggcattatgtttttcgatttcaaaatccatccattcattactacaacaattaccgagtagtgagaattttatgaccacccacgctcaaacttttttttttacggcttgcctgttttacttactgataacaatacctacaatctttcttttac

SEQ ID NO: 239709 - DNA, 383 bp, Gossypium hirsutum
acataaaagttttagaatatatataataaatatatatcgtcgagttacagagagtgggggagggggattttactaagagctgaaatgcagctgcagcaaacaaaggcccggaaaaaaacttcccaacataagttctcccatgaccttcaaccaatgtctacaaatcgtcaaacacaaagaaaaaagggaactaacgggagaggaatggagaaaccaagtagaaaaatgaagatgtatccagagtgtatgagaaaacgaccagattgtaaaaatgaacaaaacgtgtgaattagactcggactacatcctggaggcaatcataaaagtgagatatcttaatcttttccttccctgagtagattgcctctgctgctccaccttgc

SEQ ID NO: 239710 - DNA, 309 bp, Gossypium hirsutum
cccgcttctttattttctggcatttctgctaaatgcgcctgttcttgcgagaagaatgttgacatttggagaagcaaagctcagaaactgaagatggttcaaccgtatgacgtattcctttcaaatccccatgtttcagcatcaggaaccattggtgctgttttgagtgcaaattttggggagagttcggtcagattagttgaagatgctaaagatattaagcagttatcatatcataatccaactctaaaatcgtaccctctaggggatatatttgcatccatgtcatttacggcccagcacgggaac

SEQ ID NO: 239711 - DNA, 256 bp, Gossypium hirsutum
tacgttcaaaaccaaacattgataagggagctattaatgaagaagggttaataaactacagtaaaagaaaattaaaaaaaaaaaaacaatgcataaaaacattgaatatatagcatcagatcgacgtgaatagccccataattcaatttaagcataaaaaaccacactaaactcatcatcttccaatggagcttgcaagtttagatctatcaaattgttgtaaaattagcctgaatttgtagtatcatcaagcata

SEQ ID NO: 239712 - DNA, 317 bp, Gossypium hirsutum
attttcttctcttctttttctgtttttttcttcttttcaaggcactgttcttatgatacttttttttttgagaaaaggatggcagatcatgaacggaggacagaagccatgaaaaagcgaagatcgagcagcggtgtagccggcggtagcgatcggaggtttgaaaaagtgcttgaagagatcatggaaggcgaggctgatgatgatggaggcagtgcttttcagtatctgtcgtgtagttgcctggtttgtactacagccaaagctgcatagtttttctttttaacgaagtaaaaacaaaaataaataaatacatg

SEQ ID NO: 239713 - DNA, 329 bp, Gossypium hirsutum
  unsure (1)..(329): unsure at all n locations
ttgcactgtgttttttcagaagggtgttaaaacgcggagatatcaggccgaggggggcctagtacaccatctccctcttccttacctttgaaaaacagaacaatagcttgtaaggctattcatgttcttatggagcatcataagacttccgcaccgccttcttcaacaaccccttcacctacaacttcagcaccatctcttattccataggcataatttgagaaaccttacacgaatttgatagaacaggattccctcacagggtgaacccatcattttcaaaataaatgattttgcgatagtagcatcaatattctncacctttcttt

SEQ ID NO: 239714 - DNA, 352 bp, Gossypium hirsutum
ggaatcttttttggaaaagatagcggagaagatccatggtggtgatttatcgtcatcgttgggggattcctattactactagttatccaatttctctcttatatacatggtttttcttattctttatattagatctttatctttaatttttattttttctcttcttttatttcattttctttttttttaattactgtttttctcttctatatattatttattttttttttatttattttaatttatttatttatttctttctcttttttctttttttcttttatattttttttttttttatttctatttatattttttttatttatattttttctttattttttatattttt

SEQ ID NO: 239715 - DNA, 274 bp, Gossypium hirsutum
gatccatggagggtatgccaggagcacccaacatgcaaatgtattcaagggaggagctaatgaacatgaagaatttcggtggagatgccgacgatgatgaagatgaagacgaggaccaatttccatcgaatttgggaaaagtgttgagagacaaagaaagtaaacaaaccgattggaaacaaaagatcatcaaaggtgtaaaagatgcaggtgaatcattgaagagacatgcaactaaggtgtcttttagggtacatattttttggtatggatt

SEQ ID NO: 239716 - DNA, 394 bp, Gossypium hirsutum
agattctgagcaactagctattctggggatagcatttacaattatggatgaactgttaccaagtatggtggttaaaatttggagtccaaagaatgaaaaccaggaaccaggaaatgaaaacattgttcctaatgcaagtactactaccgaattaaaagactggaggcgtcagctccagtactcttttgacaagctcagagatcacttctgcaggcaatatgttttgagtttcatctattcaagagaaggtaaaacacgattaaatgcacaaatatatttgggtggagatggagaagattcacaatgggacactctgccttctttgccatttcaggcattatttgctaagctacagcagttagcaaccgttgctggagatgttctacttggaaaa

SEQ ID NO: 239717 - DNA, 322 bp, Gossypium hirsutum
gttctgtgcttcagacttcaaagctaatgggaaatatatattgtttaaagaaaaggaacttaatgtcacattcaactgtgaagaatgcacatctcttccagctggtactttcaatacagataccaataatgataataaggggaatgaattgcgtgttgctataattgtactgattgttctagtggcttcaactgtaacaatatttggactgatgatggcttataaatactggcaaaagaggaagaggcaacaagatcaggctcggttcttaaaactgttcgaagaaggggatgacctcgaggatgaactagagcttggtaat

SEQ ID NO: 239718 - DNA, 319 bp, Gossypium hirsutum
tggagaatagctcatctgatggaagcaccaccaaattgtcactctctttgttcaccttccttctgttggcaacatcatatagttcaatcttcacatcacactgaatcttctctagtataccctacctctcatgacacttcatgttagcaaaaacactatattgtattttttttatttgttagtgtccattctcctttggttgaggatacatgtaattttttttatccccttcactactccagggtcctatgattttgtatagcttaagagaaatatggcttctcctcccttctcaataaaagattgcttgggattactt

SEQ ID NO: 239719 - DNA, 244 bp, Gossypium hirsutum
tacctccttttttttcacataccgaactctacttgggctggtttaacaacaaatgtggttgcaaaaaacattatattttcttcttacccaattcactgacctatcctcacatcatcattccatttcctagtcaataataacactatagaattgtatgaacaaattatctttttccaaaacattaacttttcctactttttttattgaatccctaacaactttaaattcattttttttctacatt

SEQ ID NO: 239720 - DNA, 332 bp, Gossypium hirsutum
tgcaattgttcaaggagccttgcagatactcactgttgcagactgtctaacaagcaggtcttcggtctttgaagcatccttgagagctactctggctagattgggcgcaactttgtcactttcggtatttggttcaagtttggataataaccagctacatgttgcatatgacgatggaattggggagccaccattaggtgtatgttctgcactagattgtttttttgtgcatctttgtttttttatttttttatggctcttttttttttttttttttttttttttttttctttttatttttttatttttatttttttttttttttttttttt

SEQ ID NO: 239721 - DNA, 187 bp, Gossypium hirsutum
tagtaattgctaatctttctctactttccgggtacaatttccttttcaggcacccctttcaatcatctgcaaaacccacgtcttctttttctctttaaatcccatactccttttcaaactctaactcttgccaacttcttttctatctcctagtacctcctcttttttattcccagtcttccaaacc

SEQ ID NO: 239722 - DNA, 266 bp, Gossypium hirsutum
gtcaatgcttttaatttaccacccgagagagctttagtggccattctaataaaaaggggctgtgaacaatttaaaactgtcttattatcatatgtaggactatttacggcctctcacttatttggttttccaaaaatttaatatttttgtgtaatttactagtttatttttttggtattttgatctattctcttttttattattttcttttttatattattttttgaactagttttattttttttacttttttttcctcttcttat

SEQ ID NO: 239723 - DNA, 316 bp, Gossypium hirsutum
tgtttttttttttttttttttaacaaacaaaaaaatcaaatatttggaatcacaatcacaaattacaaacagtaacacaagcatcgcatgcaaaaataaaatccatattcaaattcccctattaatagcccagaaaacagtctttgtctaaaaacccattgccaaagcatgaattttcaagctcactttaccagctgcattagttcccttaaccgcttgtttaggtctcgttacctaacctttatttttcgtatactcctgtatttttttttttatctgtattttttttttttttttattatttcttttttttttt

SEQ ID NO: 239724 - DNA, 300 bp, Gossypium hirsutum
tggaggtggataagaagccatcattattttctcgtacaattcaaatggaaatggcaaaagctcttgtagactttcggaatggattatacacatttattaaactattatatgggctaggcctcgttcacaatttttgacatttatagtctgatatttgttgtttactggattttgttggttcattttttttttttattatatttatgttttttatcttttatttagtcttattatattttttttatatttattgtcttgatatatatttttttatttttttatttattttttatttttttt

SEQ ID NO: 239725 - DNA, 317 bp, Gossypium hirsutum
ctcgtgccgttttccccttttgtctccgacggttggggttccccattgcccgccgaaccgccatcgtacccggtggccgatgaagcgcgaagaccggctttttagccccgtttcaaaaggaaatcgaaggtctagccttcttgagccaaaaaaaacgaaagaagagatcctcgctccttttcgatcctgacgacggaggaaagacctctgacgtcgtaaccgcgggcgatcccagtaaggtcaacgaggctgtagatggccattttggtgcaacggggccgaatctcgggcgtgtgcgtgccgagggcgcacatgga

SEQ ID NO: 239726 - DNA, 327 bp, Gossypium hirsutum
gagagagagagaactagtctcaagttttttttttttttttaagtaacaaatgattcacatttttctgtttttgcttctgtatatatccaatgataaggtctttttttttaatttattgatgcagttagattgattttcctgtgtttgatattatctccctcttagagatcagaattctggcattgtcctccttttgaggaattttctttagctgttcttcatcatgaagggagagacttcatggatcagccattgctttgatgacatgtcaaaagaagttggtggcttagattcgttttcggaacttattgatgaaggtaacaaaga

SEQ ID NO: 239727 - DNA, 326 bp, Gossypium hirsutum
cgaatcctcatcgggtctccatatctacgacctctccagcggtcactataccggttcagttcactggaccgaccaggacgatccacggatatacaaagcccgagtctgcgccatcgctaactcacccgactcggtcttcgtatcattcgattgtccccatagagaaaacagcgtcctcgttatcgacaaatcaacgcttcaggtctcatcagagctgactcgccaatcaggaagcgccgccaagaacacattccccggaaaactgacgtggctaccggaaactggtttggttatcggaagtgctgtcacatgtggggcatttggtt

SEQ ID NO: 239728 - DNA, 294 bp, Gossypium hirsutum
ccttccaatatttccttatactgaattcaactcctccaatggagtccttccaaatcaccatatactctgttctttcttggattcccttaaattacccatctttcaaaacctacactagcaccctagataccattagattccattaagccaccaacacaacagcgttaccagaaagtagtatatagggaaaaggaaaacagcgatggaggagaggcatgttttatttgggaaatacgagatggggaggctgttagggaaagggactttcgccaaagtctacaacgggaaagaatt

SEQ ID NO: 239729 - DNA, 296 bp, Gossypium hirsutum
gacaaaaaaaacacaaaaaagagtgggcaaaatattatttttataaaaaaaaaaactctttcagctactgataactgagagaaacaaagctaaagccaacggtttttttttttcagttccacaaacaataaaacaatcaacttcttttcttctctgtttcaatttttttttggcgttttgaaggttgatttttttcttgagttgaagttcttggactcggtaactcagtaatggcaattacgagtccgagtcattgcgtacgtgttttgattcttgtgatgttattatctccaccg

SEQ ID NO: 239730 - DNA, 296 bp, Gossypium hirsutum
agagaaagagaagaaattgaaggaagctcgtgaactagaagagaaagagaagaaattgaaggaagcttgtgaacgagaagagaatgagaggagattgaaggaaattcgtgaacgagaagagattgagaagagattgaaggaagctcgtgaacgagaagagaaagagaagaagttgaaagaagctcgtgaacaagaagagaatgagaagagattgaaggaagctcgtgaacgagaagagaatgacaagagattgaaggaagctcgtgagcgagaagagaaattgaaggaagctcgtg

SEQ ID NO: 239731 - DNA, 294 bp, Gossypium hirsutum
cttctttttcgcttctctcaaacgaacgtaacaggaacagtaacagaatcatgataagtggcggattccaacataaaaagttaatagattttaaggactgtgtttgaggtccgtgttttccgttttttaacctttgctgcaatttccaatacccaatccacacaccaaaatattagactgtcgtgtccctcacacactcggtagagttaaaaagacttcagagagtgaaggatagaagaagaaagcaaagggaaagtcaattgaatttttttttaaaaaatgggaaaatccact

SEQ ID NO: 239732 - DNA, 203 bp, Gossypium hirsutum
gctcataaccattaacctgccggcaggtttgctttcaacccattgcattctataagaaggtgagggacaatgtactaaacgatgcactacaaagcatgtacatgtgcaaaacaactaggggcacacaacttaatatgattacgccttattcgaatgtgatcatcatggttcttatggatataggcaagcaccgatccatctta

SEQ ID NO: 239733 - DNA, 192 bp, Gossypium hirsutum
aaaagcgaaaacccgtattccaaacagttccgttcaactgaaaaaatagattttaaaaatctaatcattaaaagcaaaatcttaggattcccaaagtccgggctttacaaaaagggtacatataacggcacgggcttacaactttgatctaaaatgactatggggccccgtgatatgcttatgcttggggcc

SEQ ID NO: 239734 - DNA, 296 bp, Gossypium hirsutum
caaggcttttattgagccagatctcgaaacagcacatattaaaatcatcaacaagtttaatccgttcactggatttcagaatcctacttatattttgaagtctacaaggttggtgacactggatcaaattaaggaagttgtatctgaggaacacaaagaaactatagaggaaacatacgacatttatcttctaccccctggtgaagatcccgaagcatgtcagtcatatctgaggatgaggaacagggatggcaaatacaatctcatgtttgaggttagatgtttcatttttaagc

SEQ ID NO: 239735 - DNA, 273 bp, Gossypium hirsutum
ctggaaaaacaaaactttatttcaggctttgatctaaacttgatttcacaagccattcatgcagggaaaacagacgtgtaagaattttatgataggaaatcatctcgtggaaatcttcattgcgcaccgctgactagaattcattgatttccactaagtttcaaataaatgcgtgcttgtgtgggactgtatgattgttttatagattatctaccgtcgacgctgttaacaagtgagaccaattcaacgttactggattcttcagctaccgtc

SEQ ID NO: 239736 - DNA, 290 bp, Gossypium hirsutum
acggaaaggagtggaagctaccaaaatcatcagactggtgcacgatgccttttccaaggagctcggtcctgtctctttaactgcccaaggtaaagttcctgtaccagatgggttaacgcttaatgagaaccttggtgatttggaaacgatatgcggtgatattgaactaccttcatcgaacacattttcttttggatatccttctgaggagaaggatgtgtcgtctttctccaaccttcagattaaagaagactcgggacaatcgaatgagtccacttctttgttagcgg

SEQ ID NO: 239737 - DNA, 297 bp, Gossypium hirsutum
ccgtgccagaaatagtgaaaatttacaatgatccaaccaaaagagggataaataatgtaaaagttactgcatccgatgatctaactcgtgaaggactacaatctaaattccgtgatttagtgaaccaactttatgacaatggcaatgacaaagtgaaatgcaaagatttcccaggcttggaacaggcattgaagaatgctaggggggaaatcccagagtacctcgaatctattgccatccaaatcgaaaaagatcgtggagaaactactgaatttgttctgatcaacattcaaattc

SEQ ID NO: 239738 - DNA, 298 bp, Gossypium hirsutum
gtttcaagctcaaattctttcgtgttataccatcttttcaattttgtcgatcaaaaaaaccttcccatttaccggagactccaggtccggtgacccaccggctatctccggtgaatcctaaagcattagatatcttttatccgaacctccctgcaccgccgccgtcgacaccggactactcttttttcaaatgccatttgtcaccaaagatagcgacagttggctgcggttgccgagcaagatcatcacacactcaatacttaccctcagtggacgttagttttgagtcacctgatta

SEQ ID NO: 239739 - DNA, 292 bp, Gossypium hirsutum
aaagactgggtggttccagatgaggtggtggagatagagaaggagaaaccgattaatgttgctaagaaaattgaggataaggacttcgagtcgaccacaatggataagtaagcaacgtggtacgtcaggcattaaagattggggtggtgtgaggatcggattaaagtccagtgttcttttggatgtggaggtggatgatgaatgtgcgcatctggcgcaatttgtgtagggattgggagatgatagaccggtggggatatcaccgtaaagcatgggcagcaaaagtgtaact

SEQ ID NO: 239740 - DNA, 295 bp, Gossypium hirsutum
tctctctctccctttctttggtttccaagatataggaggatatagcacacagcagctatgtcctctcaatcataagcagaaaattagaaaaagagaaatagaaaaaaagcgtgtaagaattaaattcctttgccaaacatcaagaaaaataaagtagggggaactggaaacgtgctctaaaggagacaagttttgctttacttgttttttttttgtatgtgtaaatctcgctagaatttcgtgtggtgggggagtttgacaagtggggaagacggtggaaccataacccagcttt

SEQ ID NO: 239741 - DNA, 274 bp, Gossypium hirsutum
atgataacaaatgactggcctttatatataaacatatattgcaaacttggaagttaataaaacaaaaagcttgtgtgaaaccgatgctgaaaggttatgatcatggagttgcataataatgacaatcaaaaagcacacatcttcaaacaatttggccaaaaacactgaacaaatacaagatgaacaaaacctaattaattagaatcttccatcctcattttcattagacaacaataagacaagttgaacataaaaactgtgaagtctcaacgcc

SEQ ID NO: 239742 - DNA, 184 bp, Gossypium hirsutum
acccaggcgaaatcgggggtttttttcgttaatttatgaatggcgggggtaaccccataaatgttgggggattcaaacgacaacccaaaccacgcctacttaccgggttcggacacacaaagtacaaatttcggatgggttcacttttggaattgcgttcgcatcgagacaatcattattcttc

SEQ ID NO: 239743 - DNA, 273 bp, Gossypium hirsutum
gagactgatgttctttttggggggaattaaatctagcaggctcttcaaccattgcaaatatttgcacctaggcctccagctgccagcaccgacaccggcaaagcctaagaataagacggctaccactgctgctgatagccccgatgtcaccccaacagataactccgacgctggcaccttgcaaaacgtggacatgaaagaagcaacccctctagttaaagcgctcccttcgccaccatgacaatggataaacgaagaatacacaggttttga

SEQ ID NO: 239744 - DNA, 295 bp, Gossypium hirsutum
cttccacgttgactgcatcgacatgtggttttatagtcactctaactgtccaatgtgtagagctccgatccaggctgttattccggtcaacccaccgaaaacattagagcagaccgccgctacagtatctgaaacagccctaccattgcctcctggtgacgatattgaagcgaacagctttttccctccttcttgctcgtcgtcttcgtcgtcgtcattggagatggaaagttgccccatgaaacgactagagctagtgggactgggaactgttgtggaggtcaccatcggaact

SEQ ID NO: 239745 - DNA, 301 bp, Gossypium hirsutum
aattagttcccgttttatgttaaatgcatcaaaagaaatccgggaaacatcaagagatcggaaaagcaagcagcgactgcatctcttccgatttcgaccattccacttctttactaatcccttccttggatgatcatcgattcaatcgaaacaacctacaaaagaatccaaatgttcccactcaaaacaggtctcatctcatcatccaaatcccatcctcaacgaacccatcaccaccaccaccaccaccatcgacaacgacaacccatcatcaggaaagacctaatgacttttctccaac

SEQ ID NO: 239746 - DNA, 301 bp, Gossypium hirsutum
aaaacagatgtcactgaaggtatgaacagaggttcacatactcctgagaagtcaccagctattgttggacattctaccaaaggaacagataaaaaagcatcgcctactggttctaatgatatgatggaaacttttaatgtagtaaaggccgagaaggatgttgaggctgatgttcgtagtcaagccagtgacaaagagaagcgaaaacctgattgggaaatggtccctgcccagaaagttgagcatatggaggagaatttagaaggtagtgagtgtcctgaaccatactgtggactatctc

SEQ ID NO: 239747 - DNA, 294 bp, Gossypium hirsutum
tcgagtttttttttttttttttttttatttacaaattgaaagcgacattatccaataacaaaaaaatcttacagacaagtacaatttcgactttagcttgtagttagttagtcaagtaaaagtgttacatgtagtcaaagttgtatggaaatttgccaaaaagccctcttcttttaaaaaaatttcatcctcccagataaaatggtttcatgagcttttatctagtttaccaactttgggtcggtatggagcagtagccaaactagtttttagggttggaccctgagagaattc

SEQ ID NO: 239748 - DNA, 292 bp, Gossypium hirsutum
gaaaaatcttatcttgtgatcatccacttggttgagggtgtatatgatattcctttcctctttctatctttctgcctgctgctaccgattttaaactaatctaaccacaaattcttcaccatcgtttttgtttggaaccctgcacctgcagcttatattgctcaggtgcgtttccaaacatactggactggttttgttttcgacttttcttgatccccacctacatgaattctatttgatcaataaccttcattatcggtgatagatttgtggtcataataaaagacaatgc

SEQ ID NO: 239749 - DNA, 104 bp, Gossypium hirsutum
cggagtcatattttgcaacattgtttatgagacttctaatgtgctttaaataactgttgttgttcttaaagacactcatattgagatcacggggtatatttctc

SEQ ID NO: 239750 - DNA, 264 bp, Gossypium hirsutum
acattaaatctcaacaaccagatacccccaaccgggaaaggtcctggttctttcaaaggaaccaaattccccaaaattttccttcccccaacccaattttgaaagaggaaagggagatccccaaaccggggggttcatggatttggatgaaaaccctttggaccagggtctgaaacacgttgattccaggaccctaacaatggcctcccgcgttaggaagctggggctcaaaactggtagagaccagcgtttttgggaggtgat

SEQ ID NO: 239751 - DNA, 143 bp, Gossypium hirsutum
cagcctgtttttaacttttaaaacccccgaaccatctggcccaattgtatttccaatgccccaaagagggttgttcttacaaccaatttgggccccaaacttttcaccccccttaacttttttaagacccccagccccaaaaa

SEQ ID NO: 239752 - DNA, 132 bp, Gossypium hirsutum
ctcaaggatttcgccccgggctggggttaaactttttaaaccccgaaccaactggtccaatggaggtggcaattgcccaggaggggtggttttttaaaacaatattggaccccaaaactttttccccccttt

SEQ ID NO: 239753 - DNA, 325 bp, Gossypium hirsutum
aaaaaaaaccaaacaaacaaacaaaagaaggtttgattttgatttttcactatcaatcatatatttcatttcgtggattccccaacttattgctacttctacccttaatttcacctcccgatatgtctctgttttgttttacatcttcagctctaaattggaagtgatagagtaaatacacagatattatctcttgtttatttcttgggttttccttcattttcgatactgcgttgtgcagatacttggtctgcttcaaacatgcatgctagacatagaaccgctgggaatgactatagatctaattctaatgcgatggggggtt

SEQ ID NO: 239754 - DNA, 301 bp, Gossypium hirsutum
gttctctatttggaggagtcgccggctatctttcaggaagagaggctatcgattctagagcagctcaaaatattggaagagaaaatggtttcattgaatgatgaggagttacattttgaggatgtaaaatcaattgaattattgtatgaagagaatggcaatggcttctatggaagttctgatttcacctatgaaacaaatggggttaccaatggtcatttcgagggagcaaatgggaaacatcatcaggagaaaaagctgatggcttgcaatgcaaagagacttctcccactttttgatg

SEQ ID NO: 239755 - DNA, 160 bp, Gossypium hirsutum
cagcccctatcttaaaacaaaaatgggtgaaggttttaaccggtggatgccccgtaaaaatgggtcatttgcgacaaccacactatttggagggcatcaactggctttggaatatctcgtgccgaatcttttggagctatatggtggcattgaattcact

SEQ ID NO: 239756 - DNA, 214 bp, Gossypium hirsutum
aattaaattagtacccctatacattaatgtgataaaaatcccaagaagatcatgtccaaacacgccgtggtaagtactgctaccaacacgtaagaaaatcttagaatgcccccgctatttggttctacaaacaaactttcccctgattttcagagagattacaacaatcaaacattgcgggtgacgaaaaatttctatttaaacatccatttta

SEQ ID NO: 239757 - DNA, 373 bp, Gossypium hirsutum
cgagtatttttattatttcttttttgaattatggagtcattatgttatatcttttgatgttttcttaacaacaaaccaagaaaatgattcattaaatactgttcaaatcacaaacagacagaatggaaccatcttatttcttacataccgcaagcaaactttttttttcttatgatttgaactaaaactgctgggaaaagaagaaacttaatatgatatttacaaccaatcctccctcaaaacaaaaacagatatttttttaacaattgaagaaacacactgtcccatcagtatttttatgtgaacttgaatctcaagccttttgtttttcttcatctgatttggagggtttaccagggagcttttccttgat

SEQ ID NO: 239758 - DNA, 226 bp, Gossypium hirsutum
atatttgtgtttttttttttaaaattttatgtaccgaaaacagggggaaaatagagctttgcttcattcatacctcaattatataacatggcgaatacacaacaaagcttgtgaaaataatttgattacactatatacaaaaacgcgttctctgcccaatgagccttgaatgcagtaagcaaaactcgtcatgaaccatatcttgtctatttaatgggttaaaccc

SEQ ID NO: 239759 - DNA, 167 bp, Gossypium hirsutum
aaggttcctggtttaacctttgatttttggggggaaccacttggtgtcccaaatcaaaatgggtcaagaaacctgcccccccaaccttgaaaccaattcttgggtcaaggttaaaccaactgggtgagccgatttattaaattgggggaaaaaaatcttaaacccca

SEQ ID NO: 239760 - DNA, 272 bp, Gossypium hirsutum
aaaaaccgaaagtcgaacgaaaaggagggaaaacaaatggtaagttctcaacttcaatgcacgaggatggtaccacgggtgaagagaaaccgaagaagaagaagaaactagagaaacgggctgaactagacattatcgacgatgcaggtgcctcgttcacagagctgtttgcaactgatgttgctgatccgatacatgatggtaaaaggaagatagtcgatagagcaaatcaagatacaaaatcgtctgatagcttagttacctaccctgtg

SEQ ID NO: 239761 - DNA, 204 bp, Gossypium hirsutum
atagaccaaaaacaccaaccgggaacctggaattattaaagtattccgcacggaaataccccccaaaggtttttattggcaacctcaaaaggaacctggcccatcaaatcttcccacctttcccaatggaaccaggggccatcgccttataaaaggtttaaatcccaagccatgcctcaataagtccggttaagctaaggtttt

SEQ ID NO: 239762 - DNA, 129 bp, Gossypium hirsutum
cgggacgagcgggacttccggaaatgccagcccaaatccagaaaggaatgggtgctggtcaagatcccccttgtgccacaacttatctggccagccaagagggagccgattccccatccggttttggtg

SEQ ID NO: 239763 - DNA, 379 bp, Gossypium hirsutum
acttcctccacctgttccgatctacaaacctccaccagttgaaaaaccacatcctccacctgttccgatctacaaacctccaccagttgaaaaaccacatcctccacctgttccaatctacaaacctccaccagttgaaaaaccacatcctccacctgttccaatctacaaacctccaccagttgaaaaaccatatcctccacctgttccagtttataaacctccaccagttgaaaaaccacatcctccacctgttccagtctataaacctccaccagttccagtatataagaaaccatgtcctccaccagttccagtctataaatctcctccggttccagtatacaagaaaccgcatcctcctccagttccagtctat

SEQ ID NO: 239764 - DNA, 284 bp, Gossypium hirsutum
gtttttcctcactaccgtcctcacatcctttttctcttctcttctttgcgccacccgcagaagagagagagtaaaaaagaaactcactttcatcacgtctctctctctctcttagatataaaaaatcttccttcctttttaggtttttctttttcaacattcagattcagcgttttagatatcgctgagttgttggtttttatatatcggacggctgagattggatcttacctgagaaaagaaatcgaggtatgcagcaaggtgatcagacagtgttgagctta

SEQ ID NO: 239765 - DNA, 241 bp, Gossypium hirsutum
gatagcaaaaattacataccactcttccattcagaataaattgaatattacaaacgaaattatattaatacagattaaatactcatgttggtcacttgccgtcattcagttgtagactgatattgcccatagtaattggacgcaacgtgtattaaacaatactgattgcggtggcgatctcataggcctccctatcactcaattgccactagtattccagtgctctaatcccatataacat

SEQ ID NO: 239766 - DNA, 372 bp, Gossypium hirsutum
cttcctataaccatgaatgtcgttgatgctatgccttcaatagcagcggagcaccctatagaagttgaaaggaatagtgacattttgcctatgaaaaagaaaaaaataaccccaaaagaaagtattctcaagtcagagcccgttagacagatgatgaccgatcaggaaaagcagcagttgagcacagaattagagtctttgttgggcgagttgcctgaaaacattattgattttcttaaagaacatagttctactgaaggtcaaatgggcgaggaggagattgaaattgacatcgatgctctgagtgatgaaaccttgtttcaattgcgaaaacttttggatggttatttgctcgggaagcaaaaaaaccag

SEQ ID NO: 239767 - DNA, 275 bp, Gossypium hirsutum
cagtagaattatatttcggtctggggtacgaagctctccaagggcttccttgggcttcgccgcttcatccttgtcttttggcaggttctttcctttaccttcttccactgcccttaacccttctccttcttttgaactaaaattcatttcctctttcacttttttcctcactcgccgtctatttcacaacacagccttcgttcacaacaaaaacgagtaccaccaaccgggagaagaagaactgccgttctggtattccctttttcctttcttct

SEQ ID NO: 239768 - DNA, 384 bp, Gossypium hirsutum
  unsure (1)..(384): unsure at all n locations
aattcaaagatattaactttttttttataattttgaaaaaaaaattatttcaagtcaatttttacaattcaaacatgtttatagcataaaaaaaatttcaaatcatttatatttctatgaaatttacatattcttgtacaagcccaaatatgcccgggcccaaaccaataaacaagcccaattaacagcccanaacccaaattgacctagcccaaacattaaaatttcagaaaccctaacagcatttgctcgtagccgccgcacatcctaacagcagcccccgcacatgtcgcgcacgtccgcctccacgttgactggccgtacattgccttgtcgcgttctgctccttcctccgtctcgatcggagactaggatggcgattga

SEQ ID NO: 239769 - DNA, 224 bp, Gossypium hirsutum
ttttttttttttttttttaagaaaaacaaatccaaagggaatttaaccgatcatcacaggttcaattcttacacagaaagcatatctatgtatgcaaagggatcaatgacaaatagtatataacaaaatggggggagctttaaaatttttttttagctagcttttgaattataaaacaatgatctgaatttctaaatcagggctttctattacaaacccgggtg

SEQ ID NO: 239770 - DNA, 312 bp, Gossypium hirsutum
gacccgcccctgactttttggatcaacagacaccaaatctagggggtgtaaatcctttatcacggcctggttttttggactctccagcattacctctatgctaaggagggctactgccctaatggcggccttccttgaggaaacggagccaggaacaatgaacctagctttctaccaaaccagactagggagtcaaatcctcttagctctaatgactcctcaacggacatgcatgccgataggccatctcatgaatctacctactgagaatgcaaggtaactcccttttgaacccccaacgattaacaagat

SEQ ID NO: 239771 - DNA, 311 bp, Gossypium hirsutum
aataaactactgcgttaactttatgcatctaacctcaatttccatggccgatataaccagagcatcaccttaccactctcatatcttacaactacctgatactactttaatcagatctatatggttgaatcttacttgcttctctgcaagctctattattataacagctacctatgcttcttattattgttcctttcaatggccattagttggatcattgctatgggcactgctgctatctgtgtaccgtcttttagcagcagcactgactaccttactgtctcaacactaaaataccatgctttgcctgc

SEQ ID NO: 239772 - DNA, 303 bp, Gossypium hirsutum
ctcacgcgtccgcccacgcgtccgctcgaaagtgaggccacccaagatagaaattgaaagtgttcaggttgttcaacagtgtgtgatgttgataattccccttcattttctgcagttcaccgcttgtctgaatccctttctgtcatcggctgtctttcaagctgaaatgatctgcgtagcttaaacaaggctaccagggtggttcttaaaagcaaggtgattcagaatcgagatccaaggttcagagttctatcatatttgatcccattaagtaaatcgcttgtaagctctattgttatcagc

SEQ ID NO: 239773 - DNA, 213 bp, Gossypium hirsutum
atatcctgagagaataaccccattgttccctcatcaagtttcaatatattcactgtgtcaagggcaagttctgacataattctgtaaattattagtctgtcattctgatccgaaggttgttaaaaagaccctctgttttcagatgtacttattttcacttatgtcatacaattttctcaataattcacgctgatctagctcttcatggacacc

SEQ ID NO: 239774 - DNA, 402 bp, Gossypium hirsutum
gtcgaccacgcgtccgatgagcgctgtgaacaaaatatggacagctaggccactgatcttcgtatccttaaactatgaattctgggcctcttcaccggttgtctagttgcagttaatgcttccgcaacatcatctatgagtgatggagagtataaacccgattggccaactgaatatcgccttcttcaacctgatttaggcaaggatgatggtgcacggcgaaggcttgcccctttccagctgtgcttgctgtgcaagtgttgcagcgccaccgctggctacacctgtacttcaatgccttgctgctttggcatcgattgccagcttcccaacaagccctttggcattagtgcttttgaccccaagacttgcaactgtaattcctcgcttgctaatgcctac

SEQ ID NO: 239775 - DNA, 434 bp, Gossypium hirsutum
ccaaaaaatcctgttccaaagcctactccatgtgctctcagcgacaagggccggccattgggacccgatcaaaggatctgctgatactatagtcgatactgcatttgcaaatttgggccatcctgtaaatttgaccattcaatacaggcaactcctccaacagtgtccggactagatcagtctataccgttcaggcattccaccgctacagaacaagctggaattgccagaagcaaccgtgctgataccgcagttcagcagtctgtgtcaaacaaggattcttcgatcaaaggtccataccacttatatctctcacattattatcaaggattctgaattttacctttatttcaaccggaaaagtcgatttgacctctatattcctgtttcagtagccataaacttttgaaggaatgtcattatatatgaacact

SEQ ID NO: 239776 - DNA, 423 bp, Gossypium hirsutum
aacgatgtgatgtgcctgcaacttttgacgttacctccataattgatgagcctgtccagtggatgtatggacagaatcatgaaccagtgcttctaactatcacattatcattaccgtaccacaggtcacgtatagaccgtgctcctgacatattcaaatgaacgcacactgtgatctgcgaactcaaaaatgcccatatgactacctctcttggcggataagcaattgccgtgtgatccttgtgaatgactagttcgaccgatgtcaaggagtgttccaccgacaagtctgcgattcactagttacccatgctgccatagcatgtgccgcttcaatggctacctgaggctctgatagccaatggcattgaagcggggactatccagtgtgtgcgtgcaaatgagcagaaggtctggatctcga

SEQ ID NO: 239777 - DNA, 437 bp, Gossypium hirsutum
tgctgagttatccatttgtgagagatggattggtgaagaaaaccctgggaatcaagggcggttactatgacttcgttaaaggaagtttcgagctatggagtcttcagttccaactttcaagctctctctctgtatgaaaacacaccaaaccatcaccattgacaccatctttgttctttaactaccaatcctttttcttacaatgtactatgttcatgtctttatcgtctattacaataaatatagatgatagagatcacctgccgcccgccgtctgcggtggtggctgcggtggctctttccatctatcaattctcctttgaaaaaaatcattggctacaagaggctctgatagtcaatggcatagaaacggggactattcagtgtgtgcatacaacggagcagaagttctggatctcgtttgcctatcgagattc

SEQ ID NO: 239778 - DNA, 334 bp, Gossypium hirsutum
gcgacccactcttccggactatctccttagtgccgcatttgtctgggtacttaatcaagctatttaacaggcactgtccatttgatagaatgggcaattggcacaactcgtaataccctgaacttcatggtgaattacactactagatacctgagactctgggagtcccattgcaacgaacatagtggagacaacctgggactgatacatacctagacatgagcttattacagctcttgcaagtttaacgtaggtgaccaggctgaaaacagtagtgccaacaggctttattacttactgaacatacgacgtatctaaatatctccacatgatc

SEQ ID NO: 239779 - DNA, 169 bp, Gossypium hirsutum
cccacgcgtcttaccacgcgttttctctattaacctatccaagatctttttcgggcccttgcaaatcgtaattagctcatatattaccatatacactacctatcttctacacgctcacatatacgccattcgtaactcgccacaaaatcggtactcaacttatctaata

SEQ ID NO: 239780 - DNA, 225 bp, Gossypium hirsutum
cccacgcgtacggtcactcaaacgatccgttgtacggatgactgtctaacagatggcttgatgatgtacgatggcgccttaagatagagcctagagaccgcatcaaagatggggttactcacgttgtaggttaacggcatgtaccaatgctgaagatgctggtgctgagatgatcatgacggcagagttttacatgatgcatggtgctatgagcatgaaggaaca

SEQ ID NO: 239781 - DNA, 182 bp, Gossypium hirsutum
tgctattccattttgctttcaactaacctttctacattctactgcttatctgtcttctttgggcttctttggtccccataagatgcgtagcatggtaagctctacctctgccaaaggcatcgccgccattgtaggcgtcggaccgaagcttgtgcgatccattgcccgcaagtttgctcatg

SEQ ID NO: 239782 - DNA, 269 bp, Gossypium hirsutum
gtgaattttctttacagggtttctgtattattattcgttcttcaattctcatataccatagataattgtggatttgttcgcggttctccgatctttgtttttcatcaggaatctgtacaaggaatcatctcgggaaaaatttcattgccttttcttgacagttccttcctttatatacatgtatgtatattgggctctaagaaactgaagatcgttgccattactacgagcgtgcaaatagcagttatacatccctgacagccttaaat

SEQ ID NO: 239783 - DNA, 367 bp, Gossypium hirsutum
atcttgtttctctacctattgtcattgatctttgaacccttcaccattgggtggatcttggtcatagagatattgggtgtaatatttggaatcgtcatctattatcatcaacccgggtcggcctccatcgtcattgagacctcattttcaattttgagtaacgaagacaaatgaggaaatccgcgataattgtgtcagctgctgtagtaatccttaatcctagcgtattcattcagaataccttctcttgaggttcttaagtttcgagttcgagtttctttcttttgtacgttggtttgttccgtcacctaatttccatggactagatgttcagtctttgaaaaaaaaacaacgtttctttgtatat

SEQ ID NO: 239784 - DNA, 453 bp, Gossypium hirsutum
caaggaaatggcaatttcatcaacagcggcagccactgccgcttcttctaagcttagatacccacacgcctcccctttcccaactcactcctcaaccaccacctctgcctttttctcctcaattccctctaaactaacccctacaagggttgttgatctggcacacttggtggcaagcaagtggccggcctggctggagctggaaaccgtgaccccttggaggattactggaagacaaacccagcagatgaagaatgccaagtttacgaggcgttaatagttgcaactttatgaatggttttttcttttactcgcagatggtatagttggtggccaagggttttccaatgttcatgttaacaaaaaaaataaacagctcattttgtaatgacagcagagtgacatgaacatataacatttcaatgcatgcagctgcaatcatcttttgaataa

SEQ ID NO: 239785 - DNA, 261 bp, Gossypium hirsutum
  unsure (1)..(261): unsure at all n locations
ggaaaacccgggccgaccgacgcgtacgnccactcttcctnnnttctctattttacttttcaagggtttctctcttcaaaaaaaccctgcagaaatctatgcgctggacgctcactttttgattcattcnatgatttcttttccttctcttcttcttgttgttttatagatgggtttgatatctgttttttcggatattttaaagaaacccacaattaaagatgtgccaatatacttactggtttttatagctcctttatg

SEQ ID NO: 239786 - DNA, 223 bp, Gossypium hirsutum
cccactcgtacgcccacgctttcgataaaaatgatctaaaaatgatttattaactaacgtgaacgagcaactattctataaaaaccgtctctgtatacctatacctttgcctcatcacatgatggctcgctaagcatcttctacttaccggactcacattcaaagactctgttcttgacccacatgatccaatgaagacactactcttgctcaaacttgacgg

SEQ ID NO: 239787 - DNA, 441 bp, Gossypium hirsutum
gttttaaaaaaagaatcaaaacccttcctttttttttcaaaaccattcccctcctccggccattgggtctggccaaaggcagccgtcggcccctctgtgggcggttgtcggcgcccttaaaaaatcagttttttaacccagttttcaaaccccactcaaaggccgagtctttgaaacgggaagccgagagaaaaaagaaaaagaaaaaaatggtctttggcctcctttaagtccgaatctaatgacggcaaggagatcaccgacgccgggctcgcaaggtgaccagttacgctccttctcccttctctttttatttttattttcgcagataaaaaaataaataaacaaaataactaaaaaggatctaaaacaaaaagaacaaaaagtggaatatcacctttgaaaccttgttttttatttatttgaaaagttttgtacgaa

SEQ ID NO: 239788 - DNA, 361 bp, Gossypium hirsutum
cccacgcgtccgcggacgcgtgggggaaactggagtgtggctaatggaatcaatgaagggttttctgatgattctttcaggactgttgcaaatgagattaaagtgcagaaaaacaaaagaccagctttgagatgttcagaacaaagggatagaatatcttctgcagataagtattctcctgaactgggtagtggtcactgctgtgtagtcccacaatcttctttaaggcccttggttggtaaggtttcacaggttttgcagcaactaaagattaatttacttgatatggatgctgcactctctgaagaagctttgcgaccatctaaggcatgcatggaaaggagatgggccttgcgttcat

SEQ ID NO: 239789 - DNA, 473 bp, Gossypium hirsutum
  unsure (1)..(473): unsure at all n locations
accggttctcggaattacccgggctcgatccgcacgtcgtccgtcccacgtccgtccgcaagnaaaagttcgaaacgtgtattgtatcattgtgatgttattagcccatgagaaganncctggttttagtgggagcgagatcnntagcaaatctgttaaacccgaagctgctatannttggctgnngtcggcgtggcatagaaaccgcaatttcattctannaagaaatcgatnngattcaattgnnataggatcgtgnngctggaatggaagggaaccagtnntatgactgnnatggaaagaagcaaaagnncttggttgcatacccatcgatggttggccccatgtccatttgcgtgatacttttgacatccgtggtcaacgaatcctnngttcaaataagtnctaccttgatttcccacgtggtccaggccannngtggtcttaacctggggttcaattcnncttcagat

SEQ ID NO: 239790 - DNA, 172 bp, Gossypium hirsutum
cttccgtaaaaacctgcttggtcattttcctttattacccattgtaaaaccttttccggggtttgcttttggcttttacctttttggttttgcaaaatagtttgttatattaacacataactgcatgttaaattctctggtccggtatgaataaaaattattttaccttttt

SEQ ID NO: 239791 - DNA, 351 bp, Gossypium hirsutum
ccaaccccatttcttttccaaaacataaattctaaccctctcatagatttctcctctaacactcccaaatacacatttttttattatactccttttataccacacttatttaactactttctacccttttaatctatatttcatactactttaacctctatttccctttttactatcttattgacacttcctatttttatacttacccttattccttttctattaacaaaactctttacttattctattttatatttttcatttctttttaccacttttcattttctcccccttatttttcttttctaattatttttaactatattttcatttatccctttctattttatt

SEQ ID NO: 239792 - DNA, 451 bp, Gossypium hirsutum
ctgtacacaaactctccctctgttttcttgtctgttcactgaagaaaattaatatatatggaatatcaaaaggtcttccttcagttgcttaaaaccaaaatggcagtttcatcatttagaagcgggcgtttaccgttgtttcatcaccctcaattgcctaataaagccgcttcagctgcttgtacaacaagatcgattggtgggtttaagaagccaaattggcgtttcagttccaaccccaattgcggaagggccgtctttctttttgcccagtactctcaaccatctcaagctcaaacacagcaagatcgtttctcatctcgtctccaaagtagtcttgagaacttacccaagctgctggaggatatcgtccagacatctataagcacatgtccccgaggagccctgaggctagctcaaggtattcaagcctttgttggtgttggtgggg

SEQ ID NO: 239793 - DNA, 451 bp, Gossypium hirsutum
cccacgcgtccgggttttgatcgtgaatttagaggtgggtataattcaagttttaattgtgatcagcaaatggcaggaaaatgggggttttgtggccaaaggaattaaaaaattcaagagtgacggtagaattggcgatgggtatggttctatggttgattttgatcatagttttggtcagcatgttgatggtcttggagagtttcctcttaagaccttatgcgataggagttttttgaacgtgggattcaaatcaaagaattatggttgccctaatctaaattatgattatgataatgattcaaaagagtatagcattgatgaagaaatggggtttcgagctagagattcacgtgcttgggattcagtgccccaaggtattcatcaaaagaaacgtggtagagttgatatgaactttgaaccaggtggtgactgtaggggtttaaatgga

SEQ ID NO: 239794 - DNA, 139 bp, Gossypium hirsutum
tcattcacttccacttccaggactccaccatcctttatgacatcttttgcttcattccactcctaccaactcaatcccgacatgcaacaatccataaaatactatttttttgttgccaatgcaaaattcattcttgatt

SEQ ID NO: 239795 - DNA, 431 bp, Gossypium hirsutum
gcagttattgctctgcgggcaagctgttccaaatgtatttgatgggaggatggatttaggtggtggcatgtttttgaagggtatatttacaagtgtggaggttggattcctcacccttctggaatcccttaatttctgtaaggttggtcaaaatctaaaatgcccaaaatggccgatatgggttgttggaagtgagtcccattatactgtcctgtttgctctggatacagctgttcaagatgagaatgaattggaagaaagagaatcacagatccggaaagcttttgatgcccaagatcagagtggaggtggtgggtttattagcgtggaagctttccatcaagtgctgagggagacaagtatccgacttcgatctgagaaacttgatagcctctgcaactcaggcttcatagtatggagtgagttctggc

SEQ ID NO: 239796 - DNA, 354 bp, Gossypium hirsutum
cggacgcgtggggctctctggtacattttgtcaatatttcattaggtagagactcttctgttttcgtgtttttgttgtgagttgattcgctagcttccatggggatttgcttggtagcattagccaaactccacctcttaactcccgctcatagtataagtgctcctttacttgcaggcttcatttgcccttttgtggtcaaacttgccttcagattcaggattgttcgtcgagtttacattgatatgctttatgcaaccaggctcttcttttttcagttgagtcagatagctttcgatgctggcggtgaccgtcagccatctccgggcgatggtgagcgatggcagcgagctc

SEQ ID NO: 239797 - DNA, 370 bp, Gossypium hirsutum
ccggtccttgcttactatacatataatagagtccgtgttcaatgcaacctataaacagtggcctacgcactcttactcactgcacatatgggggatccataccgatcgatacatggccaggagcttcaaacggcgccgactccggcgatggcggcggatctgggggaggatctgatcttggaggtgttgaagagggcggacgcaagaacgcttcggcgggcggcgtgtgtgaatcgacggtggctagtcgatgtcccatgacaagcgcatctgataggctatatacacgaggcactggtccttaaccagactctgtagcaaccacatcctggcgttagtgctggcactcaaggccttattaccaacaacc

SEQ ID NO: 239798 - DNA, 473 bp, Gossypium hirsutum
cattagctgaagaaaaaagaaaagtcgccttggaagctgagaaaatggcatcgaaagaagctgctgaaaaagaagctgctcgaattagagaagctgctaatgctgctgcagaagtggcatttaaagaggctcaacagaaaaaaaccgcagggagagaaatgttatcccagaaaatgggcaccagttcggccaaagatggacaattacaagggatccatgtcatggccacggatgctgcattaaaagccgagacaagccgactaaaaacatatgatgaagtcgcgactatgtaccactccgttgctaaggacttgagtagacatgctcgaaagattcaaacgttggtagcacaaataagtgggagccttgagaacgtcagggcaaaagccactgcattgatgaacattttcaaaaatcctgaatgccctcagcctatctctatattgatttttgcaaagaaggtggtgtgtctt

SEQ ID NO: 239799 - DNA, 478 bp, Gossypium hirsutum
accctagtgcctagaccttgggaatcggcagtctttagtacttttggggaactaagaaatcttccttggcttctgagcacagggatttggtgtcagtgttgactgaaccttttaagtgattcggtttgagctttccaattactaatagttaatcggattatttcctgtgacaatgctagttcgatatctatcattaactgtgaatagctatctttatatatccaagtctttaactaggtatcatggatgatgagtgacacatcctcactaattacaacttatttatcttgctatagattatgtctcttggggatatcttacttagtaatattaagacaataagctggtctagtttgtctcatttattgttttatttatgctcattgtttttcagattgctattacgattcggtttattatggtttcattctttataggttgttttgttagttatttaaatttcgtttgaatgttggtt

SEQ ID NO: 239800 - DNA, 380 bp, Gossypium hirsutum
cggacgcgtggggaactgtgttggttggtatagcatgatatcaaccaaatttagaattcactgtgtttgtttaccatgctttgtgtctgaataaaactgagacctgtttgtgttgaaaaaaaaaaaaaaaaaaaaaaaaaaaaaaaaaaaaaaaaaaaaaaaaaaaaaaaaaaaaaaaaaaaaaaaaaaaaaaaaaaaaaaaaaaaaaaaaaaaaaaaaaaaaaaaaaaaaaaaaaaaaaaaaaaaaaaaaaaaaaaaaaaaaaaaaaaaaaaaaaaaaaaaaaaaaaaaaattggggggggccttatatataaacaaaattatattaccgggtattgaaaaaaaaaacttttttatttggggtccaaaaatataattaa

SEQ ID NO: 239801 - DNA, 287 bp, Gossypium hirsutum
gtcagcctatgaaaacaaccattacatgtacaacataagacgctagcttaatctatcagtcaggtcctgagctcaacggctctgtactctacatgtcattgcgcttttggaattttcgaatcctaaaagaggactccactaatactggctatgggagccagagaacacgttgctagacagtcagccaccaagctcacagcgaggcaaccaatagggaccgcggttaatactcaagatgaccggaaagactacactgaaccaccagcgggtacatgattcgagctctg

SEQ ID NO: 239802 - DNA, 162 bp, Gossypium hirsutum
tcgtgcgatttcaagctctctctgggtgttttatggcagtgacacttgacagccgtacgttcagagctctaatgcgtagcgcctaacgcgctactgatcgttagttcactttcaacttcttcgcacagattgtcaactttggcttacacactgtcatggaag

SEQ ID NO: 239803 - DNA, 412 bp, Gossypium hirsutum
catgtacatcggcgatttcccggtgtcagtgcaaacgacagaagacattggtcgtaatgtgtcaaacattatacggagatgctcaagtgacttgttttccgtcaccattttctcaatttttaaatgagcaaatggctaatggcatgaggagctcaaaatctaacatggatgtttacacggtactttaaaggaagtggctgatgaacacatccaatgggacaaccagaaactcaaatgcactatggcctttgttacgttacttttcattattcgtacatcctttgtacattcctggataatcatctgatcaaagtgatgaccctatgatatattggcactatttggaccactgctcgtaacgtaatgatgttgcttgagagatccatgaattactttatacaaaccaaatgaa

SEQ ID NO: 239804 - DNA, 316 bp, Gossypium hirsutum
gcgacggctgctgttggctgtggcgttcgagctagctaggacctactccgtaggaacgcactttctcatcgagatcatagagtacaactgccagctggctcttcggctcgagcgctacctatggccatcctcttacactggggctacagcatgactcagctttcccatgtcactatgaaggcgcagacatactgacattatcttgtatcacaagcaatggcagtgcagtggcaatagcgatagcagtgtgtgcactcctactggaaagactaaggaccagactctatcatacctggctgatcttacacgcgtgcag

SEQ ID NO: 239805 - DNA, 370 bp, Gossypium hirsutum
gcgccgaggaagcacttgctagggtttgagagtgtgtacttggaggggaagggggaaagggatatggtgtttagagttgatgtctgtaatgatttgagcgtggtggatgaggttggggagaggaagttggggttgggggaacatgttcttcatgtggggagcttgatgcattccttgacaattagggtttgaagggtttgtagggttggatgtgattgaccacaagaaagctgtgatcaattgaagggttgattgatttgcaaccatttagcatttgtttgagggatcaattgtaatttcggataatgcctcatgagttcaatcaagaaattgggatttggtttggtgaaaaaaaaaaaaaaaataatat

SEQ ID NO: 239806 - DNA, 196 bp, Gossypium hirsutum
taatttgggaaattgatcatcttttatcatatttatttcatcaggctctggaatgaaaggtattaggtgttatattgagtcaggcggaatttaataaagtgaacaaaatatggcaggccgttttactggttccaccctttcgttcccgtgcttgcgacgtcatacctctattattgcttcaccaacatgcaattat

SEQ ID NO: 239807 - DNA, 276 bp, Gossypium hirsutum
aaagaacacagtgctgctgaggtccctggtcccaacaataaagggaaaaacaaaataaaaagatagggtgaaaacaaaacgcagggcttagatgcggattccaaatctcggaacggagcggcacactggaggtgcgatattgaggcgacaagctgtaagaaaacagaactattagttcggggggggccttttctgggtgctgttgctcgccgagctgattaggatgatttgtgctctttttttgatggtccgcatttatggcggtgctgcggcttt

SEQ ID NO: 239808 - DNA, 364 bp, Gossypium hirsutum
atggcggcgagcgtggcggcggtgcagggtcgccacgtcaccaacgaacgggggacaaagctccgcttcaaccgggacgccgagctggctgcggcggccggagctggcacggagcggcagactgggggtggatatggtggcgacaagcggcaggagacgaacgattcgttccggagggccatgtacttgagctgttgggcgccaagctaattaatatgattgagctcagttgagaatgttcgggatttagggcggagctccggctaacctggatggaggatgtttacgatccttgtaaagtaaattactggaattgtaactatcgcttctatgaatatacaataaagatgtactttcactcttt

SEQ ID NO: 239809 - DNA, 310 bp, Gossypium hirsutum
tggaatcaacaactgagtcatgattagcagaagacgtatatgagagaccgtgaggaccatgtccctagaggctagccatatccatctgaatgcatagtgagctgcgtttgaacactttcagcgtacactggtatatgagtgtcatctacggagaccctagatacaaaacgaccattcctggtgagctgcgactattgcattaatgtgcaccagtgctcattattgtgctacatgctcctattcaaggatctgatggacatcacatgatacatgttgtacaaatcgaagagatgcatcagacttgaaccac

SEQ ID NO: 239810 - DNA, 249 bp, Gossypium hirsutum
aggactcctgcgctgagtgatgagatgcagaagacgtatatgatagtacgtgagaatcatgacgctagtgtcaagccatattcatatggatgcattgcgagctgcttcgtagtctatcagcggtcactggtatatgatgtgagtctacggagaccctagagacgaaacggccgatgacggtgagcgttgaactctaggttgcatgagcatcggagagctttattgtactacaagatcccattaaaggat

SEQ ID NO: 239811 - DNA, 449 bp, Gossypium hirsutum
ggagcttctttttttattttcccccaatttatttaaaacctatatcattcgctaactcttcttctgcaagatcgaagatttgcgtttcgtttttttatttttctcttcatatctttgaagcagttcccaagtctcgctctttcgtggtgccgattttagtttttcgcttggaaaatcgtggatttcgttgatttccgatccgattgaaggtttcctgcattttttatctgacaagttcattcaatacaataagaaggaaaattgttaattggttctggactgagcaatgcggggatacgacagagaagaagtcgaagattatgatgattatgacatggaaggagaatatcaagatgaagatgtcatggaagaagatggggatggatatgaggaggaagaagaagaggaagaggaagaggaagaagaaaccaggcaacctacacaagaag

SEQ ID NO: 239812 - DNA, 478 bp, Gossypium hirsutum
ctctttcttgatgagaacgggctggtggcgggatggctggagttcgtggcgcgagctgtcccggttcattgcgaacatgggtgatgaggagggggtcgaggggcattgcgggccgtcccattgccaccagttgttggtttatgaccgccatgtagtggatatattggatctggttgtccaaaatggccacctttgcttgcggggagagatggcggcttgtctcatcggggcgcagcgcatcctcttggtgcgacctgtggtgaggtgcccgagaagtttctccttggtggtatcccgaagccgccctctggtgaggtggatcttcgcttgatggtgtagccgttcgaacagagtgctcttgtcggagaggtggaggaggaagtttgtttatggggtttggatctctttccgagtgaggagattgagcggttgatcttcctccagggttaccccccgtcaccttactaattacgggcct

SEQ ID NO: 239813 - DNA, 361 bp, Gossypium hirsutum
cattagctgaggaaaaacgaaaagtagccttggaagctgcgacaatggcatcgaaagaagctgctgcataagatgctgatcgtatacagaatgctgctacactgctgatgcagaaaaggcctcgaaagtggctaaacacaaaacatcaactctgctagatgcgatatgacatacaatggtgaccggtacacacctagtttgacgattataggggatgcaattaatgatctcaaatgctacattaaaagcgcgtcacaagatgactaagatcatctgctgacatcatgaatatgtaccagtccgtttctaatgacacgcttttatatgctctacatatgtgaacgtccactgaacatattgg

SEQ ID NO: 239814 - DNA, 266 bp, Gossypium hirsutum
catttctttaggaaataagagatgtcgccctgaaagctgagaaaaaggcattgaaagagggtgctgaaaaagaagctgatcggacttgataatctgctaatgctgctgctgaagaggcttttatagaggcttactagaaaaaaaccggatggctagatatgatatcacattaaacggtcacaaggtcggccatagatgtacgaattacaagggaagcatgtgatttacacggttactacattgaaagcggctacacggctactaaa

SEQ ID NO: 239815 - DNA, 289 bp, Gossypium hirsutum
cttgaaatatgcatatacctaaacgacttggattaaaacgagcggcggcatcacaatggggggcccgatcatatgcgggggggattcggactgcacgcccacggatgcgaacaaagacccttttattggaaaaatacgatacatgaactatgccgggagcagaaggaaaatcaatgttgacggattcacacgttaatttaagagacttacctgtgaaatctagaagagtaaagcagaaagcccgcgtggtcaaaagatataaaaatcgggccactaaacaacataaact

SEQ ID NO: 239816 - DNA, 359 bp, Gossypium hirsutum
ctcacaacatccataaatcgaattgacacgtactaaatggactggacgcatcaaactgggtgctgggatgaactgcgcactacacacggaacacacaaacggggatcgccacactgaccagcttttgtgaaaatccgatacatgaactatgctggatgcagacagaaaggaatggagccggctacacaccttcatggaagagactagcgcttgaaatcaactaagacgaaaagcataatgcccgacgggccaaaagataaagtatactggccacgaacaacataaacttggatcggcctgtctacagagatactcttgaatgtcaacttcatgggtgatgacccactaacaatatgtgt

SEQ ID NO: 239817 - DNA, 358 bp, Gossypium hirsutum
cccacgcgtccgtggcctatgtttcttgatttctgggttttaactcaaagaaagagaaaagtcagggtcactggaacgtaaaaggttagtgcggataacaggacctggaagagcgaacttaaggcctggcgttagaagctcgttgcttgtcggctaaacagctctttgcatgccgacctgaacggcttgcataaaccctgtgttgacgctatgcaaagcagaagacgttgcttgttatacatatgcacgtgtcgacctccgagcaggcgctgatggagttcttaaactgcttacctacagtggaatccatggcttggcatacattgaatttggaggaacaataactgatcacgactgc

SEQ ID NO: 239818 - DNA, 193 bp, Gossypium hirsutum
cccacgcgtccggatatgctggaatgcttaaccttctaaatgtgtcggactttgaaagggggaacgtgctttagaggagcgggtcggtacccaaacgagaaatggattggggagctcattgttgatgatttccaccttcgttctaatccattctggaaacatacaactatagtgcgtgctcatgtggaataaa

SEQ ID NO: 239819 - DNA, 176 bp, Gossypium hirsutum
ctgccatggactgtacctgaaagttctctggtcggcgtaactggaaatgtaatgtaacacaagactgcatcacatagctagtgactgacttgaacagcgcaaagatggagactgacgacgatgatgaagtgtgacctccctaacggtatgtcgatcaactaacagctcgattaacc

SEQ ID NO: 239820 - DNA, 384 bp, Gossypium hirsutum
ctcgcgcttagcgtggaggcgctgcagggtcgccacgtcaccaacgaacggcggacagagctccggtacaaccggcacgccgagctggctaccgcggccggagctggcacggaccggcacactggacgtggatatggtcgcgacaaccgccaggggacgaacgactctggccgcacggccatatacttgatctgtcggccgccaagctaatgcataacattgaactcacctgacactgctgactattcatgaccgctctctggctgacccgtatgtagattcttgacgacccttggcaatgacattactggagctggggctatcgctactatgactatacagtctaaaacttcttatactgtttgataccatggagcaaaatgg

SEQ ID NO: 239821 - DNA, 386 bp, Gossypium hirsutum
gcgtcgtgtgccgcgtggcgggtgccgtcgctcgtaccaacgaacagcggacaggctcggtaaaccgaacgcggggtgggtgggagaccggagctctcacggagcgtcacactgtgaggggaatattggtgcattacaacgcgtaaggacgcacaaacacattcgctcgagaatggcatagtcttactctgatactcgccaagctcatgaatactcattgagctcagctggatatgcttgacattcacgtgagtcgctctggatgacctcaatgcatatcgtgtacgacccttctgacatacattacttgactcataactaacgcgattatgcatctactatagctacatactttgattgtactatcatgacatgatactcatggg

SEQ ID NO: 239822 - DNA, 437 bp, Gossypium hirsutum
gcactttcagtaacagtgcccacattggctctcttctcctttcccagagccttaaaccgtcatttgtactacaacaattgctctctcatcgctcgatgcatacggtctcgactctttcctcaaggccgaggagatactcttcttgcttcccgctcttattcgtctacacttaagagcttgtgcgctgctccagttccccaacgtttacaccgccgtttggagtgcgtcgcgagttccgcagcttattttggggctgctggcggcggcggcgtttatggcggcggcgatggaagtggtagcggtagcggtggcggaagtggagattgtggggaaggaacgggcgacggagacttgaaggcgaaattgggagcgggagccgttgacgagccatctgctgtatctcccgatattattattcttgatgttgggggaatgac

SEQ ID NO: 239823 - DNA, 398 bp, Gossypium hirsutum
gccacgcttccgcccactcttccgattgaacattttgctcagccgcgcaagatcatccggcgtacgagcatcgcgtggggtggtgaactccaacacgcaactagacattcacagtaactgctgaacacactaacggggcaatgaccgccagcggcagctgggcgggataatcattgacagagacacatttacggtcgatgattccattagacaggcatcgatcaattagactgacttgatctcgatagccaccgcatacgttaggatgatggacgttcacatgaaaaagtccacggtcaagctcgccaattgaacatattgtggcgagataccgctctgagacacatatatctacacagttccaaagattgacaccggttgagagcttggaggatgga

SEQ ID NO: 239824 - DNA, 351 bp, Gossypium hirsutum
gccactctacatacaaatgttctgattgaatattttgctcatgaacgcaagagcaacgggggacggagaaacatgggtgggggccgagctcgcaacgagacattcaactaactggtgaacatactaagggggaaatgtcattgagggatacatggggctgagaatgatgggcagtgacacatttacggtcgttgattgcatttgacaggaatcgatcaatgtgaatgacttgctctcgataggaaacgcatacgctaggataatggaccgacacataaaaaactacaagtgacaagctcgaaaattgaacatattgtggtgagataccaatgggagtcacatatatcaaca

SEQ ID NO: 239825 - DNA, 380 bp, Gossypium hirsutum
cttacccacaccatttgaattcttcatttcacacaccaactcaacaatcaacctattaatacccatgccatcccatagtaatgaggatctgattgactccccgctcatttaccgccatcaatggctaactctctgatctctctctaacttctcatggactcaacttttacggtctcctccaacaccaaaaactacaggaaaagggcacgttactcaatctatcctcagcaagaaacccaactatagccacactgtttaaacgggccaatctcatgccactttggctggcttactcttctgtgtcgaaaccatacacgcactagccgtgtgacaacgaccgacccactacgtcacctgtaattgaagcccaagctacgaag

SEQ ID NO: 239826 - DNA, 426 bp, Gossypium hirsutum
tcgaggacgcgtgggtaaaaacattataagtcacttttttaaaattcattatagaagcaacaggaactgggtgatatacacacagagagacagctacagagagagagagattatcaaattaaaaaaatatttatgactatatacatagggccaatacattaacgtaactaagatacatgtcataacaaccatatttaaaataggtgttattgtaattagaaggaatatatgccacaaacgatatataacgatatcggacataacaagttatattatatatagctcatcaaatataagatagttgctttatatggtcacactttaaagaattatgaacaagttggctcaactgatgaatccaaaaataaatatatgagtgcattctatatcaatgatgacctgtcgcctaaataaactgtattatga

SEQ ID NO: 239827 - DNA, 257 bp, Gossypium hirsutum
tacgcgtgtgtattaatattatacgttactttgttgaaatgcattatagaattaacggggattggttgataagggggggagagagagagagagaaagagagagattataaatctaaaaaactatatataaatatatgcctgggtgaattacagtcatgttcttgggagacatatatgaggaggatatatattataggtgctggtatattaagaaggattatagtgcagacaccattgtaactttaagaaggaagagg

SEQ ID NO: 239828 - DNA, 162 bp, Gossypium hirsutum
gaccttactttaattaaaaaatttttacatcttgaatttttggtacgcctttcatcattttacacttttgttggtgctaatgaggaattgttaactttgatatggtacgaggaacatggtatctatttagttcttggaacttgagttgaatttgttgttgtt

SEQ ID NO: 239829 - DNA, 213 bp, Gossypium hirsutum
gctacgcgtgggctggcgcgtgtgctggacctctagctcattctacatgtctgacacgtgcatgcggtgatataggtgatcggtactgtcaaacaaatgaaacatactgacgtggtctggacgccggagggattggcgaaccccacatatatctacaatggtaccttgcttgtcgtgaaaggaggcgaactattggtgcgagttgaatcaaaa

SEQ ID NO: 239830 - DNA, 225 bp, Gossypium hirsutum
ccacgcgtccgtgcacgcgtgggctggcgcgtgtgctggacctctagtgcattctacatctcagacacgggcatgcggtgaaataggggatcggtactgtcaaacatatgcaacatactgacgggggctggatacaggaggaattggcgaaccccacacaaattcgcatggaacttgcttgtgtgaatggacgcgaacgtattggagcgagtggaatcacaaggc

SEQ ID NO: 239831 - DNA, 399 bp, Gossypium hirsutum
tcgtccacgcgttcggagaaaattccctttcttcttcctcttctttttgtttgtctaaatccttgtctttcttttctcctttctcgcgccttggtttcctctcttcatttgataatcttcttgttttgattcctttttattgaattttttcccccacggaaactgttcacttttttttccagcaatgtggttcattggcccaataatttccgctttttatttctctcatttcgagcagattttgttatgaaagattctaaaaaaattatttcagcttttttattaatattttctgaataatcaagcaaattgataatggatcgtgttgtcggtggaaaattcaaagtgggcaggaagatcggagctgcatctttcggcgagcttttcctcggcgtcaat

SEQ ID NO: 239832 - DNA, 358 bp, Gossypium hirsutum
acctccaagaacagcctctaatacctggcctgccggaccacgtggcagagctctgcctctctcgtgttcacccttctttgctttactccgtttgccgttcatggcgtcgcttaatctactgtccctttttccctcctttcccctctctctacgctctattcttttcatcgtcagataatgaaatccagttgttgagcttcgatccgatgtcgtctaggtgggaaacggttccttcgccccctaatcctcttcgtctccttgttcatcacccctctttcttatgccggaacctccctgttcaatacactttctgtatcgggtaaatcttgttcttttagcagcaactgtccccaatttc

SEQ ID NO: 239833 - DNA, 450 bp, Gossypium hirsutum
gaacttttggatgaggctagagaagccaccaagtctggtggcagaatgtcaagggaacagtatggggctctgagaaggaaaattggagggacatacaaggatttcttcaaatcctatgttgaggtgaatggcgaatacgtggaagaaggatgggtggacaaaacatgcaaggtgtgcaagaaagatacaagaggtgaagcaaggcaagttgacaattttgggagatatgttcatgttgcgtgcttggaaaagtccaattctgggaatttcttcactaaactcttctctagatgagtgtagtttttagttgtcaatttttgtattttttttttagtaaaaacatccctaatctggagataagcaaatatgtttgtaattactggggcatttaagcctcatatttatttcttgattatattggacactaaatatatatttgtaaagcactgt

SEQ ID NO: 239834 - DNA, 448 bp, Gossypium hirsutum
tcgcccacgcgtccgaagaaatatactcttcctcgttatccctccctcagatctcctcaattgtaccatcaacaaatgtccccacccaaacaaggcattatcatcttcagtcttttttttatattgggggcattcgtgaataattagaaactgcattgggaagccacaatgttgtcattttcttactcattgcctctcttcctctgttttatctcaagctttaacggattctttgctgccacagaattcgatttctgtacgttaatacctagcatcttgaatctccttggtgtcgctcacttaaacaatgggtgcgtcagactcactctcgacctccaagtaccctgtttcggctccggcagagcctttgaactcgaaaccctgcatatttcgggatccccatactcaatctccttgtagctttttcaccttcttctccttttacatt

SEQ ID NO: 239835 - DNA, 222 bp, Gossypium hirsutum
ataccgacagcccactcttactttcaacatccaaaataccacaactccaaaagggctggagataatcgagaagtggaacatggatcatccgctaaactgcaaggtcaaaagctaataatccaagctactacccatgaaaaattatgcccgaactatgttggggggcgtccctttcggtgaagaaaaaccaatgtatatagtggataaaacacggacagaccc

SEQ ID NO: 239836 - DNA, 318 bp, Gossypium hirsutum
  unsure (1)..(318): unsure at all n locations
acgancaanggntccactctctatctgtctatgcctccaaatggcttttgtcaccacttccaccggtttttgccttctaaagatcgccgactacaccacctattcctgggactggcggtgttctgcatacgtaatccgccttgcctgcacttgacggcacctcaaaggctggtctttcatccacagcctacgcttctcctccgctgcttgaggggacactctactttgcctgcatgcctcctccaaagatatatctttcaaaggaaaagggtcaagaggggttgtttcaatggccaaaaagagcgttggggacttgac

SEQ ID NO: 239837 - DNA, 228 bp, Gossypium hirsutum
aagaacagcacaggcgttgtttcggaagtgaataacgaacgtcccgctttatagcgtattgcatggaaggaaggaaggaaggtgaagtaaaattatttatgaactttgacctcatgttaaacgaagtggtgtaacatatggtgatagttgcatgaattgataagcgtgcaaacctttttccgagggaattcacgtttacttggatccctaacgtcccttggccttaaa

SEQ ID NO: 239838 - DNA, 274 bp, Gossypium hirsutum
tcgctttgtttttcaatagatcgtaacaatgtctgtctcacttcaagctgcagctacctggatgcaaccaatcaagggtgctgcaccattaaggaccaatgtgctgctcaggtccttccagagcgtttttatggccttctgtttggagcctgttggtgctaggcttaccggctgttactaccagttctaaaaggcttggctcagacgcttgatgatgctaccaaactcgtccttaaaacaactagtctcatttttttttgttttttattgagca

SEQ ID NO: 239839 - DNA, 312 bp, Gossypium hirsutum
aggagatttcgtcgttggatgaaaggttcgtgtttggtgctggtttagatttggatttgctgggaattgaagttgatgacaatacattgattccaggacttgcagtggcttcttcacgtgcaaaaccattggcagcttggatgaatggattggaagtgtgttcagtagaggctgataccagtcgcggttgcttgatcctatccgttggaatatctactcgttacgtttatgcaacctataagaaaactccgacaactacaagtgaagctgaagcttgggaagcagcaaagaaggcatgtggaggattacatt

SEQ ID NO: 239840 - DNA, 146 bp, Gossypium hirsutum
agctctttgtcattcaaggagattgtacctttgacaaaagagatattttatgattattggtgggagtgtgatttaagctggttgggattattttttggatgatgttgggtatgttttagatgggaggcttagaacatgtgttttaa

SEQ ID NO: 239841 - DNA, 156 bp, Gossypium hirsutum
ttgcttatctgtgtctgagtttttttgacgcgccaccaacattacaatgcggcatgggattactattcctctcatcttctataacccctttcttcccctctcttcatctcaaacctaaacataatctcttttttactttacccaaactccttttct

SEQ ID NO: 239842 - DNA, 359 bp, Gossypium hirsutum
ttcttcttcaaaaaaaaaagaacccggaccctttttcggcttcgcgtcgtctcttagtaaaaatctgttcttcgccatttctttcttcttttttgattttctggtcagtggacattttcagtataaatgtttgcagatttattatctgaaaggcctttgttcggtggatcaatcttaactacttttccttttaggtttcatgatgtcagtaacatcaggctagtttccgatcatcatgaggtttttgtggaccctgcacgtgatgagagcttaattttttgagttactatattacatgcatgattgttttagatgaagggagtgctgtttgttttatttaagaacttgcctttgaacaa

SEQ ID NO: 239843 - DNA, 267 bp, Gossypium hirsutum
gccaagcgaacattatggcgtaggttcaaacaccatacaactcatccactcatacgaccgcgggttttttttacaagacgatggccggtcctccaaagaccagggctgctgctgttgccccggccgatgaatagctggctaagtggtacggcccggacagaaggagtctcttgcctgaacgcctgttagacagatcggagaggccacactactatgtacggcgactttaccggacactatagatactatgccgatgagctgagcaag

SEQ ID NO: 239844 - DNA, 414 bp, Gossypium hirsutum
cttgacgcaaaaaccattaaaaatcacccaaaaaagaaacccactaatggccgaaacgacgggtggtgttactactactacatgttgtacgcaatctccgaatcccatgatgatggacccttcacaaccgttatggtcggcgatgcctacacctgcaccgtcgcctcccacggcggtgactacgacttcaagaacgttagcgcctgcaccttcaacgaattcctcaattcttcctcaaaacaacaacaatccttctccttctcctttcattgacccttcttcactgcaaaatcaacagcagcagcagcagcaaatttacgaaattttgtcttcaactttttctcaacaacaacatctaacactgcggcagcaacagcaaacacatccaaatgttgcaactttaataaaaatttc

SEQ ID NO: 239845 - DNA, 379 bp, Gossypium hirsutum
gttcctcaatctctctaatcctcgctttcttccccatcaaacacaccttcgattttcccaaggtcggttctttttgccctttggttggatctgccggccgcttctcgcttttcttttaacgggttgcttttttgctttgttttaatgaattgggtttttttttgagcgaaataaagaaacacaatcccatttcaagcattggttttattttgtttttgtgtttaagaactaatttgtgttcttgatgtagttttttttcccttggctgatgtgttgtgagggtgctttagatttcaattccttgatgggatctgaggaagcttgaaatttgactttatagacccaaaaagaaagaaaatcaacgaagaatggttaaata

SEQ ID NO: 239846 - DNA, 251 bp, Gossypium hirsutum
gccacgcttgccacaacacgtccgaccacgcgttcgcccacgcgtacgaagaaactgattggtcctttgactcatgtgcctctaaaagcttgaattctccggtctgggtaagggcggtggctgaaatggacagtgtcgacttcctactgatcatgcgcatccacatggttcaatcgcttcgttactaaccacacaaagactgctgatcgccgacgcacctgatgatcatttaattctgagaccacccatca

SEQ ID NO: 239847 - DNA, 184 bp, Gossypium hirsutum
gcgttcgtccacgcgttcgatcacacgttcgcccactctttcgtccactcttacgaagaaacggaggtgttcttacactcagttgggaaaagcttgaattttcccttccttagtattgtcgttggtatgaatggacaggtacactatcatctcattattggagtccaagttcttcaatctcttc

SEQ ID NO: 239848 - DNA, 267 bp, Gossypium hirsutum
taattatatcatatatacatatatcatggacataaccatgccgaaatatgactcatcaacagattctgtgaatgtgagaacacagccaacgtaagttgtttggaccccacatgcctgagcatgccattcttggtggaggaaaagttgctgatgtcattactatcgaggaacccaaaggtatcaaccgccttgataacagcagtgacaaccatttggattctcttcgaggtggtcgagtacaactatcacacccttctctgttacatt

SEQ ID NO: 239849 - DNA, 322 bp, Gossypium hirsutum
aaaattcttcttcttcttcttcttcaaaaaaaaaagaacccggaccctttttcgggttcgcgtcgtctcttagtaaagatctgttcttcgccatttcttttttcttttttgattttctgttcagtggacattttcagtaaaaatgtctgcagatttattatctgaaaggcctttgttcggtggagcaatctcaactacttttcctcttaggtttcaggatgtcagtaacattaggcaagttcccgatcatcaggaggtttttgtggaccctgcacgtgatgagagcttaatatttgaggtactttatttcaagcatgatgtt

SEQ ID NO: 239850 - DNA, 280 bp, Gossypium hirsutum
acgattgagcttaatatattgtcgtaaaaatactgatgggagacctctaagactactgctgtcggccagatgcaccatcgccctcaaacaacaaagcatagggtagaataaggggacagacgcacaagcttgatctgcttttatactctcaaaggtgactgtcatggagagtcttgtagcttaacaaccaaaaaggcctttaaggtgaggacacatcggtgtatatgtaataaggacagcacccttacaagcaaggtggtgaaatacaactatggtgtag

SEQ ID NO: 239851 - DNA, 360 bp, Gossypium hirsutum
acgagtggatttgttagtatgcgtctggggtgatcggcgcatacaacgaattgtaaaggtggggaaataaaagttcgaagagggagaatgtaaagtggacactgtagattttagctatccatctttctcggagaagatctatctagcgggatttcgaaggctgctccaccagcaagagctagagctgattacgattaccttattaagcttttattgacctgcaacagtggtgtttagtaaaattgcctacttttactgttctctagatgtttctttacgacctgctttattaccaccattggtattgatttttagaataagaaccatttatcttaattttaaacggaattatgcttttaa

SEQ ID NO: 239852 - DNA, 325 bp, Gossypium hirsutum
acgaacatactttcgtacatactattgtattcatcaagtcttgttcaattgccatcatgagctgtgccgctgtcgctatccgatctttcaccggccttaaagccggtgcaaccgcagctaaagttagcgccacagccaatgattcagcctttccagtcccaagggtcagcatcaaggccttccttaaagacatcagtgttgctgttgcggcaactgctgcaagcgcaatccttgccaacaaagccatggccattgaagtcttgcttggcagtgactgaatggtgtctgagctttattctcaaagaattcaatgtaagcccatggg

SEQ ID NO: 239853 - DNA, 273 bp, Gossypium hirsutum
tcggctttacgttactatttatttaaaatattctcttaccaataagaaatctgatttttatagtggggcttggtgatgtctgcgataaaacttcattactagcagaatataactatctctgtaacgaaagcttggtttattttcctacagcctgaaccttctcttgtggcgagatatctttgaattacactctttaggtcatgattgttagtacatttatgctaatttttcaaaatgacaatacacatcaacttactgttgttaaatatcttc

SEQ ID NO: 239854 - DNA, 197 bp, Gossypium hirsutum
cgtagttgtgaatgtgttataaccacctcctcccatattagaaaacaaggattttctatagatgtgtgagagttaactgctttagagactttgacctcatatataacaaaatttgtttgctaaaaataataactgtatccaactgatgctttcaatcattattgcgatgagaatcttgacgatattccccctttact

SEQ ID NO: 239855 - DNA, 361 bp, Gossypium hirsutum
ctcgaacaacttatcgttttcactctctttctctcttcgcctccaaatggcttctgccagcacttgcaccactttttccctcgcttaaaaccaccgccttcaccacctcttacttcgcctcccgctcttatgcatacctcatacgccttctccttcactcgccgccaccttaaatccttttctctcatccacagtctaggcttcttctccgctgcttctggggactctttgctctcccttcattgcctccttcaaaggtcgatcttttcaagggaaaagggtcaagagtgggttgccttaatggccaaaaagagtgttggggacttgacttgccgcttatttcaaagggaagaaagtgttt

SEQ ID NO: 239856 - DNA, 410 bp, Gossypium hirsutum
ccacgcgttcgcccacgcgttcgcccacgcgttcgcggacgcgtgggctcaaattcttgatgaaaatggcgcatttagccagcttaaatggaatcaccgagacccttcccgctatcccaaagcttcccaccatccgaagaacccgcaaaacatcgaaaatcatcggatttcttggcaaaaacacctcaaactttcacggacaaccaccactgcaaactaccagaagaatggcattagcctttgcctccattgctcttattggaacttctaccaatggtatctcccttgccgaagataacggctattggattaccgatcttttaccccgtccttccgtcgaaaacaagataacgaatgcggataccggaactcgatctttcgtaaagaaaggactgtatgtggctaatctt

SEQ ID NO: 239857 - DNA, 205 bp, Gossypium hirsutum
gttgaactgtttgctttagaatgggctttgtgggctttacggtttctaggattgtgggtctgaaatgggtttaggcttgggctggtttgggttctattgttggggtcattgggattttgagttggtgggcgacacatgttgcaaatggacttaaaatttggactttttatttggcgaattatacggcgaaaaaaaaaaataaaaa

SEQ ID NO: 239858 - DNA, 278 bp, Gossypium hirsutum
tcgaacagatgcttgaatctggtggggctaaagtgtgttttatactccaaacaatcatgggttctcctcaagttgaaggtggtctgatgcggctatgccaagtatataattagctcgtagacatgcattcagtgagcatgaacgcctggtttactagggatggattctataagatactggacactgggaggaatggcttctaaaggtataagaagttattaaaatttaagtgattcttatatggcgttctatcttataatcgaatgctaattgacttg

SEQ ID NO: 239859 - DNA, 295 bp, Gossypium hirsutum
gctctgcctattggagattacacgcaaaaggctaccctggccttgcgtctgtgttatttgtgagatatctctcatactacaagtggcagaatacccttatagaatgcacagagatgagacgttcatacatggcaacgactgagcttgtttaccaccaggagcactacattggcggtcgaaatagtcaccggaaacacatggaagaccggagagtcagcatggaggctgtcagtttttaatatacagatatttctgactttgcttgctaataggcagtcttacatatcttagggta

SEQ ID NO: 239860 - DNA, 336 bp, Gossypium hirsutum
tcggccttttttatatcagaactagagagattatattctggtttgagggtgatttgccttggattgtacgttgtacaatttattatgaatctcaccctcattcaccctcgaggatgccaaagctctttgtaatcaatcgcaggtgcctcactgcgtgtcactcttttgacgctgctgttgtgttaggttacgtagctatgccagctgaggtgccacaagacttggtaacactatccaacataccccaaacatctttaggagaggggttattcccctaagaatgcgaaaagccttaaatccagcgaccaaagtctaggaaaggtgagacatgcacta

SEQ ID NO: 239861 - DNA, 423 bp, Gossypium hirsutum
cccacgcgtccgcacagtcatctctcatcgccaaacaagcctcgtctttctcttccttctattttatccctttccctctctcctccttcctattgcctccaagtttccgacagagcaggaaatcaaataaggatcaacatttgaagcttgtttcaaagcaacagtgatgagacgacagggacaatatgcagactctggtggcaatgcatatgtacctgctcagatgcagcatatgcctgcacaaaggatggagatcaagtctggtcaatttcaaggacaactagaagcatttactcctgaaagggatcaaccatatcgaactccaaaatcagatggccagtggaggtgggaaagagatggatcaaaagtgtcaaaccaaataacacccaaaatgttcaatgaaggccaagggactgatggatc

SEQ ID NO: 239862 - DNA, 410 bp, Gossypium hirsutum
gcgtccggtcagctgtctgtgtgagagattatagtgttccggcgtccagatcatggtgggggacgtgggacttatatctctcagcgtttctttactgtctatgccttgtcttcctcgaatcggcttcaccaaacgcagaccatttcccatggcagcattgagtgatgatcctgttcaagaatggattctcaccgaaggaaaagccacccggattacgggtattcgtcccgtaggtggtggttgcatcaatcttgcgaatcgctacgacactgatgctggttccttctttgttaaaacaaacaggagtatcggtccaccaatgttcgaggcagaagctatcggttagacgccctgtttgaactcgaacaattcgtgtgcctaagccctttaaggttggacccttacgaaat

SEQ ID NO: 239863 - DNA, 146 bp, Gossypium hirsutum
gcgacaaattaattgcttacaatggcctccactccatttttcattcttccccatcactcggcgattgggcattgaatatcggcctttgcaccctttaaatccagtgaaccctccttttttatataaccaatactcttaagaagctt

SEQ ID NO: 239864 - DNA, 138 bp, Gossypium hirsutum
tcttatatgggtggtgcttatgttggcaccggatctgaaacatttccttattattggagacacgtacatttcggatggtatctttaaagtcgaaatatatagcgtatttatcagtgtccagatacagtttgtaataaa

SEQ ID NO: 239865 - DNA, 403 bp, Gossypium hirsutum
tgatgatatgacggaagctgatgcagtgattggtgctgctgatggtggctcgcatcaagctccattagctaggaaagagtctagcaagaagaagaagcctcttaaggttgccatggaagccatgataagagggttacaaaagtttgtagaggatgagtctgaagaagagactgcttccaaggaggaatgcaatcataatgtagctgcatggcacaatgttcctcacccggaggagagattaaaattttggcctgatcctgatatagaactgaatctggccaaagatactggcattagcatctttcggatgggaatagactggaatccaatcatgccacaggatccagttaatgggattaaggatgctgttaattttgcagcattggagcgatataaatggatc

SEQ ID NO: 239866 - DNA, 270 bp, Gossypium hirsutum
ggggcgacggacgcgtacgaacaaacggaaagagaaacacactttatcaccaccaaagccgaacagaccaagggggggtggggcagccaacattagggagaaagggaaaacaccgcgccaaagcatcaaaaagagcgacgacgcaaccgcgctgctggcaagaaccacacaagacacacgcgacaaacaaaggaaaaaggccacactaacgaacaaggcggacaacgaccagcaaagagaaggggccccatgagcacaacaaagtacaga

SEQ ID NO: 239867 - DNA, 339 bp, Gossypium hirsutum
tgatggtggctcgtatcaagctccattggctaggaaagagtctagcatgaagaaaaagcatctaattgttgctatgggaagtatagattagaggcgttacaaaagtatgtagaggatgagtatgaagaatagactgatttcaaggaagaatgcaatcataatgtagctgtatggcacaatgttcctcacccggaggagagattaaaatattggtctgatcctgatatagaaatgaatctggccaaagatactggcattagcataattcttatgaaaatagacatggatcaagatatgcctaagtagtcatattaatgggattaaagatgctgataattt

SEQ ID NO: 239868 - DNA, 243 bp, Gossypium hirsutum
cggacgcgtggggcatagctgctggtgctgtataggctgttctctgcacaccagggtgaacttttcaaacttcgaaaccaacttatttctgtgattccttaaaaagctatgggccctggatatgttgctcaagaatcatatccactgctatccaaactgttgcctggatatgatcctgatattagggtgtggaacaacaccatgagcctgttatgtgagttttcttccaagcatgcttggcat

SEQ ID NO: 239869 - DNA, 257 bp, Gossypium hirsutum
ccaaagtgcacatcagggcgaaggatatcgatctggaatctacttgcacgccttgggtaggcgagacactaatcacggtgctatgcagagctcctctttgtttaacatccgggctttaccttgataaaatgcccctgcctgaaagggacctttggacaaccatcctttgggagccccatcttataaggtaataacatgccttgggcccgccgcgaaatgcaaagttgtatctttttccccatgcaatgccttttgtt

SEQ ID NO: 239870 - DNA, 429 bp, Gossypium hirsutum
  unsure (1)..(429): unsure at all n locations
gtgggtggatattctttcacttcanaagctctgcatcgatttaatgggttctgctgatcaaagatgtcgtttgtccgaagatctttgccgattatcagtcgttctcaagagctctcctccaatcattcgagtttcaatatcagatacgggcaccggtacgtgcttggaggagtttcaagaccttaagtgcaacagagaaggtattggaacggaaaagtgggatgggttgctttccatcaaaactaccagcattagtgataataagatatatcattatcacttaaatcttagaagaagcgtttctgccagaaggctgactaggctaccttcaattcttaagaatgatgccaagttcaagggcacccgaagtatgtctgtccatatttgagactattgatgccttgctgaacgatatcaaacactactttc

SEQ ID NO: 239871 - DNA, 203 bp, Gossypium hirsutum
agaacgcgtgggattcaagccgactagcgcactggcgcccgtcacgctgctattgattagtggagtccgaggattctcttgatgaggggtggggctctaccggaaaaccaaggggtccgtggacttctacgtcccaataacctgctaaggtagaagctgatgattgctagaacatcaagacggacttgcctgagcggattaat

SEQ ID NO: 239872 - DNA, 423 bp, Gossypium hirsutum
gtcggccttgtttgctttgctccaaaataatttcttagaaggaaaaaagaaaaacaaaaatgcagaaatcataaaatcaaaggtgattaaaactctttttttcttttaggattttgattttgattctcaaatcttgttttttcacataaaagaacagaaatcaaatcaatcaaatattgatttggattaataacattaatattagaaaaaaagaaaaaggagaaaagagaagacgaagaagattagagagagatggagggttactgtgtggatgaggcggtgatagctttgaagctgaaagatgcatcgaattggtggcatgacattaacgaaattacgctctggcaggatcggatttttcacattctcgccgctctttacggtctcgtagccgccgttgctcttgtccaattgattccgata

SEQ ID NO: 239873 - DNA, 314 bp, Gossypium hirsutum
ggagtttgagaagccagaaaactgggtggcaccctatccaaaatatgaatttggatggtgggatcccttcttgccaactggagttaaagtttgaagtacagcatttttggctatcgtttttttgtttagttggaaccattactataacagatgaaagattaattaatgtggttgtccattttgcatgagttggtgcttcctagagacaagttgaaaattttaatctcggatgttacaactgctaagctaatatcttaactctagcgtgtagacctttatgtgtagaattcttttgatttgattctacctttttc

SEQ ID NO: 239874 - DNA, 336 bp, Gossypium hirsutum
ctctcaccatcaccatcctgatccaaaggtaacaaaaaccagcaaacacatgctcgatgcgccacaccgcaaaggcgactcactctctatgcttttatcgaagaaaggggtgaaagcatatgagccatcatgagcgtttatgctgctacgggcattatgatgagaaagtgcagaacaaccggcgacactgcagctatcgcactcgctgtcgtaggcgttcaaactcgagccgtgtcaacaacctgaagagttcacaacaaacgcacaagattaatcgacggccacaaagaccaggaacgtacaaaagggacttcttgtacgacctcacctacatct

SEQ ID NO: 239875 - DNA, 365 bp, Gossypium hirsutum
ctttgctagaccatgtgcatgtgtgttatccgatctatggatgtgttgaaaagtaagatcttgaaaataagatttcttgttctgaatatcttttataatggcactgatcactgatttgtctgttgaagtcgccttgctcttttttattactgtttttgagtctcccatgattctaattgactgagatcataaagcaatcccctttcatgccttctaaacatgcatatgcctctgctgcaaatggtgagggaacatttcttgtgataaccatttttaacaccaagagattttcatcatattccaacctactaaaccagtcgctgatttaaaaagtactactattcaatgcttcatcaaatttgatc

SEQ ID NO: 239876 - DNA, 322 bp, Gossypium hirsutum
cggtggggccacgcgtacggtccgtacttcccttccctttctcgttcgtcactcaaaagaaacgtactctcactttggtgtttcaacgatcacacgctcatttctcaccaattttcttctcatccaaaatggagtgccagcactcatttttcgcaaaactagaatatctatcaccatgctgctggggaaaaaggagtacaagcagccgttctagttcacccgacttcaacttttggatggttcgaaacccgccttttcccgaacccgacctcatatttgccgatgaactattcaattctcaactttaatagttgtagaagct

SEQ ID NO: 239877 - DNA, 416 bp, Gossypium hirsutum
  unsure (1)..(416): unsure at all n locations
tgaattttgtgaaagacgcttgtattagctttgctcgtgaccgtttcgatcttttcaaattgttatctactgatgatattgaaacggttgtggggagtggatgtcctaatgttttacgaaaatccgttaattcagctaaaaggttgagagcctatgttcatctcgacgaangggatgtttgtggtgcttgcaatctgcgtggttcttgcgatagagcttatgtgatactaaaggaatctgaagcagctgctcgtactgtggacatcgngcgtatattattatcttatgcccttgatccccttggtatttcggagagagagaaacctactggtagagagcatattgatgcatctgcaaggaatctactttcagacttgacaaaattgagtgagacgtcatgtgatgctgaaattcct

SEQ ID NO: 239878 - DNA, 329 bp, Gossypium hirsutum
aaacaatggttgatgcacaaaaacttgtgccccatttgtaaaacaacgggtctgaataaatgagatgaaccgtttggtttttaaggctgattagttcttgccttcaggtctgacatccaaaggttgcggcttggcatttttctttcataactcgcacttataaagcaatgttcttggtggatgatgacacaaatgtttgaagcactgggaacatgaaactacatatcctgcatctttagttcttaatcattgcggtattagagatttctttttttatgtatggattctcagcccattggcgacataaattattgaatctctctttacat

SEQ ID NO: 239879 - DNA, 132 bp, Gossypium hirsutum
gccattcgtccaagaacaccttcacgaattatgtatcttaaaagcacgggcaaatacttgtgttaatgacggcatcggaacgtacggcaagggttggatttgcacccatcacgaaggcgcttatcgtatctc

SEQ ID NO: 239880 - DNA, 214 bp, Gossypium hirsutum
accacccgtaccgcctggctcaatgagacatattgattttcgacgataggacctgtgtggtactgacatcccattgcttgtgggacaacaatcttcatgttgcacactttacttggaggtggcctataatgaaactggcgcgctaagattgccatggatggatggcatatactaacttgtcacttttgtaaccatatattgcggctcataaata

SEQ ID NO: 239881 - DNA, 218 bp, Gossypium hirsutum
gcgaccacgcgtccggtctattagccgtagaaaggacactggttgcacttgtggatatagtggaaaggatgttagggcaacacacatcttcgagaaaagtcagttagtgatgcttaccgccaacgctacttgacgtttgaggcacaaactctaaccatgggggggggtgacaggatcagatgccggaccaacattgtcagcgtgtgtctcggacgtat

SEQ ID NO: 239882 - DNA, 423 bp, Gossypium hirsutum
agagtctctctcagatcagaactagagtgtttacatcctggtaagaggttgagttgccatggcttcagcttcctccaattcactatcaatctcaccctcatccaccctcgtggatgccaaagctcctcgtcaaccaactgctgcatccccacaatgtgtcactcttcctactcttcctcccccacccgttcagtcccagagtcgtccctggaagaccactgcctactgtaagttcatagactaactatatcacacacttgacatgcatcaactggtataccaaatggtctttccactttttgcaggtcgcaagattgctcgaaatgtgatggctatggccactggtgagactttggccacgcgtgaagctccaaccgaagttaccccaactgagctgacagagtttatcaacaaaatacaaga

SEQ ID NO: 239883 - DNA, 333 bp, Gossypium hirsutum
cttcaactacggttcccctctgttgcttttctgtatatatataagtaattttttcaatttcgatcattcacaaccaaagatccctcttcataggtctctatttccaataatttatcagacacacacacacaaaaagagaactcttcaagttcttaacctacgtcggccgccgtttccaaatgttgagaaaatcgaactcctcccttgaaatacttactttctggatcttcgattctcttttttgtttggcttccttttcagtcgctcagcgacaacaagaacaactcgctgaatcggatcggttcgacgatgacgacgacggatgaaacggta

SEQ ID NO: 239884 - DNA, 220 bp, Gossypium hirsutum
ctcactcgtacggttttatatggtatcagcgccttaaactggcgggtgctagcatgggacggttttagccaattttcgcatttaaggcctggacgtctgtttacttgctatgcgagatccaaaggccggggcacgacatccatgacttgaatctctacgaacgttggtaactagagatggccatggccacgtctggtaccatacacgagctgcgtaccac

SEQ ID NO: 239885 - DNA, 193 bp, Gossypium hirsutum
acggaaatgcttggggtttgccattgaacaggccgtggcgaatgggctatgccaaagtggggagtgcatcggcgatcagcgtaccttgggaactgcaacagtgaacatgatgccagagtgtgaactgccttttggggcgcactttcaaagcatatctttgggaagttcagttcttcaagacttaaaaccctga

SEQ ID NO: 239886 - DNA, 140 bp, Gossypium hirsutum
acggcgattattagcgctttaaacggaaaaagatggtcgcagctattaatcctaagaacgggtccgcttcagacatgtgtgagatatgcaagcgtcacaccctacaacatcctctaacttgttcaaccaggtgccaccct

SEQ ID NO: 239887 - DNA, 379 bp, Gossypium hirsutum
aagatgcttcagatcagactcagcaagggctctttcttggatgccggcggttccgatcagccattgcccgctgagacggtgacggtggcctgccccgaccatctcgttctcggcgacctacccgttgccaagagcattggtgccggtacctcctcctgtatcgtgaagaccgtcggtcggagatcccggcgtcagcttggcgagcgagttcacttatgcgttcactgcgattttccgatagcgatttacggccgcttgagtccttgtgagcatgctttctgccttgattgcgcgaggagcgattcgatttgctatctttgtgatgatcgcatgcacaagattcagacaatcaagataatggacgggatatacatctgtg

SEQ ID NO: 239888 - DNA, 273 bp, Gossypium hirsutum
gtcacacacccaatttatgtagggctttgacttagcaacctgtaatgcctaaggctatgtgagcagcggtgcaccattgaaattggtgaggagtatggaaacagcctttatttgagttgaaatcaacactttagagaccatttggatttgggaatctgcatttgtgtccccgatttcaacagagaagccacgggatctcatcaatgcatctattaaaagtgatctggtcttgtacgctcctatctaaagaactaaagaaaagccaggtatatg

SEQ ID NO: 239889 - DNA, 327 bp, Gossypium hirsutum
acggtaagtattggagtttgctattgaacatgcttatgcaaagggattatgccaaaatggggaggcgatcggtgatcggcattggattgggactgcatccgtgatcaaaatcttgactgcaaagtgattttttgttcgcattatcaatggcaacctttgggaagatgcctgatacaaagcttaagacactggtattacttatggatcaactctttgatgttatctttttggatgagaaacaaaactcattcagatcacaagtataacgtgatgactactttttgagatccctggataaattgacaaaggaaccgggaactttggttg

SEQ ID NO: 239890 - DNA, 178 bp, Gossypium hirsutum
gcgcttgcaaagctgtcagacaggactagtgattgctgttcacagaaccgatcgcgcccaggccatggctgatttggacgcccagatgcctacaactttcgatgcatttatcaagggtgggggatccgatggcactggtaccaatgaggatgccgatatacgggtccaacatacggac

SEQ ID NO: 239891 - DNA, 228 bp, Gossypium hirsutum
acgcgtacgctcactactatgcatgctccggataatgattctggaatgtgactagacctacatgggcaggcgattgaagatcgtgatgctttcgcagatgaatcacgtctgcataactgaagtacatacccactgtccggctcaatgtacctggcatacttaccgacagtcataacttctacaacgtacgctcttggtagcactataacatcgctctaggacaggaac

SEQ ID NO: 239892 - DNA, 217 bp, Gossypium hirsutum
gtaatgcttactgtttcacatggaaaatgctgacgctggtcatcttaaccaacatgaggagtgcctctatgatcggcactgcctgcgaagggtgactgtgacctcattgtcccatcctgagtaccgggatatacttgctagtaaaccatagctacatacacctcgcgaacttgtgtacctgacctatcagctgaccatagatcaatgccttggcagc

SEQ ID NO: 239893 - DNA, 407 bp, Gossypium hirsutum
acgggccatttgagttcatgtaattatcatttggcatcttaatgatgaacttgttattgatttattagtgttggctagagtttttggtgggtggtgctaatcatttatacgatttcgggtgatttataacagagcagtggttgtctaggatgttataaggagcctaaatctgatcctttgatgaatgatacatcaaaaggattagaagttccaggtcagacggtgaggaaaaccagtatatctgaagatttctggaccactagcgcttgcgatatggataacagtgcagcgcagtcacaaggaagcatctcgtcaatcagcgtgatcaatcagtctctagatccccatggcaatgccaatagcccatctgaattcgtaaatcatgggtctcttctctggaatcgaac

SEQ ID NO: 239894 - DNA, 303 bp, Gossypium hirsutum
ctgatttatacatgagtggtgaaattcataaaaattcacaagtggaatctgtcattagtgatccatttgaatcctctgcctcatccaatatcatttcaagcaatgggatctccacgagtttacctgatccagtttcctcacagaattttgccagtgaacatatgttgcaaatctcagggaaatcttctgatactgacaatttaccctgtactgatttatacatgagtgatgaaattcataaaaattcacaagtggaatctgtcagcaatgatccatttgaatccgttgcctcatccaatatca

SEQ ID NO: 239895 - DNA, 318 bp, Gossypium hirsutum
caaaaagccttttaacaagggttctgtctacatgcagaagtggcgtctacttaaccaactctgcctgggctcacctctctgatctggtctggctagtccagtcattgacccgcttcaagatgactgcattgcggacactatgtgccctagttaccttagtggtgcgcagtgtatgaacccggctgtgactgattggtcctactcgaccatctcggatttagccaaagctggtaactccaaggataaccaatgcagattcagagccatactaaacaaccttgcatattaggcttgaatttagcactcatgcgccttacc

SEQ ID NO: 239896 - DNA, 323 bp, Gossypium hirsutum
acggccacgcgtacgggcacgcgtccgcggacgcgtggcaagatgtgttgtgggagagtatgcatgctgggcacttgcttgattctagccgtggttgcgattgggctggtgttcggctttggggctttcaagaatgggttttacaagctcaaagatacattccatgaagattactgtgatcctaaattgtcttcttcttgtagaagaccttgcttgggttatgcatctacgcctcctttctaatatgcttcgtgggatcctatctactacaattccattcttattcggtcgagtatatgatcatgctattgacgctagatgta

SEQ ID NO: 239897 - DNA, 298 bp, Gossypium hirsutum
acgatgatgctccttggggtgctggtgctggtagaggaggctcaggttctgcagctactggccagtctgccactggagctgggtatgggggtaaaggttatggatatggcgggtatggcggtgcacaaggccgacaagctcagcaacagcgagtctatcacaagaaagacaacttgatctgaaactcgactgcgcatgaccttatcttcgctcttgtaatcgtgatggtttcatacacgagcagcaacaagagaggttcaagatggatgatgaatcacctggggacccactggagtgc

SEQ ID NO: 239898 - DNA, 369 bp, Gossypium hirsutum
caagcgcgttattcagtactactgtcgctacattcagccttcactccagattgtgcagaacataataatctcgggggctcgtccttaggttcgacttgcacatatctagccataaatcgaagaacatggccgcatcatcaagtgccatgcatatgcaatccctccgtttagcaaggcccatgactggccttgctagtacgagacaaatggatgagacttataacgtgaaacacatgcatcggtattaacgggaactcagtcttcaagtccgctgtttggcataggactaggatcaaaaggagccagtgcacagaccatgaacgcatgatcctaagcagagccatccactgatatcacccaacgtgagca

SEQ ID NO: 239899 - DNA, 297 bp, Gossypium hirsutum
gccacgcgtgcgtccacgcgtgcgctcacgcgtgcgagaaacttcgattcatctgctgagggcatgcactatggagacagtccccccagtactggctgagcagaaatggcgctgactctgccaaacgcattaagccgaatcaagccttatgctgcgcgttcactgcgtctcaaaaaggtggtgactgcaaagggagggggctataggccacaagttaactgtcggaagaaggacatccactccgggatccacgaggatgctagaggttactgccgtggagaattggggatgacaaca

SEQ ID NO: 239900 - DNA, 210 bp, Gossypium hirsutum
ctcctgcacgtgccggtccgaattgcgtttcgggtaggcgtaccgtccggcttgcttggtaacggtcgtgctactgacagtactgaatgctggttaccatgagagtgatatggcaagcatagtggcgttacccgcgtcgtctgatggttgcgtctgcaatggagtgcacaacgtcgtatgtcatggcctacacctaaacaacagcatgga

SEQ ID NO: 239901 - DNA, 243 bp, Gossypium hirsutum
catacgcgtggggtaacgcatgacgcgcgctatgcctgaaggtctggtctcacactgggaggaagaacatggcggcgagctcagaatgatccaggcggacaaacgtacagacgaccacagacgtagacaacgcttaacgctacaactgagtgtatggcttggaaatggtacaggtagaggcatacatccacggcctatgatacggcctagccacaagatctgctgacctcgtcttagactttt

SEQ ID NO: 239902 - DNA, 365 bp, Gossypium hirsutum
cggacgcgtgggttagtgtgtaacagttttctgagctaccaaacactgtctcagaataaaaggagaacatagggcagcattaagtagaccacgaagagctgtagacgccattttcttccattcttttctttaattcttctccttctttgcagtttccttaaaaccaaatctcaccataaaaaactcctactttattgacctcactttcaacccagtatgccacttttactaaagtggtcaactatataaaggtttcattcgtaggtgacttgaatgcaagcatatgcaagcaagtaactaactggaaaggaattttggaagaagatagatccacaaaattgaaccctcgggagcctgacagaaca

SEQ ID NO: 239903 - DNA, 428 bp, Gossypium hirsutum
gaatatttgtagacacaattagaagaaacatggaaagcattgttttcaagccttagatatgcgaaaaactttagtggtccggtctgtttccgccatgctgttttatcaccattaggatacgagactgcattgtttaaagggcttagcgaagacatagattgtcaaggtgcttctgcacatgatctatggcaaagccccgatgacaaaaaaactgctcggttatctgagtttggagaaatgatcagagacgcttttggatttcctgtaaacagacatcattctgataagacagtctcgggtcattataacatcctctttgtccgtcgagaagattatttagcccatccacgccatcgaggtaaagttgaatcaagactaagcaatgaacaagaagtgtttgattcactacagaaatgggcatctgatca

SEQ ID NO: 239904 - DNA, 306 bp, Gossypium hirsutum
tgctagcgtgcagcaccattcgggctaactgagcctgcaagctcatctgccgaaggggaagagcataatgttaaggtggtaccctcgaacttccgcggatctctgggcagggcaaagctcatctgtactcttgagatgacgactgcctatctaagcctgtgaaacacgtcagactactgcacagcctactgcatgttatactgaatcaattccatacttcgggaatacaagtcaggtgcgcaaatgcatgtggacacccattatcagacctcagacattcgctaaaagatagctttatatcttggt

SEQ ID NO: 239905 - DNA, 319 bp, Gossypium hirsutum
ctgaactttaagctgatgcctataccttgggttggaaccctagactagacatatgcactagcgatggcccatgttggaagctctggcatgggatatgctgatcgagtcggcaagaacaggggcatatgtacctgagaactgtatagttgacgatcgtgcctaagacataccatgaagagagtcttgactactggggtaacccaagctacatacatgctcaaagcatagtggacatttatgatctacaaagctttcctgatggatccacataacgtctaccggatagacccttgatcgattggttatgagactgacatac

SEQ ID NO: 239906 - DNA, 290 bp, Gossypium hirsutum
gtcacccttactaagctctcttatgtctatgttgacacttcatccatatttgcacgtccaatggttactcagccagatatcaggtcgactaattgaaggaatctgtcaaggtccatccaatgccagttgctgaactgtaataatggctagaagcactgctcttcatagtatcatacggtgaattatgtagatatctgcgtaagaccatctaaccctggcttcatcagattactcatgcactaatatgctgcaaagtactgcatatcactaacgagcattgactcaaaaag

SEQ ID NO: 239907 - DNA, 348 bp, Gossypium hirsutum
gctacgcgttcgctctcttcatgctgctgatctatacgccgctacgtcatatctctatcatgagatgaaccacatataatctgctctataccattcgagtgtcactcttcccgctcggtcaggctatcgcgatcgctgctgactaggctaggcccaatgctgctccatatgcagtcgatagtgtaagaggaaagtctgcttctgtccattgatgtgtcgtaaagatcaactgaactgaaagcccaacatatcaatagtatgccgcaccagattcgacgacatgactactagagttactcatacagacatagactgatacaaagtagaccttttctggacaagctagac

SEQ ID NO: 239908 - DNA, 332 bp, Gossypium hirsutum
aaaacgcgagactatcaggaggactaatatgagatactacatctaaactttccacaaaggtcacctaattggtatcccaattaaaactcctttccctccttgaaatctaagctgtaatatagggaccaatacagagaccggagcaaaaaagggggagatggggatggctatgacaaagctttttacacagcttttcagccagatggacatgcatattgtaatgctgagtctagatgcagctggtgaaactactattttatacacgctcatactcaggctaatactcaccaatatactcaccattgtgttcaacgtcgagacaaatgaataca

SEQ ID NO: 239909 - DNA, 336 bp, Gossypium hirsutum
tcgctcgtgacctactgactctaccctgcacttccttcttgtgctagccaaaatcccttcttggttttatatatatatatttaaatatctcttctgttcagctcaaattttagtattttcgcaggcatacctttcctctgtctattgacactcttcattcctttttttctccataaagctagggtgcctctgcatatctgggtttttgtgaatttcattttgtttggttggtcaaaaccaatagtatttttaaactaggtatgaaagtagagtgaaagttgttaaatcttactggcgagagatgagttcgtcgtggttaagcaggacgcatgcttt

SEQ ID NO: 239910 - DNA, 365 bp, Gossypium hirsutum
cccacgcgtccgcagtaaaacagcaattgtagcagtagtgaagtttttagattttagtgagaaagaaaaaggcataaccaattagggccttgtcggaaagttgcccacaaaaaggttctatgatgaatcaacacgacatatctttccaatcagctgctattgacagtagttccgagatgtttccgatgggtggttactttgcacctccccccatgaatttctctgggaattccagtatttttactacctcccctgctttaatcgaacctgggaactcttctggctcttcccttattgactcagtcgcagggttcacacatgatacagggttggctgtcgaatggtccgttgacgagcagtacgta

SEQ ID NO: 239911 - DNA, 437 bp, Gossypium hirsutum
  unsure (1)..(437): unsure at all n locations
atggtttaaaccattgattgtgctggaggaacgcgaagaggtgtatgataatctggaagggtattatgattattatccttacgaagatgaggacgatgaagaagatgaagtttattacaccaattcaccgagtctccgcatcggcaaccggagatggggtgatagtggatatgtaaggtcagggcgccaagaagccaggcctgttcaacgatccaatttccaggactccactggtgccgggtcctcacgcgagcctaagaataaagaaaccacaaaaagtacaatggggagacgagcaaagagaacgctcaaacgtgaggctgccaataaggctgctgaagaaaaacatcaagagcatttgatgagttcgaggctgaagtgattntcttcgacgttgaagtgtttaataaaaaccttatactgaagaataaggataa

SEQ ID NO: 239912 - DNA, 278 bp, Gossypium hirsutum
tttttctctaatgacatctctcatggaatctctactactgaaaaaaaggaaagagagaagcgctgatcacttgagcacatcctacatacgcgtgcgtgcccattcctatctctcctgtacggtccacatagcctaatttagtgcacaactgtgactaccgatgcaactgttaacaccctcgctatgcccaacttgatcatctagctgcacgtctcaatttacataaatggcgttattagcacattcactcgcgttcatccaactccctaactcatgaa

SEQ ID NO: 239913 - DNA, 261 bp, Gossypium hirsutum
cccacgcgtccgcccacgcgttcgaaaccaacgaaatccttcaagaatttgacaatttgcgcttctcttaaatcatggaaaatctctcattttcatctcagctagccagtgttcttgcaaaaagcccccatggaagacgacttcgatttcccaacagccaacaacgtggaggaagaagagatgggcatcccagaagatgacccagtcaactcacttctcgaagtcggcgaggagaaagagattgggaaaaacgggttgaag

SEQ ID NO: 239914 - DNA, 444 bp, Gossypium hirsutum
ggaagtttctctttgtatttctccttcacttacacccccagtctcactcccccaatcaaagacccacattcacaaggtattcaaatccaacggtgaaagtcacttccatccaaagatgcaaatctttgatacgaaacagtcaacggcttacaaccaaggttgctgccaatattcatgatgtttccgtcgtagctgatcctgctcgagtcgatatcacttggcaaattgttgttggagctctagctggggttacccctttttttgttgcagggattgaattcagcaaaagaattattgcacaaagaagatgtggtgaatgtaggggctcaagacttgttttcaggggcaatgattattttaaatgccctgaatgtggtggatttcttccatggcaatcatggaaaaagttcttcactggttaaaaaccatttactacttttcaat

SEQ ID NO: 239915 - DNA, 421 bp, Gossypium hirsutum
ctcatttctttaaaaccagttgaattttcactttattggtatcccatgaataatccaaggaatatcaaatcttgaaaatcgccattgaagctcaagagaattttttttccatcggaatatggaaaagaagtagcaagaaaaagagtttacctttccgccgccgttaatctttgctacccattttctttaaaaaccctaaattcaagcttgtaagaaaagaaattatgtctcatctcgacgacattccatcaacgccggggaaattcaagatggaaaaatcacctttcattcagagtagaatgaggtggcactggcaatcttcacttgcgaagctcactttttggtcaattattttcttctgtttgattttgatcttcttttttcgatccccatcttcaaatcccctccttcaagatccata

SEQ ID NO: 239916 - DNA, 256 bp, Gossypium hirsutum
ggcgaatcagagtatgagccgatcgtccatagattcttctttgcattctcgtcgacaccatagattcttctttgcattctcgtcgacaaacgatggtttgactgcttctatgcgtgattttgaaagcaatgttcaagcctttcaaagttgatcctccatagattcttttatattattatttattctatttcgcaatatatattgtgtttctacttgaaatttactttatattatatgaagcaaaattattatgtgc

SEQ ID NO: 239917 - DNA, 317 bp, Gossypium hirsutum
  unsure (1)..(317): unsure at all n locations
cctaaatggagaaatccagtaattcaacaactttaggtggaacaaaatcggatcaggtgggggagacgctggcggcggttttcaaatcgcctacgtcgcagagtgatctagcgccgggaacgtcggatagcggtggaactttgtcacggaaatcgagcaggcggtttgtagtgggggcatcgccggcgcggagcagtggcggcggttgtagaaatgcacacattaggaaggcgaggagcgctcanatgaagttggacttggaagaactgagcagtggggcggcgctcatcccggcttctagcgctagcttgggcttt

SEQ ID NO: 239918 - DNA, 361 bp, Gossypium hirsutum
gacaggcgttcgactgcgcgtgctcaaagacgtactgcttcgcgtgcgttacaatggctctcttcatcactaatgcttatgtcaaagaacatatcaataactcaactaatattatcatcaagatcaaagttcagtgatgcttaatatctttaatctgatgtggatctgaccaaattctgccatcgtgtcaagtagttatttatctggataattgcacgaggcatatgatcttacgaatacaatccaacaccatatgcctgtaatacctactcactatgacctgttaaccttagttagaaccgctactggtacttagagacgagatccttaatacggacctagacaagctcagcgagtgaca

SEQ ID NO: 239919 - DNA, 394 bp, Gossypium hirsutum
gcggagatgtactggacaggctggatgggctggaagaactatgctagtgagtattcttgaactatacagaatgaagctcgagttcattgtatcataaaagaagttggtgaagcatctcatgaacattttccccaagatggcgagagtgggcaagaatctgcttctcaagttgaacaactgcaggaggatgatcaggaaaatgaagacgcaatgtggcaggaagctagtgttgagtataatgtatcgatggatggtcataatgaagaagcctctggcatgcaccatgaagatggtgggaatgacgatggtagcttgcttgagacaacacggaattggttgcaatggtcttatgatcaagaacccggtgggagagcagacgcattttattttcctg

SEQ ID NO: 239920 - DNA, 353 bp, Gossypium hirsutum
acgcaaacgcgctcgcaaactcatgtccaacggtttgaaccggccacgtctgcaaccacgaagagagaccacccggtaatccattttgaagctcaggggttcaagcctagaccattgtctcattcattattcaatctacgtctcttacactgttgctgcttcatcatccaaagctttaaccacccctgcactcgtcaaaccatagaccaaagctgctccgagaaaggctgcacctataccatagccaaaggtcgatgatggaatctttggcacctttggtaggacagtgttaaccaacgcaaatgagctctttgttacacgtgtagccatgataggccttgctgcatgcctat

SEQ ID NO: 239921 - DNA, 163 bp, Gossypium hirsutum
attgctccggatattgacgaataatgctactatagctaaaggaccgtctgctgcataagtggttgagcgcctttttcagatgatgtcaagatcagaagttgggcctgatggacaacatattgctttacaggcccttgtaaatattctggagcatccacagtgc

SEQ ID NO: 239922 - DNA, 100 bp, Gossypium hirsutum
gtgcttccgaaatgaattacctagaaagaacaagataccgaagctggaatcccttcaagtaaagggaagcctgttgcaccaatatatacgtgaggtgaaa

SEQ ID NO: 239923 - DNA, 215 bp, Gossypium hirsutum
gttgaaaccatgtcaagttatcaacgttactgcacccaaagaggtagccataggcaattcttacattgcgtgtgtatcatgtttgacctccgtgcctattcaaatttgatgttttacgtcatgacatattttggagtgacgagagacaataattattcattttcttttaaaaaatagaaaatttaaaggctatgatttttatattacaaacttag

SEQ ID NO: 239924 - DNA, 356 bp, Gossypium hirsutum
acgtattcgcgtgcaccattactcgcggtagggttttaacatctagtgtacttaatacttcatctggcacgacggctgcttcggtgggcctcacaactgcataatgggggccgacgagtgcatatgcaccatgcggaagaggctctggtgcattaacgtctaaaacatcaagtgcactagtctatgtcttcgctagcggcttatcccctgtacaaactcatgagacgtcctctgcgggttgcagcatcatgaggatacgctctaacttacttcatctggcggtcaaagatcaattgatagcttatgataccacagtgttcttccaggtctaaaagtcgttccaggctctcatggga

SEQ ID NO: 239925 - DNA, 341 bp, Gossypium hirsutum
ggctctcatgaagggatggcgccttacctactttcattactacaacaccacctgctatttttgcgatcgccgactacctacattgctggcttccatcgcctctaacaccatctattatacctgtcctgctactgttattcaaaaccccccaatttttccttgccctgttcctttgctcaacccaagagaagagatgggaaacaagtcctaaactaatccattgaagctctcaagaaacttctcactgtggaaggagaactgaaagctgaagcagctgcaagggtagatcaaataacagcagagttaaacacaacatcagctgacggcaaaccatctgactc

SEQ ID NO: 239926 - DNA, 461 bp, Gossypium hirsutum
tcgtaaacggttcattgtcggataaccttatccttctctcccgttactgaatcaaccgaataaaaaagaagaagcagcacgctcttccatttcttaagatcaatgaaaaaaacaattctttggatgatgaattggagtttaatttcatgttaatttatttattcggagataaaaactttcgttacttaagagattaagaactcctccattattacaatgtggattgcagcatcatcaacgtcgagttcaaccttgtctttctttcaaatacaatgctctgattctaaccgtaaacggggtttcggtcccagaaaatccaatcaaaaggctacatcaaaggaggagaagggttttaacttacaacataggaaattagctagtaagcagtccggtccttacctgctgcggacctgtttaagtgtccatttgatggaaatctaataccgttcttgacattgact

SEQ ID NO: 239927 - DNA, 175 bp, Gossypium hirsutum
gaaacggttcattgactgatttgcctaacgctctatcctgttactgcgtcaaccctctgaaagagacgaagcaggtcgctgcgcgatttcttaacatcaacgattaaaacatctctaaggatgatgacttggagtttaatttcatgttaatttactcattcggaggtaaaaactt

SEQ ID NO: 239928 - DNA, 446 bp, Gossypium hirsutum
tcggtcccatcaaatgtgcctgaaaggttcttcttcaagtggaaacgtccttatacaggatgacatgtccggtgaacttgaagaaaacgggataatgtcacgcatccctttgcttttggcttcatctgaaacttcatagatagcacttgaaagaatcatgtcagcattcgcaagaagcatctacaagaacttccggcaggtgatctaagagtattggtccattaacagatagccctactgatacaacttctgagattgatgatgatgatcaagtttacgatagctagtaattccctcaacatgctgtaccgtgcaaacacggggacaggtgctgctactaatgcgacatctaccgtgacgctaggtatgaatacatgaggccgatggttgaaggatacaagagagtatgacatgggagatacgcgttctcacaacgctaatctaca

SEQ ID NO: 239929 - DNA, 153 bp, Gossypium hirsutum
tcgctgactcgtgggctgttttgcgttaaaacatcattggcctaatattgacattcaggatcaatggtccttacagaggagcatctgacatttaatacatcaatggccatatctcatggtctaacatcacttatatttacacacatcatcaga

SEQ ID NO: 239930 - DNA, 270 bp, Gossypium hirsutum
ttcacacgtcctcccacgcgtgcgcaattggcgaatggtctacgttcacgtttggattctacaccaatctcatatgtgcacgtggactaactctgcaggcataacctactcgctgatactctagcaatgaggtccccgacgttagcacctaacctaagaccattgctcaaccttgtaagttctaaactactgcttaaaaacactatcacgtatcaagattcgatctgattgtgaattctgggactgccagtctgtgtccagacaaatgct

SEQ ID NO: 239931 - DNA, 288 bp, Gossypium hirsutum
cccacgcgtccgctctctctctctaaaattcgttgagtttctgtctctagaaagaagtttggatcgtcgattccgccatggacgcagcagcgccgccgtggctcgtctactgcggtgtcgatcccgtccgtttctcttgcccgcgctctaacagagtatctattcgtactcgaaccagaccggttctcgctgtagcaaccgaccctaaacctactcgtaagactgcgtctcagtcctctccttcaaacaacaacgtgaacggctccttcaagtgctccttatctaaaa

SEQ ID NO: 239932 - DNA, 280 bp, Gossypium hirsutum
gttactcttccaggaaaaatcttcatacagtatttctttcactttctttctttgctagaggaaagataaacaaacctgctactggtcgtcatcacatctgagaaagaaaaaaaaaatgtcaggaggggttggcccaacctgcaatgatataagcctaccaaatgaaggaattcaaggccatgaaaaatcattccaccccaatcctcttaaaaccgactcgatttctcaccctcagggcaactcaattgtcttgccgttatgatcatcgtggcggcgagcg

SEQ ID NO: 239933 - DNA, 374 bp, Gossypium hirsutum
ccagaatcaagttcccagttagctatgggtgcaaccttcggcgttgagccaccaaaagaaaagggtgatgtggacattgcaacccacataagagttgatgatgatggtcctgatcgtagcttgctctatgtggagactgctgaccgtccagggttgctggtggatcttgtcaaaattattactgacatcaacatcaccgttgagtctggggagttcgacactgaggggttgttggcaaaggcaaagtttcacgtcagctccaagggtaaagctatcatcaggcctctgcagcaggtttcttgctaatagtttacgatatttcttgaggcgttctactacggaggaggcgagtttttgagtcaccatgatgatgc

SEQ ID NO: 239934 - DNA, 197 bp, Gossypium hirsutum
ctcactcatccgttcacgcgttcgaccacgcgtacacatacgcgtgcggcttatttaagggaaaggaaccgccaaaccaatccgtgtcctgtgccaagtttaaattgctacaagcattgaccaagtaccagggcacggtgtaaaccatcgacaaaactggaaatcaagcatcaagattttccaaaggggccaaagga

SEQ ID NO: 239935 - DNA, 454 bp, Gossypium hirsutum
tccacctacatacaaaaactacccaacgccaccaccacccaaccctatcgtcccttacttccctttttactaccatacgccgccaccaccgtcggaggcgagaagcttatcatcaacaacacattggctttttatttccatgttgggttttttcctttctttcttttaatattaaaaaaaaaagtaattaaaggagaaaagatggtgaaaataaaatgtagaagatttgcagatctgaagaagccattgcagggatgaaaaaaaaaggaactgagaaatttctgaagatgtatgaagtaataatatttttctcttccttttttctaatatttattttcttcttatgatgtagattttatcctttaatttttgtttttatgaaccattttggatctatttttgttccatatgaatggttaattacaaactaattaagaaaggtaagttcattttc

SEQ ID NO: 239936 - DNA, 246 bp, Gossypium hirsutum
gcttggatttgaatggtggaggtgaggctaatgatgataatttaaaatagtcttagcggatcggagtgagatattactgtcaatgatctgattgttacacacactgtggacttccttttagtaaaaccaaaaatccttttggattttgactttttttaaattcaattcagaggaaataaagggggattggatttttggtatgatgaggtgaaaacactctagtgttgatgggcagtggatttggat

SEQ ID NO: 239937 - DNA, 373 bp, Gossypium hirsutum
  unsure (1)..(373): unsure at all n locations
tcgcccacgcgttcggaaggagttagacaccaggacgcgtacaataatatttggtgccgcccccatcagaagtaaaaggttgatccaatgagttccagtacaccatcatctagcgctggaggtgttggatccgctgattctgctgctcctagaagaaattccaagcgacccaaatactctaagttcactcagcaagagcttccagcttgcaagccaatcctcacgccacgatgggtcatatcagcctttatgcttgttagcattgtcttcattcctattggagtggtctctcttgtttgcttctcgagatgtcgntgaaatcattgatcggtatgaaaactgcatgtgtaaccggacggcttacaaaaatgat

SEQ ID NO: 239938 - DNA, 405 bp, Gossypium hirsutum
atcctcattcaagttattcctttactctttgttccttaagaggattgcctcgtgtggggcggtgaatgttcaggtatctactatgtttgtaatggctatcatttattactccaacaaccgacttctttatcatccgagcatgaagttttcaagtaaattgggcaactaggtgtccctcgaaaatcaaaatagctttatggaaatttgttcatggttttgtagccactagatcatgcctatacaatagaagagttgcaaataacccaagttttccgaggtgtaatgttgattacgagacggtgaaccatgtgctaagattttgtgctacagcgagagatgtgtgggtaatgatgggttacctattgctttgggttagtgctcaactggaattccatgattggcttt

SEQ ID NO: 239939 - DNA, 420 bp, Gossypium hirsutum
tcgtccacgcgttcgtccacgcgttcgtccacgcgttcgcccacgcgttcgaaaaaccagggttctgtcttgggattttctcgtttcaaaacatcttcaaagcttttacttacttacagacatggcgagttcacgtcttccgaggtttatcatggaagttgctccaccacagtttgttactgtgatgagacaaagaacaaggacgatgttggataccattaatgaagaggataatcttgatggttcaaagagtttatcatcaactacaattccagcaggtgctactatggtgactgctgctgctgcttcatcttcttcagctactactgtgacggctcactccaagtatttttctcaaaggagtgtccagctctttaactttcagtaactagaacgatcgtatatttgaagatatgtatc

SEQ ID NO: 239940 - DNA, 317 bp, Gossypium hirsutum
cttatttcctttctcccggggttcctccgactctcgacggagggagagaaagaaagagcccacaactttcaaaagtttaatttctagggatttttaaaattttcttttttcttgtgtggtcgattttcagtttagctagttagataggttggattgagagggagggaagagcataagaaaattaattgaatagaaatgtcagcggcattggaccctgtcgattggcttctcttttctcttagtagagctttccgtagtcctcttgctgtttttgttcagatccagggttgtgttatatgcttgtctcttgctattgg

SEQ ID NO: 239941 - DNA, 287 bp, Gossypium hirsutum
ccatttaaaaaccttatcttcttttggctaagcgaaacaaaggctaaaatggtgcgggatctgctttatttgtgattctgccattttctaaacccaaaaccatatcttttccaaacccaacttccattttaatggtccccttttttcttttccaccggcttcatggcaaggccttcctttcttcctttctttaaaggttcacgcctttaacaaaaaaggcttcttcttttccttctaactttggtagaaacgcttccgcttcattttgagtaccggtcaggaagagg

SEQ ID NO: 239942 - DNA, 153 bp, Gossypium hirsutum
cttcccggtcctgcggagccaaagaccgcaaactgccgtgctttaaaacccaatcgtttggggctaaaaaccgctcgggattggccggtcaacgtagaagcgttcacggggtcaccagtaacacccctggggacccaagtatttgtttgcccc

SEQ ID NO: 239943 - DNA, 354 bp, Gossypium hirsutum
ctctactctgagcggacattgctcatctctgttcatcagcctcagcctctcctcctcagctctggtcatgggcctcacctcatcagctgtgcccctcttctctgtcggtcgaccatcggccttactcaagtctgtattttgaaaaaaaccctaaaaacttagcagccacgataatgtataatctcattctactttttatcaagaccttttgaacatgctgggtcacctcttctcgttagcttgctaaaaaattacagcctcctttgtcacctcttctcgcgattcatcgaaaggtgctgctggagttgctgttcagtacttgcgttacacacctggcctctttaatgtaggact

SEQ ID NO: 239944 - DNA, 155 bp, Gossypium hirsutum
cttatctgtagggaaacatcaggtgcaagtttactctcaagttgaaacgggaacacacaaccaggtcgtcggaaaatcccatcgtctaaaaagcaaaaaccaaattctcaaggaattaattacggatctcacaaaacaaaaactgactaaaccaa

SEQ ID NO: 239945 - DNA, 224 bp, Gossypium hirsutum
cccactcatacatcaaaacttgctttttttcatcccaataagatttttatttttcatggcttgaactttcttcaatggactttctaacttatcctaatccacacattttattatcaaatccactctttaatcaactactttttccccacaatacttcactatcaatactctacattccctacccattcatttccaatattatccattctataccactccctaca

SEQ ID NO: 239946 - DNA, 147 bp, Gossypium hirsutum
  unsure (1)..(147): unsure at all n locations
gagagctttgaattatccatgtagctagcgaattattattataattatcggaagtagggtgtggtagtaaaaatatagggagttagttttttaactntaaatctattttactaactatctttttttttattttttattttacttttg

SEQ ID NO: 239947 - DNA, 369 bp, Gossypium hirsutum
gatgtttccccacacttttatcatgcataactttttttaccccccgcatgtattccggaacaaggtggaaagcaagaaggttctccccttcctgtgagcacctcatttcattcagaccctgatgttgatgactcagaacagcgttaccgctggtgtgatgaagctaccaattcttctaatgttcaaactcttcaagggcagaacaaacaggagcctattgaggaattaaggtgcagttctcttatagatgatcagagtgcttgcaggcatttattgtatgatgttgaaaatcatgaaaagagctgcacacatggagctgttccaagttggagcaatgcaagctctgttgttactcttgctgcatcaatt

SEQ ID NO: 239948 - DNA, 360 bp, Gossypium hirsutum
  unsure (1)..(360): unsure at all n locations
ggaagacgagaggagaggacagacaattgggttctaccattgatttcttttgccttatttcattgaatttggactcatagaaaaaaaaaatatacttcactcattcacctttctttcttttcttttttcattttgtatttttcttggaatgctactactttacttcttccttacttgttttcccatcatcttcctttttaagttgaagaaatcacttccaccatgggctactgaggtgaaattattgtctctctggtttgggaaagacgtttccttttcttccgttaccaagttgatcaaaactagntctagtcctttgtatttcacctccaaaatgcctctcaaaaagatgtctctcac

SEQ ID NO: 239949 - DNA, 416 bp, Gossypium hirsutum
tccacgcgttcgcccacgcgtgcgattttgttccagagcctactcaagtttcagaggcttctggaccggatccagctactgcccttgtggaagagaatcaaaatgttgctgagaaagtttatgagccttcagaccaggaaaaacagttggtcgatgaagacgaggcggttgtgaaaccccagtctaattcaaacggtgatgatattactgtagttgttgaaccggcttcttcttcagcccaagaggattctgcaaagaaatcctatgcatcaattgtaaaagtaccaaaagaaagtccggggccaacaacagtctatgtaccttctaatactacaaaagtgacacccaagaaaactgagaagcaagctcctatttctgcagcacctgctacaccggaagcttctgcaccttccagc

SEQ ID NO: 239950 - DNA, 280 bp, Gossypium hirsutum
aacaaactttaaactacacttctacttcccactactaacattgtcttcctcaatcaggtcatggggttccattaacactgtctgtgccccacattctttcattgtcttttctttcaccggtctcaagtcctcctctcctttcccagtcaccacgttggtcatcaaccactttacttttttctctagcacatgctctcgagtatcattcattcacgtgttgccccccactgataagaagaactcctatacatcttaataccttaccgatcttactcccgtg

SEQ ID NO: 239951 - DNA, 151 bp, Gossypium hirsutum
atcgctctttcggttaaactggtatgtgctgcatctagaaccgtctaaccttaagaaggaatgggatgagcataacagggtgtgaaccgaacaagcgaccttactacgtattatttccgcatgtatgtcggcctaaaatgtcggcccaagc

SEQ ID NO: 239952 - DNA, 300 bp, Gossypium hirsutum
  unsure (1)..(300): unsure at all n locations
gaatcgaccgatcgacccacgcgtgcgtccacgcgtccttacggacacttttttngtccgtagcgcacgccatagccgctcagtcgatctcttactggaagccaaacttcttccttcaatccaaactagccgagaaagatcaacaaattgccgatctctatgctcagatcgaagccctcgatgcttctttatctcaaacttcggataaactccctaaggccgatgaggagaaggggagcttgttgaaagataatgcttcgcttactagtactcttaagaaacctcagagagatgtttcca

SEQ ID NO: 239953 - DNA, 323 bp, Gossypium hirsutum
ctcatgcttacatcggaagaaattttaagtctcatatgctaggacagacaatgacgggcgttgggaatataaaggcttactaaaacatcctcgacaagcccgttatcttgggctaacaagacgacaactcgtgtgcgcttacattttggtcctctgagcaggatgagtacaatcaaactcggtttgacaacattgcttaattaaatagaacgctggaagatgcaggatatgctgatcgtactcgagttcttgaactcttatgccatacggataaggggaatagcacggaaacacgatcgactggtacttcatcctttgatcac

SEQ ID NO: 239954 - DNA, 300 bp, Gossypium hirsutum
ttccagcatgtcgtggtgctggcattgcatgaacaaacccacgtccttgaacatgcttggctatgaaacttccaataaatctaaaaataaagggaatgaattatctgcattgagtctttaggggttccattggagtatatcggattcattcacataattaaagtgatctgaattcgagtttggcatcttagtgaagactagagtctactcttgtatgcattttccagttggaatatatttcttgcctaagaaatcatgtatcttaatttccacattagttataaattatgacccattatg

SEQ ID NO: 239955 - DNA, 319 bp, Gossypium hirsutum
cgatgttatctctgtgcacatgcgttttatgctgttcctgtgaatcggtggataagtaggctggagaataattgagtatgaatggatgctttaatatcaccaaaaaagacttaaggatatctgatccgttaaattttaaatttagttgcaagaattgaatcatcgagcatcacgaaacattgatgagtcctttgtaaaccctggaattgcggtaaagcagccattgcatgttgtgatggttgatcctaaagttgcaaataaatcacgatttacggaagagcttatttaaactatcttgctcaccgttgctgttggattg

SEQ ID NO: 239956 - DNA, 398 bp, Gossypium hirsutum
atcacgcgctcctacaagcaatagctctagcttattcttttttaagagagagagaaaagagagatcttgcgtgagttaaaaagacaaacgactacagttgcatggtctgtagggttttgcacgtacaagttcgtgtttaatcatcacaatgactagcatcatggacacggtggttgttaactctagcacgacttacttccttgagacagagttacgtttaaggttgcccagcgcctatggaaactaatgtgaaactaccaaaaacaacggaaaaccagggttctcggcgaccgctaattcgaagcttaacctttcatcaaacgagactgtaacactagattccgttatgatgaaagataacagctcaactgacactgcaaagccacctgtcattgcac

SEQ ID NO: 239957 - DNA, 293 bp, Gossypium hirsutum
cccacgcttacgcaaacaacaacctttataatggttatacggccgcgacacggaaggaccgagctacatctcagagcgcctcgggacaaatacattctctaaattaacatgagctatctcccaaccctaaccacatgcgctcggacctgcgcctatgaaaccgaaacgcccctgccgttgtgaattcatacacatgataggtcagctcgccctagacgcaaccatcctatacgctgaccgagataaacctcccgcttatgtgatccaatcaacattcgacagacgaagaatgc

SEQ ID NO: 239958 - DNA, 209 bp, Gossypium hirsutum
agcacgcgatgctggaggcgaccgttagcctttcttcagcgaaggcgagcgacggcagcaagctgctttagttgtgtccgaacgaataaccacagggagaagatctccggtggcggagttccacgaggatagctttcatactgtcaccgtaccctcactttcaacagatgttcatgtaagctagaacaacatgatacttgaaaatatat

SEQ ID NO: 239959 - DNA, 326 bp, Gossypium hirsutum
ccgatgcttacgattgacttaagtttttagttgttgaaaaagaatggagacagccggggagggcggtaaccaagatggttgatgcggagaagtaaaatgattcgctgactgaaaagttgtagtaaaatggctggtgaattctggtcttaccattatgcttaggattttcctaaactgagacgaaagtttatcctacctcatagccaaaacaaatcccatatcggttgccacacccaacatcgacccttcgaggccccgttctacagtcgtggaacaagttgctgatgaatgtcgatactttagcaggtttcagattgttaaccatg

SEQ ID NO: 239960 - DNA, 127 bp, Gossypium hirsutum
gaccacgcgtccgccgacgcttgcgctcaaccatacgccaaaatgtggtattctcttaggcaagcccatcaaccggcggcggcctcggtggcaccgagacctctatatcatccccgtcgacgaaaac

SEQ ID NO: 239961 - DNA, 219 bp, Gossypium hirsutum
gccagtcgaccaatgcaggttgcattttttttttttaacctgcacgccaacaggctgaaaagggccatatattgaggccgccgagaaacctccgggctggagccagtctaagtgttcatcgaacgaacaacgtcttgtaaatgcaacgcttaaacagctgtcggtatctagccagcagattatatccctcagagatcatcatgcagtagatcctgtaaa

SEQ ID NO: 239962 - DNA, 275 bp, Gossypium hirsutum
  unsure (1)..(275): unsure at all n locations
gagttgaagattcaacaagaaactgttgtctaatggtaagcatatanaagagctcangaaggaaattgaggtggctaatgaggaacatgttctagtcgaattggctaagatggaggcatcaaaagaagctgcagatatcgaagctcaaaaagagaaagaagtaggtgaactgtcatgtatgatggcaggaacgaagaaaaaaatggaggacatgatcaacgagattgatcagactggagagttggaacaaagattgactgtcactttgtctgaca

SEQ ID NO: 239963 - DNA, 186 bp, Gossypium hirsutum
  unsure (1)..(186): unsure at all n locations
cccacgcgtacgatggcctctttagccaacactgantggtgtctcccncggcaacgccaaaaggcgcggtgaccctctgtattgcagtcgtggacctaggtcatcggctccaacaccatccaactcatccactgtctagaccagtgctctcttctccaagaagaaagccggtcctacaaagcccaa

SEQ ID NO: 239964 - DNA, 287 bp, Gossypium hirsutum
  unsure (1)..(287): unsure at all n locations
cgggccgaccgacgcgtccgaccaatcgtccgaccaaccatcattttcagtttttttcataagatanacaccgcggcgcaggggggtaaataaacaggcataggtcacaaccagcaactcttcaatcaataattagcaacacgggtcccctcctcgatcattagttcataatatacgatcacatgaaaaacacaggctcattaatgcggttcagaacgcgtgtaacgatcaaacagttgcatacatacaagaaccaccattgacaaatccagtgacccttcatgacc

SEQ ID NO: 239965 - DNA, 356 bp, Gossypium hirsutum
aataaacaacattggcaactccattttcagtttttaagctatcccgtaccttctggcacacgcgcgtgactgctctcactttagctcgtacttccacctcaccaacaacaaatatcctcgacgtcttagctgcttggaaacaagctcagcatattctttactttgatcctcaaatctctaatggtcgttacaaaagccatccacttatcgacaactcttcttcttgatcgaactctggttgttcgatccgacttcattcacggagctctctgcgaagaacacatcatgttgattataaaaaccttgtgcgatcctgactcgaccgtgattgagcccgagttaacacgctcaccacc

SEQ ID NO: 239966 - DNA, 324 bp, Gossypium hirsutum
atcaaggcctacgccaaacctagattttgttgtcttctgccggggtgttagcgaccagcacggagatcgatgctaagggcaacaatgtactcaaagttgtcgattgggacacgtttgtgattctacctccgtacattgcgttcaaaggaaacaatgacatgttcttgcgtaccgccgagatcgatggttacccgtatttacagctcttaagataggatattgaacacgcagctgtggaaatggacgttttgtatactctcaatggtgacattaggatcataccggtttgttccgataaagattggaagcgtaaaccgaattgga

SEQ ID NO: 239967 - DNA, 191 bp, Gossypium hirsutum
  unsure (1)..(191): unsure at all n locations
cgcgtccgancccaacctaggtcctcttatttttggcctctttaaggcggcncttcggccctcttccttgggaacacaacataggtaattcgggttttaagggaaggccccgccgccgccgccggcgccgccgccgttgcctaaattcaaccaatcttggtattccaccttggcacccaaagggtccgttt

SEQ ID NO: 239968 - DNA, 275 bp, Gossypium hirsutum
  unsure (1)..(275): unsure at all n locations
ggcactgaagctgactggtgcaatttatgttctcttccncgacacacccgcccancgggataatggctgccgtccaggagctcatgcgaatccctactcacgcggatgcagaagaattacacgctgtcggcggtagatttatttttacaagcacttttaaataataaaataatattgtttcatttataattacgaatgccgtcgccgtcattgtgattggatggattgatgtggataaaattattattattaacttttaccaaatattattaaat

SEQ ID NO: 239969 - DNA, 305 bp, Gossypium hirsutum
  unsure (1)..(305): unsure at all n locations
gcgaacggggannngtncnnnnatnncttttgatgtggtcttgagcaacaaaaccacgactgcggtgggtgctaagagagcaaagcctactattattgccccaactgtcaatcaagatatggctcatcctgaaagatagaatgctacacactatgccgcgtatgcttctagagactatatggctgactcactacataacgacttatttaaaaccaaccgggcaatggtagtatgctcacaccgttacatagccaacgacaaggatggaattaattgttcacttgctcgaggaacatttcagacac

SEQ ID NO: 239970 - DNA, 167 bp, Gossypium hirsutum
  unsure (1)..(167): unsure at all n locations
nnnnattcnaggnnnnnacaatattgcaggctgatttgccgcccgccaccaaaggcaactaggctgttcaacatgggataacagctatctgagaaattgaacgacctcttttgtagggtattatttgtagtatggcagcaaaagcttgtttgagcaaggaagaagag

SEQ ID NO: 239971 - DNA, 216 bp, Gossypium hirsutum
cccacgcgtacgattccgacctgtttttcctttcttacagcatcaacatcgacagactgttcaaggaactgacactaattcatactttttgaaattcccagaacagacaaatatattataaaaaggggtaatttctgtagtggagaacccaacacgaaaaaaaaagaagaagaagctctaagcatcacttgaaatggctagaccgatactacccca

SEQ ID NO: 239972 - DNA, 214 bp, Gossypium hirsutum
cccacacaaactgtgaagcctaatcaaacagggcatctgctatagctaccagattaaatgctggaggcctttcttgcacggttcttgacaaagaaacatctcagaagcaaattttggagaagctcatatggatttgtgcatttatgcttgttggagcttgtcattcctgtggcaattataggcgttgtatagaatgaatacctttttgagagct

SEQ ID NO: 239973 - DNA, 119 bp, Gossypium hirsutum
gcatacactactagtacccactactagcaatggctttcctcaaagatctcattggctaccataggcactgcctcttcggcacaagctaacatgggcacccctttcaccggcctaagtct

SEQ ID NO: 239974 - DNA, 264 bp, Gossypium hirsutum
  unsure (1)..(264): unsure at all n locations
gtntaaaaatgtcaaatagagagactttatgcttgagatttgatcttttatttcttgaatattaaaaattggtagcaactcatatataaagactttatgcttgagaaacaaaccaatcaaaaataccaataagacttttagttcaatccaaatttccttagaaaattcaatgttaaaataagtttgactactagaagatctctgccattatgctgattattaaatacctttttatatgactattttaatggaataagctattgt

SEQ ID NO: 239975 - DNA, 343 bp, Gossypium hirsutum
gtcagtcgggagtagagactcgatagaaactcagcaaaagagaagcccaaatctctatggcgatggcgagtctaccatcttctccacctgcgccatcaccttcttcaatctccgcttcccattctgagtccttcgtcactcttgccaccgctcttctaccaccgcaggcccaggttgttgctaccgccgaaaatggaacgctcaatgtcgatgaccaaaagcctcaaattgctaaccattttgcggttcttgataatccgggaaacaattggaagtacaagaaatttgaggctgactacgcccgtccggtgatggcaaaatatttctctaaaaataactttta

SEQ ID NO: 239976 - DNA, 271 bp, Gossypium hirsutum
  unsure (1)..(271): unsure at all n locations
accacgcgtccgccacgcgtncgctcaccatcaccgtttttctctaatcgtatggccactccatcgatcctcagaaactctgtatgccctccgctgcaccattcctttcttgccttccctaaagatttcatttccttcattttcctacttcattaaatcaaggcctcttacttcttccattatgagaggaagtgtcttaacaaaggaagtttttgaaaccaaagaggcagtcattgtggatgcatagaagaaaactttatttgtagcttga

SEQ ID NO: 239977 - DNA, 155 bp, Gossypium hirsutum
attaagcagtcagcgcaaagtggtgttgtcttgactctgtgtgctaacagcacatggacagaggaagcagcttatctgacgatatgagaagctttaaacttgcattatatttagatgaaaaaaagatgaagctatacttcttacatgtttgttga

SEQ ID NO: 239978 - DNA, 318 bp, Gossypium hirsutum
gtaatgccagctacaaaatgaattaaacaagaaaaacaggggggctgtagcacaagtccaacagaaagttatggtaacgcgacgtggcgcagacaatactacaaagcatttgagggctggagctattgccgtcatcgttttgacaacatttgttgattcggtagagagatgtaagcttgaaattatacatcgtggggaacaaaggaagatatttttgcttgttaagaaaaattgcttaacacaaagatttcttggattattgaaagggaacttaattaagtgttttttgcaccgctacattcaaagcctaaaattttt

SEQ ID NO: 239979 - DNA, 238 bp, Gossypium hirsutum
  unsure (1)..(238): unsure at all n locations
accacgcgtncgtccacgcgttcgtgaaacttcatttctctgccacaaaaagctcctccgccccaactcccctgggatcaacagcacaattcttaacccaaaaacataaaataatggcagccagggtagcaacaatgggttatgctcaattgcaaaattgcgctaagcatctagtcttaactatttatgggcaggcctacaaagtcaacccccaaagccccttctctctttttttcca

SEQ ID NO: 239980 - DNA, 147 bp, Gossypium hirsutum
ccaattctgactatcacttgcatactatcaattggcagcttctgcagtaataacgactcgtgggcaatttatagcgttaagacccatagtttctactgctccagtttggatcctgtcagcacttcatccaatgatgcgcaaggagaa

SEQ ID NO: 239981 - DNA, 158 bp, Gossypium hirsutum
gttaaacatctacattgacaccttgttcaaacaagaaactctctctaaatgacgggtttcttgagttcctattgccaaaacctattcacatcaaaataatctgaacttgtctatcatcgagattagcttgatctatgactttatgatataactatctg

SEQ ID NO: 239982 - DNA, 108 bp, Gossypium hirsutum
gttcgtctggcgatcgagtatatcgacatttccggtggtgaaccaatggagctggtcccgagatgtgccgaaataattgcccgtcaacttgagcttgacaaaattcta

SEQ ID NO: 239983 - DNA, 307 bp, Gossypium hirsutum
  unsure (1)..(307): unsure at all n locations
cccacgcgtacganaaaacttaaccacatttcaaaagtccatcctacaagtcttaattttgggagcaaccttgtataatacctctatcttcaccctaaactgtaccaataattgacacatagatagtcatcacggcactctccattacacctacgcctaactatcttacgaaatagctcatctaaaacgacactttgtactatgctgactttgctatgccatcctacaataaatacaagtcatgtcttttctatatgaatgagattgatgaattctacaatcattgcaaggactataatatgaatac

SEQ ID NO: 239984 - DNA, 338 bp, Gossypium hirsutum
cggacgcgtgggcaaaaaaaaagaaaaggggaaccaacttgttcaagaaacaattaaaatggcggattcacagatttttaattgaagaatccaagtttatctcatcttgggttttcatttctttggtttccaggttcttcttcattattcctttcctcctttgagttgctttaattataataattgcatattttttccatttatgtatttttattcgactttttattttttgggtttgttttttcgtttattgctttctataattggtcttccttgttatgcttgagaatttggggtttttggcgtatgcttagcttgacttgaagggtatgtttgga

SEQ ID NO: 239985 - DNA, 347 bp, Gossypium hirsutum
gttattctttcctgatggagaagctgaaaatttcaccatctaaaaagcttgaagtgctttgggctgataaatgaccaaaataacctgtcttctcccccttggaaaaacgatctttcctctgctgtgaaagttctatacctatttttttcacattttcgatgcgaaagctgcttcctgatctttgttcctcttccgcacgtgagttcggtttcttcttcttctctttaatttttagatatgctttggatgtatttactttttaattctggcttttgtgcctcttttgctctacttgtatgagcctctactgctgtttgctctgcctcttttgttttgggccctttttt

SEQ ID NO: 239986 - DNA, 413 bp, Gossypium hirsutum
atttaaagaaacttcgcttcgttacggcagctcccgtctcaacgcgcctaccttaccattcgacgcgccacctatcttcggtttcattttccttctctttcattttccttctatcttaaatgaaatgagaaagatctgaaggagattggaagttggtgattgagatttgaggtttctgaggagagagacttattttggtaattttaatgaaggatgaacaacgtctggtgctaagaagaagatgggaggagtaacgtcttcgattgccgcgaaatttgcgttcttcccgccaaatccgccgtcatacagagtgctagaggacgagttatgcgctggtcagctttacataccagaggtaccgaggagggacggtgtcgacgtcttgaagctactcacgcgccgcgggaacgaca

SEQ ID NO: 239987 - DNA, 203 bp, Gossypium hirsutum
tcattaacgttgttcatgaaatatgggctttgcatggacgggcacccagggaaacctcaaacctgtcccagaaaagatgcacaaagctgacgaagaagtgtatgtttgaactatattggtgaaaaattttgtgaataggatatggttgatgaagggatgatatatagcatattattataagccatctatagatgtaattttgc

SEQ ID NO: 239988 - DNA, 205 bp, Gossypium hirsutum
gtatggctttgcattaaatatgcatcattagatatagacgtttgtcgtacataaataatttattctttgcctttttttaatgcaaaaactggtgttatattagaattgatggttgtcacgacatcgttttgatttcgtttaacgcacagtcttcaatacggataacaaccattcagtaatccaaacatacaatttcaccacatac

SEQ ID NO: 239989 - DNA, 373 bp, Gossypium hirsutum
  unsure (1)..(373): unsure at all n locations
acgcgtncggcgaaattgataccaaggacaaaactgatattgatgcttcttacagaactgttcaacgggctccagcagtgcttgttgagcatgatataaatgatatattgttgttttctcctgatgatgttggtcttaaggcaggcctaccattactgttttcaagcatgcgaactccaaaaaatcagcatcatataagccttggagctatatcaaatcatggtcttgcttctgaatgtttatctggaaatgcatgcataattgttagctctcctactctgaaaataaagaagagtgaagacccctccattgctgatactacagtacaatttttcaagtcatcaacaaccctaaaaaattccgttgataatac

SEQ ID NO: 239990 - DNA, 131 bp, Gossypium hirsutum
ctcactcgtacgcttacccttaaatatattttaacagtatttacatcaattcttaacttggggactaaccttatattatacctctagatcctcctaaacattaacaataaccctcacatatatattttcca

SEQ ID NO: 239991 - DNA, 259 bp, Gossypium hirsutum
cggacgcgtgggcggacgcgtgggctctagttcaaattttggaaaacaacgaaatctagggttagtacaattccatcatagtttaagaacattgggaaatggaataaagaggtgtggatttaggagtatcagtttttgtagtactgatagaacgaacctaacaaaaagatcatgtctcttgagctgcaaatgccaaagggctgatagggttagtggattaaccgcagatgatggaagacccgcatcactttctataaat

SEQ ID NO: 239992 - DNA, 255 bp, Gossypium hirsutum
tcggccgattactaccttatcatctggcccaatatcaacaacggagtctattgagccacctatgcgggaagttgaggctgacgtcggcataaagagattcgatcgttgctcacaggggtatacagggatgcctgtatgtgatttggataagagggtgccacatggcaagaaagtcttaggacttgatctagtggtgcggcgggataagaacgagaattgaatggaagggtttgatgatacttgatctcatagatt

SEQ ID NO: 239993 - DNA, 245 bp, Gossypium hirsutum
cccacgcgtccgtgtctttaaacttttgtaaacttagccatttcccttcatcttctccactgctaaccagcgaaaattctaatactcgataatggatgggaatgattctgtagattcaaaacaggacactacggatatggcacttttcgtccagaatttacttcaacagatgcaatcaaggttccaaacaatgtctgattccatcatcacgaacatcgatgagatgggcagcaggatagatgagc

SEQ ID NO: 239994 - DNA, 264 bp, Gossypium hirsutum
cccacgcgtccgttgatagacagattatgtaagccaaaacgatgaaagcatatccctcactggggaaaatcgcgcctgcgctctacaatccaatgcatccctatagagctatatatatgcacattatcaccaaccgcaccttattactcataatcgatgacaaagagttgaacgtcctgaatggttctcatagcggtagaattctgactggaactgacggacatgatgtgaccataacaacatataatccctttaaaccgattg

SEQ ID NO: 239995 - DNA, 406 bp, Gossypium hirsutum
  unsure (1)..(406): unsure at all n locations
cccacgcgtncgatcccttcccaactccatatttggtgtaaaccatccttgcacagcacaggcctctgcaagagcatcacttcaaaacaacaaactccatctttcaggctaatggaattcaaatacagagctgttgatgaacggccgccgaaggatttccctccaccctcctcaactttcaatcctttaccgcctcaaggatttctaccccaccctgtcaacctggaattggggaaggtccaactccgagaagcgatcatcgcctcggatatcgctcgtcggagagccttataagctcaagtcagaagggagctagaaacgggcttacctttagaccaaaggctcacattgcacctncactctcactctaccattcctttcatgcatcaccttaataactataatc

SEQ ID NO: 239996 - DNA, 347 bp, Gossypium hirsutum
ctctctcatttaactcttattatattgttgtagtgatattagtagccttttttctgttgcggtgtacattttgttactgatttttgcagccaccgcctgaaaaaggaacagcaatggcgtacgacaggctacgaccatctgaacccggcagctctggagttactcagcaacaaaatcatgaagaacccaaagccaaaaacaacaagagaaagatcgttattctttcggttattgcattgacgatgatcgttgcctcggctgtttgtgccggactcgtgattggtctccgtgaagccggtgctgatcccgtcggtacccaagttcgacgtaagccgacacaagctatt

SEQ ID NO: 239997 - DNA, 432 bp, Gossypium hirsutum
  unsure (1)..(432): unsure at all n locations
cgcgtgcgattcagattanggtttttccgcagcacttctatttgatgattaattagggttttagagcgggtgcttagggttttgagattggagaggggagcccaatgctgaatttggggattggttgtgttgtttgtccccattgtggagctcatgatgacacccaaatagggttggatcgattgtgcttccgggcattaacccttattgccattggtgtctaagaattactagtttctttgctgctatgcggcatagcttagcatcaaacactacattacgctggttcttaaggacgtgggttgatctggctctctctttagctgctttcgttgtccatcgggattactgctgtgtgaaagataaccggcttcgtctcctctctgttagacctctgttttggaaaaaaaaattaagtgcattcttagcgat

SEQ ID NO: 239998 - DNA, 327 bp, Gossypium hirsutum
  unsure (1)..(327): unsure at all n locations
cccacgcgtncggagacacttatcttgcgtggtctcttaaacggagtaaagcagtgaacaggcgtaaaacaggggtgggggtgatcggaaaggggcacatgaatggtgttatatatgcgttagtgtcggaccaagggaacctacggttcatagaccttgcaaggaagactccatctgaagctgaatctaatggctgggttcaacgtcttctcaaaagcttggctagagacactttgattggcatcctattatgggcattatatgaacagattaaatcagctggtatattattatagtataatgtgattaaagaaatcatttgtgaat

SEQ ID NO: 239999 - DNA, 364 bp, Gossypium hirsutum
agagaatatcagtgaagttggacatctataggaaattctcaaatgcattagctgtggcagtgattgcttctgttgcatggataacttatgaggttgttttgtctagatttcaatttctttcttggttggaattttcaagaatggtggatctgattcgttcggcattacagatatacttcaaagcaactgatccattcaatgagaggtggcaaagtgcttgaatcatcacagctttttgggacatcctttcgttggccctactctgggttattggctacctttggcccccttttaaaacctcccaccgggccgccttattcctttaaaaagtcctttcaagccactttccaaccttacccttaaa

SEQ ID NO: 240000 - DNA, 287 bp, Gossypium hirsutum
cccacgcgtccgatctgatccaaaaatggcttcctttgcttctcaaacgttcctcatcaggttcaccctcttctcacctttcttcattacaatcaatggagaattctcgattcaatccattgtaacatccacaaaacgcatggagaaaatgacccatctccatttctatttccatgacactataagtggcaaacacccaacagccatgcaaatcatcaagccacataacacgtcagcacgtgcgttatttggtatcactttcatggcagatgatccattgactgaaa

SEQ ID NO: 240001 - DNA, 306 bp, Gossypium hirsutum
agcgagcattcaataatatacagtgtctatgccccattcccaatgcttcatgtaaatatgggatgccttaggtgttatgtcccgctcacaaagaataattgctcaacttgaacatcttcttgtcgaactaacaatactcaaaaacaagaaatttgcgaccactataacccatcaaatctgcaaaccctggaatgtgaatcacttcccatggtccaaaaaggatataaaaattccccaaaaaaaaatttggcgttcctttttaattcccgaaaaataagaaatttcatccgaattttgttccttaaa

SEQ ID NO: 240002 - DNA, 243 bp, Gossypium hirsutum
ggcgggatcaaatctgtgtgttagagacaatggacatgttttgttgggggcggagctgcggacattaatgctgaccttgtcgatgatgaaataaaacacggacctcgatgatggacatgggacactaccacaccaagaatgctctactttgcttatgcctgctttggcgattgcgtatgtgaggcgactcgcggtgcatttattagtatcatgaatgtaagcagagaggattgggtacttaga

SEQ ID NO: 240003 - DNA, 136 bp, Gossypium hirsutum
gacacacttacaatatctactgctcgtaccactgagtcctctgtcacctcagcggcggtgggggcgaatctaagcttccctatctgtttatcttacacacttcacgcaaacgttatcgttgaccacttagctccat

SEQ ID NO: 240004 - DNA, 182 bp, Gossypium hirsutum
cttaaaacaacattagtacccgcctatgtctgtatctcacatttctactatcccacttctggaccgatgattcaatatctacatattcattcactacctatttaaacaaaactaattacatgcatacccactattttaaacattcatttctaaacacaaaaccacactacttaactcttatt

SEQ ID NO: 240005 - DNA, 251 bp, Gossypium hirsutum
cctcgacttattctaatcctttcttgtaatttatataagaagaaacatggcttgttcaactcggtgaaccctttttatacgtgggtccacttactctaaagctacgcactcttgccatctcaaagtcccgttcatgcaatggcctctgcgaacgataactaacactaagctgactcaccgaagcatcgtgctgctggccacggacacacacctgataatggtgaaactgaggaccctaatgttcaacttaa

SEQ ID NO: 240006 - DNA, 188 bp, Gossypium hirsutum
cccacgcgtccgggaaattcttgttttttaggaatattggtaacaatatccctgtgtcttgagttgtttggtgttggtgttcatggtcttggtgtgaattggggtaccatggcatacataaactttccccaaaaaccaggggttaaaatgttaaagaacattggattaaaaaaggttaacctttttga

SEQ ID NO: 240007 - DNA, 140 bp, Gossypium hirsutum
gccacgcgtccgaaatgttatgcttgctttagagaggcatctttttttggtgtatgcattaggaaggtcattgtaccctttacctcttcattgaactcaggaacttaggaataagggagttgctatcggaatgttcgagc

SEQ ID NO: 240008 - DNA, 160 bp, Gossypium hirsutum
gaaagatctgatgatcttttagaacaaaatattgaatcacttggacacaaccaacctatagagcagtgttttgtttacactcccaaaacccattttcaaataggcttttatggactcctttaccctcacttattattaattcctaatttttttcaacaaa

SEQ ID NO: 240009 - DNA, 185 bp, Gossypium hirsutum
cccacgcgttcgagaggcatggctatttcagactacatttaccatattacccctatcacatggggttatttactcctactcctactactatgctacaccataaccaccaccaccaccaccaccacctatgctataaacataacctacatgctctccttcttccaaaaccataccttcttatcctc

SEQ ID NO: 240010 - DNA, 339 bp, Gossypium hirsutum
atttttatatatattattcatagcccctagaaattatataaattgcctttgcctctttgagtaggaaactactaattgccctgattctttattattaacaatttctactttttgagtattgattttctctctttttctttaaaccatctgccaaattttattttcccgaccagggcctaaaagaaatggacaaacgtgaccggaagcaagcgaagactggtagttgctgttctgaaggtatgttatgtcctgaattcctttttgtttcctctttggttgctttggaattttcgtcttgtttttccaacttccatttttggactttctggtttgggttta

SEQ ID NO: 240011 - DNA, 502 bp, Gossypium hirsutum
  unsure (1)..(502): unsure at all n locations
cgnntccgcccacgccgnntccggctgacgttcnaatatcaacgtnntaatcttcgttctttggctgcgatctggtatcagagcgatggctnnntttaataagactgaccnnngacggcggtgccaacaaccatccggctttggtactcgttgcacgcactcttctagcattcacggattgtgcgcccttttcgtcgcttgtatccccgtcggcgcctaaccatctccggtggccgactgtcaatcccgcccgttaccattcggtgcctttcnngttggcgggaaccattacatcttttaccgtggtatccctttattaggattggctcgaactccttggctcaacccgtcgctttgcgctgttacttaaaggttcgacaactagtgggcctggggagtaccaaggctttcgggactaatcatccggcggggggagcattataacgcgttccttttcgaaatcgtgatgactttcggactggtctacaccgtctacgccaca

SEQ ID NO: 240012 - DNA, 232 bp, Gossypium hirsutum
tccgtgaataaacataacgagcattcgatcatatgagatgaaagatggtcccttcaacaagcatgtgtgataagaggtgagagaagaatgcttagacaacgaagatgaatacttcatatgaagctttagatgagagccttttaatatgaccctttgggatgctttatcctcgtcttcctccatattctttctccttcaacattggagcttttggctgaagtggccgtactcg

SEQ ID NO: 240013 - DNA, 196 bp, Gossypium hirsutum
atttaacacacatcaatggccgccaacacacttttgttctgtggcataaccaccacatttgggtgggttctttgctcatcaaagtccaagttcagtggcgccgccgcatcattgcctattgctgttggtaccaatgttggccaccgcgttagcatgtcatatgtctggatgcctggtcaacctagaccaccttacc

SEQ ID NO: 240014 - DNA, 409 bp, Gossypium hirsutum
gcgcccacgcgtacgcccacgcgttcggcgtgtctctttcttcacctttcctctctcaattaagctctgttctctaatcctcgccttcaagctctgacattctttcattcctttgcccttttccccaacttttgtttttcttgctacataaaaggctttggcacatgtattccatgccttttgtacaaagcctacccctatcctccctactgctgcagctgcatttccttatcccatgactacctctattggcatgcccaccacagcgttgactttagtattgcaagcaaaaagaaaaacaaacgttatgttcacacaatggtttgctgcaaaaaaagagcttattgaagacgattatggacgagatgatgttaaaatggaaaaaatggaggagtctagggaaacatta

SEQ ID NO: 240015 - DNA, 433 bp, Gossypium hirsutum
ccggtgcggaattacggcggtccgtggaaacttgttcaaaattatgtgcctacttttcaaaacttacattataggagattgtcttgtgataactggtgtccgcattgtggccaggggtgtgaatcttctactcatgctgttcgggattgattgtttgatgcacaagcttggtccaagttagacgtccagcggccgaggtcaatgataaattctaatgagtggctgagttggctgttagagaattctgataagaacaggaaagggtaattgttgctactatctgggtgatctggttctctcgaaataaatttatacatgaaagaaacgtgcaaagcttggaggaaattgttaccttcattaagagttttgggttggaatatcgtagcaatgctaagaatttgaagcatccccaactgacatccatggtaaaatg

SEQ ID NO: 240016 - DNA, 444 bp, Gossypium hirsutum
cggacgcgtgggtttggctagggcttcatatacccatcatcgttgccgtgcgaccaccgcgccaccaccgtattcggtggccagcgatgcgccaaaatgggcccttagcctcatcttgaaacaccctagagaaaccagccctcaaaacccgaaaaaaaagagttgaatagaaatggttctcaaccccttcgggttcgattttgacaatggaggaggaccctccggcactgcaaccgtgggaaaccagtgttgcgacgcgtgggaggggcaatgttcaggggcgtggtggctgaggggaggccaaaagtcgagggggagtggcggctgaactttggtggctagggttagggtgactgctgaaaaaaattaaagatagttggctagggtttagtttatttcgggcctggtaattgcgtttgagtttgggtctgattttgtaatgga

SEQ ID NO: 240017 - DNA, 269 bp, Gossypium hirsutum
  unsure (1)..(269): unsure at all n locations
cacactcttacacccacacgtgctatctaattatctatggctctatactcaacggtctaaagccttcattagaagagcttatgcaactgtcggtgntctctgtctattgctcagcacgaaacactaacagacagatcaacgagcaccaacgccttggcatgaccaccacagagacgagacgactctgcgtctctgcctaagcctatcctaacctttagactgtcaaccaacagtgataagactgaaatgtatgattcaaaaactggcgc

SEQ ID NO: 240018 - DNA, 265 bp, Gossypium hirsutum
  unsure (1)..(265): unsure at all n locations
natatatattactaacaattgagcaaaaatctgttattttctctctcaacaggcaatggaggcgttctttgaatcttcatcgacaaccaactggacataccatacactaaagaattttcgttacacttcttccgtcaatcaatctcatctcaaaagggcacatacgaccttatgttgagccctgggtgcctatgcttttggagcttatcttcatatcttatggaacattggggggtacctcacatcattggcatgcttccgaacc

SEQ ID NO: 240019 - DNA, 215 bp, Gossypium hirsutum
gtaaggtgtagcaatccatttttagtgaactcagaatcggacgtactggaccacagattcgaggtacaaaggcgtattttactattagtatcaattcctatggaatactagtaagtgcatataataatgtcaataagaaattttatcggttgcatgcttaatttagtaaacaggactaaatagtaaagagtgcgaaagttgagttctataagtta

SEQ ID NO: 240020 - DNA, 358 bp, Gossypium hirsutum
cttcgtttcaatcgctgcgtttacatttcaatttattatcctctttctttccttgtattctagtttaataagaaaatccaaattcaacaacaaaagcaaaactcaaatttgttgagcaaaaaaaaaacagatatcattttgtttgctcttttcctatttttggacttttctgtgtattcacagcttgagaagaaagaattggggcatctctctctctttagttagattttattaatggagaaagaagagaagaagaagaagatggaggtagattcagctccagcagcagctttggaagggttttcaccagtctctacaactaggatcttctgaattccaggaaaagatctgaatgttt

SEQ ID NO: 240021 - DNA, 238 bp, Gossypium hirsutum
ctaacatataactttcctgtgccgaaaaatttttacactccaaacacatgacacaaccgaggtaaactatgacatttccaacactacattcttcaccttccacttcatacatccatctctcttccactgctttaattaaaacccatgcctaccgactacacaacccacagttgaggaacatatgattaatccaatcatttgcaaggcatggagaatggaacaggagccgttgcttcaa

SEQ ID NO: 240022 - DNA, 152 bp, Gossypium hirsutum
  unsure (1)..(152): unsure at all n locations
gaaaaccaatcctttgtaagaagagcacttccaagtttctccttngaaagcagggtataatgctacttggatacaacttatccaatggaaaggaaagtatagaactcgtatccatcatcactgaccttatatctcttagaactagaaggaat

SEQ ID NO: 240023 - DNA, 323 bp, Gossypium hirsutum
  unsure (1)..(323): unsure at all n locations
gttctttttcatcgttatttcaattcagcttccctcttcttctctatcaagtattattcacgtctttctatgtataaaactgcgttagcttttgagtttgtcgaaattgtggggtgctgggaattttgctttcttcttggatgaacagagatggctgtggaattgatgatggggtacgatggtggtaatagctttgtnaggaaaatagatgaaactgccttgcatgaagcttaaactgctgggattcaaggtgctgaagaattgattaggatgatgtgcaatagtcaacagctttaccatcaagatgcctcttctaaaacttc

SEQ ID NO: 240024 - DNA, 290 bp, Gossypium hirsutum
cccacgcgtccgcccacgcgttcgtttacttgttctagttttgataaggtatactgtatttgcgttgccaagttaataggaatatgaaccagaataagttggtcgattattctgttaccataatttcgtatgttgaactctttgaggctatatataatgcaggaatgaactagaataaattgattgatcagtctgccaagcgtttaaattaccaaataaaagaaaaaaaaaaaaaaaaaaaaaaaaaaataaaacaatattaaaatacaatgtttttttgaagatacaag

SEQ ID NO: 240025 - DNA, 373 bp, Gossypium hirsutum
atcggtttaaggtttcgctacaaaacaggaatcgtttcatctccgattcaattactttccgtgtacgtaacgtcctcgttttgaggaaccacgagagattcaatctgtatggaggaggtagattaaggttcaaagaaagcaaaattttggctaattgtacagataacaacgattcgaacgatagttccagtgacaaaaatgaaagcgaaggcgggcaaggagtgaagcagaaacaaaacacgacaaattctggcagttctaccaatcagagacgagaaaagagcgggaaaagcgagctttggtggtccaaaggaaagaaatggcagtggcaaccgataattcaagctcaagaaattggcgttttgcttttaca

SEQ ID NO: 240026 - DNA, 356 bp, Gossypium hirsutum
gtgaatttgggcggtccacagagagccatgcccatggatccctcaatttatggacagggaggcatgcagtcaaaacctggaataggaaatacagatttgatgaactggagacagcattgatggagatggttaagcaggacaatcgacaccaattatgtgctaggatcttaatgtgatttgagcaacatcaaaaggaaacagaagatgcttgtagatttgccgaacaaaatgcagctgcacagagatattctgttgaagtgcttcaggcttgattggggcatgtttatgtattctatatatcaacttctatagcagaagcttaagtcttttgtttgagcacgaacacatgccctatg

SEQ ID NO: 240027 - DNA, 162 bp, Gossypium hirsutum
gaaaaactgcttatttgcattgggtttcgagaagatttaattttaagtcctctaaacactggggcccaaatgagaaaaccccaggggtctcctaccaacagtttttgacaatcaaagctttctttgccaatgccatagccaagaactcaaaaataacattcc

SEQ ID NO: 240028 - DNA, 337 bp, Gossypium hirsutum
ccctttttcttttttctcctccaataatgatcattcttccaatcatatacgaataaataattattcttttattatttaattgctatatatactacttagaattctatactttctagtttgtagtgccgttatcgaatttgcttcgaagcttgtacattttcgtacaaaagagattggattttttactgttggttgatgtttcttgacccttataggccttagctcagccttttctgatatcaattcaacccccaaatttattttgcttttctgggaacaggttttaagagcttgcaaaagtgaagtaaagatattagagaaatgagtcaacctaaaa

SEQ ID NO: 240029 - DNA, 429 bp, Gossypium hirsutum
cccacgcgtccggccagtcatgaacccagcattctcaggttcttccatggaacagatgaacgcaatttgctggagcagggtcccatgcccaaagtggccagttatctggaaatggagctaactttaacattcagcaacaaagttcatctaatctgccgagtgagaagaatgttgctattcctcctgtcgtgaagtttcaggcatctaaagacaccgagcaacgaagatgtacagcaagcagtccaggtgagagagcagagaaagacgggacctgtaatactgctgaaggaaaaaatacacctcttatccttatagctccagcctatccacagggagcctcgaagcctaacgaaactgaccagaggacaagggtgatacgagttgtgcctcataatcctagatcagccaccgaatcagcagcacgtattt

SEQ ID NO: 240030 - DNA, 178 bp, Gossypium hirsutum
gtcgaacaaagatgtcacaaaggctctccctagagcgggacagataaagaacgcaaagaggcgatatgacgggaacaccttggactactgggagaaaaacaacacactgaacagatcaggatggcacgaaagctggagcacgctaggtgattgatccgaaagattaagaagaagaaac

SEQ ID NO: 240031 - DNA, 283 bp, Gossypium hirsutum
ggaaaagtacacaattcatgtgaactattgcttgatatattttccaatggaactgcgggagtgggtgtctataatatctacttccaatgcttatgtcaagagaataaatcaccagaagcattgtctcacttgaagcgcacgatgaaagtttgctttaagccaaacaatgtgtcgtataatactatcttgagtgatttttgtaaagaaaaaaatattaatgaggccatggagctttcggaccatttttagtatgatgtgaactaaccttatgccgtcactttca

SEQ ID NO: 240032 - DNA, 402 bp, Gossypium hirsutum
aagaaaacccataaatgaatcttcagattcaaagcataatgaagaagaagaagacgaagatgatgatgatgttgatgcggatggtgatgatgatgttaatggcaaaaacaagaaaaccccatcaaagatcaagaagaaacgtggtgagaaaccaccaaaacaacccaagtggtcatgtatggacacttgctgttggttcattggttgtatatgtataatctggtggctcctcttgttcctttacaatgcaatgccggcttcattcccttaatatgtaacggaagcaataacgggttctttaaccgaaccggcttgtggtaaactcaaaaaagaaagggtggaaactaaacaccccatggtggttgggccttggattgtcacttgtggacttgaactattgga

SEQ ID NO: 240033 - DNA, 308 bp, Gossypium hirsutum
  unsure (1)..(308): unsure at all n locations
gcgtccgcccacgcgtccgatttttttttaaatgggaaaatccacttcctgtttcaaactcatcacttgcggcagcgattccgctgaaaaagacgacgccattgatgcccctgagaataagagatcaagtgacaaaaagggatggagttttcggaagagatctgaacggcatcgagtgcttagcaactctgtgatacaagtaactaccactacaggacttaaggaaagtcaagactctgttggctttgagtttcaacagcaagatgtctcggttgcttctgagaaaacctncactgttcagtacactg

SEQ ID NO: 240034 - DNA, 186 bp, Gossypium hirsutum
  unsure (1)..(186): unsure at all n locations
gagagccnnagcannaacacnagcaccagcagcaaccagggcacgcgccccaggaaccggggaccaccacgcacacaccaccaaaggccgaacagcaacaaaaccgccgacgccgcgccaggnaagaaacaggaagccgaaccaacacgcggcgcgcaaggcacacaagcaggaagaagacggaag

SEQ ID NO: 240035 - DNA, 435 bp, Gossypium hirsutum
ctttcccattattttcttcaaccatgggagcctctaatagcaagaaaaagaggaagccattgcatgggaggaggaatgtgaaggtattgatgacagacaaaatgaggcttctccaagagggaagagtgggaagatattatgagaaagaagtgatggttaatgcatgcaaagaggctgagtggcttaaagagaggaagaagttaaaggaggaagtgaaggtgttgaggaagttagtggatgagaaagaagagaagataaagaaaatggaagaaggtggttcatcaatggtgatggttcagaaatgtgacaaagggtggccattgcttgggacaaggtacttattggagcaaatgaaagatgaaagggcaaggagggatgaagttgtggagaaatggaaacaactctatcttgccatcaagactgagcttgatgatc

SEQ ID NO: 240036 - DNA, 179 bp, Gossypium hirsutum
cgagagccgaacatcgacgccggaaacgctttctcgacaacgcacgcgcctcggacacgggagggtcatatggataactgttactggtcacccaccactgcaaatgggcacgagtgctgcgcagaggttgtaacgaccgccagcgttgcacctgatgaccacgaacatgttgactacac

SEQ ID NO: 240037 - DNA, 316 bp, Gossypium hirsutum
acctttttctttttatttctacaataacgatcattcttccaatcatatgggaataaataggtatccttttattatttaatcgccatatatactacttacaatactattcttactaatttgcatggcctctataagaatcctcttcgtagcttgtacactttcacacaatagagatcgcatttcctactgttgcatgatgtttcttgacccttatatgccatagctcagccctttctgatataaattcaaccaacatatttactttgctactctggaaacaggttataaaaccttgcaaaagggctgtgaagatata

SEQ ID NO: 240038 - DNA, 252 bp, Gossypium hirsutum
cgcgtccgaagagacctccattgacgtagtaaacagatttcctaccgtcacagcactggctttcatgggcttcttagtggggcacgcagctatgctatctcaggcactggatcatatgagcttactgccaagctcgcttcaacacaattagctgcttccccacttatgagcagaggtcacaagcatcctgtgatcagaaaacagcaagcttaattttctgattgcgaaggatcaccagccatcgaaggaaga

SEQ ID NO: 240039 - DNA, 169 bp, Gossypium hirsutum
tcgaacaaagattcacaatctctctcctttgacctacagataaaggacgcaatagggtaatgacgggactccttggatactggacaataaaatcacactgaacctatcatgatgtcacgaaggctggagcacgctagttgattgatccgaaagattaagaataataaac

SEQ ID NO: 240040 - DNA, 301 bp, Gossypium hirsutum
gaaaacgtgctaaaaccaaaaaactaacttataaacggcgtgtgcagctcagcaatccacaggcattagaggaactacactattcttatgtcggctttatgcgaaaccaaatccaacccacacagttggccctcttgcttgttctatatcttcagacctcactgtcttaaatgcacacaccaaacatagtctcgtactcactatgatattcatatattctcactaaagctgttgaactgatcctatggaaggcagagctttcactgttaatgattttaaaactgctcttgctaactatgac

SEQ ID NO: 240041 - DNA, 359 bp, Gossypium hirsutum
aaaactcttgaccttatctttcctgtaaaatctttcgatctaacgccaacattctattgcgattgaaaggatatattctctacacatccttactaaacttaatcatcacactcttgtaccattcatctgagtccatataactactccaaactccatcatcaatccatttaaaatcataactagtttcccggaaacctagggcttttctctactatggccttttaaccgacctataattcattcatcccttatgtacatcgaaattatccctacaaacatctagattccgcttataattcatactggacagaaaaccgctaatcaacactttatacgaactcatgcctatttattcctac

SEQ ID NO: 240042 - DNA, 413 bp, Gossypium hirsutum
cccactcgtacgataaaatttatgaacaacttctgggcaaagcaaaaagcgtggatctggggaggaatgaactgccaactgccaaacttattacaagcgagaacaatgcacgcaatgcagtcaaagaatggtaattgatgctagaagttactattgcagaatagaaacaatgttgtctgcctctttatctgacaataaaaaaaaaagatagctgcttgatgcttacaaaatggtaaagactaaatacaacaacctcttcagaaagaataggacttactaccgagaacaatgctctttcaaataaactggaagatgaaagtaattcagacatgcataataacaaatccaaacattttcttgattctgaaaacatgattcataaaactcctatagatgattttgacacaaaaagc

SEQ ID NO: 240043 - DNA, 395 bp, Gossypium hirsutum
ggattattgcgagggaatcttcttcaaaaatttgtgcctgcctaccatggtcaactcctacgtgtactggtgtgctacatgcaattgcttcagcaacaaaagcatatggaactccattgaggatttctgagcaagataaaagaatttttccttcctagtctctggtcactacacctgaagctcaccggttctgaatctcattatatgcaccatcaaaattaatctttatggattcccactgtgatgcacaggaaaagaatcgactttgataggggtttaactgctctagcacccagcacattctcaaaataaatgattcatagtttcatctccttcttcacatatatgacaccacgtgttgactgcttatttccggtgatgtagatatacctttg

SEQ ID NO: 240044 - DNA, 427 bp, Gossypium hirsutum
cccacgcgtccgataagcaataattttggcctgcactttgctgacaaaatccatctccgcttctgtaataaaacccttgcctatgaactaaccgtaattttaatttttctttttttaatgttttaaggggtgggtatttcaatgcattccttttcctctcatccattaccaacaagattttatattctttaaaaggattacccttgtttatcttaaaatacagggtagggtttggtttctcttttttgattttttcctcttccatatttgcttactccaaatggatgtttcgcttcgatagccaatagtagcaaatatgctctatttaagggatctttggagaaggcataggaggaaggttttggttacagcaggtgttttaggaagtgggtatttggtgtataaactatatgatgctcacaaacgt

SEQ ID NO: 240045 - DNA, 365 bp, Gossypium hirsutum
cctttgtttgctctccaataccctctctaggaagtaggaatgccaaaaatatctctttaactccacaactcgagactcttaaaagagattattattttccatcctttctctctttctctcaattaatcaggccatgagtatttaatcatcgtcgtcttcatcagcttcttcatcgtatctctctttcgaatacgttttatagaaagaaacaagaagaaggtaaagagggttacatggcgtttcaccccaaccatctttctcaagaccttcctcttcatcacttcaccttccaacaacaacaaacgaaccaactacctgaaaccacagctcccaattggttaaacacggctctcctccgttcccag

SEQ ID NO: 240046 - DNA, 444 bp, Gossypium hirsutum
cccacgcgtccgcatttggtgggatttttaacgcaacaaagaagctatgtggcagttccatcaacgaatccttctcgaaaacaactacaccaacagtacccacgacgacaaacggcactagaaacgatcaccatggaagtactgccggtagtaccaccaccaccaccaccactcagggtggtgatcaaggcttgacaagagatttcttgggtcttcgagctttctctcataccgatattctcaacattgccggtcctggtcgtaattactgcatcgacacttcgcaagaacaacacaaccagtctcaaaaaccatggcaaggttaggtaatatagcaactcttttttgttcaaatgctatatcttaaaatttataagcacctttttcggaatttattcctgttctttatctttaattaaattccttctaccttttgctacaatc

SEQ ID NO: 240047 - DNA, 451 bp, Gossypium hirsutum
tatatttactgcacgcactacttggctaaactgttgtagctagttgtatgtaacatgcattatgcatatgccataatgagatgatactttagcctttctaaagttttgggcgtattagttattatttagtgtgcttatgatcttgatttttgttattgtgctttgatagatgcagtccggtggacatgggacaacttttctatgacaagggtctcaatttggaaagttgttggcattttgtgctattcggaagttaaataaattatattcccctacgtggtggaaaataataaaagcatttatcaagggaaagtgagaactttcatactatgataaacattttctaacaagactactgctatcgtatgaaggttctgaatttgctagcattatgttaacccttagatgtggggcttggagcacagaatgtcttgtgtctggctgaactaaa

SEQ ID NO: 240048 - DNA, 452 bp, Gossypium hirsutum
cccacgcgtacggttaaattcagagaagaattagaggccaatctgctcggggagagatcgagatctgctcgggcttttagacgcggcggtgcacatggggaccagtgttgggcaaatcgacggtgctactgcgcaagctaacgtcgcaagggactattacggctttgattaatggggatgacgtgtttattgtcccacataccacccagtgaccatattgtgatcctttttgctaataaaaagactgggtggaacgtctgttctcttttttcctctccgtgatctttagaaacctgagctgaagagcatccaagccatcttgaatctgtttttagccgaatttatatcttgatatctaaaaagcctgataatggatcgtaaagagagggtatgtggtgagctacaaaaggaatgttccaaaggcgcgtcttttacttaagtcatacacaaca

SEQ ID NO: 240049 - DNA, 441 bp, Gossypium hirsutum
cggacgcgtgggtatgtatgaaatccttactcaccatccgatctcatcgcatttcaatctttgaactgggtttctttcaacaatcctttaaacctcgtctttctttcccttttttcaaatcacaatctcagcctttttcttgaatcctgtaatccatgcaacaccaacaagaagttccggccatggaagtaaatatgaacttgttggggaaacttgaatcgttggggttcccacgggccagagcagttcgaggacttcatcatacagggaatactacagttgaggatgctgtaaattggctcattgatcatgagaatgatgcagacattgaccaaatgcccttggtggtaataaacttggatctagagacccctcagccaaatgatatcacagaagcaataaaactcaaagaacaggaactaagggatcgagttcgcatga

SEQ ID NO: 240050 - DNA, 268 bp, Gossypium hirsutum
  unsure (1)..(268): unsure at all n locations
ctaccttgtatcattattctctagcctttgaccacgagccaacggctaccatggatcacgtgagtttctaccccatctatggggaggaccgttcanaagccactatccttcctatgataaagaacaattggatgctcacttgacgattataagaaactataccctcccttgcaccatggaactgtcatgggtccagtctgctctgagcctgatcctgaatgctccttcggaccatcttactcttgacgagaacaaccctcttcctatt

SEQ ID NO: 240051 - DNA, 265 bp, Gossypium hirsutum
acactcttgtaggaggttgaacacgaagacgttacggtagtaagctaatccttagcttaagaagcttgaaaggacaaagcggcgttggcttgtcagagcatcaaacgacctctgggggattaaactgagccagaaagacaccatcaatggaatctcgtgattcttctggagaagaagaagttcatctatttaattttttcagaaactgattagggtcatgtttattttctgacaactgttttttcactgcttctcgatgccatgt

SEQ ID NO: 240052 - DNA, 319 bp, Gossypium hirsutum
ggaactcatttctgcttacaagcagatgaatccgggacactggcgaaactctgggtcttctgcaatgactcgagatgtaaaatgggaaatgatatcttattccaagatgcacctatcatctaagcttataaatggcaaatccatttgccttgatgtaaacttcagcaatgctatcgtcacaaacagttgcaaatgcataagtaaagataacacatgtgaccctgccagccacgtgttcaaactcgcggacagcacacggagcagacatgaggaacaattcttcttacattctgactgcatcttcgacttgcctggaaag

SEQ ID NO: 240053 - DNA, 215 bp, Gossypium hirsutum
cccacgcgttcgcccacgcgttcgcccacgcgttcgcgagtactcaaaatatatatatattggtcacatttaaagagctaacccttttttgctttgcagacaccgcaaaccctaaccctagtaccttcaattttctccctgctttaattaagttcaaagataaatgggagaaacaagggacaacgatgcttacgaagaggagcttcttgattacg

SEQ ID NO: 240054 - DNA, 450 bp, Gossypium hirsutum
aaatcgcacaaattcttccatttggccaggataagggtcttgagtctttgattcagccagttgaagatgagtgcattttcgatcacgcgcaagaaaactcctttccagaagcacagagaagaggaggaagccaagaagaagagggaggaggatgaaactgctcggttatacgagcagttcgtggcttcttttcaaggagacaatgcacctgggtcgaaggcatttgttcgaggtggaacaatcaatcccaatgagaaattcaagcccgattctgaaggtgaaaaggccaaagatggggtgtctgttccaaagaagggaagtaggtatgttccatctttcataccacctcctttgtctgccaagggaaaggaatctgagaagaagaaggaggaggagaggccaaaaggaaaaagagaaggggaagtctcggaacatatgatcctgatagat

SEQ ID NO: 240055 - DNA, 362 bp, Gossypium hirsutum
cccacgcgttcgcccacgcgttcggcaggcacttggagtgagcaacagttcagctgccagtgtgccactatcacaacagacgtcaagtgctttgcaatcagcacaatccaaatatgttaaagtctgggagggaaatttatctggccagagataagggcagccagtctttatcaccagattggaaggttatcggagtgcctcagcttctgagacacttgcagcacattggccacaaaccatgcaaatagttcgtcttatatctcaggatcacatgaataacaagcaatatgttgggaaggcagattttttagttttcagggcaatgaatcagcatggatttcttggacagctacaagagaaga

SEQ ID NO: 240056 - DNA, 418 bp, Gossypium hirsutum
cccacgcgtccgcccacgcgttcgcccacgcgttcgcccacgcgtgcgcattcattttcattctttctgtaagaaacaagctctgagagaagacaatggtgggttttgaacaatgaagaagaagagaaagtgtgggttatgcttgttccatggcctgccattatgcttactatgcttccttttcaccttcagtaacattgagaggctttggtgccaagaacagagaatccaggccttttcaagtacatctttctttcattagcaagcctgctagagccttctacaataaccttggtctttgaggtggcagggtttttggttctccagcatttttggaagcttaaaacttaaaagtggctttatgggaaaaaaggttaaaaggtatttttgcattattccaaaaaccttccttcttttc

SEQ ID NO: 240057 - DNA, 391 bp, Gossypium hirsutum
ctcacgcatacactattagatacaattattagccccggtactatcaatgacttcatcaatgaccatagccactgccattgccactgactctaacatgcacgctaacatgaccggtcttaagaccggccttgagtttgcagttgctatgacagtcaacaacaacgtcactatcgacattagttatgtcggaagcaatgactgcatacagcaatggacgcatactggaacgaatactgtaaagactatgttatagattctctaatatacacccgagcttacacctaaggaagtggattacgaagtggattaacaacggggttcaagatgggaatcttgattagaagacggattcgaggaccgattatagtaccgcatatacacgtgcttacat

SEQ ID NO: 240058 - DNA, 241 bp, Gossypium hirsutum
ttcactttcagggtttccaatgaagaacaaattaagagcataaaagcaccaggatcaaattcagagtaaatttgaaaaataaccccaaaattcaaggcttcctttgattccaaagtaatctttaaaaaaaatcctttcttttaatcaactcattaagcccatccttcaccgccaaatcgaacctaccacaaaattttgcgcagaaaaaaaattggatctagattctcctttcttcttctct

SEQ ID NO: 240059 - DNA, 329 bp, Gossypium hirsutum
aacaagctcacgaaaatctttaatctgtatcaatccttgtgaacatcgtagggggattaaacgccgtcttatacggatctccacgagacgattttagtaaccatgggcatgagcgcagcaactgtaaacacaatgacattttcaacatgaccctttcaaagaaagtagatcatcaagtgcagaggaatgtctagcatgaaatgtgcatgaaataatagaacatacatgagtcccacaaacagtatcataagagctgattacaactgtgcatcaatatgaggaatggaagactgctgataacataacagcactgcatgtgcctaattgca

SEQ ID NO: 240060 - DNA, 461 bp, Gossypium hirsutum
ggttgagatcacccaccacatctgctgaatcaaagaagaatttggtatatttcctgcgtgaattttgtagtttaagcaagagcctgcacatggtgcagcagcttcaactatttagggatcttataaatgaaggtatctttgacattatcagtgatgctctgcagagtcaagataaaaagctcgtactaactgggacagacatcctcatactattcttgaatcaggatccaacccttctgcgctctcatgttgttcgccaggaagggattcctcttttaggacttttggttaaagggatgattacagattttggggaggatatgcactgccagtttcttgaaattcttcgtagcttattggattcggtctcattgacaggagctcatagagataccattattgatattttttatgacaagcatttgggccagctaattgacgtcataatattatcatgccct

SEQ ID NO: 240061 - DNA, 114 bp, Gossypium hirsutum
tcggcaccgtcgcctaacgtgaatgggaaaggcattagattttgaagggtacctttgaaccaaccgttattaaggggaacccgttaactcccgtggtaccgtataatggcttga

SEQ ID NO: 240062 - DNA, 180 bp, Gossypium hirsutum
cttttagtttaatcgaagagagaagaagcgagaggtaccagcgtacgccatggctggtactgcaaagatcaccggcgctcttttaggaggccagggtcatcatcgcttgtctggcatgacacgttgccgtcggacacgactcaaggcgcaccagaacatcatgagcccgatggacacact

SEQ ID NO: 240063 - DNA, 438 bp, Gossypium hirsutum
cccacgcgtccgtgtgcgtgtgttctcccccttctttacaaaaatgaaaggaatggctttataggcgaacaataatccaacatagagaaatacaagccccccttttttttattctgttgttttttgcttctatttgctgatgtctgcttgtctgcttgcaggtacatggcggtgtacggatgtggtatggtcgtgtcgacgtggaggctcgagcgatggtagtgctggaggctgctggaggctactgcatcggcaagcgaatggggctagggttagggtttccaagaactttcaaaggattgggcctatcgggctctatttttgggtctaggttaatattagttgttgggccattgagtattgagctagggttaattcgggtttggggtttaaatatatgtttgggtttgtaatggattgggtttaaaaattgggtta

SEQ ID NO: 240064 - DNA, 235 bp, Gossypium hirsutum
aaataccgtccaacacagtccggatgtccagaaacggcttaatgaactagcgcacatatgcatggggctagtctgcatgctgagctggcccatatacaatggtgagcatctgagagcgattgcagcagctcttacacacagtgtgcacataatacggatgacacttatccgacctggactatcgtacgatgaacccactgcaaaagcaactgactattatgatgcctacaaggaa

SEQ ID NO: 240065 - DNA, 306 bp, Gossypium hirsutum
cgcctgcatgtactcggtccgagactacgcgtgcggtccgaagcctacgcacatatcaatagtgagcttacattggcatgaaacacggccagcgcattcgccgatacttcgtcgggattacttctacattcacgtcgactatactttacagacctgttgacgaacagcatgtatgacacgtcgaaactaatactagcctaaacaacctcaaaccatcgggaaccataataactgacggtacactatgaggctaatccgtcgaaactcacgctaacgctgacatagaaacgttcctaactcaacgaa

SEQ ID NO: 240066 - DNA, 385 bp, Gossypium hirsutum
tcgaaagaagacaatggtgtaagggtgtgcaatgggttcaatttcacaaagtgttttaatggcactgactgtggcagtcaaccagttggctccttgaaacgtgcatgcagttcatatgaaacaaggcaaatcgccatcccccacttctaaacctaaaccaaaaccaacctatacaacaacaatcacagccgtcgtagtaaacgttggtttcaccggaattgcaacgagaggtatcattttattcggcgtggctttcgctcctcaacttaatgattccagaaccgagctattcaaaaagtacttgaagaaaacagaggagaacaaagccaataatgacaaatagcatagaatggataattattacaggcgaaactacaaagattac

SEQ ID NO: 240067 - DNA, 173 bp, Gossypium hirsutum
atgggcccattctagatgcctcccacatatatgcccattatgctaagggacccatgcccgtcttttacgagttataacaaggcatttttatcagcaacggttgcttacttgcacaagacaacatctgggaccgcttaaccgggcttaaaaatgtctttggtactcgagtcacc

SEQ ID NO: 240068 - DNA, 447 bp, Gossypium hirsutum
gaatggcataccatggaccgcaatgagggtcaagggaatgtcaaggtgggtacacttgctgtgccttcacgcaggatgacatgtattcaaccactttgggaccacgattcataccattatacttggggtccacatgatgtgcataaccagtttggaattgaatgggatatcattaatgatttgaggattgacatggctagactggagcaaaggatgaatggtttgcagaagatgcttggggcctgcatggaaatgcaactcgacttacagtgatcaattcaacaagagaggtctggtggcctcaaccgttcagctggttcacgagggatgattgatgacagctcgttcaaggatgcccacaattgggataatgtcaagaaagggctctgatgtatatgctccaaaggcaatatcgcttcactactatacacatgtgggcacatgtgc

SEQ ID NO: 240069 - DNA, 305 bp, Gossypium hirsutum
tcgattcaaacgtaccaccttatattgaatggttaccttgtgtggacttgaacaaagcatttcgggggactttctggggggggggggggtttttttcgacccccccattttcattgttctcagccaaaggttaaaaacccatactgaaaccaagacttgcttttcctcacactatatacaacaaacttaccgatctccgccgtggctattgggttggtaaccggagcttcatcacttgctatgttgacccatccactgagtctcgtgtcaacgtgttaggggtgagtcagataaaggagaaatgc

SEQ ID NO: 240070 - DNA, 254 bp, Gossypium hirsutum
ttgtacaggctaaaagggatctgataaacggggtgaatgatcaaagaaaaaaccaagtcttgtattgttattttacaccatactggagaggataacacaacctccaaattgggcagaatgtctgggtgatgtacataatgatttaacatttcaccacactttttgaacctaaacaccataaagaagctcattccattgatactaatacagggttatgcttgaggagcaaaaacttttctattggacctcttaac

SEQ ID NO: 240071 - DNA, 325 bp, Gossypium hirsutum
tcgaatcaaacgcacaactttctgtacgaatgagtagacacttccacgcatcttgatccaatcatcatgatatgcagcctgccgcttgcattatcagggctccataccacccaccgcgtggtttcagacaaccatattgacgcagctacctgctccgaaactcaaatgcatatgggacacaacttgtataaagtgcgcgctaagcaaacaacaagctggaggtgtaagaaagacgccgcatgagagtcactacataacaaattcaggaatactcgcgaacggactgattacagatgaagattctagctaatcatatcatcgctga

SEQ ID NO: 240072 - DNA, 331 bp, Gossypium hirsutum
atttgagtggaacaaaaataacaaacagttgagtggtgggaataaagatggcggctgccacggttcttcatgttgtggcggcggcttttctccgaccgccgcattcgctgccgcggacgaaggctaaagaacccatactgaaaccaggacttgctttacctcacctttacgataacaagcttcccgttctcggtcgtggctatggcgctggtaaccgtacattcatcacttgctatgtagacccatccactgagtctcgtgtcagcgtgttatgggtgagtcagataaaggagaaatgcagtaagtggcaatggaaagggcggtacttcat

SEQ ID NO: 240073 - DNA, 169 bp, Gossypium hirsutum
gattaacataaccaaatagaaagctggcttctgtttccggtactaatatgacatgtggacctctggtccacaagtccgagtggattaagggccaaaaccttcgacacccttaggcttggtttgtacggtcacaccctacattggtcgactttaccattcgagctaattc

SEQ ID NO: 240074 - DNA, 191 bp, Gossypium hirsutum
  unsure (1)..(191): unsure at all n locations
ctcacgcgtntcttcacgccttcttaagatgctctttaatatcgttcgcccactcttacggccactcgtacgaatgaaatctgctcccttcagggcatttgtgggaatacgaatatagtatcgtcaaccacattttcaatgcgggactggaaatattagaagccctatctatctcatagctatcattttaa

SEQ ID NO: 240075 - DNA, 407 bp, Gossypium hirsutum
tcattcgctagccatagacgtattataaacatggctctttcgttctcattctggaggagatattgtggtgtttttttgaagcacatgaataatgcctgagaaaataacaacagaggacttatttaacaatctagtagagaccattgcagatggtgtctttaagcagaaatccgcgtccttttttgaggaagagaaatcaaactcagttgtctttttgttttaatcggcttttttgtatggtaaatgcgcgtttaacatattttgtcttttatatgatctctttacttttctttggaacgtacaaattaattttatccttcttttagcgagagcaactttaatatgggttctatttgaatggcttatttaccatttactgactcttttatgctttgcttttggttctt

SEQ ID NO: 240076 - DNA, 244 bp, Gossypium hirsutum
acattactgatgatcatatcttagccactcataaacgcagggccactcgcaaagaagcatggggctattcttatgttaacccagatagaaatgcggcaagcaagcgaacatggtcattacatgccaaaattgcgaggctgtcatgacatcatattttatcttctttgagcagggctgcactatgatcctgcctacgtaatggaactgaagattatggggtaatggagcgttaactctagaagta

SEQ ID NO: 240077 - DNA, 458 bp, Gossypium hirsutum
tcggttaatttcaatttctggatctttgcttctttttgtccttatttttgtggaaaagcgtgcgtgtatttttatttgtttagttgtgtcaatttattttatgattaattcttatttaattttgaatttcttgataatttactttttttcttttctattattagctttctacagttagttctttgctcagtttttacataccaaagatcaaaaatctttaaatagaaatcgccttatatatgtgttaaaattttgattattttccctttaacacatagattaaacaagaaattttactctttctttcttcctttggttgaaaatcctgagtagtattatgatttaaattctttttgtccccataagctgatctgtacatagatcaattaagaaattctttggtttcactttctcttttgggctttgttaatgggatcacattcccagtggtcttattt

SEQ ID NO: 240078 - DNA, 197 bp, Gossypium hirsutum
ggcacgcggacgcttaacctaaacaccgccctagaagattttatattcatcgcctaaattactgatcgacgctcaaaagcttgtcttttttcggggaattttatatgggtagtttgctttagtatcgagggcgaacagaccagacccagatatcgatgatgaatttcaggaaatttacaaggagtacactggcccgc

SEQ ID NO: 240079 - DNA, 460 bp, Gossypium hirsutum
cccacgcgtccgccagccctagccaccgccctagaagattttatattcatcgtcgaaattactgttcgacgctcaaaagcttctctttttccggggaattttatatggttagtttgttttagtatcgatggcaaacagaccagacccagatatcgatgatgatttcagtgaaatttacaaggagtacactggcccgctagggtccgcagtttccaaggcagaagatagggtgaaagagaataaacgttctcatgctgcttcaaatgaggaagaggaacagcgtgaccccaatgctgtccccactgacttcactagccgggaagccaaggtctgggaggctaaatccaaggctactgagaggaattggaagaagaggaaagaagaagaaatgatttgcaaaatatgtggagaatcgggtcactctactcagggttgccccttcactcttggagcaaatcgc

SEQ ID NO: 240080 - DNA, 405 bp, Gossypium hirsutum
gtcgttttggttttccttgattcaacagaggaaagagcttttaactttttaatagagagatggcagccttttccgcaacgcattgccgttcatattcatactctcattcttcatcgataaatggaggccaaaatcaacgcttttctttctcttctttttcgagattgtctgttccagctaaagctataagaaattcccatcaaactgttgttctcatgcaagatgggaatacaagcaaagatattggagaaaagaattttcaattatggaaaatctttattctgtttggaattgggaaaaatccttgactatcaatttgcttaatacaaatacatggttgatatataaacatatttataatttatgaatggcttttgatgcataggtgtagtggccacaaaagtg

SEQ ID NO: 240081 - DNA, 261 bp, Gossypium hirsutum
  unsure (1)..(261): unsure at all n locations
acttttccaaacatggagactagtgtcacgtgctacggctcctggattgttcttcctggtgtctcttctaagcactcctcggcattagtctcccctccatccacatctccttccttcagctctaagagccttaaaacacgttcactatttgntgaatccttaaggccatgcgcccggtcatcattgaacgtttcaaaggcaaagcacactacgtgacttccaacttactggagcagagaaagtctttgaagagtttctcac

SEQ ID NO: 240082 - DNA, 457 bp, Gossypium hirsutum
cccacgcgtccggcagaaatgctgaatcagcttcagtgaagctgcctatcaacaagcggagagaacagcggagagaaacggacggtggtaatggagctactagctctgcacatttctccgacgttagccagagagtgtttcttaacggccagcaataataactcttgtgttttccctcgctacgttcgaaatcgtcacggaaaatcgcggtttcgattccaagctcgaaaaggcggttccaggagctggaatccaaacaagatttctaggctagatttaatccaacaagtacttgaaagaaacaatctcattgaagattcacaagaagaagacgaagacgaaataagtggtgacgactcgtcttttttgtctttgagtgaaaaaccagataggaacatggctttgcttgacgagtacgagttggaagagcttgattttacctctcccactaatcatc

SEQ ID NO: 240083 - DNA, 243 bp, Gossypium hirsutum
gacttggttttttcagctctcttcttctctttttcaacattattataactctattcgttttgcaaactcactctcactgtgtgcccattcttctcttaagaaaaaaaattatggattgctttgatcttgagaacccattcaccagcttggacaatcaagaatctgatataatctcagctctcttctcttcagaatctgatcacatgccgttccacaactactgtctaagttaaaagagcaatg

SEQ ID NO: 240084 - DNA, 248 bp, Gossypium hirsutum
cacacattgcctccattctctaaaaccgacgccctcaaccgcggccatacgccgtcaacgggctccggtctcatttcagcgggcaggttcccgccacgttcgtcttttggtaaacttcataaaccagatgaagtttgggctgtagatgagcaagtgactttgtcttgatgctattgaactagttattcttggttattggataatggctttgtcgatctctagaaggattgtacgttcttttggttcac

SEQ ID NO: 240085 - DNA, 149 bp, Gossypium hirsutum
  unsure (1)..(149): unsure at all n locations
cacacacganctacactatgtcacactctcgcaatcgaaacgagtcatacgctatgcaccatgtcctccctaattcctgcgtgggctctccatatgaatccgaatatccgattacttccttctaaccaacatgagtgtggtggctcact

SEQ ID NO: 240086 - DNA, 353 bp, Gossypium hirsutum
tcgatttcgtttcttttataactttattatggttccattttgtttttaatgtaaagaatgtttttttgatagaattaatgtaaagaattttgaaaataaaaaaaaggaccctttttttttctacattttagtgattgagcagcagagaatgataattccgaacaagcatggtgaaaaactagtgggattattgcatgaaaccgagtctaaagagattgtcatcttatgccatggtttcaaatccacataggtcagttgcgtcatttcatctctatcaccttgctttcattagcaaatatattacgtggaaatgcctgttcatggaggaatagtaatcatttatggaaagcagc

SEQ ID NO: 240087 - DNA, 216 bp, Gossypium hirsutum
tgccatcgacaggataggccgcaacacccgtgtcaaagaaccggactcgacaggctgctctatccgtgaagaggaaacgctaccggcggatgactctgactgagactaggagagaatacgcatactatcaacatgacatatacagctcatgaatagcatacatcgcgacatgggatgcattgactcatacggatcaatgatccgctaggcgatgca

SEQ ID NO: 240088 - DNA, 361 bp, Gossypium hirsutum
acgtccacgcgtgcggcgaatattgaaagctcacgcgattctcctgcatgcggcttaggaggttgcccatctagacaattcaactctggtccaagtatggctgcaattgctgctgcaactgtagcagctgcaactgcatggtgggccgcccatggactgcttactgtatgtgctcctctgcatacaggctttacctgttttcctgcatccactgctgcagttccaccaatggagaatggtcaacctccagctgccaagacagaacaaaaggggtaaactgatcaagctctatctctgcaggttgagcaactagaccccgaaaactcttgaactttgcaaggtcagcattcatcatctaaat

SEQ ID NO: 240089 - DNA, 190 bp, Gossypium hirsutum
gatcatcaagaaatttctgggagtggttcaaaaccagctgagagttcatccattaaagggaaattttgggaagaagatccagatgctggtggattggacaacgagttattagctgttttgggttacaaagttcggtcatcagatttggcggatgtagctaaaaaattggaaatgttggagaaagttatgg

SEQ ID NO: 240090 - DNA, 207 bp, Gossypium hirsutum
tccaagcgttaccttaaggcctaccctaaagtgtcctctcatctatcattttctttagcagtgtctgttccatctaatggatggggtgaaagaaatgacggctgaatataatgctgaatgtgctacggtttaacctactgttaaaccttgtgccaatggtatggcctctaccatgctcactcactgcatcattctacccatcgatat

SEQ ID NO: 240091 - DNA, 369 bp, Gossypium hirsutum
atgatacattggatgcattcctcttttactggattgacaaaggggaaactgatcctatcatactgcccaaaatagggggtagtggtgcagcgctttttgattatgctcgagggggtccccagtttggggctgatgggttactcattggacctcccctggcgccggtcatgggcgggtttgcagggcctgacactaattcaggcattggggacttgaggcaagccaagtctagattgggattatcatatgctaagaggaaggatggtaaggagtccctctttggggatgactccaaggttactcttgaggaagtgcaagttttttgcagtcctcacattgctagcttatactaagatgagtaatggagct

SEQ ID NO: 240092 - DNA, 387 bp, Gossypium hirsutum
gtttattgagtgtattttggaattaaatattcagggtttcaactcataacaaaagttccaagttgctaatatggtatctatataccagtgcattatcaatcatctgcaatcactttccagttgtcattaacttatctttctctttaggttgaaacatagaatgaaaatgagcttctatagagggttatagatagtttagaaggaaatgggattttaaagaataataatagagagaggatgctgatagtatttgttatccctgtataattctagcatcaatatgatcccactggttgacatttgtagttttatgcagccttacattgaaatttaatttgcaggacctcttgagacgtgaagccaaaagaggtaatggtggtattccat

SEQ ID NO: 240093 - DNA, 128 bp, Gossypium hirsutum
tgtggacatacaattctgagacaccacggaatctaatactcctaaacatggcgataatcatactcggacgtggagggcagacacctattattggctattgaccacacaatgcaatacacacatattat

SEQ ID NO: 240094 - DNA, 359 bp, Gossypium hirsutum
  unsure (1)..(359): unsure at all n locations
caagtcagttgataaccttgcacctcttgccttttgtttatggttgtgtcttctagttaattagtttcatatggtacattcgtccaaaatgagatcttaaataatgtttagaatgagaatgtcgttgctgaaagaaagagaaaatggaatattagtcacagatttcccaagtcgggtgtttggtgagttttattcatatgtttcatgtatttataaatgtaattgctgaaagggagagaatatagaacagtattttgaagatttctgattctcactgaatattttctctgaacagttngatgttntcagtgtatgtngctagttaaaatatcttctttaacccacatatctttgaagtg

SEQ ID NO: 240095 - DNA, 274 bp, Gossypium hirsutum
cagtaattcatatttctctctcttgattatattttaaaaagctagatctgtttttttattggcggtgaatcgcgattgtcggcggtacttaatcgggaaagattttgttctaattagctaggctgattttcataagagatctgaggtttttttgaatttgagatgatttgagtctttagaggctttggtttttatattacagccttcaatttttggggaaattcctgccattttctgatactggtgaattttatgattggtgtttggtttgggt

SEQ ID NO: 240096 - DNA, 264 bp, Gossypium hirsutum
ttccgaactctgaagctcactactccagagctgtacgccaatcatgctcacgttgctgacatgtcatatctcaactgctgaaggtctgtcgctttcatatgttcatgatgatcgaatgcagtttgagacttgaacgacttgatctgtgccaccatgagtggagcgacatgctgtcttcatggctgtggtgcattaaactcagatacactcatgcttgtcgtcaatgtcatgggattgactctgctgcattgatatatggctggc

SEQ ID NO: 240097 - DNA, 285 bp, Gossypium hirsutum
  unsure (1)..(285): unsure at all n locations
aaagggctcttggcacgacttacgccagttagaacctccttaaaacacagcggctgcaccagctgatcctccgnctcccgctctgattgatgcctcatacgtcttgacatgactcgtcgacacctcaaagactgctgtgtcaatcgcagcctaggcttctccttcgatgacagtggggactgtgatgggtccctacatgcctgctgcaaagttcgatgtctcatgggaaaagggtcaacatggggtgattcaatgggccagaagagtgatgaggactagactggc

SEQ ID NO: 240098 - DNA, 187 bp, Gossypium hirsutum
gcgacccaattgtttgcataaaaatgatgcaaaagaggaccctcatatgcatcaactgcgagtgtgacacctctcatcggatgctgtcgagacaagaaccgagaccagataagcaccattgatacacattgcttgaccactcagactacccaactcccgggcttttattaatacacaaccagctttg

SEQ ID NO: 240099 - DNA, 284 bp, Gossypium hirsutum
ggtttggttaatttgtgtgctattccacctcatattgaacattgaccattccatgatactggactactaccgatgctctatatcacgcagcatacatctggggttgatccatttacatcacattactaacatgacattcaatgcatgggactatcgtgaagtaaacaaggcaaaaaaccatgccattttttcattccatacatggaattgttagcaacattggcatgggccattaggcccttttggttcgggaaaccgaaaaatggtgattggcatgcctttta

SEQ ID NO: 240100 - DNA, 411 bp, Gossypium hirsutum
gcgtatttgaagagattagaaagatgaaaatgagttggttttccttaataccgctgctgcttagtgtaccaatcaataatctgtcggaggctatccatggacataagctaccttctgctgttgcttctggaactgtatactgggacatttgtttccaacaagatttctcaaaggcccatcactttatttcaagtgcatcagctgcacgagaatgtgaagatggggattctaggccgagtcttcgacaagatgcgaaaaccaacgcgcagggagagatcatagctcgcctgccattctcagttaccaaacatgtgaagaaagtcaaaggatgttcactgaaacttgtgagaagcagcgagccatactgtgcagtggcctcatcttcaacattatcatcactgcatctgaagt

SEQ ID NO: 240101 - DNA, 388 bp, Gossypium hirsutum
  unsure (1)..(388): unsure at all n locations
ctgcgtagcgacttcaacgtgataggatttgggctgatcggatggattgctccgtcaagcataccggcaatcaatggcaagagcttgacggggcttttgtttgagagcattggaaccgagcttgctcacttccctactcctcctcctcctacttctcagttttggttgtggttggtattatggcacttgggactgttcatcactcttacatttggacaaattgggttcaagggaaggactgaggactacttttaattattattattttatttatgaaatatgatattattttggtactctctctatcttccatcatttccctataattgctatgcactttgtttcctttatgtccctttcaatgcaaaanagacggattctcttcact

SEQ ID NO: 240102 - DNA, 347 bp, Gossypium hirsutum
tgggccctctcggctccactccacccgtctgatatgggctcaccctgaatatatatccacaaaagctatctcttccatatcacaaccttttttttttctcttttaaaactttcctaatcagaaaaagaaatgaaaagaagctttatatagtctcgaaaccaacaatagataagtatagttgcctctaccccccacagcgtccctttccttctccgcctctttcttataatctttgcgtgtgcttgctctccttcctgttgtcttctgctttctcctattaatatctacacacacactcacgtcttattcagtacctcttcaaacttaattctttcttcctagttaac

SEQ ID NO: 240103 - DNA, 436 bp, Gossypium hirsutum
gaacttttattatgagaaataggaggagtcatactaagtccttgttgccgaccttaaaacggttgcaaactactaacagtgtgtcaacgggtacagggtattttagtactaatgcacaactaaaggtttttgtcaaacccctgtcccaaactgagatgatgacagaaggaaaaaaggtctttgtttttagagtgccaccaaaaacacaataagtcataaggggtttaaagtctaaatgtaccaactggtggtggaaggttacccttgacaagaaaatgaacttgaaagtccaacttttgaggaatttattgggtgccaggagcaattggaagtaatggatcaagatactgggaccaacccatcggtagaatcattgcatgctttgaatgggtcacacggacacaacactgtgaggattttagcatctatcaacaat

SEQ ID NO: 240104 - DNA, 298 bp, Gossypium hirsutum
tccacacgtgcgatcagataaacataggcaaagagaaaaatggcttctgctaccgctactgggtcagatcggcaggtgttagcgtcaatttcaagacgcttaagggccatatgatacacctccctactgcttgttgcgtgcggtcacacgctacataggtcaggtataccgtgcgtacttgttgatatgccgctgagcttgatacgaccaggaaaactgatgcctagcctaggcgggggctgttcaccatggttggatcacaggctccatggaggatgcagcttgcctgcgattggct

SEQ ID NO: 240105 - DNA, 254 bp, Gossypium hirsutum
ctccttcgttttccaataattcgtaacaatgtgttgtcttacttcaagctgcagctaccccgttgcatgggatcaaggttgctgtggcatgaaagaccaatgtgccgctcatgtcctcacagagcgtgtcttaggccttccggttggagcctgttggctctcggctttcctgctctttgcttactgacctaaaagacttgactctgaagtgctttgttgcttcttagctggtttgtgtcgctcttgttacatat

SEQ ID NO: 240106 - DNA, 276 bp, Gossypium hirsutum
tcgaatagccatttcctctaacatatacagctttttcacctgaaacaggttatcacttgattcctgctcaccttacgcagagatgcgtgtattctagtgtaaaaatcaagtccccttaattagcaattttttttctcccttatcttgtaaggaataaacacatcatatgttgataaaacataaatcagatagatacatgtacttttctgaaaacaaacttccaagaatggatgctttttcccattaagaaagcgaggagcgctcaaataaaaattt

SEQ ID NO: 240107 - DNA, 250 bp, Gossypium hirsutum
tctcaggccctgcatctagcggcggcggtgctgcctacatcatctgctcaaatctgatggtgatgcctgtctatatttgtgtgcacaatactactgctccagagagactgcacatcacgtcagtacctcataacatacttattaagtcgcttatgcttgctaacaatccagctggttacagctcagacgatgtcaaagctgatgatgaaggtgctagtcgtgggctgctgacaaagacatggataggagc

SEQ ID NO: 240108 - DNA, 205 bp, Gossypium hirsutum
tcgtattacctttgttattggtacccataagccttctgtggaaattctatcttttgcacctgaaggtctaagagttcttggtgctggaacgatttcactaacgactattatggaaactgctattagtgggtgcattcctcaagacgtaaggctagctcttgttgatcactcttatgttctggcacgattgacgaatggaatgctg

SEQ ID NO: 240109 - DNA, 238 bp, Gossypium hirsutum
gcggacccagctagggcaaactggttctgcgaaaatactcatagatataaacctcgatcttcctgcccgaaaaatgggtgaaatttaggagaataccacatgacctgctctctactatcatcactacaacgacgatgacgttcgggactctcaaactattagcacgaggaaacttgcccactttgtaaagagaccacctatggtggtcagaccaccaccaaagacgtccagtggcatt

SEQ ID NO: 240110 - DNA, 210 bp, Gossypium hirsutum
gaaagaaataagacacccttgttttccattaataccgaaatttgtaaagccgttcttcattgggattaatatgcctctattatcgcaaatttagttttgaacttttgctctacggatctagatctgacagcaagagcggggatcttttttgttgcacgatttcgtgatgtacatccttttatctgggatcatataaggtttgatgtttac

SEQ ID NO: 240111 - DNA, 221 bp, Gossypium hirsutum
gattcaaccgaatcttgctattggccaaaaataataaatcgtatcttactgtgcagcaaatgggcggaaagaagaggaatggcgtatgacctgaccttagcttgccttccaaccgccatctggacctccaagaagcccgggagcttatgctctgcgacttgatcaaatgctgacgtcctatgtcgatgccattaatgcttagatatggaaaggattaacac

SEQ ID NO: 240112 - DNA, 383 bp, Gossypium hirsutum
cacacatcctcaaagatatggctcattgcgttttggctccaaccccaattcagtttcagtttcagtttcattcccgcagaactggatttcttagatgcttctctgaatctgctctcaagacttctctgccatatcctattcatcctcgttttcctcctagaatcttctgtaactacgatgattccaatcgaaacagccagacacagtcctcttctcttcagctctatcgcgatattgaaaggttagtcacggacactgtaaggcaatctcaaggtgcttggggtagttcaagtgattggagccaagtcgagggagcatggattcttaaaccgaaaggctcaaaacctggatcagtcggtcattttattggtggtatatttggt

SEQ ID NO: 240113 - DNA, 161 bp, Gossypium hirsutum
cttccgttcctgctgagaagccaccaggtgagcttccttcaatggcaaagccacccattgcagtccgagcagtgacttggggctcctgtgaatgcaccaattgaccttcttccaattgcaaaaccggccatcacagttcgtccaatgaccctaccagtccc

SEQ ID NO: 240114 - DNA, 256 bp, Gossypium hirsutum
ataatctctaggaacatttctccgtcaaacaaaattaagatcaattttaatggctgcatcctcatgcgattctctttcgtcatcgtcttcgttgatctgttcggcttcttcttcgcttcggttttgttttgtcgatcgttctttaatttctaagctgtcttctcatcttcagattcttagtcaaccttttacctgttattgacataattaagaagtaaaattcaatccaataggaatcgtctgcaacatgggaaaa

SEQ ID NO: 240115 - DNA, 270 bp, Gossypium hirsutum
atccttttttttttttttttaactaaagaaatcttttaaatatatattttggtgggactcatggcatggcgatggggaattagacaaaacccaaacagatgaaaatatccttgatcatcattcatgcactgaacatatatatatgcgcctaccaggatccaatacatcacctaaccaattgacaaccatatggcgcccgctgagcctatcctttaccctaactctgcttcatataccgttccctatctcaaacaatggctattacatata

SEQ ID NO: 240116 - DNA, 399 bp, Gossypium hirsutum
gcgcccacgcgtccgagaaactagtcactgagaccactgtataaagagggtgtttcaaggtccaccttggggcaggcatttcaaacactggctgccttgccaagcttctaggtggaccataccagctattcatcaagaagaaaaacctggtgttcaaggttgacaaggtgggacatcaacccttacacttacaccctttccactagactggctatctccacttcatgcccttcaacattcattgatgctaaaaaatgtttagctcaaaaggggatcggtgtatccaagaccgtagctctgttaatacccccggagtggggacttgcgccattcaactattgtgtagccttacttactcatcatcgtgattccttgtttactattttaatggattaaaga

SEQ ID NO: 240117 - DNA, 189 bp, Gossypium hirsutum
ttctccttttggctgctcgaagaatgatactgatatatactccaacggttaagtcggctggtgcgagtgcttgctggtatactactcaaatctcaatgcgcttgagtacggattacttatctgcaggattccttagcgaaaggagctcctaggttcaattcgagttcaccaacttaccactttgacaag

SEQ ID NO: 240118 - DNA, 193 bp, Gossypium hirsutum
gccattcattctccaaagccgtggctcaatcctttgcgcttttacattggaacaacctactgggacaatagggaatctgttagagtcttccaacatgctcaacactaatcctgaatatttataaagaaaaaacatctttaacataacatagagtaaacctgaaaccggtgaagctattggagattctaataac

SEQ ID NO: 240119 - DNA, 222 bp, Gossypium hirsutum
  unsure (1)..(222): unsure at all n locations
aaggcccaggccggccgacgcatccaatccaatcactcccaatactttcataacatttcaccaacttcactctccangcggcnaacgcgtttaaccggtccaccatccttgctctcaaccaaacaccttttaattttaatggatcaaccacccgcacttctgctacaagctcagctttcatcgggaacaacttgaacaaactgaacactttctttaacaaca

SEQ ID NO: 240120 - DNA, 206 bp, Gossypium hirsutum
cccacgcattcaaattttcagcccataatcaaataaatcaaaatataaaatatccaataacaatgtgccttaaggtgttcacttcttgcactgccaatccactcaaaaactcttgtctctcctaacctaatgctttcctttctttctcactctatacatgcttttccactaatatcaataccctcaagtcttctaattcacatgaa

SEQ ID NO: 240121 - DNA, 315 bp, Gossypium hirsutum
gcgattttgcaagacgtgttcgtgctgcatctgttataaggtcgatgacaataaggatcctagtcgatggttaatttgtagttcggagcctactttcctgggaaactcttgtggcatgtcgcgtcatctcgagtgtgctttaaaacatgaaaagtccggtattggttaagataaacaacatgctgttcttgatgggagcttttattgagtggcatgtgggaaagcaaatgatttgcttgggtgctggagaaaacaacttatggctgcataagatacaaggaggggcgacattctctgttatcgcgtttctttagg

SEQ ID NO: 240122 - DNA, 349 bp, Gossypium hirsutum
cccacgcgtgcggatttgaaagaaggaattttgaagttattgggattccaagccgatgatgttgagctatcagggttagattcgagggatgcacttgtgggtcattcagtggcatatgaattcgacgttgaaatcgacagaaaggtgattcctgttaaacttttggaggatgtgaatcgatgggagtacgttgatttgccctttttgagggttgaagagctagctagacccggtgttgataatgggttggtagagcagaagaggatattcgacgatgggctacccgttttggccccctttcagttggctggtcccatggagctctggattcgggatgccaaggatatac

SEQ ID NO: 240123 - DNA, 212 bp, Gossypium hirsutum
cgtacgcacacgcgtgcggatttgaaagaaagaatttttaagttattgggaattcaaaccaatcatgtgtgactatcaaaaataggggcgggggaataactttttggtcattcacaagcatatgaattcaacccttaaatcgacagaaaggtgaaacctgttaaacctttgaaagaaatgaaatgatgggagtacctggatttgacattatt

SEQ ID NO: 240124 - DNA, 324 bp, Gossypium hirsutum
ttttgtttttgaaggacaaaggttgttgggatctttaaacacaaacaataacttcgtcgaatagcaagaggagtggcggtaaccaatcatctttttcttcgcactatgtggaaaataatgacaaacaatggactttattgctcattccgatgtttgctggggctaatatagctgtgtatgttgaaataatgtatgttaataacctgcctaataacactcatagatttgaatgtttgttgagtggctcagaacctctcatactttctttttatcatgagaaagaaaatcctcttttttgaccttctcctaatacatggtaaaaat

SEQ ID NO: 240125 - DNA, 410 bp, Gossypium hirsutum
  unsure (1)..(410): unsure at all n locations
cccacgcgtccggatttttctagaaagttgccaacaggtgggatagtttgaaagaagcaagtgctagacttttaaaagggagtcttattataacaagttttgagttcgcaatgggattcttggatctgttagttgtggcattggtgccaattctaaaagtgttactggtaactggtgttggtttgtttcttggcatanaaaacatcaacctgttggggccggaggcaagagactacttgaataaaattgtattctatgtattaagtccttgcctctactcagcacctgggccgaaacaatcactaacaaaagttgggttacctaatggttaatgccagccaatgtcttttaaccttttttcgttgcttaacttttgggttggttctttgcaaacttaattaaacttctta

SEQ ID NO: 240126 - DNA, 262 bp, Gossypium hirsutum
cccacgcgtccggtcagacaaagcctcaatgctggatgaagcaattgagtattggaagtcacttcacttgcaagttcaggtatgtctttgcttgtacttaatgagatacatgtgaaattttgtttgatgttagctcttacaagttacaactctgtaacaaagagtggtttgactgggttactgtcctttatagcaattttgttttgttaaaacgtggagaataaaagaaacttatgtctctgttccatctagaaacatgttt

SEQ ID NO: 240127 - DNA, 148 bp, Gossypium hirsutum
cccggaaggcccaggccgacccacgcctacagattgatatgacatacactgctacatacccacgttcagcaaagccttacaaacagggataaatggataacaaaggcggggcctggcctggacatgcaaacatagtcgattctatcac

SEQ ID NO: 240128 - DNA, 242 bp, Gossypium hirsutum
ccggaagagccacgccgacccacgcgtaacgaataaaataacaatcctgtttaaaccctcgtcgggtgtcccccaaaacaggaaatatggaacaaaaacacgggttattactgtgtattaaatgaatacctcacttaatacaaactcctgtttaacccctcataacaatgacgtttcttcataactttactcaaaatccatacaccctttcaaacccatatataattcttctacttaatgcg

SEQ ID NO: 240129 - DNA, 251 bp, Gossypium hirsutum
tcggtccctccaatacgatacttttctacgggtacctgctggtgggacactcccatggactaagtgatttatccacagtggtacggggctatcaaacaagctcctaaagactatggctcatgctaccatattattttctttggaaaacggcctatgtttccttatataatatatgtataaacacttattcacgcgaacctgaaacgaacttctgcttcttgtgggcgcattgcatgaaaggttgaaagcaa

SEQ ID NO: 240130 - DNA, 297 bp, Gossypium hirsutum
tgctgaccgcctcaatggacggagcattaagcagtgaataaagagatatgttacagaatcttaaattcttacaacccaccccacagctactttaacctccaacttcagctgcccctctcccacagcttcattccacttgttttcccattctgaaacagttcaaaatcttccggcgagagcttacaatttgtagcaactcctcactgcttctttctcttaggttcttaagcccttgagtctaatgcaaaggctgaagaaagttcacccaacgataatcaacagaaagaagagaatgtt

SEQ ID NO: 240131 - DNA, 290 bp, Gossypium hirsutum
atttccttggacaagagacacctttgactagcttaaaagcaattgatcagattgatctacttagggagcagcagaagattttgtctggagaggtagcacttcattcaagtgccttaaagcgtttgtctgaggaggctattagaaacccccagaatgagcaacagattcaagttgagatgaataagttgagtgatgaaataagggggaagaatgaacaaattgctttgttagaaaagcaaattgctgaatccatcttggctttacccaacaagatggagaaatcagaaata

SEQ ID NO: 240132 - DNA, 258 bp, Gossypium hirsutum
  unsure (1)..(258): unsure at all n locations
gacacacgtccgaacacgcgtccggaagaagatcaaatcctccatcaagaaaacgtttctgggcacacatgaatggattgtctgtgccnacaacatttccggcaactctaagtttgactgacttatcatgaacagaaaataatcaactcgaggagaatctcatatcaaggccgccgagccccaaagcgaacacatcttcttatgttatctgtccaataccaggtcttaccgctcctccatcatcgaacatggctgatc

SEQ ID NO: 240133 - DNA, 215 bp, Gossypium hirsutum
ctgtgctccaatatattacccgggtgacgctgatacataatgcaatgaattgaatgaatgttgcatggaggtacagcttcttgcgtggaccgattgcatgacttgactcttttacaagctgtataaacccctcctcttttcttcttcttcgaaacatgtacctttgtactgatactctgtttcatcttcaagtacaaggggatgttcaagcaaca

SEQ ID NO: 240134 - DNA, 290 bp, Gossypium hirsutum
  unsure (1)..(290): unsure at all n locations
cggacgcgtggggaatctttgaagagagcctcaataaattgtaaaacaaggccgctaaagtggaggattgtgtagcgtttggagcggccacatatcanaaactgcgaaaattcattgagaaatggcgacagctgcatcctcttcatcctccatggtagccaccgccgttttgattcctcgttttccggcagcctccgttagaactaccggctgcagtgccttgccgcctctccctcctcgtgtttcaaccgcttccttgtctttttcctcttcccgtaagctaatcccag

SEQ ID NO: 240135 - DNA, 248 bp, Gossypium hirsutum
gcggttctttgaaggggattgattcaccctttggttttttctactcatttctcaagttactgggactaaatattaccgacttctactactgtcttttcttctgttttgccaatacagctaggttttcctttaccaatgaccgtctagtattgggcagtagccaaataatcaagtatagagaaggcttaatgggacacacaccccacacaacattctttacaaaaggatgaaaggagtctatcatgcct

SEQ ID NO: 240136 - DNA, 321 bp, Gossypium hirsutum
  unsure (1)..(321): unsure at all n locations
cccacgcgtncgcaaaaatttctccaatttcctcacaaattttcatttctattttgagagatttaatttgacatcatgaaacatggagtaaatcggcctccaacccctgatggtgcagaagatcaagggaatgaacccatccttcaagaaattattaatatcaagttaattgaaagcggggaaaaagagagattaatggaaatgttaagagaaagacttatagaatgtggatggaaggatgagatgaaagctctttgcagagcatatgttaagaagaaaggaagaaataatgtcactgtggatgacctttgtcatttgatc

SEQ ID NO: 240137 - DNA, 323 bp, Gossypium hirsutum
agatcatgaagaatttgttttcattgaagaagattatgatgttgatgataatctttcccatggggaattcattgattcctccgtgaccgattctgatgatgccgatgatgatgtatcgtttcatcgtggtgaattatccagaagaaacgtagagtcggttatccctttcactttcccttttccccctataacggaggtgaaaaagtccatcccaattcctgctccgattcaagatactgatgatcatgatccatcacatgatggatctgatgatcaagatgatgatgttgatgcatcatttcatcgtgatgaattatcgagaa

SEQ ID NO: 240138 - DNA, 320 bp, Gossypium hirsutum
  unsure (1)..(320): unsure at all n locations
cccacgcgtncgctgtaaatcaattcattgattagcaatcattcaacatttctctctcaaacgccattcgtttacgttcttaaattcattggtcctgcttctgtataaacccaaagaaaaagttcaaagcttttaccggaaaagaataaaaaagctaaaaaaatgggttctcttcagctttttcacagcttttcgcattcagtttctgcggcgaccaatctccaccgcccgttaaacaaagggagagtgaatgcatctctaaacatggacgtggaagcaccgaatccattgaaattgaagtcgaatggaagcaatgaagt

SEQ ID NO: 240139 - DNA, 157 bp, Gossypium hirsutum
aaaagatgggagacgtaggaacttcccatttgtgacaatggcttgtgtacaaaaatgggggctttgacgatccatgaatggcacgtggtctgcacaggtcttactacagacgcatatgaacctccctatgataaccagttgaagttttgtgccacta

SEQ ID NO: 240140 - DNA, 297 bp, Gossypium hirsutum
atgagcctttcttaactaacacgtgcttgccgtttcttcggtgagaaagcattaaccttggtggggcagtttggttttcaggctactcaaaataacacgatgcctggagctactgcttcatacctcgagcgaacagaccattggacattgtctgtaaattgatcttctactagacacaatgctggttaacgctgggatatgagatgctgtaacaagatctacttgatcgctgatgcggtaggcatgaagatatataggtgtatacagaatgctcgccctgacacacccatacttgat

SEQ ID NO: 240141 - DNA, 321 bp, Gossypium hirsutum
cccgaattgccgcgcatccatccacacctaacgaccacgcgttcgaacactcgtacggcctctcttactaactggtcctacatggggcaaggtgccacactatggggcgctgcatatcacactgtaccacatgcaataagctgtcttcttcactgcgacataaagaggaaccatacacttttccgctcttgcattggtacccaatgataaccctatcatggcgctgacactagatagattcactatatggcagccgccccatcacgtaagtcttgccacacatgtgatgaacgatgttgctactaacttgacccatactga

SEQ ID NO: 240142 - DNA, 433 bp, Gossypium hirsutum
gaaagtttgtgtgctcttttggaatcttctggaaccaccatctcattggcgaagcgggcggcggtgctgcttgcgggccttctttctgaatttgaaggtgtagtgtcttcggcttcgttgtcctcaactcgtttgccgattcagcgtttggtggaagccttaatcgagtgtgagaatcggcatgttcaaacgaatcaagaagtggtgtacactgctaacctggtggaagatgcgccgctatcacccacggatggttcgacacgaggaggtcgttcggagctgcgtggccgtgggaggaacttccggcagcgtctccagtgtcagatctgcttccgttttggtcacgttgctcagagatgctattaccggtaccaccgtgacgattcttctccgatgcagattcaattgccaaaccctcgtgattatggggatg

SEQ ID NO: 240143 - DNA, 338 bp, Gossypium hirsutum
ctggagtacaggctgctaatgcagcaaaaatgagatgcatagctgtgacaacgacattgacagaagagactctaaaacctgctggtccatcaattatcagaaatgatattggaagtgtttcacttgatgatattctcagtggtggctcaggtggttatagtctgttgtcctgagaatatggtgcaaatgtcattttgtaccattaacattgtaaaatgatgatgctttttagcattctttttgttttttttatggaagcacatgatacattcgctcgtgtaatttgtctcctatgtagtggaaaattttcaattctattgataaagtccatccttgtg

SEQ ID NO: 240144 - DNA, 202 bp, Gossypium hirsutum
cccacgcgtacgggaatgttcgtaaagggatatgtctactaagctgctgcaaacaaaggggatcggagatgatggagacggcatgagatggcctctctttcattctcattgagagtaatgctctatagaccctggagactactttttgttctggattgccacgtactgctagttaataaacttcttgccgatgagggtactc

SEQ ID NO: 240145 - DNA, 332 bp, Gossypium hirsutum
gtcaaaccttcgctgctggaattcccttttagcaaaagctgtctcaatgatgggcacggtttccaataacactggctatcaatcacaaaatctcatctgcgctcgttacaccgaccacaattatttctatgacctcacatgcgtcaagaatggcaacacctacatttcatatatacaaagctatgataagacactacatagcatgcgggggaggtctcactactgcaaagaagaagttcgagactatatcatacataaccgatcttacacaacgacagtactttaagtgacgatataaatgtgtttgctcaaaatgacctccttgcttgcaa

SEQ ID NO: 240146 - DNA, 274 bp, Gossypium hirsutum
gccacaccatcgctaatagcatcgactgctatccaaggctaccttaatgatcggaacggatactatttgcaatggctgtttataacacacactcatgtgagctaatatcaccgcccactattatgtctgtgacctcactggcattcacaatagcaactactacctaacttttgttccatgctacgacatgacagttcaaagcatgctcttgaagtctcctacttaaaagaatatatgcagaattctatcatacataccagatcttacataaata

SEQ ID NO: 240147 - DNA, 436 bp, Gossypium hirsutum
gaaaaaaaaaaagaaaaagaaaaattaaatgaaaggaccatggtctaagcatggaaaagatgagattcttctctccctccattttcagacccccttcggtctcttaacaaccaaagcccattttcctctcagttttttttctttttccttttatttgtgatttaaattcaacacattttaatactactagcaacaggaaaacagggtgagaaaaaaaaaggggggagagtgaggaaaggaaagaaatggaagaagagggagtagggttagcattagcaagagctacagagctgagattgaaaatcagcaactgcatcacaaaagccacctccggaaatcctgtttctccctacaaacaaagccaagaaggaaaacaaactgataaaaatgctagcttgaatggagacaaaccccatcaaactctcggtggagctga

SEQ ID NO: 240148 - DNA, 213 bp, Gossypium hirsutum
tatcacacctacgaccattctttttatttttaaacatcatattactcattaacgcgccctttttacaaaaacctcgccatcgtattatttatccaccatattctaccattttttcttccccatttcaaataacaaactatctctccttttttaccaccaaatttccacctcatctaatacctcaccttctatattttaccttttacttacaca

SEQ ID NO: 240149 - DNA, 174 bp, Gossypium hirsutum
ggtatatcgctgaacctatcgctgcctatcagacttcgttcaaagaatagcatcactcgggcaagggaaaaaaaattcaaggtcgcaacattctatgagactcttttgctgacacatttttcttgccaaatacgttctctctcaccatatcatcttgaataatcccattgctat

SEQ ID NO: 240150 - DNA, 430 bp, Gossypium hirsutum
  unsure (1)..(430): unsure at all n locations
ggtttttaaagcccggttccaggtgggctgtggggtcgggctttcgagccccacaaggaccgaaacagaggcccagaccctacctctcggaattcggtctcgacgacggagatccgccctccgaaggcggtcacggggcgtccggtaattgatgggtggtggcagtgagtaggtggagcagagggcagacgatgggacgtgacatgcggcgcacatggtcctggcgtgcggcgttggaggagggactagggttaggatttcagttgtgttttactgaaacttagttaatgttttgggtcgtcgggctttgggcttgtaacttgggttttttaatttgggctagtattgtaatgtgaactggactattatttgggntttattattattatttgctttgattctttggccccgggcaaaaatgggtctttcc

SEQ ID NO: 240151 - DNA, 174 bp, Gossypium hirsutum
cccacgcgttcggacagccataggatattgctgactaactagacataaaaacgcgctgggacctcattgctgggttgaaggactgaacactcccataaaggcaagcttgaaactaataaagattagtgcaattaccgggctgctttacaattgatgtaatctaccttgatctaa

SEQ ID NO: 240152 - DNA, 338 bp, Gossypium hirsutum
  unsure (1)..(338): unsure at all n locations
cccacgcgtgcggagatccattggtttttgcagatcaaagagatacaaatgggggtggggattccattgcgcagaggatggagagagatcaccctaaaagaaaagcttcaaaataatactattatttcaattactgggttcctttacaatgaatccatgttaccttgatctaagaagctcaaatcttaatcttatctctcaccccatagaagaaaaacagaataagaataagtaggattgacttctgagataataaagcctaacactgtgtacaaagtcgccttatttatattcctttcgttngctgacgaaggagacaacaggacggtacaaatgtc

SEQ ID NO: 240153 - DNA, 436 bp, Gossypium hirsutum
ggcggtcccaccaaatgtacacccatcatcactggcacccaaacctaaacacaggccaattacctacttagctcggacatccagtccgctgccaaatgtagcgtttgctcatgccaagcctccatcaaagagtgaaccaaataaagaggatcctgataggataccttcagtttcaccatcagcatcggcacctttctgtcttccaactatgcgatggctgctatctttcctattagctattattactttacatttataacaacagggtatatcaacctattctctagttacaatcacttcaaaactgtataatccaagagttttgcggacgagagcgagagcaatgccgaagggtgttggtctcgtgtttcgagtgggggggatatatgctgttttctgtgctgtaaatatgttgattaacacggcaaccattttc

SEQ ID NO: 240154 - DNA, 270 bp, Gossypium hirsutum
atttacacttcatttctagggccttcttgaaaggctttgctaagctgactttcgaaggggtgttctttatatgcggctgagtaaacaaacgaaagaaaagtgattgaatttgaatccttttgttttttttctcggcgaccaaacagaagtttctttttttttcgtatcattttctattaaaggatctggcggctactggttccatttggggagaattttcttttaagatctttggaagaagccgcctcttttgtttgtcacagcggacac

SEQ ID NO: 240155 - DNA, 384 bp, Gossypium hirsutum
  unsure (1)..(384): unsure at all n locations
ggcgagcggccgacacattaattgttgttagtcagggactgattgtcactttggttggggctccaactgttgccatgacgacaaagaaggctactgagggtgttcctggtgttgggaaagtggtgcagaagttacccaattcgatttatgcatcccttgtgacccttgccattgttttgtttcagacttcgcgtgaagaggtttagttgagcactctatcttttctgtcaaattaccgnctccgtatatgagattatatctcagtttgtataagatgtctttcgagttggcttaactatccgaagaccaacatttcttgaacttcgttatagaaatattaatttcggggaatgtctataatgaaaatgtaaatgaacgttgggg

SEQ ID NO: 240156 - DNA, 403 bp, Gossypium hirsutum
gtctccctacctacaattcattttcatttgctacacttatctttttatcacctggtggggtaaccacaatcgatggtgggtcaacgaccatcgctgttctcaggtgcctcatcttgagttctactattttatgggtgagctgaaaccgacacagcttcaaactactaaaccatatacgatgcaacatcatcttcaacattatcatattacgactacattattatcgggaggggcaccgccgcgatatccattaactgccacattatttgaaaacacgcacctctagctcattaaacactgtagatcatgttatggtaaacctaacctaactcatatacgcaagctttggttgctgcttatcttacctttcttaggcagccgcatcacaggggttcatctccga

SEQ ID NO: 240157 - DNA, 216 bp, Gossypium hirsutum
gtcacgctacctacaattcattttcatttgctccacttatctttgcatcagcttgtcgggtaaccacaatcgatgttgaagcaacgaccaatgctgttctcaggtgcctcatcttcagttgaaccatactatgggtgaactgaaatcgccacagcttcaaactaataaactatatacgatgcgacatgatctccaacattatcgttttacgactac

SEQ ID NO: 240158 - DNA, 365 bp, Gossypium hirsutum
ttttcatctatcctattctgttattgatttttttcattatttttatgttcttttagataagcggttgttttcattatttaattcgttgggcatttgttgattatagtttcattgttataatcggcgttttgcatttttttgggtgcatatggcatttgaacaatttgttggataatttttattttttgcaattttctttggcttgttactgcaaatcaaatagattctttttataggcaggcagtggtagaaattcaagtgttgtgcattggtattaagtactatgtttggtgttttaattttctatatttttggattgcttgacaccaatcacttggatacatgcaggcttctttggcgtttac

SEQ ID NO: 240159 - DNA, 190 bp, Gossypium hirsutum
acgggtaaaccaaaatacgataatggcgaccactgctgcttctatggcgactcaaatcctgaacgggtatacgtcgggtgttgcaggaggactaggtctccccaacggcatttggcgatcctcggttaaagtatcttccggtaacaccaaaaccccttgctttactgagactgctggttaatgcaacaag

SEQ ID NO: 240160 - DNA, 327 bp, Gossypium hirsutum
  unsure (1)..(327): unsure at all n locations
ctcacatctggagatgaggaagaagtgcttcaatgtctangacagctaaaggatctttgggggcggagagacatgcaccgggagggggtgatcttggagaactatatatcagttcttattcaacttcttggtggaaaaaatcgtgatataaggaatcgtgttcttgtcatacttcacattttgacaaaagatagtgatgatgcaaaggatagagtggcaaaagttgatggtgcaattgaacttgtagttcgttccttggggcgtcgcacagatgaaaggaggttagcagtggcattacttttggatttatcaaaatataacgtctta

SEQ ID NO: 240161 - DNA, 314 bp, Gossypium hirsutum
agaaacttacgcgggggggcgggagcggacaattataacatcatccttgtctaaaacttttagtgttacaggatggagaattggatgggctattgctccagcttctgctgcttctgcaatccaaaacattcatatccgaattactgattcagctccagcacctttccaagaagctgccttaactgctttgagaagccccattgaatacttcgaaacgctgggaggagaatacgagttaaaaagagatttctgtatgaagttgctcggttcaatcggttttcggattcaagttaagccccaaggttccttatttc

SEQ ID NO: 240162 - DNA, 367 bp, Gossypium hirsutum
gagaaagacgagcacgagcctttgtatttggcatgcgagtatcgattgaaagtaaggaggttgggggaagatcaacccgcggttgataacgctcactaaatttaggcataagcattccaccaaccaatggccttctttgatgcattattctctccgctcttgcatgctgaactactggcaagtcttatgtataaacttaggaactaacctactaacacgtatgcatatttagtggctgacacttccttctatgctacattataatcgacaacaaaaactactagcgtcgtagatgtgacagctttgatacacgatgatgttcttcaacaccttcatgatgctgactaataccttgatgtttaaagac

SEQ ID NO: 240163 - DNA, 246 bp, Gossypium hirsutum
  unsure (1)..(246): unsure at all n locations
aaccanccaaaaatttgtcaacctacaccttaacaattgcaccagcatcttcaacatctgtttggaaattaaatggttacagggtctgaaacttcctcacatgaatgacatgaaaatatgtcctaatcccaaccaactccaaaacaacaaagctgtcaattttgctgaacaggaaaattttcaagataatgattattacgatgattactttgatgatcattgccatcttcatcattatgattattt

SEQ ID NO: 240164 - DNA, 314 bp, Gossypium hirsutum
cttataccggcggttttaaacctggctacaatcctagctacaacccttactcatatctgggtggaaccttaactactacatgagcactttcatcacaactttatttgaatttgcattctaggtgccattctagcttacatctcatcttaatgcacttttagattcatctatagaatctaacattacatgcaacagtacatacaaaatctataattatttttacaaaattttgaacagaatatggaagacaccatgaaagacgccaaaatagattgagatctgatatagaatcagattccaatgaggaatccatt

SEQ ID NO: 240165 - DNA, 461 bp, Gossypium hirsutum
cactctctctttattttctgtcagatttcttttttctctctcaaaaatctataaactggtgtgctctacagtcctctgggcgtgtcttcaacttggtttattacctctaatgaaaaacccactcttggcggtactcggattaagacccgcaaacggaatatttctgcacccctggacccttcatcatttgctgatgcactaatccacatctatttggataatgctggtgacctggcttcccaatcaaacacttcttgtgtcttgcaggaacttgttgccaggagcattgaatcttcacatcttaacttctcaaaatacggtgacaccttctttgaagttgttttttctggatgccccacacaacctggcacacttaaacctgaataaagggaatgccacccttactctatcatagaatgtgaagctaaacctaatccctttttactatctgtatttacatt

SEQ ID NO: 240166 - DNA, 448 bp, Gossypium hirsutum
cccacgcgtccggaggaattaaggtttgcataagtcagagactttaagtaggtttttaagtttctcggggcgaattggaaacaacaatgggtctaatgattcagtggttagatgttcaaattattccaagtctagttcaagttttaatgtgagcaaaggggaaactttgttttagtttttggtttcaactttttctcttataaaaaaaaaaaagattgatagggttatgtctaaataggattgtttttatttattttattttaattagatttttaaagaaaaaaaaggggaaaaataatcccaaaaacttctttcacgttcttcctcttttattttcttttggtttccccaatttccaaatttttttatttattttctacttatttcttccggttctcaattctcctcttcttctttttacgttctacatttttggtattttttggtt

SEQ ID NO: 240167 - DNA, 366 bp, Gossypium hirsutum
ctgaatctctatcataatcctttctaaaacgagactcgagaattggaacgcatcatccacttggactgtagcgattcacctgactgagtgaactaaaagttattgcgctaccgactcatcacttacagaaagtccttgcaatcgcatacaattgcatttcctattcctaaatcgcgtacaggaaccaactaacgcgaccaacggcgataagatgtaattcaacaaacccctggcgttactccgtgattgcaataaacactccttcttcgctaacggatgttttcgggatccgcttgcggtcgacgagcgtgcatggctggccccaaaaaatagaggatgatttctttttactatcggctggtcttg

SEQ ID NO: 240168 - DNA, 267 bp, Gossypium hirsutum
tggcgaaacctctgaaccggtcactttggtgtcttcccgatgcctttcttgtctttggtgttgcgggtggagctctgatattagtggcgttattgtggtcttttttcactccaacaccaaactttggacccactgttacccacccaccatccaagttgagcatgaatacagtcaatagctcggaaagagggttcggtgttaacttaaaatgctatcccaaagactccaccttttacgactacgcatgaatgggtgacataacttgaa

SEQ ID NO: 240169 - DNA, 203 bp, Gossypium hirsutum
gccacacgtgcgcaacaacatggacagctacatacattggtttttacatcattgacaagtgtgtggataacatcagtgagcacatcatgaagatctttatcatcaaggctaatataatcgtgcgtataatacgaggtataagtgaaggcaaatgtcaacgaaaatcgcttcaatgtgcccagatgcgtatcaacatcagtatg

SEQ ID NO: 240170 - DNA, 459 bp, Gossypium hirsutum
gcgcccacgcgtccgaaaacatttcttgtgaagttctttcagttggtattattcttattctgggggggtcaaggtatatctgaacgcttcaccaattctctcgcataagagacattcagttgttattattattctgtgccgagctttgtttatgaattgacattcatgttaaagacttactcccaaacgacatgtcttagtcttgaaacaaaacacatgtgcttcctattaattttttgttatttttagggaacttgtaatgtgctgctattcataagcaattagctccctcagcatggaggcacttggcttttacactctttatctagatcaaatgattatacactatgtttctagacttgaagaatattaacgatgtttcatatacgaaattgtgttggttcagatataaaacccgtgtatgcttctttcataacgtgggtttttattctctttttt

SEQ ID NO: 240171 - DNA, 399 bp, Gossypium hirsutum
ggaaaattaaaaacccatgggtgcaacacaacttaaaccatgtttggtactgatgatgaccttgtcggtacttgcttttgcttcagccgtatccagaaatagaatcaaatccttgaaccaaatcagagaggggaaccgaaaagggccatacattggccgtattacagggattgccactgaagaaggagcgtttttcgcttcatggtcttacaaacctgatcccaagttacctttcatccatctgttacgaagaagatttcggtttggaacgggtcatgggacaaaacgcttgtacgttcgatgtggggagggaatgactcatgcacaatgaggcacacaacaaatggttgacctatttgatatagacaggattatacatttcggcattggtggcaatac

SEQ ID NO: 240172 - DNA, 312 bp, Gossypium hirsutum
gacaccccctcggtaaccaactaacatttttggaccaagagggagagcaagaagctgcaaaatcggctgcgaaattgactcattgagtgatacattcacatatacattgacatttgaatggctctgttaagtgctcttttaagttattgcagaccctatttgagactcattttgtgcataatgatttgaagctgaaattacatctatgattccaaacatgctttaaaacttggggtaacacttggcgaaacactagactaacattaatggtaccattaatcgtttgacaaagcttgcgacaaagcttgtgac

SEQ ID NO: 240173 - DNA, 386 bp, Gossypium hirsutum
cttgagccttatccatggcggcaacaacaacagcaatagccttaaccctttcttccttgagcggtaggtctaccattccttgcaaaaccttcttcttccccaaaccctcaaaaccaatttctctccgccgcacattccgccctctttccctcacaccacaagctaaatccttcgacatcgacacttactttttcgacgatgtcaaccccgaaaaaaacatcgttttcgacccaccaacaccaccagaaagtttcaccccaccgcagtctttcgacgagggtccagaagaaacggaagacgaaatagccgcagcttacgaagaactatacgtccggcttacactggagtctctgattgggaaacgatgtgtacttcatggattcgaa

SEQ ID NO: 240174 - DNA, 460 bp, Gossypium hirsutum
  unsure (1)..(460): unsure at all n locations
agtgggagggacaagattatcatttccttctatgatgttttaggagtttgaagccaggaaaaggcgagttttaaggaatcctaggtcaagaggcttattggagttgaaagttgcttaagtgcattcttgtttaccattattattcctcaaaagatgggaatgtgatatgccttatgctttggttcaagtctagggtggataactgtgggcttcaataatttctttggtttaattttgttgagatttgaccatgcctggttccttgataaagcgtgtggagtttcatactttgatgaaaatcttaaactagattactgaacaaccttagtgtgccaacagaaaatagctaatacgggtgcgctttgttgtgtggccgctgggccacatggaacaaaatcacccactaacggaaaggactgttccatggatcgtaatgaaccacattggaggacanatacta

SEQ ID NO: 240175 - DNA, 275 bp, Gossypium hirsutum
  unsure (1)..(275): unsure at all n locations
cccacgcgtncgattgagctacattttcctattatacagaccacttcttttcacagcaatggcggcgatgaactccagtgccatggcctgcaactattctatataaggcactagatcatctgatcttaatggccagcttgctgcatcaccattaccagcttccacaaatatgaacagcgaccacacttttcttgtgatcaaaggccaccaagctcaatgctttgatgtcaaaggatctagtggcaagaaaagaagaaaaactgttatactctact

SEQ ID NO: 240176 - DNA, 140 bp, Gossypium hirsutum
accctagcctacgatagccgtaggcaccattgtaacacctgctgtacaacaatctactgtgcggcaacacactgcaggctagcggctcaacaatctcttacgccaaaactgtgctctgaatcatagccaccaaaccatgc

SEQ ID NO: 240177 - DNA, 453 bp, Gossypium hirsutum
gcgacaaccaaccaagctcagaggatcagtttcagtgctgaagagctgagccaccgatctgattgagttgtctcgacccaccccaggcgctgggctagcgagtcgcacttaccgaagaaggtcatctctccgtcaaatgtttgtattccctcttcaacccaaagattctccccaaattctctcctccgtttgcattgcccgaccctccctctaattttccgattccccctttctaacttctacctaacctcttatcttcaccctctctgtctactaacgcctcgtttcttcttcttcttcttcttcttctctggtcggatagcttcaacggtttcttttggcaaatccatggcattatcttaattatggtggcgagttccagaggattcacgactcagcttgagttgaagctctccacgctcttcatctcctatggattggcgccgagtaaaa

SEQ ID NO: 240178 - DNA, 363 bp, Gossypium hirsutum
gtgaattttgccaaagttggtgtacagattttataaacgaagtggcaaacactgaaaccgcccgttgcgttttcgatcctaaggggctttatgtttttccaatggaatctctttcgagttccctctccatctccatctctaatctacgcgagacctacccaattctcaacagccacttaccatcttcttcttttagtctgatcaaagcgccaaatcaacgaattggatttctgaaattcaactctgaaacctctcagtttcataggttttatctccaagctctaccccgagaggttcctgctgatgaaggtgaagaccagctgcagcctcttacccttaataatgggtttcgcttactttctg

SEQ ID NO: 240179 - DNA, 321 bp, Gossypium hirsutum
gcgggaacaatataggagattaactcttgcatctttaaagagtgggacctggacacaacattatacacacgcgttcgatgttgtgtcctaacatagcttgcagaagcgtatgagataacattgtcgctcactttgaaatgcctcccacatatgggcgatgctctccgaatgctccatgttttgggattcaagcattatcaacaagaagcatccttttgtccgagttttggtgacttttttagaatgcgaaacatggaagatggggtagtctttggttaacaacggttgttatatggaacaatccaacatttgaggattagt

SEQ ID NO: 240180 - DNA, 408 bp, Gossypium hirsutum
gaaaaagcttaaaagaggcctttaaactcgctactctatcactgtcccaaatcacccaagaagggaaaaagaaacccaacaaaattgaaagaaacattacctaatggttgagaatcacggcataaccaggccactcaagaggggtcgtaggtctaacaagatcaccgcgggtgccgacctctccgatttcctcgcttttccttcaccttctatcgccgcctccgcttccgggaagcctttccgtgacgctgttcggagcttcctctctgctaacgctcgactcacgacggcctttgctccgcctgtccttccttgccttatgacgtggcaaaatcctgtttagatttggcgactttgatccggacgccaacgatccttcgccgatcgtcgtgtcgctttatgtcatcg

SEQ ID NO: 240181 - DNA, 397 bp, Gossypium hirsutum
  unsure (1)..(397): unsure at all n locations
gcgcccacgcgtncgnccacgcgtncgctgattttcttcctttattttctttgctctgttaaactgtggcgtaagttatatttctttgggtttttgaagatgatccttgaaaagaatccatttttctccttcattttcactccaaaaatatctctgtttttctcgagagaatacgagttccttttcactctctttcacttgggttcttgagagagatttcgaaacattttaaagaaaaaaagcttccttttttttttttgaatctcctcaccccactatgggtcttagttaaaatctttagatctggtcttcattcttctagttttttcttatcaaaggtgtcttcctttttctcttggggagttaccttgagaaaaaacaataaacatgaattatt

SEQ ID NO: 240182 - DNA, 153 bp, Gossypium hirsutum
gtaccgcgctcaccgacttttgttcttcattccacttatcggcgaaccaccatcaactgggcggtgaactgctgggaggggcacagacactgctggactctaagataatcccaatacctgctgtccgtaccgcgagcttcacttcatttactg

SEQ ID NO: 240183 - DNA, 406 bp, Gossypium hirsutum
  unsure (1)..(406): unsure at all n locations
gccgcagaccggccggaattccggtcgagcacgcgtncggcctccaccacgaacggggatgatatatcggagtggatcaccgtctttgataccaagatccctggcggcttatctcgtacaggcggaccagaagcagatctgaaagatctcttgtcaaaggccgcatcaaaaaagacagtcacccttgtgcttcttgcagtttgtttgtgacctttgttaacatttaaggggagttttttttgttccactccattcaactccgatatataattgataacttgtttcgaaatatctctgcctgtagaactcttcctttcataaattagttgatttctatgtttctagaatgaccataatccacaacaaaagagatgacattattctatatttcctcgactgaatgctc

SEQ ID NO: 240184 - DNA, 426 bp, Gossypium hirsutum
atgaagagtacactctcactagaaacccagcacttttatcttccaaagctttcttcatgggaggcaatatcgccaacaatcctggctacaatcatcaaaacccagaaacaaaaccaacccttgtcaacatggaaacttcaagccaatgccaaaggattttccagcacgccacaggctaccgtgaaagaaaacactgccaaaaaaagctcaaataacaacaacaagaagaacgaggatgagaaaattccccaggtagtgtttgagaggatgatagcaaggattttggtatctgtgggaggtccaatggccgcgggtctggctttactgcacctatttggtgtaacgaaagagcaaaacttatgggatgcgccgttgtggctgccattcttgactacattaattacttttggggcatcaacgcttggg

SEQ ID NO: 240185 - DNA, 377 bp, Gossypium hirsutum
gccatctacctcaatagcaatagatgagctctcaattgttgatctgaagaaccttgctgatggggaggcggctgaatttggttgcagggagcctgagtcagagttggagatagaggaagaagagtctcgggcatctacctcaatagcaatagatgatattttctggtaacttcaaaagaattttacattcatatggttcctggtgataaggtttcccagtggacctgatgtgtataacaaaaaaaagaaaaagaaagataaaaaaaaggggaaatgtggtctgcattggactacttttaacatgtcagtgtatgtggtagtagttgtatgatgtatatgctgtacttaactgacttgttgttccatgcttcattgtg

SEQ ID NO: 240186 - DNA, 462 bp, Gossypium hirsutum
ttcttcttttaactggtttttttctttccccattctcatagctttcatcatcttcaggtggcgaaatcacttgtcattgggatgggatgttttctcttagtaattgttttacttggagaaatccaggcatcaagcccttctcaaaaacaaagacaaggcaaccatggaaatggaatggtactgaaaacttatcaaacctcaaactcttcttttgtctttaaccttttgtattaattggttctgcaatgtaaaatgcagtatggtgccacccaagggagccttcgtcctcaaggtgagttaaaaacagttgtgaattatctaatttggtataagtttcaaaggagttgtaaatgttatgatataaaatcaaatttatcgaatatcattaaatttctccgcgactaagatccaaacaagatagataatttccaacaacggatcattcttacatacttgcacatg

SEQ ID NO: 240187 - DNA, 264 bp, Gossypium hirsutum
attatgcatagcgagaatgcactggctccgccttaacgtggtcactgattgtttttccgacgcgaggagatctcaagtcggatggtttatggtacaccgttggcgatcttgcgctaatggttggatcggcctgcctggatcaccctgtggactctcttggcctgcaatcttatataccgattagctcggcaagactgctaaacctattgcttcttctgagcgcggaattttagccatagatgactccaactctacctgcgggaa

SEQ ID NO: 240188 - DNA, 159 bp, Gossypium hirsutum
catgctcgagcggcgcgtcaatgttattgaatatatgcacaaatttcagcacaactggcgggacgttactagtgctttgggacatgcataacgagtgtgcgagcggcgccttgtttctcgggctgtatacgccatgaactccgaacagggttcctgttc

SEQ ID NO: 240189 - DNA, 108 bp, Gossypium hirsutum
ccttaaatcaaccaccaaaggactactacattggtgcattcacaagatttacaaggactgttgtcactgcaactgcggtgttggagtattcaaactcgcaaaccgcag

SEQ ID NO: 240190 - DNA, 373 bp, Gossypium hirsutum
ctctcatattccttctttctcctgctgggggcgtccaaactatatgatgttttcccaagaggggcaccatcttctcctccttgtggggtgccgccttgctgctctttttcctcttcttctgttgctgatgattttttgctgctgttacaaccaattcatcattgttagcagcctccaaaataattatttttgttgccaaaaaatcctcctttgttgtgccctaatcatatcatctttgtcatcatctattgtggtgggctgctcttctatcaggactactctggctgccatcattccttcttttactgctgtatcatataccaccttacatcactaattacttgttgataacatcaccaaaatttttcaatag

SEQ ID NO: 240191 - DNA, 457 bp, Gossypium hirsutum
aaatttagaaaaaaaaaaaaaaaaagcacccaaatcccaaatattttgatcttgttgctatccgacccgtcatccacccaaattcggtcattttcaattttgttcatatataaattcttttatggctgctctttactcaacttcctcttgcttttgtggtagtttgggttcttacccagttcataaatcagtaaaattgggtcatggcaaggttagagattctgggttttattttcctcatcgttttcagtgcgctactcctaaattacacgtccaagcaaaagccctttctgttgatgggttacctgaaatgatggattcttcacttgtggtttgtttcggggaaatgctgatagattttgtcccgacgatcagtggtctttcgttggcggaagctcctgcatttaaaaaggcccctgggggtgctcctgctaatgttgctgtccgcataactcgt

SEQ ID NO: 240192 - DNA, 454 bp, Gossypium hirsutum
cttttgccttcctatgtctaatttgttccctttaagaaaattttttaagttactaatgtcacggatatctggattgctcatgcttgcataaggcctgctcttcatccttttgtggacttggcctgatctttgtgttccttctttcccacttgtgcagaatgtctgataactagtataaactttttaaagcatttgaattctgggatggcaaccggaagtgtttttcaaaggataagattcctatttagttctttgatttttgttatagtgaaatttaatttggcttaactagcaaatggcaatgtttgttaaattgataaggggaatatatccattaaagctaagttatagttggtatttaatcccgaaatttagtgttaatccatctaatggttattatatgtgtttccttgtttagtaacaatgtcatatgtccatatgtcaggtgctctgc

SEQ ID NO: 240193 - DNA, 282 bp, Gossypium hirsutum
cccacgcgtccgctacaacagtcccctaggactccagaggcatgcctttgctgaagcaggcagtggcgtgaaaaaaatagaactagaaggactctctgaacacgaacatgctggtgccaagatagaggctgcaccaatcggctacgaaagttcttcactcgattgcatttgcaatttgaagttgctgatttcaattgtaaactttcttgtatttggttgcttactttaccaaccacttttttctgcctataatttaattatttgaattttgcttcttccaat

SEQ ID NO: 240194 - DNA, 273 bp, Gossypium hirsutum
ttgaacttgtttgacgagttgaatctgacgccaatgaaatttaaacattaccaatattcggatgagatatagcatttcgaaacacttaatgaatctcaaacacccaagattatggtgattgctagtgcatattccatagtgggtccttatataatccttggcttctgaccagaggaagccttcatgattcgaaatgtatctaatcttgttccttcactagaaaatggacctttataaacttacgctggccttgaattttcagtataaactctt

SEQ ID NO: 240195 - DNA, 357 bp, Gossypium hirsutum
tgcttacttcatcgactacttgtaggtttcctaatcaggctcaggggaaacgctcctcacatgatacatcaggctaccatattgtaaatgtttttagtccctcacaatctgaagctacaactgatacttcagttgaatacgatatcgttcggtgatctgatgattatcatcctgctacttgggattatgattctcttcagtcacttgggctccatcacgtggaggatgaattatgcaaggatcgagcgagctatctgtaggaagaagtgaagatgatgtttgacaatgtgatgcatcctttgcagaaactcgagcttattgatgccttacatagacttggatcgtcataatactttg

SEQ ID NO: 240196 - DNA, 352 bp, Gossypium hirsutum
ggtaccgggcacgcgttcgaggacgacggcatggataagcttggggataccaaaggcatgcctaattaatatttcacgaagggtcaggggtctaagcttaaataatccagaaacttcatccacatagatcaagcgttaatcgggatgcaatgttccatctcctgcaaaaggattagctagaagcttctctaccatacccgaaggaatgtcaaagtaaacattttcagtaggttcaggagggtgaggagaaactatttgcgtctactggtcggggtgaagattccccgaacaagcccatcaaaggatcatgtgccatagtaacaagtgacagcaaattttaacacactatata

SEQ ID NO: 240197 - DNA, 196 bp, Gossypium hirsutum
taagcttggggataccataggcgtgcctaattaatatttcaagaaggcgtaagcatctaagcttaaataatccacaaacttcattcacattgattaagtggaaatcgggatgcaatgttccactctctgcaaaaggattagctagaaggttctctaccacacccgaatgtatttcaaagtatacattttcagtagg

SEQ ID NO: 240198 - DNA, 314 bp, Gossypium hirsutum
cccacgcgtccgctcattcctttataccttacagacaatctcctcaataccccatgtttctgggtcctttttcaaggcattctacaggcacttccgagctgcgagaaggggaaaatggcacaacttttaacaccgtcaactaaacggcaaatgacactaccaaggacctcatcctatggaagtcccattgcagcaaaaatgtggcgttctttggtactgaaacataacatcattggacctggtaaatgctctggcacaggtaaagcggttgccttgtgtgaaaacagcactgtgaacaggctagagaactcact

SEQ ID NO: 240199 - DNA, 422 bp, Gossypium hirsutum
cccacgcgtccgcccacgcgttcggtttgttcactgaagtcaaacaaacatggtgaaagcagtggtcggagaagaaagccaactccagctagctgaggatcgtctctcccgatcttcagaaccggctcacgttggtctggtgatagggaaactctactccgttctggaccgcggcttcatgttcgagttagtacccactcaaaacgacgccggacaaccagctagttcggctctggagccatcataagacaacatgaaaaagggatcgaaatccaaatctcagacgtctgattcttcctctaatttggtcattgacatggattgggtcgctgaacatgctcgccaagtgtcaagaatgatggtgggtggaatcaaagtatcgggtatttatgtgtgggcaagtgacgccgctttcaagaatt

SEQ ID NO: 240200 - DNA, 250 bp, Gossypium hirsutum
gcgcttttcttgatcttgttcgtcaacgccttcatcacatattacttaatcaatattttcttcgggtgagtttgatcggatcatcattctggttagaatggatctcatggtcactactggtaacatgaacatcaatgctaaattagttctacttgtggatgttggatctggaatgactagatcctggtttgacttctttaaagggcaatttgatgaaattcaggaatcatccatacgtgcagcttttatt

SEQ ID NO: 240201 - DNA, 218 bp, Gossypium hirsutum
tcgatcactcgttcgttgaactatagcgacgcttcacactagtggacgctgcagaggctgcttcaggatcatctcaactgcagcaatcaagtgtcccgatactgcgtcacacactgcaccacttcagacatgctgagaagattccaagtccctcgaataatgccctaccaatgcgactgccgttaacgccatgatcaaaataatgcatgttatgggcc

SEQ ID NO: 240202 - DNA, 286 bp, Gossypium hirsutum
ggaaatggcaggcgtctaagcagggaatgattatgaggcgaccgctgttagaatcaccgggggaagccacgtcaagccgggtgaggagatacgaataaaagagtgtcagatggtcacacattgatcttccctacctggctttctattataaccagaagctgatgttttacaagaacgaccgcagtgttgacttcgaagacaaggtttgaaaaactcaagggaaggctgatggtggtgttagaggagctttatcaacttatgatgtaagctttggaaagatgacgat

SEQ ID NO: 240203 - DNA, 272 bp, Gossypium hirsutum
ttcttgacccatttcttcaatccggatttctttgccaatcttcatccaacgtcgtaatatgacgtcccgggtcttcgcctatcatgtaaatggtttcttctttcgcaagagctttctatgctagaccatgtgcatgtgccgctgctgatctattgatgtgcttaaaagtgatgatcttgaaataaggacttcttgttcgaatatcctgtctaatgactcctattaccgattcgtctgttgaagtctcctcgctctgtctttatgacatcaaa

SEQ ID NO: 240204 - DNA, 401 bp, Gossypium hirsutum
gttgttggctttggagacgtatagctcataagttcacgtgatctcctttctttaagggttttgaatttttggtttctttctatttgactcactacatataatttctatatatctatatatatttcgtacttcattgcagatagatttacacattagcaatggattccactaaaatctcagctcttcttttcatttgcatgcttttcatttcctcagctactccagttcttggttgtcgttcatgtcgtaaagcacattccaaggctaagcctattaaaaagccccatcctgttaaacccccaatccatgttaaaccaccggttacagtccctccagtcactgttccaccagtgacagtcccttcaatagtaaaaccaccagttacaagtccaccagtgact

SEQ ID NO: 240205 - DNA, 173 bp, Gossypium hirsutum
cccatataccaacccacttgccgtacctggttagaacacctgcgctgtcacccttggtccctcggttaggaccagtgggctcgctcatcatcgtctgtccaccaacaccgctagaggccgacatcgcgcgatactgggcttaacccctgaggaaacacgcgcacaatcctacg

SEQ ID NO: 240206 - DNA, 172 bp, Gossypium hirsutum
gttcatctatacaccaccacaattccaccagttacaagctctcttttcacacaactaagccccacatgtcttcactagccggtccgtttctatgctccacaacaaactgttcttccgtgcacaacttcatctttcaagcccaattcaccggtcataacacttcctacgactt

SEQ ID NO: 240207 - DNA, 277 bp, Gossypium hirsutum
ccacacttaaggcacaactctcacactactactatcaaccatgtccatcataaaccccataatacaaatcccactgtacaacatagcggcacaaccacctatatcatcgtccacttacctacctaatcacagactgccaagcataatctaggatctaaacgacaaatctcatcttcaaggaaaggatactctgttgataacgcagcttataatccacccgcttaacaatgaacttatatacccttatagaccgcatctaaacaaatcccatcatact

SEQ ID NO: 240208 - DNA, 282 bp, Gossypium hirsutum
tacactcgtccgcactcatagactccactgttgaacatagtagaccatgacgtccatttctctggtcctgttggattacatctaagaactcatacttatcatatcataatgctgctactctctgaccacttctcattcaattcatggatactcacaaaccattgcctttacatgccaaaactgctggttctataaagggcttgaacttgatcgctttttcgattggctagccatagccatagaacagtcatattggcgacacaaccagtgaatctactgaca

SEQ ID NO: 240209 - DNA, 387 bp, Gossypium hirsutum
cccacgcgtccgctactccctgtgctatcctttgagcatcacaaagttatacacagaaatggagcgaggaatagagcagggaatggtggtgatgcctcagcaaaaccctttggatcagttgcaagctaagttcaaggaagtggagaccaggttcagaggatggctagccaagctgtccttgcccatcgaggcggctgttgtaaccaccaccagcgctgctcagggtgctgctatcggtgctttcatgggtaccctcaccaacgatgtctcctcctctctttcaactacgccttgatacaagctcggaatactgctgttatgacgggcgtgaatgcaggcatatcttgagttatgaaaagattgagaggacaggatgacgtccaatct

SEQ ID NO: 240210 - DNA, 283 bp, Gossypium hirsutum
gcgcccacgcgttcggaagctttgatagaggttcatactgttctaacaatgttattataggatcgggcatcgggaaagattgaggcgatgacaacagatgtatgacttgattgaacatctggttgatgactccttgatgctatgtaagttaaacacatatgcacacgaagaaaataaaatataaaggccaggtcatggatgattgattgctattatagcggatagctcagagctggactacttgattaggttcttggtatttagatggcctagcaaatatcca

SEQ ID NO: 240211 - DNA, 210 bp, Gossypium hirsutum
tccgtccgaattccggtcagccagcgtcgggaatagctgtggttagaccccttggttgtgtttaaaccccaagattattagctgttaacgagaaagggtatctttggttcggatactttttgcaggaaagcatgttttccttccagaattagatataggattcttaagcgttatggaagggaaagacatgaatatcttcgtgcagcactt

SEQ ID NO: 240212 - DNA, 456 bp, Gossypium hirsutum
gaggatgaaagtggagcaaagggtttgcaataaggctttagaggaagtgaatggagaaagcttgtacaatagaagctgatggagagctgagcatgagccgagtgtgaaggtggtttggccttgctttgtggatatgttagtttcatctgtccttagttttgttttcattgtttttatttgaaactatggatgagttaagaaaagcagggctcctttttctccggtgtcctgatgatcaaaatgttttacttgacgacattaaaaggggattttggtatgttggttgtttgagctatccatccctcgtgtgtttgtaatgctaattttgactagtaatttataatctctgagaaagggtgttttaagagaatgaatactaatgaagatgagttgttaattggggttctatgctttgaataatttcaggtggattacggttttggttcactatgaacg

SEQ ID NO: 240213 - DNA, 261 bp, Gossypium hirsutum
gaaaaatggctactgcttacgctactcttcttaagtatgacaccaattatcgacaaggccgagggcaaggatgaccaaaacctggggcacacgttagttagcatcgaacggtcacaccctacataggccgcctaaggcatccgtgcaaaatcatatgccgaagagctcgaaaagaccgcgaaaactggagcatctacaagtcgtggaaactaggccatggatgaatcaaatgctacaagtaggaaacggcttgcctagatt

SEQ ID NO: 240214 - DNA, 319 bp, Gossypium hirsutum
cccacgcgtccgagaagctgagatttggctgtttgtgttccgaaatcctgtcaaagttaccaagagcaacttcaggtggatgaggacaactccagaattttatatcgagagatactaaacgacaactctgcaacttttttcaagcaaccagtaaatttaggatccaaatctaaaaccagaacaccaactttaagagttgaaactcggaccatgatacaccagtacataccatcacttagttgaggtaagtggaatatgaagaagagtcagcttcagtctcccttacttcctaactctcagcaaaaatcactatcatcta

SEQ ID NO: 240215 - DNA, 417 bp, Gossypium hirsutum
cccacgcgtccgaaccgctgaacacccttcctttgttgggttttcttgcgcagatcgagctgggggttgattgcaccatgcatggtttatcaatccagattagttccaaccttatcaaccggcttgctgaagatgatgagaaactgaagaaaagaacaaagaaaactaaaccccgagtgcctcgagagcctcgacaaccacaaacaaaggtagatcagacacaaatacctgatgattctgaaaaacagaacaagactacaggctcaggatggccagttccacctcctatgtttctaccggtaaaccaacctccttactctgcaactgcacagttagacccgattcgagctgtcgttaaagagagtgaaaatgttgtcgagaagttgcggaagcaggaggacaacatggtgcaagaag

SEQ ID NO: 240216 - DNA, 217 bp, Gossypium hirsutum
gcatacacctctccaaaattcccgtctggacacacgcgtgcgtacacgcttaatcaccttactaaactttctttttttattcatttatctcacattatactgggggttaatctaaccatgcgtggggtattaaatcacattaacttcaaccttatcaaacgattcattacctgttacacttaccttttcaatttatcccatctatctaaaccccatc

SEQ ID NO: 240217 - DNA, 437 bp, Gossypium hirsutum
cccacgcgtccgctcctccacccactgccaaaaatatcactaaaccaagtctgacgccaaaacccaaaatgagtaaaaatagaaagagaaatcctccgttgaaatggcatctgcaacagcaagactcatttttcctcttcaccacttaacccaaccttgtcccaagcccaaaaaacctaatctctttcccccccataaactcctctccagaattcctcccaacatcatccaaacccatagaaaccaatcccatttcaccgttcgttccattgatgtctctaaagaagacagtcaagaaaccccaacttctgacccagaaaacaaacaatctccatcagtggaagaaacaagtgggggagaagagacgattgacaaacgcacgttagaagagaagtttgcagtgttgaacacaaggatatatgaatgcaggtcatgtg

SEQ ID NO: 240218 - DNA, 145 bp, Gossypium hirsutum
cacacaatcacatacacagacatatttgacattaccactaatccatcatccgtccctaagtgggagctgaatacaatttcgtaggtgcttccttacttcaatatgcagtctttacaccaagtctcataaatccatttcaccactt

SEQ ID NO: 240219 - DNA, 255 bp, Gossypium hirsutum
agataagaaagcaaaatggcttacacaattttgtcacctgtactccactctctttcggtccggggtgttcgcgacgcgctccccggacgatccatcaaggcgcatgtcagtaaacctgcgccgacggtttctctccctaaccggatgcagcttctgttctttctgacggcaactacggcattgacagttaaagacccttcttctaaagcggaggacaattcattgttcggtttgaggaataagttgaagaaagct

SEQ ID NO: 240220 - DNA, 299 bp, Gossypium hirsutum
cccacgcgtccgggttcttctgacttcattatcatagatacaagaagattattgtcatacatgcgaaagaatgtgcataagaaagaaacttcgctcgatgtaccaattgtcgtctacactacacctgcttttgataatggatgggacaggctgggaagaatgcaatatatgtcaaagtctgcaattgagcatagctaccggtaaagtgtcaaacattgacaataaatgcaaaccagttctttcaggcaatatatgctaaagtctgtgaaatgatcatagctaccgggaaagtgctaaca

SEQ ID NO: 240221 - DNA, 322 bp, Gossypium hirsutum
gtcgaccgactcgttcgccctctcttccgaccacgcgtccttactgtttatatgtggatgaagcgagtccgatggttagggaaccctctccccctcgctatggctcattccttctctgctactacacttttcttgttttcccccttactctctcttttccttcacttgttttaaaccgccttacctcatttccttaccttcttcctatggtcctcgctccatttcaatttccaccccctcttgctgctcttctgcttcctcactacttttcctcccagaaaaccatgattttcctgatggtgaacgttgccaatcctataca

SEQ ID NO: 240222 - DNA, 140 bp, Gossypium hirsutum
gcgcccacacgtacgaccacgcgtacgatcacgctttctgtcaaaattaggtgcttcacagtggcgggtacaaccatggctctttcttggccatcattctatagtctggcagtgaatttctcccctttcacccatgaaat

SEQ ID NO: 240223 - DNA, 446 bp, Gossypium hirsutum
  unsure (1)..(446): unsure at all n locations
tttatttctaaaaaaaataaaaaaaatgctctgtcctatatcaaaccaaaccctagacaaccgggtttttgaggcagtgtttactaactggtcagtttaaggtaagggctcacttcttttactctttgtttctgttactttttttttcaaagttttaattgtgtattttttaggttataatagttgaaacaagagaagaaaaaaaaaggttgaattttaaggatttgcagtagaaaagaaaaaaaaatgagggattttccatcttgttttggtgaaatggagtgcaagtggctgattcgtcatcatcatcatcaaatagtagcaaaaatgcacagaatttggttacttgtgtttatcaatgtcgaattcggcgtaggcctcgtttaataactgttacttggaccaagaacttgatggggcaaggcttaagtgtanggattgatgat

SEQ ID NO: 240224 - DNA, 464 bp, Gossypium hirsutum
caaatttctaacttctttgaagtgcttttggccaaatgaaaacgcagaaatttttagctttttcagctaaaaaagtgcttttaggctgctcttttacctttttagccacacacacaacactggttctttgctctcatctcttctcccatcgctggttctttgttcctctgctggctctttgttcttctgctggtgctggttctttgttcctctgctggtgctagttctttgttcctctactggttatttgttcctttgctggtgctggttctttattcctctgctgcttctttgttcctcttttccaccaccgtagatgagtacttcggcggttgaagttagtgacgaaaaattaaaagcaatgtgggataagagattgacagaaatattttgtgatatttgtattaaagagatattgaaggcaataggcctggtactcatttcataggagatgaatggctgaa

SEQ ID NO: 240225 - DNA, 421 bp, Gossypium hirsutum
tgaaaattcacctcttttttaaaggaaaaaaaaccagaaaaacaatgaagtgagctcctctctttttttttaataataaaagtcccttcaaccccccgcagtcccaattgaaaatggatcctaacctaatgcaaaagtttcaagccatcaagcaatccaagaagtgtaagaagcagcagcttctggacaagcttttactctatacatgcatagcagtgacttgttgtgtcttctgttccacccctttttggctcccttacttgaagaattttctcttcatttcattaccaaaaatgggttcaatcatgtacaaccctaaactactgttctttgtaaggaacctcatcggtgtggttctcattggaagattcaagatttttgcttatttttcaagttcttggggagtgtactatgttgatca

SEQ ID NO: 240226 - DNA, 381 bp, Gossypium hirsutum
tttatgcgtgtggatacccgtgcgtgcaatctaaccaccactacactgcgcgaggggagcttaggaggtacgagcggttgtccatactggatactagtaacatctttggggtttttgcacaacagtgtgaccaaatgaggggcgtgcatcttatcctggagacaggcacgaaaacgagaggtgctattttatctctggatgcatacattgaacatgatatacagcgcgggtaggttaatggattcgagacaaaacctacgagagttgaagcacatgcaccgatagaacataccgggtgataaaaccatccagagtgcggatcgggatattatagacagtgtttacaaccttcgggagccgactattgatcttgctcttctt

SEQ ID NO: 240227 - DNA, 342 bp, Gossypium hirsutum
catcaacttatgtttaacataaaaaaaagacctcacctttagcctcgccatgatatgctttaacggcccaagggagtatttttatgggttgcattttcattactaaaccttgtagaagaacaaagcaataaaactctttgatggagcgcgcaaggaaggtggttaacagggcaatcctgaaacgtttggttaatgaattcatgcaagcacgcattggagaaatgagtgttagatcacctgtttcctacactttcatcaaagtatgtgtcttcattgttacctttcggtgtcaagaatcatagcacatcagattcatttggtgcttggaatgtgtcgaacaat

SEQ ID NO: 240228 - DNA, 290 bp, Gossypium hirsutum
agcggatcgagcgaaggaaaattatggtaattggagcggttggattagtctcctgctctctatgattcttgcaacggagaaattgagatggcaatggctgcctcttctggatttactgatatgccagcacttaggggaaaggattatgggaagaccaaaatgcggtatccagattacactgaaacagtatcaggtcttcagtacaaggacttgcgggtgggggatggccctacaccgaagatgggagatacagttgtggttgattgggatggctacactatttggtatta

SEQ ID NO: 240229 - DNA, 334 bp, Gossypium hirsutum
ctcaaaagaaccccaaaaacattttcctctatttgttcaaaggcagatgatgatagtgacaaaagtccaaacgggtcttcgagggggaaaccaaagctcgttactaaggaaaagtcctctgcaccgactacatctgcgttcaaggagaaaaccagccagagggcttgtaaggggtatgacaaagctaaaaaacaaaaactgaattcgagggatcatgaactaaaggatacactttggaaaagccttaacgaagtggacttcaatacgggtacattcactgacatagtgaagcttcttgcgcaacatttgaatactgacctctcccccagggagt

SEQ ID NO: 240230 - DNA, 273 bp, Gossypium hirsutum
gcggtacgctctcccaacttggggagaccatatgtaagcaccttttccaagtgcaatggaagtcacgaccctaggccatggaacttagggggcagggattgaccccatccacgtaagtatgctgtaaggcagcaccttgccttatatttatatatttagcgtcttgctccactgccatcacccggcggtgtggcatttatcatctcaacagacactaaccctcttccctcttttgtaggcatactctaaatgcattccgtctttctttctatt

SEQ ID NO: 240231 - DNA, 321 bp, Gossypium hirsutum
tcgcacaatcgtacgcgcacacgttctttcacgcgttcggacagaagacttattggcgtgcacttgaggagggatgtggtgagccaggggccaaactaacgaatacatggactatacacatagggtagccgaacgtatctgtccaaatcaaagatcagaccttggacattgagcatgctctatcgagcctagtacttttatgttaggtggagcgctatagagaaaaggagttgactgaactcataatacttgcaaatgatatactgcaattcaaacttcgtgaccggttgcattctatgctcgtttgattttctggaatta

SEQ ID NO: 240232 - DNA, 208 bp, Gossypium hirsutum
ttagaaatttatcttaaatggctactgcatctattatcttcaaatatctcctagcgggtatagggctatctctagcagccatctcgacttactcctttatgaaacgataatgtgattccattcacaaaacgaccaacgtttccgtaccgaagaaggctgcctacccttttactatcgaatcggcgcacaaaaaaggaactctgtatac

SEQ ID NO: 240233 - DNA, 221 bp, Gossypium hirsutum
  unsure (1)..(221): unsure at all n locations
tctcctacgctttcgatgcgcaagacatactgtttttgaatgactcaantactgctggagggaatgcgacacatgctgctcgtcgaatacatcaaatgttcaagatgcaatcctttcattgtaaacagttgaaagagttcattgtttctttgtctgatgaacattttatttcacttctaacttcttagacacgcaagccatttttaagtgatgtggtatct

SEQ ID NO: 240234 - DNA, 350 bp, Gossypium hirsutum
cggacgcgtgggcggacgcgtggggttagaatcatagctgatattgatccttcaaaagatttttggtgtgtttgtaaggacaattaaaggagcattgatagaagctgaacttaaggtttctgcattgaataattactatgactagaataggaaagaggtaaagattggatctgtatctgatttggcctacaaaggatggatagttcatttccttactagttacaacatttaataattcaagcaactcgtatgtatctttgcttgagaaacaaaacaatgtaactaattaatgccaattccgttcatttctctatggtatgtaggttaaaattaccagcaacatgattgaa

SEQ ID NO: 240235 - DNA, 185 bp, Gossypium hirsutum
cccacgcgtccggtggatttagtttctcacgccttctgtctgggatctctttctgcgcatctgggatagatcggggggggaccttttctctacctcactacaaattcagctcttactcgtttgctcgggacgggtatgttggtacccttgtgtaacctgtcgtagttgacttgttttgagctttt

SEQ ID NO: 240236 - DNA, 246 bp, Gossypium hirsutum
ctggggttaatggattattgatgttgattctttctgaagtgccaaagggtaattaggttggtcagagcggggagctttgaattgatctgttgatgggtattttttagattctgatttggaatcaggaacttgaaggtgaactttttgtttgtggatttccttttgtggtttcagctggattttggggataaaatctggggtcttgggcaaattctttaatggcttctttggattttggttctcaaa

SEQ ID NO: 240237 - DNA, 458 bp, Gossypium hirsutum
cttcaaatgggaatctaaatttccagatttaaagtgatttttcaagtagtcgtcgccaaaaatttgacaattatagacaacgaaattaaggcattgatctcaacaaacaatgatacaaacaaaacgagtgttttttttttttttttaaattaactaacatactgtttctcaagaaggcttccacagaatgccaaatcgaaccgttcctctggtggatctccaatgcaatcgaacactgcatcggcattcaagaagtcttcatcggctgtataaccgctcttatagtttttgtgtacaggcaaaaacacttcttttttcttttttatctaccaatgatagctctgagtccgaccagacagtttggaaaattttggccttaaaacttagaagccaatgttgttaatctcttgtccagctgcaaacatcttaatattatagtaactgatgttttaatgaaa

SEQ ID NO: 240238 - DNA, 315 bp, Gossypium hirsutum
ggatggtgccttacactaccgtgcttcctacatctttacctcctctttgtacgctcgacaacgggggggatttcggacttggggcggggctaaccttaactctaatccttatcctacgactctaaaccaagaccggccggatttagctgcccctgtgcctttgctcacccagagagaagagatgggaaacaagtcctactactaatcccttgaagctctcaagaaacttcttaatgagaaaggagaactgaaaactgtagcatctgcgagggtagatcaaataacagacgaatttaacacaacatcaggttgacg

SEQ ID NO: 240239 - DNA, 203 bp, Gossypium hirsutum
accataatcaatggctgccgatttacaaacattttcttgctttcatggcacgttccaactcttgggtgtgccacgactttacggggtcttccctttcttggcccgggcgcttccatctaacagacgcttcctgttcgcgcatgttaagggggcggggttatctttgttcaccaccacctttcaagaagggatagtggagtttt

SEQ ID NO: 240240 - DNA, 480 bp, Gossypium hirsutum
aataaattattgagttttaacagattatttgttatccgcccttcaccatttcaaaccctcgcgggctgtaacttatctggggcggaagttctactgtacctggtgatcatgcaattccccatgggaatgcagtgatttcttcgaaaaaggaacaaatatttcaccaagaggcagctctagggagagccaaccttcaagaaactgtggtgaatgctaaatcctcaaatggtagagtaatgcttattgatggctcatcagtcatttatagggcctactacatacttctagcaaaactgcaccatgggtacctatcacatgctgatggcaactgtgactgggctgtaactatatttacagcttgatcacttataattgatgttctggaatttgttcctttacatgtaggggtcggtgtttgaccatgattgaattccatgtggtcatacatctatttgttcaatagaaaatgtgttgggaaat

SEQ ID NO: 240241 - DNA, 396 bp, Gossypium hirsutum
cccacgcagtcgcttttctttcctaattcccttttttttctcagcctgtctcaacctgatctgggatgctatacccgaaaaactcgactagtctctcattctttttaatacgaatgaggtaagcctaagctctcatctgttagacttagggctgattgataatcctcctcttatcaagtgctttgattccatcctaaaatatcatcactctcactctttttagtggtgcatttctcaaatgcttatgcacccttatgacctctttggattccccctgatcgtatggcgaatctatctactgctgctctgtattcgatgatgaatttaaaccgtaagaaatagtttggcttcgctgtaaaaacattgcatttggagatctcaattcttcaatccccg

SEQ ID NO: 240242 - DNA, 137 bp, Gossypium hirsutum
gttccttgtactctgtactaattacactaatttttacagcactttcattactcgtcctaacggcaccactaaaaggcacactggttcaccatataaaaactaatcatatatttctccacccacttttattactattt

SEQ ID NO: 240243 - DNA, 255 bp, Gossypium hirsutum
  unsure (1)..(255): unsure at all n locations
ttcatcacactttctgtcgctactaatttataccgggccacgtcgaaatacaggggacgactcacaaaataaaccanaactaccancacgacatgatagccaacattctcaatcaggcccatcacattcataccaccattacaagcatgtataagangaacttcatcaccttgcagatggcacagaccactgttnctatggtagccaagatgaagaacatgttgctcgacattccctaattgctggacaacatct

SEQ ID NO: 240244 - DNA, 469 bp, Gossypium hirsutum
  unsure (1)..(469): unsure at all n locations
gcggacgcccacgcgaacggcgaacaagaacgacacagacggnggnncccccggagggggggaagccggggaaaaggcggaggncaaaaaccagaaaagggctgacaccaagaacgagagcaagggagagcgccacacccccaaaacggaaaacaaccaggcaggaaggcaaacaaacaggggcaccacaaacaagggccgcgaaaacaacaacgcgcggcaaaacaacacgaaagaacgggcggcgacggagcacaacgaaacagagccggagcaaacacagaagcagctcccccaccgaaagaagggatgaaaaacaaacacagccagagggaaacaaagggggggcaagccaacaaagggcagcaaaaaaagaaaaaacggcaccacacattcaaaggcctccctaaaagccttagaaaccaggggaaggagggggccgggaaccacaacaatccccgattaacag

SEQ ID NO: 240245 - DNA, 207 bp, Gossypium hirsutum
ctcaggccgtaatgcacttttgtgctctttgatttgattatctccgagaagaaccctcgggaggaagccgtaaatttcaacggatcaaagactgagcttgtgctttggtaagcctctcagttcaaactacgtctcatgtcagagcttgacatgcaaactgctactcgctttgacccctctgcagatgcaaatgctgaggactcaggt

SEQ ID NO: 240246 - DNA, 147 bp, Gossypium hirsutum
  unsure (1)..(147): unsure at all n locations
ctgnnnctccttttttttctctcttttaacaattttggctttaggccataaaatcaggagcgggtgttctaagctgatctttctttctagactttctcgtcagtctcatgatgctaagactctttcatcattgccctgccaaatcat

SEQ ID NO: 240247 - DNA, 124 bp, Gossypium hirsutum
tgctcgtggcgctgcggaatattattaaattgaaatcaattataacggagcctgccccgacaccggggctcataagcttttcgaaattgtggaccagcacaaacttcgcatcttctatgaaaag

SEQ ID NO: 240248 - DNA, 308 bp, Gossypium hirsutum
  unsure (1)..(308): unsure at all n locations
ccnccncatccgtccatattggcatttctgttctcacttaatatatggtctgaagtgcgcattgcatggtatgtggggaggatgatgaaccancctcaaaacgtatgaaactatcctcttaagaattgagacgtctttcaaacggttcaactattaaagagcctgtagctgtgtcttcgngtgacctgatggctcggcccctacagtctgaatggtgcgaagaacttgctggttcaaaaggagtaataaataaggtagaatttgtccgaataatatcanaagcattatactctcttggttatataaag

SEQ ID NO: 240249 - DNA, 218 bp, Gossypium hirsutum
  unsure (1)..(218): unsure at all n locations
ttccatcacactgccggccgttactagtggatatcgggagccgggctaacgcaggaccaacaagcagcttaccttcttctggatggaaggcaggaaaaggtcgatggagtcctgcatagactcctgctagacgtcgagcacattataggagctgttcnacgctagaatccatgctacggcggtcttgcaaatatantatgccgttccggtgccggact

SEQ ID NO: 240250 - DNA, 257 bp, Gossypium hirsutum
  unsure (1)..(257): unsure at all n locations
agctaatcctncactttgtaggttactatttatatacttttttttgcttatcgtgataaacgggaattaccgatattttgtttgtagcttatttgcaacatctgcagttgaattcgttcatctgaactttgggattttagtcttgaaataaaatgagtctatgtgagagtgattttgtcctgttcttaaacatacaaagcagctagatattcatgggaaacgtcttatcctttagaagaggagaattcatgtgaaaa

SEQ ID NO: 240251 - DNA, 284 bp, Gossypium hirsutum
  unsure (1)..(284): unsure at all n locations
ctctagatcgcatcgctccagcggcccncanactcatggatatatccagacttccatcacactgtcgctcgttactaatggatcgggcaatatcacatcaccactttgaaatctaactcctactcaatcaaccaagtctccattaactaatgcactcactaatctcccatctgctcgcttcagtacattagtcaatgccttgngccctttctacttcaccaacaccaccgatgtattctacatcgtctcctctttcatcccagacattgttgttcacatcacca

SEQ ID NO: 240252 - DNA, 377 bp, Gossypium hirsutum
aacttccttctcaaagttctcttctctcagagtcaggttgccactttccaccttttctgtttatcattttatgtttctggactttgtttttattcttttatgttttgctttgacattcaagacttttttttttggactgtgaatcgggaattttacaggaattgaagggttgaataacaatgggattttgctctttttgttgtttagcatcttaggcattcaggacactgaggccaggtttagaatttagaaattcaataacactcgccaataagcttgttatagacattgaatactactggaaatgaacaaggaaagtattttcttattaagataatttcttgtaaaacttgaaaagttattaatttcatttcaaa

SEQ ID NO: 240253 - DNA, 381 bp, Gossypium hirsutum
atttgatttggttagttgcttaactacgttcttttgttttagttgttaaattttctcgtattatctgttgttctcaaaaaaatgaaaaaaaaagtggaaaaaaatgcatttatgttgattattactagttctatatttttgagcttaagtagttaattttatattctaagaagaagctcgtgttattctttaataatttggattgatgtaatttttcagtattagtttatttttctagttaggtaatttatcaattcgatctcgattctaaccttcttttttagcctttatctacacctttaacccaagccctgttacaacccttttaaagacctttttattttgtgtatcatatcattttgtagtggtggatatttgatt

SEQ ID NO: 240254 - DNA, 387 bp, Gossypium hirsutum
  unsure (1)..(387): unsure at all n locations
cccacgcgtccggccaatctttcatactctcgatctgtggctcaacttgcgcggagcgagaaaattagctagtttcttttagacagtagcgattagcgaatcctagctttcccctgccttcctctgctttgcttattgacctctttaatcaaacgagttcttgccactgacttcttgcattcaaaagaagggggaagttaacaagtgtggtttcagtcagtgatacacactaagctgagagcagatgtatttctttctttaggcagngttgatgatgttcttgggtctgagtacactcagacatgccaatttcatgtttaatgactaacagtcttgtgactgatgcttaacgaatgatctttgggaagcaaatgagaaagggcatga

SEQ ID NO: 240255 - DNA, 353 bp, Gossypium hirsutum
cccacgcgtccgaattttttttcactctctaaaccctagtttcatccctaattttcatgtccaaatctttccttaaatgcgttaaatctcaatatttgctcgaatttcaagcagaatttgaattttcgaatcggagtttcgcccttgaccgaacgtgttcggtttcgaattgactttttctttcgcgagcttattttgcttgggattcgaagaacttttatccgagtaagtttcgtattttttggtggtgttggagcttctcggagtttagctattggaagagattcgttgaattttattggtctcgcagcttgtttgaagtgaattttggttgaaaattgagaaatgtttgt

SEQ ID NO: 240256 - DNA, 127 bp, Gossypium hirsutum
tccaggcttctaagctttttataaactttgtctctccatcgtttttctgaggacaaaggcaaacggatggagagacagagggtataaaaagcttataagcctggaggcccgcgtgcctcgactcttg

SEQ ID NO: 240257 - DNA, 444 bp, Gossypium hirsutum
gtagaagtcctgcacaaagtgccagtggaggatctcttgaagatcatccaggcatgaatagcagagcttcttgtcctgtgctttcagagaaacatgagcaattacatcgtaacatgaaggagaaaagtgagagttatagggcaaatgttgccactgatgtgaataccgaatcttggcagagcaatgacttcaaagatgtgctgactgggtctgatgagggagatggttcacctgcagctgttcatgatgaggaaaactgtaggactggagaagatgctaggaaaacaactgaagttacaaaaactgcttcctcatcttctggaaatgaacttaaatcagggaaactgcaagatgcttcttttagttccataaatgctctaattgatagttgtgctaagtacgccgaagcaaatgagtgcttgccagttggggatgatgctggaa

SEQ ID NO: 240258 - DNA, 378 bp, Gossypium hirsutum
  unsure (1)..(378): unsure at all n locations
cccacgcgtccgagaactttccactatgtcgacgaaatccttccgttcagttttggtggggctgatctgcctattgacgatattgctgcagttttccttctggtatactttggagtttcaacgttgcttgatgctgcttcaagtgataatcaaaaagcagaagatgaacaaaaggaggcagaattagcagtttcagaattttcaggaaatggagctggaatcttagctgctgccaacactgttattagcactttcttcttggttttcgttgctgagtggggtgataaatcattcttttccacaattgcactagcggcagcatcttctcctctcggagtcattgcangtgcactggctggtcatgggtgtgctactctg

SEQ ID NO: 240259 - DNA, 243 bp, Gossypium hirsutum
ggaatgcagcaagatgtgtttgcacgctttgaattcttcatctgaaccccataagggggtctgggtttctgaatcggggatggggattctccttgatcttggatactctacaacagagaagcacttcatgtcccatctcgaaatgcatgaccttgttgaagacggttgatttccgttgtatataagataatagtacatctcagcgtgataaggttgttcaaagaatggaaactaatgggaaaa

SEQ ID NO: 240260 - DNA, 396 bp, Gossypium hirsutum
  unsure (1)..(396): unsure at all n locations
agtataaagatgatgaaggtgacaaggttctactcaccaatgatactgatcttgttgctgcggttaacagtgctagatccataggaaagaaggtgttaagattgcatctggatttttccgagtcagctgagcaattacaatcagaaccaattgcaagtgccaagagaagcagcgcaggggtacctttgcacttgggtttattggcaggtactgttgtcctgaccagcatcggcgtacttgtctacttaaagcgttcagaattgtgaggttatgctaatttatctaccaaaaacaacantatatgaatcgtagcattgattaattagggcaggcaatgaaagttaatctggggtagaaagtacgaacttaagttctttatacagtccacagaaatca

SEQ ID NO: 240261 - DNA, 268 bp, Gossypium hirsutum
atctcttttacaagttcattattttttctgcatcttttatatagcgtattacgtgaatgtttatgggttctctttcctttaagaactgcatcactatcttcttttaaaaacttttcctttcttctaggtctttatttcttttttgatttccttctttttttcccacttattatgtcccttgaaaaggtttgaaattcaagcaagtttgtatctttatactttcattataatttcttttccgcattgattttaataaaattaacttttt

SEQ ID NO: 240262 - DNA, 420 bp, Gossypium hirsutum
  unsure (1)..(420): unsure at all n locations
aaaggcctatcaacgaagagttctaccagaaatgggctcaggtgcaagatcaggtaagcggggccattctagtgatcttgcattacctctcaatcgaactcataacggatttgcgtctggccttatggtcctgttcgagcaacttcatcatgcttctcgtagtcaagatgctcctcttctctccctccgtattgtaggcccgacctctcttactgttccatcatcggcaactccaaataacaaagttgaagctaaaaagacttgcacctggctttgtggaactatcctncatgtctaaaactaaggccatgaatggtctttccactattattccacaagaagaaactgcaacagtattaaccccaaagcactttgctacaatgtggcctcttgcttcaatcaatggttccaatgctaatt

SEQ ID NO: 240263 - DNA, 421 bp, Gossypium hirsutum
attttaatatataaaatataaattttaaatatttttaaacaataaatattagttatttataaaatttaattagaatatataaactatattttaaatatttaaatataactattaaatatttgtaattagtattttaaaaaatattttttatttttaattaatgattttaatacatttataattaagtaccaagaaaaaaaaaaggaagcattatgttattggaggggtgaaaaagtaattaagcactaaaaatgctttttgtagagaaaaagttaaaaaatttagcttttctttttcaaaagtgcttgaaaaactaaaaatttcagccaaaagcaacttgttgttctgcatagcttttttttccaaaaatgcttttgaaagcatagtttttttttttccaaaaatgtttttgaaaagcaat

SEQ ID NO: 240264 - DNA, 317 bp, Gossypium hirsutum
cccacgcgtccgtcatttttctttctgttcatggcgttttcgagtccttctgctgttcattcggctacaccagatatggtttccaatgtcgctgatggtttcgacactcagttcttttctattaaaaagattagtgtgcttcttgacgatgataattatcttctatggcgacaaccagtactgcttgtgatcaagacttataaactgagcgctttctggacacccgcactgttcctcctcctcaaatgcttccagaagctgatggggttcctcaagaaaatcttgagttcactcgctttgagcaacaagatagtgcg

SEQ ID NO: 240265 - DNA, 442 bp, Gossypium hirsutum
catttccctgcagtaaattcagaatctgctccaagtctctcacacgcatctgcaaactggttatagagctcatctgctcaggtaaagttggcagtgaataactctgtacctctagcacgaatttttctggaggttcaagtatctgaatactaaaagcaggagataatgggcgtcccacaacttgaacatgtgacacactgcattgatgccccacatactgcattattagaggggcatggcaaaatggtcatagaaaaactaaagatacctagatatgtatattatgattgaaatttatggcaaatctatactcataactctactgcaatgtactagtagagaaggggtgcatttgaccgtaccagatatagaacaagccatctatttcctgtctctggaccctactcaacagctcaatctgtaatattccaccaatggcaaa

SEQ ID NO: 240266 - DNA, 372 bp, Gossypium hirsutum
aaaaaagggaataattttcgtcttcattcaatctttctgctgctgaccattctttcctaaggggttcatcatgtgcaatttgaagacccaaatcagaatatgctattgttataagattaattattaagaattggtgttggatattatctgtttttgaatagtttggttagtttaatctttgttgatataaaatttaagttatggaagcggaaggtggttcacacggtggtgtctagaaccgaaatagagttgataggttttggatgcttgagtcatgctatatatatatatctcttccttgaccggtccaacgttatataggtgttgaaccgatgggaagttattatcagagtcatggagggtcttaacctt

SEQ ID NO: 240267 - DNA, 425 bp, Gossypium hirsutum
cccacgcgtccgcccacgcgtccgcatagtactactacttacaaagtctcaaacaacaagcagaaaaaagaaaagaaaatggtgtgtttgtggtactaataaaaaaaaaatggagtctttgaggtacaagatgaagaagaggctaagtctttcatggtaggagtgttgttttttttttatttagaaagtttatcaataggaaagttttgggttttgggtgtgttttattttttggttgttttagatgaaggccatgcccgtatcctttgaggaatttcaagggaagggggctttagatttttcttctataacatcatcgtgttcagattcatcactgttattacaacaccagcgattactctcccaaaaaaaagggaagtgggagaacaagggaggagattgttgctatgtgggcagtgagccca

SEQ ID NO: 240268 - DNA, 303 bp, Gossypium hirsutum
cacgaacaaagtgcgactcgtccaaccggttacaccataaccctcaaaaaacgaagcaaatgaaaaaatagggctgcacatgcacttgaattatcctctcaaacatacttatttacaactgaatggtagatctttgcttgtaaactacaaagctaacccttgatgaaatgattctactttgaccatgaacatataattacggaatgatacctatgatcttttagaccataactggtaataattaaacacagacattgatacatatattggaggcatccacgtgaacatagatgtgaccccttg

SEQ ID NO: 240269 - DNA, 435 bp, Gossypium hirsutum
cccacgcgtccgctgacttcagcctctaataaaaggagtgagtcagaactcagctctgccttttgatttcctttccctttcaagctcttaactttccactcatttcccattttcttctgattggcttttgattgtatgagctcgaacggatagatcacttttgaacttcagctagttcgtattagtcataatgaaaggaaggaggaaagccagtatagctaatcttatccagaatttgcaagatccgagaatgatggttgaagtccaatgctgtgagatttagaggatctggggactgaattttccagtttataaaatgatgattgtgtgaagtgttctatgagttttatctctctgatggagtggaacgaacagaccccgttgcaatgggactgggaaaacctaatgttaaacgcaacaccaactgaaatcccg

SEQ ID NO: 240270 - DNA, 303 bp, Gossypium hirsutum
cggcacgcgcccgcttttacttttttaatcaaactaaataatagtgggtgaattgtatcaattaatacaaattccggagcaatggcttgccgtggacgagcttatgaggaggttgagctcaaaggtcttggagagaaacgtctgggaaaccatttgggactctaccaaaatatttccttaagctttgtaccatgataacaagaacattggtgtgctcgagggcgaaggcaaagccccttgattcatacgcctgatcaattacgctctatgatctccaatcggttagggtttaaaggagagaat

SEQ ID NO: 240271 - DNA, 408 bp, Gossypium hirsutum
gaacaagcaagggcagagaggtttggtgaaatgactgaaagagagaaacctgtaaatctacccccaaaacttgctcaaataaaggagaagacaggtgtttctggtaactcaaatgagcaatccaatgacgataaggctgtagactctcaaactatcagcaagatgaaacttgcccacattgaaaagagaccacctatggtggccagaccaccaccaaagccatccagtggcatttctgctgatgcaaataccactgttgtaggacaacctccatcacctggtgcgccaccaccgtcaccgtcaccttctggtggacgaccaccttcgccttcttcttcaggcaagctacctagaggggcaggcagtggcaataaagttcaccgagcttctgaacttgttgaattctat

SEQ ID NO: 240272 - DNA, 268 bp, Gossypium hirsutum
cccacgcgtccgcccactcgtacgtccgaaccatgatctggaatggaccaatgagagggttaaacttccacaaattagcggctggaactactgctattgtataaaagctacctaaacccactggctatggatagacacccaccttagtgggtgaacactattgcgattgtgcctaaaaagtatgcaggtgctgacaccatcaaccacacatcatctggtgaatgagcgaggaaagaataccctgaagagcatgaccttacaccgacta

SEQ ID NO: 240273 - DNA, 276 bp, Gossypium hirsutum
  unsure (1)..(276): unsure at all n locations
cttgttttgttctcattttctgaacatggagtgtaattaataatcaatctgggggatgtaaggttgagaaagcaggggcaactgttttgtttgaggaggcaaacttgggtaagtaacaatgttggggtngttgtgagcctatgtcgnttaaacatccttggagaagttggtactccccaatttgnatgtgataagcttatacaggcggaaaaacgcaaggtacntagacttagtttcaaggtncgtttacatatgggactactacatttgtggaac

SEQ ID NO: 240274 - DNA, 129 bp, Gossypium hirsutum
  unsure (1)..(129): unsure at all n locations
cgggcatcaaaaagctttcaatcctttaatggactacacagaacaaatctagtcttcgctaatgggtacgcatccggttgagcctgtgtgcgtttcagtggtaaannntcgttcgttattaaaagtgtt

SEQ ID NO: 240275 - DNA, 413 bp, Gossypium hirsutum
atcaatcccacagacaaccatatatacattcattgctccgacatgtgccacgacatgcaacaacttgtaccgatgcttatcgcgtacatgaccggggtcgttacagaaggtggtattcaagggggtcttctggttcttcacgatccctatggctacatggttgacatcatgcatctgtaataacctttcgcgaattccacttaccttttgaactatctagcggactatttacgtggctacttctttattcgcttatctatacaaggagacaccttggtctgcacctgggactgctatgacggaagacatgcttgtgaacatgctggacatattctttggcatgtgcctatgatggtttcaaaaaaaaattgatatatacaaattgttttccaagtttgttgacaagttttttt

SEQ ID NO: 240276 - DNA, 180 bp, Gossypium hirsutum
  unsure (1)..(180): unsure at all n locations
cggacgcgtgggaaaaaaaacaataaacttcattttcctttgaatagcaggaggnacaataattaattaatcaatggtgacttttggattaacttctattgggtcctantgggactccttattgtttggataaggncgaatgaaattatagttcatttgccagatcctaagtgaggcact

SEQ ID NO: 240277 - DNA, 195 bp, Gossypium hirsutum
gactgtgttacgcgatacgatcgttgaaattttcattctattacaattcggagagaataggggaacttaggatggtgaaaatccacatattttaccttcataaattatatgcttaaaacaatgttactattatgtataaaaatgaagggttacatcaacattaatcactgaacgttgaaaggtaaaatacattac

SEQ ID NO: 240278 - DNA, 455 bp, Gossypium hirsutum
cccacgcgtccggaaaataggagtgaaattaaatggaaattgtatcgagaaattctggtggtgaagactaagagagtcttagtggttataagaaggtggggaactgaaagtacatcaatgctgaggaaaaccttaaaacttgatatgcaagtattgataggtctaggccataaatctatgagataaattgagcttctaaatatatccatacaatgaaaaaccctaataaaagcttaaagcaatatccattattcatccttgttggaagaaattgtctttagagttaaattgcatatacccctccttcggtgtgtcaaaatagatgacctttcccaatgaacagaaagtatgtcaccgagtctagaattaaaaacctcatcaccaagttatttgcatccatcaactgattgcaatcactaaaaaaacttgaaggtgtgtaatggaacaaacataag

SEQ ID NO: 240279 - DNA, 257 bp, Gossypium hirsutum
caaaacctcctttcctcccctttttcctcctttacaaggaaaacacaattaggggcgaaggagcaatcactgtcggtctttttaatcttatatacccactccccttctctctcctaactaactctttaaccaccaccttattctttttctcctcaattccctctaaactaacctctacccaccactcctctttctttctaccttcttttcttactaccttggccaccacttacatatttcctttcctgctccattct

SEQ ID NO: 240280 - DNA, 321 bp, Gossypium hirsutum
ctcaacggcgcctcgttattaaattaacaaccaagattgtgtcaaagcgggatggcgttcctgcatgaaccatggttagggaaaaacgggactaaggggactatcaaggctaacatacatgtcatgactgaacacaacatgtcgtcttcgacatagcggaaaaaatcagacctgacacatgtttgcaaagcgcggtgtgcaaagcttaggcagttccattaccaaacttaaagagggcaaattatggaccaagctatgcaacctcgttccagatattccataaacatttgggctgaatgatatggatttgaaagaccctgg

SEQ ID NO: 240281 - DNA, 451 bp, Gossypium hirsutum
tattctcttattctggaattattatttttggtggacttctagcacccactctggagcttgagctaggactggggggcacatcatatgcagatttcatccgtagtgtacatctgccaatgcagttgagtcaggttgatcctatagtggcatccttctctggaggagcagtaggggttatctcagccttgatggtagtcgaaataaacaatgttaaacagcaagagcataaacgatgcacgtattgtcttggaacaggatatcttgcttgtgctcgctgctcaagtaccggatcacttgttcttaccgaaccagtctcgacactaaatggtggagaccgtcctttatcaacccccaaaacggaaagatgttcaaactgtttgggatccggaaagggtatgtgccctacgtgtctttgaaccggaatggcaatggcaagcgaacacgacccacg

SEQ ID NO: 240282 - DNA, 288 bp, Gossypium hirsutum
cccttaagaactgcaagtggacctcaatcttctgctaggaaagagccaaacgggggatatggggggagctatacaaagaaaaagattccttctatggaggattttccaggatatcatgaacctgtgtttgacatgcccagtatgtcaactaattttcatagctttgttggtcgagctactagccctcctgcttactcgaatgttggttctaatgatactagttgccaggtgaattcaacttctagatctgagaaacttgactcatttgatgatgtgtggctcactgga

SEQ ID NO: 240283 - DNA, 213 bp, Gossypium hirsutum
ttcagctataacttactctactaggacatactactatgcttggctatgtcaatcatataaggggataccattatcactgactgttcatctcacactaacatggtcgttgcttctagcggcatcaagtttgtatgtgcttttccagtcaacaggaaggccaacatcgtcattacttctgtcgcaagcaaagtctgcagtatgcaatgcatgcat

SEQ ID NO: 240284 - DNA, 261 bp, Gossypium hirsutum
gctgtttacaagataccatgtcctacctcattttcagtctataaatctcctccagtttcggggccacattcttcgtcagttcgagtctattagaaaccacatacaccttcagttccagtattcatgaaaccatgttcttcctcagtttcagtctataaatctccttcagttccgtaaccacattcttcttcagattcagtccataatcctccttcaattccgagatacaagttaagagtcccttctttggttccaatctac

SEQ ID NO: 240285 - DNA, 286 bp, Gossypium hirsutum
agcggccataaatcctgctccgacttacccatagtagcttgaccttatttgataggtggtgaccgccgcatcattcggcatggcggccaccgtcattttggttccacgtgtccacactgccgttaggatctccctctgctccttcttgccgtctctcccttcttgcgttttcagctctgctttatcctctatcgttaagcttagtccagattcccgtaggatttctcagctgctgacaatagccttatatgagtccgctgtttatgctgtggagtttcttactgac

SEQ ID NO: 240286 - DNA, 157 bp, Gossypium hirsutum
cggaactcacgttaaatctacacatactatatgcactggctacccttatgacactcttacccaagggcccagaaacgaaaacgagcactttaccttctcgactgggatgcaactcggtttagcacgcgaacctgcaactcttagaaatggtcagagc

SEQ ID NO: 240287 - DNA, 335 bp, Gossypium hirsutum
gggagctcaacctacattacaacactgttctaagaggggaagggactacgatagggcaccagcggtaggcaaatggaagttgcgcgtattcttaaatcgcctatgatgaaactcggtttagcaggcgtactgaaaaatcttttaactttcgagatgagcaaacttacaaatgacagaatacctgaaaggtaccctgttcttgatgttattcttcgtgcactagaagccctctgggtgatagatgtatgttctcaggaaatctgctcaaataaagaaattttccaactagtctgtgacttgatcaaatttcctgataaagttgagggctctacctc

SEQ ID NO: 240288 - DNA, 192 bp, Gossypium hirsutum
tggaaaacacgttaaatccacagcttattgaaaagagtgttggacttctattgtccatgatagaaagtcagaaggaagttgagcatattcttctctcgcctttgatgaaacttggctaagcaagcgtactgggtaatcttttaactttggagatgagcaaacttacaaatgacagattacctgacaggtacc

SEQ ID NO: 240289 - DNA, 158 bp, Gossypium hirsutum
gcgtccgacacacgcgcccgaactgagtgctggcttgcttgcgggagttcagtgcggcgagcgcaagaacgtgcgtagtatatggtgtcagcatttgctctttgtcaatccatccaaaagcattcaacctccaggtgttatagcagctatgtagacat

SEQ ID NO: 240290 - DNA, 317 bp, Gossypium hirsutum
cgcgtccgcggcgttcttaattaagacattgtcaagctcgtcgacaccttccccggccaatccatccttgggttcgatgccttgagggctaaggcataactagtactcatgagatcgattctgatactattttggaccacaaaggcttggttagatttaatatcacttttaggctatataggtggcataattattggcaaatgaaaactttcgacatacatttacaagaaagatactgatatacgcgtttttctccttaatttaaagtttcagggttatgcactttgccttttcaggttgaggattttttttaattt

SEQ ID NO: 240291 - DNA, 148 bp, Gossypium hirsutum
gtcggattcccggtcgccgacgcgtccgaaaacctacctatatgtaggtggaggtgtcgcttccatccactcttctcttcaatacaaaaaccgtcccaaacttgaatatgagccactaccctctattacatgtcgtcccaccccaatg

SEQ ID NO: 240292 - DNA, 184 bp, Gossypium hirsutum
cgtccgagacggggaagaataataatcaatcatcgatgtggtcattgaaaccgatttaaaacactttgcggcggaggttttggacacggttgaggattttcaaatgaagtgagcctttaaaactctgaaacgctatcgggaaagggtttgcctgtttaatgatgacgtacagggaactgctgga

SEQ ID NO: 240293 - DNA, 167 bp, Gossypium hirsutum
cccacgcacccgcagatgcttcacacgcaacacctaatcatctgcatggaaaacacgataacggcggttcccagagagaactgcactattggcatgcagataccccaccacccattgaacctgcgcttggaacctcaatgatgacagaactgtactagagggaatcc

SEQ ID NO: 240294 - DNA, 123 bp, Gossypium hirsutum
gcgtccgaagtttgattgagctctctcatggcgttttttacccgtctcctctacaaaatctccccccgtcgatgtccttaaacctgttgtgcggcacctcgaagccattcctgctcgcattca

SEQ ID NO: 240295 - DNA, 208 bp, Gossypium hirsutum
atccgcatgcagcccggaggcgtaaacagctatttaaacacttggaacagcttgactgctggtggtgctaaagactaggagatgtggggtgctacatataacgtggaagggccaacagctgttgcaggcaccgagtctcctatgctcagtatctaaatccatgtgagaaatggtagtaactctgtttggcactatactgactatatcg

SEQ ID NO: 240296 - DNA, 257 bp, Gossypium hirsutum
gccgcctaccacaggcttcgaggcgttttttttgatgatcttgattcaatttgccgcctatgcgtcagtgccgctaccgatctgtagctttaaaatgaattgtacaatatagtttgtgttgagaacgcgcacactaaagcttgcacgcgcagtgttgaccatgtttcttcatggacgtcaaatgccatggctgactcaacataacagcagggcttagccactctcaaacagtgatggtatgtgtgaattgtcagact

SEQ ID NO: 240297 - DNA, 281 bp, Gossypium hirsutum
acccgtactgtgcccggtggtgaagacaattagttggtcaactgttaacgcttgtaaaatggtgggggtcaggactagagaagcagttgcagcacatcctttcatttacgacacatatgccgtgcttcacggcaattcacctaaacatcctaaccgacctcctcttcttctgttgctggccgccgatcgcgcgatccttgccggataattggggatctatccggttaccttccgacggatttacaaacgccgttgagaacgaaggcgtctccgctcgattc

SEQ ID NO: 240298 - DNA, 126 bp, Gossypium hirsutum
cccacgcgtccgcccacactctcaaattcagttaacaatctcacaggtgttttcttcattctgtttctcagccatggctgcagccatatacaccgtcgttgcagctgccgcctacaaccgtgctct

SEQ ID NO: 240299 - DNA, 131 bp, Gossypium hirsutum
cccacgcgtccgcccacgcgtccgtttagctataacatacactactagtacccaatactaggggtggctaccataaacatgagaactgttacaatgaccactacactatacaaacattctaacaatgctac

SEQ ID NO: 240300 - DNA, 251 bp, Gossypium hirsutum
cgtccgaattcccggtcggcgacgcgtccgccatatcgtaggtttcctcgtttgatccaaatcttatccgtcgtgaatggcatccttatcgtgcggattagcggactgggacacaggtagagtcaaaccagcaacatcaagtgtatctcttgtcgtaacgattataccctctagcttaaccacatccttcaccggatgaaaccattaccgcgctgtttctaataggtctgagattgccacgctcaggcggc

SEQ ID NO: 240301 - DNA, 123 bp, Gossypium hirsutum
gcgtccgccacacggagtactcctcgttcgatccacattttagccgttgagaatggcccaattatctcggtggacaacggtatggcgcaaaggcagactaaaaccattctcatggcgggattc

SEQ ID NO: 240302 - DNA, 206 bp, Gossypium hirsutum
cgcgtccgcccacgcgtccgtccacacgatcgctacctgtgtactcccacattctgaattctatttctaagccgatttgaagcacttggatgagctcgcttacaagatcggtaccaaatgtggtggtcgcgtttccattcaaaaaaccgataaaagtgctctgccaggatatggcctaactggcctgtcacgacatgtttcatgtt

SEQ ID NO: 240303 - DNA, 270 bp, Gossypium hirsutum
ggagttcactcatcatacggtcgatgatgtacttgtaaaacactaatacgcactcacaatcaaatgcttatcataattactggggccgtcgatcctcaagttcaggatattcaaatcccgcctatggatactcgggttcggattctatctccgatccggacggaaccggtaaaacattgttgacagatgggtcatggttagctggcttggccatgggagattcaccgagaacaacttcctaggattcttacaatatgcaccaactttttc

SEQ ID NO: 240304 - DNA, 226 bp, Gossypium hirsutum
cccacgcgtccgaccactcgtacgtcatacataataaagaagcctaccttgcttatccatttgccatcattcatgctcacgtggattccacaagcccttttacaattgcagcctatattggccaccttaatcgccacataaccttctacataacatactgcattcgagaaccaggcgttggacctgtcgtggtacctaatcatgttactccgcatttgcctccact

SEQ ID NO: 240305 - DNA, 240 bp, Gossypium hirsutum
ataaatattgtcaatatcaaatggtgtgattttactcatatagcacacaaactctctcatagatagattttaaagcaccgaacataatttatagaggtaaggaataaattctatgctctcatccaccatgatatataaccacacgatcacaaataaacacatgggaggagcgatgatatcgactagaacacctatgatgatgatgtgaaaagccctaacgagtttgatagaatgaaagaa

SEQ ID NO: 240306 - DNA, 169 bp, Gossypium hirsutum
cccacgcgtccgcttgaaaactccaaccaaaattccctatcactttgcgtattttttgatccggacaattttccttcttggaggggctttttactattaacactcaccccttctttaactgtcttcaacatttcaagtttagggctttataccttgggcctttaaacat

SEQ ID NO: 240307 - DNA, 175 bp, Gossypium hirsutum
ctaacacaaaaaacactactaagacccaagcctgcgccgcagtctttacggccatgtacatgagaaacacagttccttactggttcttaccataagataaaccgaaacatttcattataaaccagatacattctacatgtgactagctcattcaaagttgaagcaaagaaaggag

SEQ ID NO: 240308 - DNA, 368 bp, Gossypium hirsutum
cccacgcgtccgcttgaaaactccaaccaaaattccctttcactttgcgtattttttggtctgatctattttcttctttcgacttgtttttagtagtaacattttctctttgttttagtttctgcaaatttcaagtttagggcttcaactttgagcttaaacacactcagcaaagctggataggtacagagccgatcgctatggcgatggcaacaacaccaccaccaacaacaaccaagactcttactataataacaatattcacgaccgttactatagaggacccttgcgttttttcgacgctttttctatgagccggttttacagcattaacacccgccccaatactaattttaaccgttaagttt

SEQ ID NO: 240309 - DNA, 461 bp, Gossypium hirsutum
gcgtccgcccacgcttcctcttgaaaactccaaccaaatttccctttcactttgcgtatattttgtactggaggtattttattcattagacttgcttctagaaataacattaaactttttgttttaatttttgcaaacttaaaaaataaggctaaaatctagagcttaaacacaattaacaaagttttaaagaaacaaaacccatagatatggctaaggcaacaactttatcaccaacaaaaaactaataatttttactataataatctaataatcacctaccctcatctaataaatagaactttttgaattttttaaagataacttatatctaattaagcattttttaaacaagtaattaaaaactcgactaacccaaaaacttaatatttaaaacgatttataatcattaatttccctaataaatttccatacttaaaaaatcatatattatattatta

SEQ ID NO: 240310 - DNA, 115 bp, Gossypium hirsutum
atatatcgcggctccttctcgctgcgatttcgtcttcaagatctcagttctaaaatcgtaccgcggggaacctacaagcacatgggtccgatctgcatgcaggataaacaaacaa

SEQ ID NO: 240311 - DNA, 174 bp, Gossypium hirsutum
gatggcccctagatctccacctaaaagagttttcatttctcactcattcacatctttcttcgtgggttataaattgcttgcattgatgctgcacactacggtgcttgtttcaattcctggacttggttagccatctaagggccatcccttttgaggaaaccctttatcaaacca

SEQ ID NO: 240312 - DNA, 265 bp, Gossypium hirsutum
cccactcgctctgtccgagatagctagtgtccagcctaattacaacattcttagcccttcacggttttactcctcttcctcctccgccgccaccacatttctttctgttttctaccctcaacgcacgcgcttctctccgccgcaatatctcaagttagataagcaagttttagcttctgcttcctgtcgctatgctcatgaagtaaagcctcctttaaggatggctgctgtttaatccgatcttaatagaagggaggcttccaac

SEQ ID NO: 240313 - DNA, 172 bp, Gossypium hirsutum
ctcactcgttctctccgtcctagctactctccagccaattaacggaattcatattccaaagcgaacccgactgaaggctagcttttgcgagtccaaaaaatcaaggtgggaggaagcattggcgagggcgaagagcaagtcaatcggctagatagctcaactgggagaaatt

SEQ ID NO: 240314 - DNA, 360 bp, Gossypium hirsutum
cccacgcgtccgcaacattcatggctttcatctctcaaaaccactgctcttttctcttccacaaaccaacacaagagttctcttttcaaggttccattttctcagaattggagccgatctagtgatgaagcttcaaaccctgagtcacctaactcggaagaagctgctcctgttgaccctgtgaagcttgcttttgaaaaggctaaatcttataagaaaaccaaagtgaacccggacggggattcgagtccagcttcagttaaggttgcaaaggagaagacaagcgagaacaaggagaatggaagtgagagcataattgcttctgtgaagaaaactgggagtgagggtacctcacagcaa

SEQ ID NO: 240315 - DNA, 150 bp, Gossypium hirsutum
tcgcttctctttcggttctaccgcctgcacaacgattaagggatttcattttccaaatgggaccccactcaaggctatcttttgccaccacaaaaaatctaagtggtaggtaccctcaacccacgcgcatgtgcccgacgaaatattata

SEQ ID NO: 240316 - DNA, 433 bp, Gossypium hirsutum
atgtaaggatgtttcccgctgttgctcttgctgatctacatatataacgtccactgctgctatgttttggcatctttgtttaccataggagtcttgtcttttgtttatccactccactttgcggtacatagagaattccgatggaacttcgagacttttcaaacaatgttatgcattattgctctctaatcttagacagaatttgacactatctggtaattaaagactgtgaatgatgaagtggtacttctagtacacattttttgagttatttctactaatggatgatgcttttccttttggattttttttttttaccagcattggttcaaagttagctttgtgttctgctgcatttttatgacatgacattgcattactaggtaatgcccaaataatgaaataatgactggttcttgacccgttatcgatc

SEQ ID NO: 240317 - DNA, 304 bp, Gossypium hirsutum
tccctgggtaccgtccgaattcccggtcgccacgcgtcgtcatcactgcgaccacgcgcccgaaaaagttcttgtaagcaaagaagctcctcaccgtccaattttactcgattttggtcttacaaaaaaactatcaagctctctgaagcatgcactagcaaagatgtttttggcttctgccgagggtgaccatgtggctcttttgtctgccttctcagaaatgggcctcaggctgcgcctagatatgcctgagcaggttatggagataacaagtgtattcttccgtagttctacaccagcaact

SEQ ID NO: 240318 - DNA, 232 bp, Gossypium hirsutum
acttcatcgcgtgctgatcccaattcatggtctttttacagagctggtattgccgactttggagcggatatcatggagtaaaatctctcaaagtctaacacgattttaatcagcaaccttgttccgccgtgtcaaaaccacctcaactgggcccattggaagataacatgttatacttgaagcaacaattcttcgaatcagcttgcaaagggagcccatttgttgccaaacg

SEQ ID NO: 240319 - DNA, 199 bp, Gossypium hirsutum
  unsure (1)..(199): unsure at all n locations
cccacgcgtccggaaactacaaatcatggtctttttacagagctggaattgccgngttggaggggaacccccctttttctgttcctccctgaggacacttattaggcttgcggtctctctatgtttagaccttggatttccaatggaacggatgagacctaaggaataaaaaggccgttcttcgccatatctcatgaaa

SEQ ID NO: 240320 - DNA, 123 bp, Gossypium hirsutum
atcacaatcacattatgtgtactcactattggcctgtacaaccatggatatttgttcaccagggttctacggagagggggtggacttcttccattttatatttgaatttcggtgaaatggtcg

SEQ ID NO: 240321 - DNA, 199 bp, Gossypium hirsutum
cccacgcgtccgattcggtttatcaactgaaacagaacgctatcaagaaaattgagagccaaagtttctgaaccctgaaaagaactgaggaaaattaaattaaaagatggcttttagtgtaggctttcgtttcaatcttttgggaaaggcttaatctttggttattccttcaagttcattaatttcttttgggggtttt

SEQ ID NO: 240322 - DNA, 152 bp, Gossypium hirsutum
gaaactgtttggaacttagacacagggccgtctcatattccaccagccgtgcatagataaggggctgctttgacatggttcttgtccattgtgtaaacgggatatgtactgttattattgcaaactaaactaaacaatacacgttgagaaga

SEQ ID NO: 240323 - DNA, 163 bp, Gossypium hirsutum
aaaacggatcccggagctaaaacatcacggcgaagcaagcttaaaccaggaacaatagtgggaattatagtcggtgatatagctggagttggattagtaattatggtattccttttcgtctataaaataaagagaaaaaacagagtactggagaccacactga

SEQ ID NO: 240324 - DNA, 240 bp, Gossypium hirsutum
gagccactctcacattactttttgtgtgttctcttgtctccccaatttcttaccttcctaacatcaaccttagatcttttcctttttcctcattaattcgcttacatgggcttaaccctattttaaggggtctcttggatggtggttcttttttaaggttggaaaaaaaaggaaaaaaggcggaggtttacagggtaatctttaaaacgttaacattggcaaccaagaaccctttcaatc

SEQ ID NO: 240325 - DNA, 140 bp, Gossypium hirsutum
cgttctcatagtagctggcagccccgtggcgtctctcgcaccacagccaagttcattcactaggtgatatccgcctaaagtcggccgatcaagtgccgctgtcatacatatgtggataacggccggggaactggatgcaa

SEQ ID NO: 240326 - DNA, 313 bp, Gossypium hirsutum
ctcacacgcacgaccacgcgtaacgcaccgtgtgctctattgccacaccttgcacattgctgcgaccgccatttatctttctttaccaacatttccttcatcttcttcaactgttaaagctaaaccttctatattcagtcacccccatttattcattgcaaagaacgtaccatcttcttcactctttagttcttcaacgaagataacgaagcaaattcgtactgccttcaagatcaaatgctcatcggcttctttttcgaatactcttccatctgctcttctttttgactgcgatggtgttctcgttgatact

SEQ ID NO: 240327 - DNA, 191 bp, Gossypium hirsutum
ctttgacgcaaaattaaaatgaaataacgctgttgctagacttgacagcttgatactgactgggatcgatatataaatgaaaaactcagcttatggctttgtatttcatgggtacttcacttactccaaaatcctgttcaaattctaatgtcattgcagatgacgcattgttttactcaaaatctaaacac

SEQ ID NO: 240328 - DNA, 144 bp, Gossypium hirsutum
ctcacgcgtacgatcacacattggcacacgcgtacgcccagggaaagctgttttcttcatgcgaaggcgaaaagttttcttggcggtgtttctttttctttttggtatgagatgatcgttgaataacgatgaggaagaaaacag

SEQ ID NO: 240329 - DNA, 200 bp, Gossypium hirsutum
attctatcgggctatatgaattgctctctcttgagttttgaagaataataacgcaaagaatggtcctttaacatgaggggaagacttagacatcttgctcaatcgattacacgccgtgtatctcatgctgacaagaaggctgtaatacgtaaattctttgcttcagatgctgatctgaaaaagactgcccttaatgacta

SEQ ID NO: 240330 - DNA, 181 bp, Gossypium hirsutum
aacagatttcgatcatctcggtctaggtatacataggagcgagtatccacatctgactggggggagacaagctgggctcaatcatcactatttcgatccatcattccagtagaaacggacattggagtgtggctggatctatctcacccaacatgggttaatctgacggggaaatcaactt

SEQ ID NO: 240331 - DNA, 233 bp, Gossypium hirsutum
gcgtccgctgttctgcatctctgtgtttgaagatgagaattatcaacatgaagtagttaaagaagtgtgcggagatcagaaatttgttgatagcggagggtattccaagtccccagctgaagaagcagctaagggagttgttactagtgaagcagaggcctcgctttatcagagcaggcctagtgtaggggtggaaaatgatagggtgggaatatgaggtccatgtgggggat

SEQ ID NO: 240332 - DNA, 259 bp, Gossypium hirsutum
ccgtccggaatcccggtcgccgacgcgtccggtttaatttaaaaatggctacggaatcttcagaatcggaagaagacaggaagacccgtgagggccccagccactgcctgtgcggcacatactaacatggcctgctccttttaccggcctcaagtctggctctgctttcacagtgatcaggacggccaacaccgactttgctattctcccaggcaatgccgacaaatgcattgcttggcagccgtggcctcctactgca

SEQ ID NO: 240333 - DNA, 247 bp, Gossypium hirsutum
cgggaggaatccctctatctcctttttttccccctaaaattgtattataataaatcctctagaattatctggacctcacattgataatcatctcctccagatctatccgcttcggctttgagagagaagggataaagaatatagcgaaaaagagggtaaaacggcgcatacagtagaccacgagcccgataaccttgaaaagagcgcgttgaccggctatacgggagtgggaaaaacaaatattctt

SEQ ID NO: 240334 - DNA, 212 bp, Gossypium hirsutum
  unsure (1)..(212): unsure at all n locations
ttttnttttttttttttgaagggaaaaactggaatgcgattacaagcaaatatgagacaaatttaaagtacaagataagaagatacaaaagcatcatagatgatttttcaatatcacctcatccatccccaatactcgaaactctagggctcaaaaagtagaaaagatgtgtgagaagacacatacaaagcacaatggggttgaaaaagaaa

SEQ ID NO: 240335 - DNA, 443 bp, Gossypium hirsutum
cccacgcgtccggcaaagaacgtagagaataagaaaaacatggaagcttgctttctctcatggaaattccttcactaaaagtcatgagattgtgccctcaatcaaggctagatcacttacttttactaagaaaaaccccaacctttttcactctaggaaagtttctttcccatctttcatcacatgctgccatctggattcatcttcaccgtcggatgatgacaagaagccaacacttgattctgattggcgttcatttagagcaaggctagtagcattagagaaagtatcaaagcctgagaactcttcatcgtccaccaatcctgatacagtagtggatcacccttcatccgttgcaattaacgacaaatgggtccacaccatccatgagcccgaaaagggttgtctccttatcgcgactgagaagctcgatggcgtacata

SEQ ID NO: 240336 - DNA, 196 bp, Gossypium hirsutum
cttatgtggcaagcagtgacggaacagggtaatgcatgcaggtgtgttctattacgggaaagtagaagaaagagactctcttatacctgctctatctaacaccctatcagttggtttaggaagtatactacctttactgatgaaatagactaccttgctgggaatggaaataataggaggaatcattgcccggtaa

SEQ ID NO: 240337 - DNA, 165 bp, Gossypium hirsutum
tcttcactcaccactgttccaagattgttgtaaaccaagctagaaccagcagccaggatgggctcattagcagcctccgccgttgccttctcccttggcgtctctgaaatgctcggtaaccctctgaatttcattggtggagctaggccattggctccaacacca

SEQ ID NO: 240338 - DNA, 165 bp, Gossypium hirsutum
gaaaatctttccagtatcaattttctcacaacataactgaaaatgtcttgctctttatctagatgagtctacacatcatggtaacagcaacacctaaagcaagacctgtctcacaaactacatcgaatcgatcctttactcaaactgatgccaaagaagctccca

SEQ ID NO: 240339 - DNA, 175 bp, Gossypium hirsutum
gcgtccggaaaatctttccgatccaatcctgtaacatcataactatacatgtcttactgagcatgaagacgttgccaacacgctgagtgcacgtccttcaatggatgtaacggattcaacatgttacctgtcattgtggattgtgccactccaaataccgttgttcttggtgcgg

SEQ ID NO: 240340 - DNA, 161 bp, Gossypium hirsutum
ccacgcgtccgaaagattgtaggggggttttcgttttcatctacaaggaattggcatctaggtaaagcataatgttgtcccgctcttattcctgctctatcgtccacccgatcagttagtctaggctgtaaacatccttattgatgaaagggacttccgtg

SEQ ID NO: 240341 - DNA, 236 bp, Gossypium hirsutum
acgcgtctcatgacatcttgtcccacataccaactacatatctttcactacctacctggtaagctggttcggtacgcataggacaaaaacccacccacacaacttccacattgttcttcagttaaagtctaaccaaaacttctcttcttcttctgtctcttcttcttcctcagtaatggaagagcaaagagagcttgttgttttaccagctcaagcacaagaagcatatgccaggg

SEQ ID NO: 240342 - DNA, 319 bp, Gossypium hirsutum
gtcgaattccgcgcgcccctgcgacgatggatctcaccaagaccacatggggcctactgcacgtgctacgctcgagggagtgtggttcctggtgtctcttataagcactcctcgccattagtctcccctccatccatatctccttccttcgagctctaagagccttaaaacaagctcactatttggagaatcatgaagggttgtgccaaggtcatcattgaaggttccaaaggcaaagaacactacttcactagagacaaaccgtgaaactggagagactttggaggagtttcttccaaaggcaccaccagataaggca

SEQ ID NO: 240343 - DNA, 264 bp, Gossypium hirsutum
ctgatcttcaagtacttcaaagtgccacctatgtatcagaatcgggttctttcatacggtggggctggtgcagtcttctttcggttgtcattgatactacttggaacagccaccctccagaggtttgaagcggtcaacctactactggctgccgtattgttattctcatctttcaagctattttccaatgatgaggatgacactgatttgtctgacaacttcatagtgaagacttgccagagatttatccccgtcacatctaat

SEQ ID NO: 240344 - DNA, 181 bp, Gossypium hirsutum
gtccgccacgcgtacataaccatgatcagtagatgattatttgaggaccttatcagggacgttcaggggggcggcaactagtgatgactgagcttcctgagtgagtgtttagtattgattccgggatgaagggtggcatgtctgtgaaagctgccatgattttgttgcatgaagggcataa

SEQ ID NO: 240345 - DNA, 137 bp, Gossypium hirsutum
atgcatggtatgtatatctatttgccacctatgttgacttgattggtggttacatccacattcgagatatcattctcaagggcggcttctcatcctacgttcatacaacacaagaaagaagcgttttggttcgacag

SEQ ID NO: 240346 - DNA, 147 bp, Gossypium hirsutum
cacactcttacagtacggtccagaacggggataaatggtggctaggtttttaatcagaatggggcacttggattggtactaaacactctactggatttgattcagcttcattttattgcattgttcaagatgggtgatgtagctaag

SEQ ID NO: 240347 - DNA, 216 bp, Gossypium hirsutum
ccaccccctctctctctctctctctctcatcaacattcaaaaacattcttaatattatcgagccccctttgaaacactggcaggcatatttaaattaaaaatccttaacgttatgtttaaaatcaaacccttatgcatgggtactcctttaattaataccttcgtttcttttgggacagaaaataggttttcaacctttaatatttccacactttt

SEQ ID NO: 240348 - DNA, 241 bp, Gossypium hirsutum
  unsure (1)..(241): unsure at all n locations
cttccccccctctctctctctctctctcataaacattcaaaaacattcttaagaatattgaagccccaaagaaacacagaaaggaaaaataaaaataaaaatacataatgttatgtttcagatcaaacccttatgcatcggcttttcttttatttttttcttggtntctttttggacgggaaataggttctaaagctttaaatgtccaaacttggattatttaagggtttgggaaaagttt

SEQ ID NO: 240349 - DNA, 181 bp, Gossypium hirsutum
cccacgcgtgcgggaacctgaaagcgtgtcactcacagactgttattagccctactgcacgggagacgacaggcacgagggccggtccaagaggtaatcatagcgaacaccatcgcagtggctgagcaaaactattttcatcagctgactgtcctggctgcggcaaaccctgtgggagaga

SEQ ID NO: 240350 - DNA, 237 bp, Gossypium hirsutum
cccacgcgttcgtggacctgaaattcgtgttatttcacattactgttttttatccctcacccattcgatcccagagtcgtacctggatgaccactgcctactgtcgcaagattgctcgaaatgtgatggctatggccactggtgagactttggccacgcgtgaagctccaacctaagttaccccaactgagctgacaaagtttatcaccaaattacatgaaacctgggttaaagttg

SEQ ID NO: 240351 - DNA, 284 bp, Gossypium hirsutum
gctactctttctcagattaggtgctgcttgagttttacaccctgtttataccctccctgcttgcgcgctttccgtcttctgtttcttccttctgtctttcttttgctgaagattacaatagaatcgacgcttggccttctcaaccttttattttcggagtttactgcaactggaaaggtatcattgcatttcattgcgattcctaaccaaaccaattaaaatttgcccaaaataaaaccctttggccgtttccttttttttttgggttcgacggaagggggaaa

SEQ ID NO: 240352 - DNA, 156 bp, Gossypium hirsutum
cttccctcagtaccttcctaattccctttcgacccactcgttcggttcctctttctcacacacgtcctgcttgatttttacaccctgatttacactccttcttaggggaaaattaaaaagaaatctaatattgaagatttattaaaattgcaatca

SEQ ID NO: 240353 - DNA, 202 bp, Gossypium hirsutum
agcgcccacgcgttcgtacaaagtctgctcgctcatagcacatccttctagtagcaaaaagggagaacggcagtactagctttcttttttggtgcattgtttcgatagcaatggagatggtaacgaagttggcatccgagagaccggttgtgatcttcagcaagagttcttgttgcatgtgccatacaataaagaccctttt

SEQ ID NO: 240354 - DNA, 103 bp, Gossypium hirsutum
  unsure (1)..(103): unsure at all n locations
gcgactctcnnttcttccacactatcatgcactttctaaactaatgtattgaaagagcttgagcggtgccagacggaataccccactgcattcattaaaatca

SEQ ID NO: 240355 - DNA, 170 bp, Gossypium hirsutum
cttcttcctctcatctgctcttcctttctaaaaccctaacaaaagggacctgtttttcttccctatctaccatgtccatcaaccttaacgcccatgcatttgctggtaaccccataagatccaaaacccctaaagcccatgacccactctccccttcttagctttcagtc

SEQ ID NO: 240356 - DNA, 190 bp, Gossypium hirsutum
  unsure (1)..(190): unsure at all n locations
gccgtttggtttgagacagaaaatgaatcatatgctccttgttattaaactaatactagcaggaattgagaaactatcaccgactggtatatgcgtgtatgcataagtttcttgttatcattcagcagaatgtgaaccatattgttctaaattactatataatatatgaggagaatctgtttgcctaana

SEQ ID NO: 240357 - DNA, 135 bp, Gossypium hirsutum
cccacgcgtccgattctctctctgtattatctttgcctctttaatggctactatcgggttgtttctcatatcctttcttatttgctttcactcttaaagggctgagccttttatcggagtgaactacggtcaatt

SEQ ID NO: 240358 - DNA, 229 bp, Gossypium hirsutum
cccggtcgccgacgcgtacgcccacgcgtccaaattcaaccaccagaacatgcctacttcttagccatggcaaccaccacagggtggagcgtgacacattgttttcggtacccgtatatctacctgtgacaccaatattgggaagaatccaagctaggataggctttggaaggaaacaagagcaccacccttctttgaaagtggtgaacttaaatgatggtctttttac

SEQ ID NO: 240359 - DNA, 261 bp, Gossypium hirsutum
attttctcacctgaaacaccaattacgctcccataaacaccacttcgcaacccaaaatttacacttcttctgctactgctaccgccatttctgcttttattttcaaccttacctctctttgcttactttcaagatatggatatgcttccttcttttattctttatccacttattaatggtggaagccatctttctaatttccactctctttcttcttcttctaacaccattgcttcccatatggaagcctaaagttacaaa

SEQ ID NO: 240360 - DNA, 154 bp, Gossypium hirsutum
  unsure (1)..(154): unsure at all n locations
taccgtcccaattcccgntggacgacgcgtccggctgagcaccgtgccggcatagtccccgttttctaccgccgggtgccatgccttcaaaagaggagggataatgggcacactcaatggatttctatattataacctattgttgatttcttac

SEQ ID NO: 240361 - DNA, 233 bp, Gossypium hirsutum
atcgctgctccacatttcggtataaaggctaatggggaacacatgaacctatatatcgagggcgacatgctaatttttctatggcgagtaatgaggaggcttacgaacaatttttttcgggaaatgcaagaacaaataattgatggaggtctgcctaaagttatcgcttgtgtggagaatctcattaacgaaagtcaaaaggaacccgttttcccacaaaccctgcccaaact

SEQ ID NO: 240362 - DNA, 257 bp, Gossypium hirsutum
gaacagcaaacagaggccctccggataatattctttgatcctatggaacgttgttgaccagggcacgaatacattgtggctggacatagtgattcaagctcggatgtaaagagaacaggtcgagccatgaatgaggtacccacctttaccgcggcgaatatgcgcaaaaacatgagagctgtatattacaggcgcacgtgtatgcttatcatgggaggagctattgatgggatcttagggttcacaggcgatatggg

SEQ ID NO: 240363 - DNA, 197 bp, Gossypium hirsutum
gcagatggcctcactcgccaacacaactcgtttttttccgttgtctgcatccttggaaaatttgcgacgggaaaacgtattcccagcgtttctttcaaatccttctcctttccctctttcaggccttccatttcctcactgaaacccttattccccaccaaatgctcttttctttttccctttccaatgcttcccta

SEQ ID NO: 240364 - DNA, 228 bp, Gossypium hirsutum
cttgcgcaaataatacctcattaagcccttaactggcatatccacttattccgcgcccaggcgacacacatggggatcgtgctgccttggacccaacctttaatgttccccttgttattgaaatacttcaaaccaggcaggaatggctgctccggaaatttggccaacccttggaagagcagagaaaacatcgctgactaataacacggggcaaagatactctttctt

SEQ ID NO: 240365 - DNA, 340 bp, Gossypium hirsutum
aaagaaaacgagcaaaagataaacacatgatatcatcatcacaaaactcctttgctaaaatgggggttctttcatttaaagctttcttcttcgacaaatcccccacaacccaactggttttttttttccctttaaaagcttgggtttttttttttttgaaagagaaagagagagggattgagaattaaggcttaagcattaaaccaccaaaaaaaagaagggtttttttgggctggcttggtttctttttctttctttccaggaaaaaatactttgatttttgttcaaaattatggggtttttctttttaaatggtatatggttaggtttggaaaatttt

SEQ ID NO: 240366 - DNA, 262 bp, Gossypium hirsutum
gttccgccgtagatggaggccgccgccgccaccgccactttggttggatcttctttacatgtacatccaccaccttcaagctctgttaccagatcgactgtttacgctgccagacctcgcctctccttcccgattaagcattattcttctctagcttgttcaggatcatggaataaaagaatggttttggagagtaggagaggcatatttgaaagggcttcgtcttttcccaactcgactgacccatttgatccaattgctc

SEQ ID NO: 240367 - DNA, 461 bp, Gossypium hirsutum
gatgaaatggaaaaggcagcgaagctgttgggtctgatgttggataggggggtttttccacgattatgcaacatcgaatgaggtgttgattcagctttgtaaagctggaatgttagatgatgcagttacagcattgtttggattggctgaaacggggtttaaaccagaaccacattgttgggagtttctgattgaaatgaattgcaaagataggaaattgctgcctgtttttgaactacttgatgagttagtaataaaagattgtccttataatcttcatgttggtgctactttttgtttagcctcctattgcttgtaaaaattttcattgttgaggcatttggttttatttgtataccttccatgtcattttttttggtggattactttgaatatttacccgatataataaatttttcttttatttttttggctaaatatttatagttccatttattttt

SEQ ID NO: 240368 - DNA, 194 bp, Gossypium hirsutum
ctctagagtaaacttccttttgcaatcctttgtagagcttcgggatccattgtcaccatgtggtgctcaaatctgacaatgtgggtgtcctcaaaaccctctctttttgacacttcttcactccttttccgttctttcataaaacccttttcaactcccatattaaaggttaacccccgggaacccttttcagg

SEQ ID NO: 240369 - DNA, 107 bp, Gossypium hirsutum
ttcattcgtaaccttccttaagtattatggtcaaattctgggttgaacctgcttcatataggtgaccattaatttactggggagcttgcttcttttttttacaataa

SEQ ID NO: 240370 - DNA, 204 bp, Gossypium hirsutum
gcgcacccatgcggcaaatgagcacggatcggtcttggcggtgaaggaaaaggctgcttgtgaggctaacgggcagtcctatgcgaagacgaacctttggaatgttgatattgtacctagtaaatcacttacctaattatagcccgatatggagcctgtagtgtcgcattagccaaatcccaaaaccttatcacaaaaaataac

SEQ ID NO: 240371 - DNA, 149 bp, Gossypium hirsutum
cagactctcccgctcattctcgctgcgatttcggctggaagatcacacaactcaaaggggggcgctcttttctatcaagccatggctctcaacttccgtgcgggatagacccacatagaagcctggaaggcactcatagctgaatacta

SEQ ID NO: 240372 - DNA, 245 bp, Gossypium hirsutum
  unsure (1)..(245): unsure at all n locations
cgcgaagcgaaactttgtagtttgaaagcgtaggatcattaagacactgtttgtgaggctgagaaccagtcctttgcgtttttgcacctttgtaatgtttgtattgtaccttgtagatcacttacctaattatagccccatattgatgctgtagtgatgcanaaaaaaaaaaaaaaaaaaaaaaataaaattaaataaataataaaaattaaaaaaaaaaataaaataaaatgggggcggccgtt

SEQ ID NO: 240373 - DNA, 301 bp, Gossypium hirsutum
ctcgcggagcgaaccttgttgtttgaaagctaggattttagctttcgggttttctataggggttgagagttgtgaggttctcgggttatgtcttgagtgtaaaacacttgtaatcttcatcttgttatagtgaaatttcttttcgcctctgcccgtggacgtaggcattaaagccgaaccacgtaaatccttgtgttcactttatttttcgttccggtcaattaacttgtagtcatatcggagttctcgaatcgatcctttccgcaccagcaacctatcttattagtgaagcaaatttcca

SEQ ID NO: 240374 - DNA, 248 bp, Gossypium hirsutum
tcctgcagacatcttcgggccgtcaacacaaggtttgatggtggtattataatgacccatggaaatgaggctggcttgatgctatctacgaggatttcaccacttcagttggtaattgtacctatttgaaagatggttggtgataatacatgagtactatatggtggatcttctgaaaaagaaactcaaataagagatggacttgacgataaacttgatggcgcacataagaggaaacccttagggaa

SEQ ID NO: 240375 - DNA, 243 bp, Gossypium hirsutum
  unsure (1)..(243): unsure at all n locations
gacccttgttccagtttgttnnnnnngaactaaggataaaggaaccacaccagccatgggtgcaacatctgcctcatgtcttattctcccatcgctcaaacccaaagttctatctttatccgactaaactcccatttcactttttctctgctccctttctccaacccccaatgcaaagcctttcttctgttctgctcttccaggtttcaggcttttaaaccaaaaagggctctttttctttcg

SEQ ID NO: 240376 - DNA, 304 bp, Gossypium hirsutum
cccaggcgtacgcgcacgcgtccgaaaaaaaaaaaaaaccaatgtgcgctgactcctcctagcccgccataccgggacatggggtcagtcaaatcttcatcatctccttgcctatcaccggccgtacattacctcctattcggttctccatgctccattgctaacccgtttctgcttcaaaagagcgggcttccgctgctttccggggcggtggaaccttatttctttggagcggaagaccaagcgcttcattacaggatcgtacacgaaaagacgaccgcttggtcgagccggaaacattttt

SEQ ID NO: 240377 - DNA, 304 bp, Gossypium hirsutum
gtaccgtcctgattcccggtcgaccacacccgtccgcgactactcctcgtgctgatctacttttgcaagccgctataattctcgttacgatctttatgttccttgctatgcacgatattcccaaaaagatcttcaccaaaatccgttaccggaatcgagccgacttccaggcgaagcgtcacttcgtcctcggagcccagctcttggctcaagccagatcctccaagtctcgttcatccaccggctctttagccaaacaagccgaagccgaagccgacaaagccatttctctagaccggaaaga

SEQ ID NO: 240378 - DNA, 368 bp, Gossypium hirsutum
gcaatattactcatcttcaacgccaaatgtttcagagttgctgtgttagcggagaagttgaatgacaccgctttctggggtggccacggtggcggtgacagtgtagggctcgacgatgatgactacagcagcttcatcggtgacgatatggagctggagatgttgacggattcctacatccgccgagtgctcgccggtagcaacggaaaatcaacgattgcattcactaacaacgctaaaaaaactccaagttgtggcaagggtaaacaatatggtccgggcttggtggacaggaaagtggttagcaatggcagtccataccaccgtcttggccgggaacggcatattttaaagggaaggaaaattaa

SEQ ID NO: 240379 - DNA, 228 bp, Gossypium hirsutum
cccacgcgtccggggacaactgctagaacatgccttcccttcctacttgcttccactgtgctaggctacatggttggttcggggttgccatctgctgtgaaaaaagttcttcatccgattatttgctgtgcactctcagcagatcttgcagcagtggcatttgggtacatttcacagtcgggagttgatgcggtattaggagattaccttacaaaggtgtcatctaat

SEQ ID NO: 240380 - DNA, 202 bp, Gossypium hirsutum
cccacgcgtccgatcacccgtcctgactcgcgtctgtccacccttctaactatacttgcgatgagctaacttgcaatctggcatagaaaaaaaggagctggaactgaaaacacaggtagatataggctacgacgcgccgttcattgtctttactaccattgacttaatctctttgacaggtgaaagcggaacctgttatttt

SEQ ID NO: 240381 - DNA, 108 bp, Gossypium hirsutum
gccacacccttccggaatatggaagtaatatgaatgatcaagggaacctatgatacttgttattatggggctaggctacatggatggtcagatgttgccatctgcttt

SEQ ID NO: 240382 - DNA, 281 bp, Gossypium hirsutum
cgcgtccgcccacccgtccgttatcccaaacttattacccatttttcccattcaaattttctccatcatcctccaaccatgtgcaaaggcttacaacaaggaagcacatcaagttcttgtctgaaacagggtgtctcactctcacctaatgcaaatcctagggtttcaacaaggttggtgaagtgtgagctctgcaactccagggcaaccttatattgtcaagcagatgatgcatacctgtgcaggaaatgcgacaaatgggttcatgaagctaatttctt

SEQ ID NO: 240383 - DNA, 191 bp, Gossypium hirsutum
ggctcgcccacatttcacattggcaacatatgccacttcctgagatatggagggagaaagaggagtgtgatggatatctcgaactatactagaatcttatttcccggaaaattgctttgatattttaaaggaagctcttattgccaacacggccgtttataacggaaagaggattccattaccttttaatt

SEQ ID NO: 240384 - DNA, 200 bp, Gossypium hirsutum
taccgtccgcatcccggtcgagcccacgcgtccggccacgcgtacaaggatagcgccagcataactctcttcgggagagacagtaatgctaagcgggtggggagggataagtgcaacgatacttgtctctcataaaaaaaatgctagccttcatagtgacggggtcgcggtcactgctaaaaccacggtggctaacgacc

SEQ ID NO: 240385 - DNA, 269 bp, Gossypium hirsutum
gaggagctcattttttatttttttccccagttcctgattttgagagttgatcctgccgtgagacacaaggatgacaagtacagcttgttttatcattgtgagccgaaatgacatcccaatatatgaagctgaagtggaatctgccgttaaaaaagaaaatgctgctcagctgcataaatccgtataacatgcagttctggatatggttaaagaccttgcatggaccaccagtgcaatgttcttgaaagcaattgacaggttcaatgatt

SEQ ID NO: 240386 - DNA, 152 bp, Gossypium hirsutum
ttcagctataccatacactattaagtgtcaataacagaagaggtttccttcaactattccgtggggggaggatgccacggcctttatagcaccagaaaacctggtaccttccaaaaacatgaagaagagggtgtaaggttgagaccccattc

SEQ ID NO: 240387 - DNA, 284 bp, Gossypium hirsutum
cccacgcgtccgatcactcgcaataggggacattctccgcatcggtctaggtatggcctacggggcttaacctaaaacatggcctatcacatggctcattcttggaagagggggacatgcttatacaagcttcatcattctttgcaaatgccacggtaaacttgaaactctcttcctgattcccacaggtgtcggtatttctgacgtgtttttccttgacccgaacaggcagactgaggcggggtaagctataccatacgggtgcatgggattggatataagaa

SEQ ID NO: 240388 - DNA, 187 bp, Gossypium hirsutum
tacgctcatctctcgatctcctcgaggttgtactaggttatgctgaagaaacagataaactgaatgggtaaggacatttgagggattttctctttcagactttctcaaagagaggaaaatgtcaactggaagaaatacccattggtgtaatagatgcaggcgcccattattccttcgggggcatgat

SEQ ID NO: 240389 - DNA, 219 bp, Gossypium hirsutum
tctcatgattcactggtctctctgtctctcttcttttctttcctctactttaaattttttgtggaaatcagtccaaaaagcttgccatatttttcagaaaaaccaagcttcattccattacgtcttgaatgcaatctcttcctgtttcacaatttgccctgtgcctttttatctttcttttgctgggtttgtacacattctttcaattccttcttgggt

SEQ ID NO: 240390 - DNA, 190 bp, Gossypium hirsutum
cccacgcgtccgataaaaagcaatctcttggttttcttgtttgtataaagggttagtagagttgggtctctaggtttctttcaaaacaaggtttttctttgacgtatttcctcgcttttcttttaaggggaaaccacaaagaaagggaaccgggtttggaagaaggagatggttttaatggtggagattt

SEQ ID NO: 240391 - DNA, 266 bp, Gossypium hirsutum
cccacgcgtccgagaataaaaccctaattccaaaattcccccaaattttactagaatggatgagatacgaagagcaagagcacgaggtgtacggaggggagatacctgacgaggaaggagagatggatgcggagttcgatatgactgctggagctgaggattaccaaggcaacgaccaaggccttcaacaagatcctagttcctccaaagacttggaagacatgaaaaggaggcttagggaaatcgaggaagaggcgggagcttta

SEQ ID NO: 240392 - DNA, 198 bp, Gossypium hirsutum
gtcgaattctttcgcccggcgacgcgtgacgttacagcgaccttaacaaacactctttacacctcttgtacgaatatcacataattcgtttagcggatgttgcacgggcaggtttatacgaacatatttgattatggtcgtgattactccagacatggcaagacatgtactgaactaagaacctatgtttcatttact

SEQ ID NO: 240393 - DNA, 237 bp, Gossypium hirsutum
gttggaaatttagaaacaaaaactaatgtaggcgaagataaaagtgttttgcctctcgggtccaggacgcttgaaagtgatgataaagctagtggcgtgccagagtctctcattgatatgcctattgcagatttatggacagatccatgcattgcatttgccattcaaactctcactggaattccctgcgatactccaacgatatcaaagtcaaataggggaaaaaatccagggatt

SEQ ID NO: 240394 - DNA, 330 bp, Gossypium hirsutum
cccacgcttccgtacaaagtattctccccaaagcaatcctttcacttgcaaaaagggagagcggcaggcctagatatattatgcggaacattcaatacatcgtcgggaagattttatcctatatagcatgataatcacaggacctgtgaggcagatggtgtaccgaaaaaatgctccttgcaggttaaggcaaataatgcggattaattggaaatatttcggaaggagagcttcatcataggcccagatgaccggagtgctggttagcactatgcagaggcggtcattacagtaaggaagaaggctaactcgttgaaaaagaataacggc

SEQ ID NO: 240395 - DNA, 249 bp, Gossypium hirsutum
  unsure (1)..(249): unsure at all n locations
ctgccgcgaacncatacgcccacgcgtccgctcctccacaaattaactcccttttttcctcttcaagttttctctctataccgcttctattctcctttattttcttctctatatcaccacaaacgaagttatgggagtgggaggattataagagagttggggtttctgggtgatttcagaggtaaagggagggtgacttctggttcaatggggaaacagaaaggggggttcttttggcgttcttttcct

SEQ ID NO: 240396 - DNA, 220 bp, Gossypium hirsutum
  unsure (1)..(220): unsure at all n locations
taancttncnttttcagaatcctacatcgctgccgcttccctcgacgaccctgaaatggtgggctaccattttgcatattcattgagcctatctaggccatcaggaaccaaacaccaatccaactttattctagtttcaagacgcgggccatacatctccatggggatggccaatagtaaaaagacgacggctccttctgcatccctgtccaggaaagag

SEQ ID NO: 240397 - DNA, 166 bp, Gossypium hirsutum
  unsure (1)..(166): unsure at all n locations
tccgcattcccggtcgacccacagcgttcgcccacgcgtccgaccactnnnnnnnnnttttnaaattatttataacgagaatgggtgccaggggaggaggccgttgctacagtgctgctcatggggacactcttactcgacgactacacaaggtgagggagattcg

SEQ ID NO: 240398 - DNA, 262 bp, Gossypium hirsutum
aagccaatgatgttgaaaaattggccaactttgccgtcagtgaactcggttctatcgacatttggataaataatgctggcactaacaaaggttttagaccattactacagttcagtgatgaagatattaagcagattgtctcaacaaatcttgttggttctattctctgaactcgggaagccatgcgcataatgaaaaaccagccaaagggaggcatatatttaacatggatggtgcaggctttgggggatctaacactcct

SEQ ID NO: 240399 - DNA, 241 bp, Gossypium hirsutum
cccacgcgtccgctttgatatggttgtttccatggcggtgagatcaattttcactatcttagcaaggatcaaacttatttttgggattggtccttcgatattaccacgaagcctatcagcttctgcaactgttcatccaactgaaaaccctaacggattcatgtcaggttccataaaaaaatcccttccgaagaggaaaacaaagattcgaggttcgggtttttcgagtcgaacacaaagc

SEQ ID NO: 240400 - DNA, 253 bp, Gossypium hirsutum
acgcgtccgccactatcactaccattatggctacgtctactgtgcctgtagccaaacccaacctggaaaggcaggcaaaaggaaagggtgatgactttgcagatttatcaagcctacacaactcctttactagccttccctttgccaggattaacgctctgatgacggccattcactcgttgctctacagacatatgctctacgaagcagtcatggctcatagcaggaaagggatggctcatgcacagctaaa

SEQ ID NO: 240401 - DNA, 244 bp, Gossypium hirsutum
cccacgcgttcgcccacgcgtccggccacccacatagctacattaggatggttcaacatcggatcgatagatgtatgctgctttacatgaaccgacaacaatgtgtcaaggcactggcacagtatgcaagcgttgggccgtgcattacaattacagtgtggagagagctataaaaggagaacatggacttctttgaagcatattttaaagcttttttttcatacaggccttttatgggtacatt

SEQ ID NO: 240402 - DNA, 154 bp, Gossypium hirsutum
ctgggtctattcaggacgcctagcgcattggcgaccatcacggttgacgctgccgatatggcatctctgaccggacataatgacggtgcaaccggctatgaaggtagcgccacaggcaatgtggcagtcctatcattgccaaggggcagcttaa

SEQ ID NO: 240403 - DNA, 185 bp, Gossypium hirsutum
atgcgtgcggtacatggacaagattacacgctccctaaagggccgataggatcagaagtagcgcagggattagaaacgcccgacaggaggaaaaagacgaccacctgcgctaagatcgctgacacctaacaaacccaatgcagtgactatgcttgcactagaaggcccagccgtcgctgacacga

SEQ ID NO: 240404 - DNA, 220 bp, Gossypium hirsutum
tacactctatctgagatttagcgctttacttaacggtcctgatagttgatagatagtgcagcgttaagtaacctgaggggagacatagaccaccggtgtcaagaaatagcttgcggttagtaaaccctatgccatcaagactctttcaaatgaatgatctgcgcgcgctgacacgtactggatgaaagcccttaggtgtgtggagacttacaagatctac

SEQ ID NO: 240405 - DNA, 133 bp, Gossypium hirsutum
ttcccggtcgcgcacgcgtccggctatagcatacactactagacccactacttctttggcttcctcaatgatcattatctggggcgggtgtcactgtctgtgcggcacaggctaacatggacgatcctttcac

SEQ ID NO: 240406 - DNA, 277 bp, Gossypium hirsutum
ctcgaagcccacacccttgctaatgggcgattgcagcggatggcttttctgtttttgttggggggttattttttatttatttgataactatacaagtgtcaaaatcccattggggactgcagagagatgagacgtacatcgttggcaaggcctgacctatcttcccaccgtaagcgctaaattggcggtcgaaattgttaccgcacacacgtggaagacggctgattcagtttggaggggtttcagttttaaatatacatactatttctcacttcta

SEQ ID NO: 240407 - DNA, 200 bp, Gossypium hirsutum
aaaatttcttggttttcctcccaaagcatcatagatgttcgcagaacagctcgcatctcgagggcaccgctgctgaaggtaggcaggcaaacccatatcctgttccaagcatgcttactatggcattgtgtgatgctatgacttatgacatggctcccatatctgatggctaggatgcatcaatttactttagcacatag

SEQ ID NO: 240408 - DNA, 189 bp, Gossypium hirsutum
ctcgaagcccacaccctttctagtggacgccggtcagtatcctctggcgcatcaaagctgcaggggccatgtatcagcatgcggatactaaccctcagactgaggatgagctccatcgagagaaaaagaatgaagatacgtcctaagatagggaactgaagaaacagatggccttagaataagctgctt

SEQ ID NO: 240409 - DNA, 104 bp, Gossypium hirsutum
ccacgcgtccgccaaagggtgaaatctgtgatgtaaatcgtcgtttgtgttgatgctgctgaggatgagttcttcagattgacaaccagggaagggaaactgac

SEQ ID NO: 240410 - DNA, 347 bp, Gossypium hirsutum
  unsure (1)..(347): unsure at all n locations
cggacgcgtgggtcaattttcttggattttttttccattttttgtcctaaaacttctcttggaacaactcaaccctagttttgctgtacccgatctgtttagaagtgaagctaatttcttcgatcgaagcagctgttggaagagttgcagatctgttgtgtggctttggattctataaaacatctgtttttgttttatttttttgtctgagaactggactcctataacaacaaccaacgttgttcaaaactgtggctgccatttttcaggctatgcttttgaaagtactgaagctgcaaaaggcttaaaacnagagagagagagagtagagtgagagagaggggggg

SEQ ID NO: 240411 - DNA, 350 bp, Gossypium hirsutum
acgacaggtacaaatggattggtctggttcggatctctattgctaaaaatggatgctcacctctgtggaggggcattagtcgggtaagggacgaagttaaacaagggttgtgttggaatttgggcaaggcaaaacggtggatttttagtttgataggtggcttccgaatggctatcctctcattgatgatgttcggtcaagggaggtggccccggctggctttacatccgtcttatccatgacgagtgttattggaacttgtgcttgggagagatttaatcagctattgtctcaacgtgggatcttaagagtggttgcggttgatgtttaggatttctttgggttggaga

SEQ ID NO: 240412 - DNA, 276 bp, Gossypium hirsutum
cgcccgacgcgcgcggcagagaccactctcggctcaattcttacattacgcttgcatttgcatatctaatacgagcgggagacttttcaaactagggttcaaaaacagaggaaactcatgagcatgcttagtgactgagtttgaatagagcaacctactctctgaagctcgcaggtgcaacctaccacgagagtagctcagagtctcctttgattgtgaacggagggaaaatgtggggacacgcagtggtggatgtatcaaccattcgaggatgct

SEQ ID NO: 240413 - DNA, 236 bp, Gossypium hirsutum
ttggctccatgtctagacagagcaacgaaacctaggacgaaagcggttcgttatcgttggatcttaatgaagccgctgatgtggaagacgacaaagccgatggatcacacaattccagtgatctcacaggggatcatgaagaaggacaaggcctaacaaacagactatgttccatcttaacatcatcatcagagccccatgagctactcaattccgtcgacgatgccattcatttt

SEQ ID NO: 240414 - DNA, 279 bp, Gossypium hirsutum
  unsure (1)..(279): unsure at all n locations
atccctttaaccatattgctctcaattcttacatgacgcttgcttctgcatatagaatacggtcaagtgacttcttatccttccattcaaaaacagatgaatctcaattgaaagcttttgaaatgagtaggatcagtgcaggttactctctgttgctggcaggtgcaactcaccatttgttttgctcagaatcttctttgattgtgtctgctgtgaatttctggaaacaggcgngggaatatttattaaccattgctggatgctctgtctggaacttat

SEQ ID NO: 240415 - DNA, 155 bp, Gossypium hirsutum
ccacacctcatggctgtaagttactctcatgtgctttctaaacttcctctaaatgttacatctcaaacattccccttctataacatagttgcactgtaagaaaacagcgcacgagacgtctaaaaagctcatggccttacatctctctctcgctt

SEQ ID NO: 240416 - DNA, 275 bp, Gossypium hirsutum
cccacgcgtgcgcgtcgctagccttaactcttttctgtctcctccgactcttatccaagacgggccggattttgctgccgctattccttcgctcaccccaacagagggggtgacaaacatgttgtaccactaagccgctgatgctctcatcaagactgatcgagagaaccgagaactggaagcttaaagccctgcaagggtagatcaaataacagcagagttaaacacagcatcagctgatggcataccatctgactcttctgtgagagacttgt

SEQ ID NO: 240417 - DNA, 185 bp, Gossypium hirsutum
gcgtgacaatcatgacgggccttaactttacataggctgcttgtgtttgatcgctgttaactgtgacgcagagggtatccatgcgagatcatcaacaacatatctgctgatggggttggaactgaatactgtgatacatgtttgcaggctgacctcttcaggccgacctattttatttcaggtgc

SEQ ID NO: 240418 - DNA, 388 bp, Gossypium hirsutum
cccacgcgtgcgaccacgcgtccgcccacgcgtccgcaagcttttcatcaatggctgggctgtgaacaagcttcaatctctcttcaacccaagcttctttcatcttctcaacaccccagatcccttgcctctctcaacctctctgtttcagccactgtcccttccctcaaactctgcaccactcgccctcttcatggcggtgccaaaatgtcagcctccgccgctttcagctacgccaccgctttagccgatgtagccaagttcaacaacacccttggaggcaccagcttcgacgttgaaaagggtcgggaaatctttttcgacccacaaggtcttccggtctttacccaccccaccattggtgttcctaaaaaacggtagggtttgg

SEQ ID NO: 240419 - DNA, 231 bp, Gossypium hirsutum
tgtccctgggaccggccggattcctgttcgggcgaggcgacgcgcacgcccacgcgttcgcttcgaaattattattatcttggacttcgcatctctttcaggcacgtgagggaggacttgactgtgaagaattgaacttcaagctatctaggactctctacattttctaggttgagtcatagtgcttggtaaaatgtcgaatgctatatcgatatcgccatagtttagacc

SEQ ID NO: 240420 - DNA, 246 bp, Gossypium hirsutum
actctcacccgtgcgacccacacgtccgcccacgccaacgtatgaatactgatcgggtggcctaccaaaaaatatgtggggcttccagctttatatcccttatggactacgtcgtattatcagaccccaccctgtcatactttccttcctcctgacactttgcttcaccatgggacgatctgattcggcggtcatctaaaacacatcctgtcactgcactaagctgacactttactttcttcaaac

SEQ ID NO: 240421 - DNA, 239 bp, Gossypium hirsutum
tactttcataacacttccacgaacttcgctgtacatactgcaatggcggctggcgtctgcaccgttggtgttatcaaccgcgcacggtgaagctagaatggaccaggagccggagcttgtgttgcaagctcaatttacatggccaacatttagaagaacgtgagcgctaggttcaacaacaacggtaggggtccattgggacccttcatgatggcggttgccaaaaagccccacaaata

SEQ ID NO: 240422 - DNA, 221 bp, Gossypium hirsutum
attgattctacatttctatgacacaaaaagctcccccgccccgactccgctgtcatcaacagcacatttctaaacccatatacataaaaaaatggcagcaagtgttgcatcattggcgatgctcaatgcaaactgcctaagcttcagctcagctaagatgagcagcccaacaaagccaaccctaaggccttttttccttgtctccatgcataacctcccca

SEQ ID NO: 240423 - DNA, 302 bp, Gossypium hirsutum
tcgaccaccctgtccgggacattcgaaaagacggacaatttcaagagaaaaaagatgtttggttgaggcatgaatttgatcacaacagtgatcggttttggaatgagtgccacttttattgtgtttgtttgtacgaaaatgatctgtcggagaattagagggtcccaaacccgacttttgtttcagaccgaatccaggattgatctcgaacaggcagaggcagaatttagaggggttgaaccagtagtggtagctgcaatacccaccatcaagttcaatcgtgaagccttcaagtccatgga

SEQ ID NO: 240424 - DNA, 228 bp, Gossypium hirsutum
cgcttcttctaaagtccaaaaattccttacggataaaagacggaattataagatcatatatgcttgagatatatggtatatggtatatggtactaaccccctcacgatgaactcgtgttaggcatgacttcatataacaaacctgcctaaacttgtttatgctactacaagctttcggtgctgggtttggaaaggtgccctttgcttagctttagatagacttaattt

SEQ ID NO: 240425 - DNA, 140 bp, Gossypium hirsutum
cccacgcgttcgaccaccctttccggtacactggcataaacacttatcgggagatcaaggacagaatctggggtcgctttggtaacgctggaacaatggatatcccctttgggaccgatgagcgattattggatgtacta

SEQ ID NO: 240426 - DNA, 337 bp, Gossypium hirsutum
gcgtccgctcgctttttcgataaaagaactttttttgattctacgatctgcactgcttggaggcgtggggtaaaatacatggcttagatggatgaagatccaccttgtacaaactggctgcggcggtgccctacacctgctttgtcttgtaaaaacagaaaaccagggcggcgtgctaatagactcacatctgcttatatcattgtgctatcgagctactcttcatttgtgaaacacacacccaaatatttgggcgctcgtgaaaaactaaagaacggtgacaacccagaagactccctagcttattgtccttacgcacatgcccctttacaatagc

SEQ ID NO: 240427 - DNA, 232 bp, Gossypium hirsutum
gtcttgtgcagccgcatcggtctttttcccttacacatttgcccttcgtctctttaccagtaaaaagggtcaatactggttaaaaagtcgaaacccaaaagaaaagaagagtagaaatggaaatggatcatgggggggaacttgtatttttttttcgtttctactgctaaagttttttttcactcttggggttaataagtttttcttttgcaaattggttgttccttcctcc

SEQ ID NO: 240428 - DNA, 272 bp, Gossypium hirsutum
gtcttgtcatccgcatcgctctttttcccttacacatttttccttcgtctatctaccaggtaaataggtcaggactggatgagaagtccgaacccatcataaaagacgagtaccgacggaaatgcatcatgggggggaacctgactttttctttcgcttctactgcttaagcttttttgtacttttgggggtaataaacttttcttttgcaaattggttggttctttcttcaaactgtccttaaaaaaaacacacttttattaaactcggaa

SEQ ID NO: 240429 - DNA, 224 bp, Gossypium hirsutum
ctccaccatttctatcttacccactaacaagaactcctcgcttctcggcttcctcgcagacacctcctcctaactcacaaccacccaatccaccaccatctcctaaattaaccacaacttcatctgagcagcaaccaccggtaactgtgcgagaaccaaagccccccaaacctaccaccactgttgaaaccactgattggatagcttcctccttgaccaggcgc

SEQ ID NO: 240430 - DNA, 175 bp, Gossypium hirsutum
gccaggcccaaagttccactttccgttgctttaccatcttactagacccataaaaaacgtggttgactatgtttgggcggcttggtcaaattcctaaaccctttgattcttctttctcaacgacgatatatagttcttgcttggttatgggagatacatgcaccgcaagaaaggg

SEQ ID NO: 240431 - DNA, 170 bp, Gossypium hirsutum
acattagaagttccttgttttacgtggaatatgcggtgggagaaggattcactcaaagctttacaaaatttaggaacattaagctacatctcctccaaacttcaaacccatttattagtaacctctgattgtgttgatgatggggtggtgccatggatctgatagatgct

SEQ ID NO: 240432 - DNA, 102 bp, Gossypium hirsutum
cttaaggctatttcgcaggaagtttctatccgtgaactcgctgatgttgatgctgttaatgctgcgacctatgaaattggaaacttgacagttgacgccata

SEQ ID NO: 240433 - DNA, 323 bp, Gossypium hirsutum
aaagtctcaaactttcacgcttttcaattcagttcttccgcatacaaacagagagagaggggcgtaactttatgatttcatatgtgtgaagtgaacaattgacaacatggcttccacattgtttagaactattcaaatccacccattttttctctacccaactgcattatttagcagaaggaatggcgtcctttactgcacagtgaagagtcgtcaaactcaaacagtttcacaagaaatgcagaaccctccaaaagccaaagttccacaacatgccctgaaaaaaacattttttaatatcacaagaaactatgaggcattct

SEQ ID NO: 240434 - DNA, 280 bp, Gossypium hirsutum
tttttcgacccactcgtccgctctccggtttacgagttctagtggaaattcaaagtctgcagatgtcaaggagcacataccagtgttataccctgaaactattctatgtgttgaggtctaccataacatacgaaaatggtcaaaggtccaagagttcttggttcttggccgtcaaaccttaaccgaaattaaggacaagatatgttgcttgactgaccaggtgatgcataaggctggccgttatgatccttctggatatttcctatagaaaacatatttt

SEQ ID NO: 240435 - DNA, 108 bp, Gossypium hirsutum
ggcaagactttgaacagtgcccaccatcatttctgccactgtcgataaagaaactttcaggggccttaaagccggtgcaaccgcacctaaagttagcgccacaaccaa

SEQ ID NO: 240436 - DNA, 190 bp, Gossypium hirsutum
ccacacccttaatcaccagccgtaaaaaatggacacacttcgctcaagttcatcgtctgagggtggtccggtcacccctccctccggttcgcacaatcgcttccccatccaaggtctattccgccgccgcaagattcccttgcactccttcgggcagcggtttccgactgaaccacgtccagttcctacg

SEQ ID NO: 240437 - DNA, 213 bp, Gossypium hirsutum
tcgagcaacacaccaagtcaacactacatgccttatgcaccaaggcttcctatggtgtacagcgatctgcttgctgtggccagtcgcggggtaaatcaaataacagcgcagttaaacacagcatcagctgatggcaaaccatctgactcttctgttgagagactgaaagaaggcttcgtttacttcaggaaagaaaactatgaaaggaatcct

SEQ ID NO: 240438 - DNA, 229 bp, Gossypium hirsutum
ccattacccatccgtttccatcactcattttcccgagaaacaaacactcttctcttattggcttgtatcacttccccatttttgaataaaccccaacacagtctctttttagccttctctatcttttctttaatcaaatcttgatctccgttcctctcttttatttcttttaaatattaaggttacttatattttccgattcgacggtttttattattatttttttgga

SEQ ID NO: 240439 - DNA, 258 bp, Gossypium hirsutum
gccctaaatacccttttcttgttgtttcattttgcgcttctaaaatccattaccagtgaaccatatagagcgacattggcggtcgtgtgcagtgttgcttgcgcatgtcttatcgtgacttttcaacggtgcgagtctataatgctctcgaattctacatcctgaaaaccgagaacggtcaacatctttgcaacgacgccgtcgacctcatctaatccccgttggccgggcagtctccaatcattggatccataacca

SEQ ID NO: 240440 - DNA, 292 bp, Gossypium hirsutum
gcgcataaataatcccccgtttctttctctttaatcaaatcccttcactttttttaaaaaaatcttcataagaaaaaaatgactccatttactgttatgttaatggttcttttccttgtgttcaccttgtctcaggcccgctttttgacagttgaaccggagttacgccgatccgttcgccaggtccaggcccgttttttgacagttgaaccggaacttggcgccaccgcccaagatactatctcgaatgtacccgattccgacccgagaaccacaacaatcactatccttc

SEQ ID NO: 240441 - DNA, 308 bp, Gossypium hirsutum
  unsure (1)..(308): unsure at all n locations
ccggcgcgttcgtccacgctntcttcattctataccaaattatttttattatacttttttcttacatggggcgggggcttatacgccggggtacgcctaagcctatatacccaaacgcctccgtgcatcgggttcttccacactcccgaacactccattcctacgggtgccctgaactgaaaatcctccccacgcaccattgaaagctcacgctcccgagtagaagcctatacatctgcccatagggaagcaccagtcggtggaaccccaccctggcgggacccaaacccccaataaccaaactttgg

SEQ ID NO: 240442 - DNA, 175 bp, Gossypium hirsutum
acgcggacgctgttgaagctcttttgcttgcgcagcttccactgctgtgactgagcaccggcactgtctctgctcccatttggcctcaggcttctcctcctcattaccatgctgcttcacctgtagtcccgcctagtcacccaccaacccaccaccattaaccaccaacgctcac

SEQ ID NO: 240443 - DNA, 361 bp, Gossypium hirsutum
tcgggatttgcacgttgtacagcagtttgggatccctcatctttttgatcttcccattagagcaaccgtatgtccgatgatttatgtttgtgcttatatagtaaagtgtatttttccattgcgttattgcaaactcaagagtactccattagaatgtttgtatgtgctgaaaatcctacccaagtttatgttttattacatttaatttttgcagctttctgcttttggtgatagtggaacacctgaagtggtggctgatcctcaaggtgaagttgcccagacgtttcataaccttggagtatgtgttgtgcaacagcgtgccaagattcgccagcaagtatcaacagcagttacatatgac

SEQ ID NO: 240444 - DNA, 223 bp, Gossypium hirsutum
cgtccgctttcttctaaagtaccaaaaactccttacgggtagaatatggcatatctatatcatcgattcgctcggggtatttcccagccagactttaagaacaggattgaaaacgctgggaatgacatgcaggacccggttgctgttctcactgcgggagaggaagggacacttttggagatgggctttgagcctacctgcggccttgcatgcttggggaaag

SEQ ID NO: 240445 - DNA, 262 bp, Gossypium hirsutum
cccacgcgtccgagcaaactgaacggccggcgagtattgagccagactgactgatatgaatgagggggacatcgggtggggctaaattggtttccaaagggacggaaatcaatgaggttccgtagtcggaactacatcaattcctggggcaaatttttctggttcgttgctttcatcgtctccactttcgttcttttcaatggcttctcctactctaactttcgctttctttttggagaaagatttgagcctgtgttgaagt

SEQ ID NO: 240446 - DNA, 186 bp, Gossypium hirsutum
ggaaagtagcctgggaacaccttctgctgcagcatctaatgcagatgatctaggtttaacccaattccaaggcttttggatcccttctcggagtgttcccacttcatccataatcgcatttcagaaaaatttccaggctcttgatgatgatatcattgttgtatctaagcccaaatctggcaccac

SEQ ID NO: 240447 - DNA, 368 bp, Gossypium hirsutum
gttgggaggatatgccagaaatgccgaatccacaaatggactgcctaggtatatcatataaaggcaaatttcatgtttggagtgaccaggtacgcttggcagaacagaacccatccgaaattttcgatccatcaaataaaacatggtgcacagtctatgacatatggcctttttcgagggcaatgcaatttgctttacaagagatgggggatgaacaagtatattccgtggtggattggggggagagcttttttaaaactagatattttttaagaagagaggggcacaattttggtggtgtttccttcggttattttttcttaacagtggataaaaactttggcgccttttggttattttttttttca

SEQ ID NO: 240448 - DNA, 174 bp, Gossypium hirsutum
cccacgcgtccggtcagctcaaggatggaagaattgttgcagtaaaacgacttaaagttcaaggaggtcctgatgcagattctatcatttcgacagaggttgagctgttgtcaagggtacatcattgtcatgttgtaccttagcttggctactgtttggaattcaggggtaaac

SEQ ID NO: 240449 - DNA, 304 bp, Gossypium hirsutum
taccggctggaataccggccgacgacgcgtccggccacgcgttcattctttacaagatcatcttttatctctactctaaccatggatccttacggcgatggttctagaagatcctgggaataaaaaccctgaaccacaaataaatgggcaacaagattgctagacaattgcacatatactgacggcgagggcatgagggtcactcacgcatggagaaaaacaccggggggggaaaaggccaaatttactgtgaaaattgacacgtagcgtggaaacaacctaaaataaaaacatggaaggggcc

SEQ ID NO: 240450 - DNA, 241 bp, Gossypium hirsutum
ttcccggtcgacgacgcgtccgcatatacttccatatttttttatcaatcaacattctcagattttcgtatgtccttcatggcggcgtgattctttaggttctttgttcctctcaataattcacggttttattgcatcgaggaaaaaaagtgaatctgaaatacgcttggattggattgcgatttgaaagattgggcacgggaaggaaaaaacggttttttgatgaacaattctccaaaaa

SEQ ID NO: 240451 - DNA, 337 bp, Gossypium hirsutum
cccacgcgtccgcggacgcgtgggttctttctctctctctctctctctcttacattatgactatgctctctaattctttggttttacccacaagtcttccattccaattatcttcttctggctcacatttaaagacagcagggggtgctagtcccacaaacttgtcattcaattgtaatggcttaggaaaactgcatctttcttcctttagaaggccagtagtaacagttcaagcttcctacagtgatggtgaaagaccaagcaatgcaagcatctttgttggaggttttattttgggaggacttgtggttggtgcacttggatgtgtatttgttcc

SEQ ID NO: 240452 - DNA, 264 bp, Gossypium hirsutum
agctagcgagcttcttagcttccctataagttaagcatcgttcaaattaagaggatggagtgcgaactccagatcaattcctaagctgataagtactttgatgcctacaagaccaaagcctatcttatgccaaaaatggccaatcaagtcgtttgagatgtaaaacttgtagagggtattggctggcattcaacgagtacactaaaacaatgatgttatgaacccgatggtaactttgaaacttgaaaggaaatgatgcaaaag

SEQ ID NO: 240453 - DNA, 206 bp, Gossypium hirsutum
atctcacgtcccctaaattccgcctttattcttcaaattccccacaaatggccgtaactttgtgagatcttcacaccgaatttggccttaaatcccttaacgacttccttaccggcaaatctaacatcaatgggtacaagcttactaatgatgacattaaggttgattctgctgtttttaaaaatcctggtgattcattttccaat

SEQ ID NO: 240454 - DNA, 148 bp, Gossypium hirsutum
tcgaccgacgcgtacgtctataccaatcacaagacatgaacaacgaattgaaacctccattccgggagtgatcagactcaggagagaagcttttaaatatgtcgtcaattgatgctaatacttttttttgagaggctggttttgggga

SEQ ID NO: 240455 - DNA, 271 bp, Gossypium hirsutum
ctaaactcctctcttcccctttctctcctccattatcttctctttcaaggcttccttcgggtaccactattacttttcctactcgttgcttagactagtatttttttccatttatatattcatttttctcatagacgctcgcttataacacgagattatataacactgcgcgagagacacacacagagagagagagagagagagaagaaaaacccctttgggggggggaacccttttttattaaattaaacttcccagagacaaagggggg

SEQ ID NO: 240456 - DNA, 286 bp, Gossypium hirsutum
cccacgcgtccggatcaatgttgatgagctggtgggcatgtcaaagttgagtttgggagaaagtattggtgatggcggctcatcatctctttcattaaaacttgatggctcatctaggcagtctgcttttcatgccaatcctgcttcatctggtaattctaacatggattcaagtgggaacccaatccatgcggtttaagataaaaacttgatctgaaattaatgtcgaaggttaccttagggtttgtgagcagtacaggttaatattggtggtagtagtacacta

SEQ ID NO: 240457 - DNA, 196 bp, Gossypium hirsutum
cggacgcgtgggtgaaaaaatggttggggcttggaatggaagtgaagctgagccgaagcctcgaccacatggataaattctgatccgaaaccattaatacacgcaggcttgattggttgagtcggattcaaggggggatccaacacaacaccttcctgtccgtttcatgaaaaaaaaggaatcctactaaaatgaa

SEQ ID NO: 240458 - DNA, 224 bp, Gossypium hirsutum
cccacgcgtccgagttcgttaaaagcagtggcaaagaaggcgaaggttaatagcaaaaaaaaaagatggcgacgaatcgggtgctcactcctcagccgcttgctttttcaaaattctctgtttcaaccaaaaaagtagcgattaatagccaaagagcgacgagattcgtcgtcaaagccagtggtggagaagagaagaacgaccagaaaggcttcactccgttt

SEQ ID NO: 240459 - DNA, 243 bp, Gossypium hirsutum
aacatgctaaatgtaaaagataaatagactaaaattttaaaaataaaaggtaaaaaatttaaaggtaaatatataacaggaaaaaaacgatcactctagaactgagtgcttcacatgggcattataaatatataggaacattttaggttttgatgagttatttatgaaattcgaaagcccacaaaaattcatggatgggaggactaaatcatattttaagactaacttctgatgggtttttaa

SEQ ID NO: 240460 - DNA, 380 bp, Gossypium hirsutum
ctcactcttacttactcccctcttttatccatacacagaagccgcctcctcttagtgtaccggtgacatctatgcagatgccatttcatcaccagcctcaggtttccattcaatatggcgggcctaatccacaaattcagtctcaaagtgttactgctagttcaatgcaaatgcctatccatatccccttacctatgggaaatggacctcaggtgcagcagcaagtctttgttgaaggatttaaggctcttccattgccacctcatggaatgacccataagggggggggcttaattttacccccacctattggtggccagtttacgccaaatttggccacttgggggatgggcattgcccctcaatttttttaaacataa

SEQ ID NO: 240461 - DNA, 226 bp, Gossypium hirsutum
cccacgcgtccgcattcagcaacttctcttttaagggagtgtgttatcaacaaggggcaatgggtgtggatgaacagttcaatgaaataaacgttttgaagacggatgcggttttttcaattgatgatgatgttattttcccttgcacttctgtagaatttgctttcactgtttggcaaatggcctaaaatccaatggggggatatgttcttcgtttgcattgggt

SEQ ID NO: 240462 - DNA, 212 bp, Gossypium hirsutum
aaagaaaatggctatcctttgagctccaaccccaaccagaatgatatataatgtgagcctcaacgagcggaaccaatggggggacgattagcatacaccacacagtccctcattggaacttgtccagtcacaacaccagccaaaccctgtttttgttttgacaaaaaggaagtctttttttatacgagaatttccaggttagtggccagacc

SEQ ID NO: 240463 - DNA, 248 bp, Gossypium hirsutum
  unsure (1)..(248): unsure at all n locations
ctcgtgtcgtgtctgacgggtttcacttgcatagctagcanagctaaagagttcgcaaaatgggggccttgaatggctgtgggcagttggggaatattcttcaaggccattaaaaggcttcaaaggttacccatgggtggttggtggcttttaaatggctgtgccgaccaagaccaaaggtggaccccttaaccaacttggtttttttaaaggttccacccaaataaaggccaggggtaaaatttgtt

SEQ ID NO: 240464 - DNA, 276 bp, Gossypium hirsutum
cccacgcgtccgcttccagtggatcgatttgaggaaaaaaaagcagcaatgatcgctgcagctgcgacagtattaagcccttcaaccagtttaaggaacagccttaacagctaccctaactggatgaaatggcaatcctctctttggtagagcactaccttcgttatccctcacgctggtgcctgtgcccacactggcgaaggccaccataatacttgacccgagggttaaaaagcttcttttgcaactccagttactacaacaacaaactgaatc

SEQ ID NO: 240465 - DNA, 150 bp, Gossypium hirsutum
tccacaccactgccggccgttactattggatcggaaccgtctccgcggtcgtcgagggggacaccgactgcggcaacgaactgcacggcttcgggatctacggccagcgagactttaacgcctggatggccaacatcacctgttagcgaa

SEQ ID NO: 240466 - DNA, 330 bp, Gossypium hirsutum
tttctcagagtacgtctgagtggttgttagcgcgacggacactcgtagaaccttagtatatcggtggttgccatcagcggactagtaagtgcgcgtagattgacgttacgacggtgtactcgatttggtcgtaggagactgttgactagtatgatggcaattgcgtgtcgggaatgtttggtcattaggttagttctgatcacgcggctaatgtgtcgtgtgataagggccctgaggcgtaaattttggaccctgaggcgtgtactttgcctgttgaggattttaatggctgaggcgctaggtattttggcggtggtttcgttgacgagt

SEQ ID NO: 240467 - DNA, 464 bp, Gossypium hirsutum
tccccgacgtacgtctgagtgggtggttaagcgacaggagacacgcggaaccctagtatatcggcggttgccttcagtcaacgcaccgtcctccggaatgtcccgggttgatcgaggaccggtttggttgtgacctagcgtggacgtgctggataccgcgttcggccgtgaatcgcctaattggggtgtgaatagtcggggagctgactgtgctgagccctgtggttagttagaacctgaagtgtgttaggagcctactgtgccgcgggagtagtttgcgacgccgtaggaggtcgtgtaggcgactgacgcggtggttggacttcgttgtcgcgaggttgctgcgggctagtggcgccgcgttcgaggtgaccttgttgagtagccttagtattcggacgccgtgcccttaggctaggacgtctctgggttgacttatggtgtagagcatgctgacgagcgtc

SEQ ID NO: 240468 - DNA, 387 bp, Gossypium hirsutum
cgtctgagtggttgttagcgcgacggacactcgtagaaccttagtatatcggtggttgccatcagcggactgatagtacatactgtcgtccgtggtgtagtgggcggatttggccgcgtaggcatcggcgtgtgaatgagacgcgttgtgttcgtctggtgatgcgaactagtacgataagtcttacgaatggacgtacggatccatttcatcataagatgcctcctcgggcgcggctgacggggcttcggcgggttagaatcttgaagacacatgggacggggaatggattcggacttactgatacgactggccgtagttatcatagtagtctgggtacattgggcatgcttatatctacgtgggctagtacccatcggggtacta

SEQ ID NO: 240469 - DNA, 244 bp, Gossypium hirsutum
gtttctcagacgtacgtctgagtggttgttagcgagacggacacgcagaagaatcgtagaacatcggttggtatgccatcaactaagcgggccttgctgcgagttagtctggagcgacagagggcgtagatgcctctgtggatttggaatggtctattgtttactccaaggataaatgatcggcttacggtgcagtttagtctacggcgtgtagctatatttaaatacgtggtggataattggg

SEQ ID NO: 240470 - DNA, 249 bp, Gossypium hirsutum
gacggacgctcgtcgaaccttagtatatcggtggctgccatcagcggactcggcgtgtgttacgcgtgaggttaatgttgattatccggtgattggttcggactgggttactgaaccgtctattgatgtctgtgattattcgtctatttatattccggcggttgtgtcggctgagcttcgatatgttgcttgggcctgccatgaaagtccctgcaggtttgatacgtcgaaggctcttacgactctggt

SEQ ID NO: 240471 - DNA, 453 bp, Gossypium hirsutum
ttctcagacgttcgtccgagtgggtgttagcgcgacggacactcgtagaaccttagtatatcggtgggtgtcatcagcggactacttctcatattcttggaatgatggctgtgttgaagggtgcgtcgccgagttattacgttactgttgatggtccggatgggtcggtgtaggttcgggtgcggatactggttgacattgcggtttatggttctttgtcgccttatatttatggttcgacttctggtgcgtcgggactatcctatactggtctgtgctcggcttatattggtaaattgattttgtagtgccatgttgagattgttgttattacgcatcctggtgcgttgatggctcggatttgtactatttgtgatgagctgcttgttatggtgtcgcttctggtgtggtcgtcggctagtggtagtgtcttgccgttggcgttggcgcctg

SEQ ID NO: 240472 - DNA, 245 bp, Gossypium hirsutum
ttttctcagagtacgtctgagtgggtgttagcgcgacggacactcgtagaaccttagtatatcggtggttgccatcagcggactccgctggtgcatacgcgcattcgattggatatgccgtgtgtggtgtggttgacggctcggaccaggtcgtgtggtgattgtaggaagtttcttccgctggtggcttaggaccgttattagtgatattcctggtaggcttaagtttctatgaagtaggccga

SEQ ID NO: 240473 - DNA, 263 bp, Gossypium hirsutum
tttctcagacgtacgtctgagtggttgttagcgcgacggacactcgtagaaccttagtataatccggtggttgccatccagcggactgattgcggttattttcacgctggcgatggcgatgcgcttcctgatgctgtaagttcgtttggccatggaaagtcccttggttattgggctaataacgcttattagggtaagggtgctgccttgggcaaatggaactagggtgacccaatttcggggaaggggtttaagttggggaa

SEQ ID NO: 240474 - DNA, 461 bp, Gossypium hirsutum
cgggtttctcagacgtacgtctgagtggttgttagcgcgacggacactcgtagaaccttagtatatcggtggttgccatcagcggactgttgttatggcgatattgtagaagccggtgtgccggtcgttatgttgtttcgttgtggtgacctcgattgtgggtgcgggggttgtggtgccgtttggccgcgaacgtggtctggccttgactgtttgatggtcgcctggtgttgggattgctggggtcgtggtgtcgatgcctacgtcggttgtatttgtgactaatttggccgcttcggcagttatggttgccgtgccctttggtgagttgtcgtcggcgtcggtgtggcgctcggtgctaccgtctattgtggcgataacgggcccttcgcggatatgtcctggaagattcgaccgggctattaggatgccgttcgtgtttgtgtttgatgatgagctct

SEQ ID NO: 240475 - DNA, 376 bp, Gossypium hirsutum
tttctcagagtacgtctgagtggttgttagcgcgacggacactcgtagaaccttagtatatcggtgggtggcatcacaggactacggagcctgtggctatcgcgttggttattacgtcgccgtgggattgggcgtggccggctgaatctattggtgctgaaacggtttaatctgatgatcgtgacgtttcgtcggcgtttattactattggttatgtgatgactgttgacgcgattgttgacttggcggtgtctaacctatagacgggcgctcatattaatccccgtaattccgacgattcgcgtgttgcgtcggcgtttgttggaaatgacctggtgggagtataatctggggcgagctctcgcgtccgtgtagg

SEQ ID NO: 240476 - DNA, 412 bp, Gossypium hirsutum
ctttctcgtcgtacgtctgagtggttgttagcgcgacggacactcgtagaaccttagtatatcggtggttgccatcagcggactattgatcctggcgttcatggattgcattggagtcggcttggcattgatatgactcctcatgtgatgatgatggtgtcgctgtgtcttggatttgctattggtatttcggcatccctgatggcggggactgtcctggtgatgggtgctctctatgttggtcgggttgcatcggttgctcatcattattgtccgtgttatcgcggaggtgagtatacagatcccctttgacctgaggtggcggcttaggtttctgacttggttcctggcgtttacggataggttgtcgctggatctaaatgtattgctggacggtgcggctgtttgagaa

SEQ ID NO: 240477 - DNA, 415 bp, Gossypium hirsutum
ccgggtttctcagacgtacgtctgagtggttgttagcgcgacggacactcgtagaaccttagtatatcggtggttgccatcagcggactgctgacgctattttgggttgggcgtgtgacgtgtcggatgatggtgctactgcgtcggctgttggaccttagggtgctagttaggatagtaaggacgctattattacgggttgtggtggtctggacattattgttgctgtgtcggttgtcgtgtcgaatgttgatgctcgtgagactcatattgatgctgatcgtactcctattgctgatttttgtactgcgtttaatgtttgttattcggattatgctcttcccgacgagacgccggagacggttcgtcgtggcgttaaggcgtcgacgtcgtgtcgtgcggaacatgtgtgttg

SEQ ID NO: 240478 - DNA, 371 bp, Gossypium hirsutum
tatatcgcgtggtgccatcagcggactactgttcctccttgcggtgaaatagggaatgtggctcggcctgctactgtagtggcgcgtattcacgctactggccattgtcctcatgtttgctctactgagacgaagactgctacattgtgtgatgactatgttatttttgttgaggcgcctgagaatggtattgatcatacgtttattgattggtgggcgtcgcctggttattatcctgttggtactgttggtgttggcttgacggctggcttggcgtcggttacgtagacgggccactcgttgggtattactcggactactactggtgtgccggctgttgggcgtgcgtacgatcattcggcgtcgctgac

SEQ ID NO: 240479 - DNA, 232 bp, Gossypium hirsutum
cgggtttctcagacgtacgtctgagtggttgttagcgcgacggacactcgtagaaccttagtatatcggtggttgccatcagcggactgaggagatttagatgaccgcggctggtgcactgtactattaggtttagtgtatgacttcgactcgtctggaggtgtactataccacgttgtagggagtttttgtaatcggagacgtcgtcctgtatcagaatattgacgtttat

SEQ ID NO: 240480 - DNA, 464 bp, Gossypium hirsutum
  unsure (1)..(464): unsure at all n locations
gtttctcagacgtacgtctgagtgggtgttagcgcgacggacactcgtagaaccttagtatatcggtggttgccatcagcggactgttcatattttgggtgcagtttaggctagttgtgtgactgtcgttgacgtgatgtcggttaagaagcatattcgggttaattggtcggcggttgctgctagcgatggtagtgttgcgtcgggttctggtgacactggtttggttgttctgtcgttggctacggagggtaagagtgtgtcgcctaagattcctggtggttcggatctgactttgactgcgtcggatattaaggattttgatgagactgctgagatgtcgacttggtcgtgtttgatgcctggngtggcgaattcggaggatactctggtgttgcgtcgtcctgagactgagtgttgcgctactgacgtgccggatcgcttggctacgtatgatgattagt

SEQ ID NO: 240481 - DNA, 453 bp, Gossypium hirsutum
ttctcagagtacgtctgagtggttgttagcgcgacggacactcgtagaaccttagtatatcggtggctgccatcaacggactcctgtggggtaatccgtgtttgcgactgggaagggtaccgattactttgtgtaagtgtttgcgtgtgtttggtccggtggtaattaaggggcctggaacggtgcggggctgccttgctctgggcctttgttgtcgtagtagacgagttatgatgattctgctggtcggactgggttgatatccgtaagtcactctgggggtcgagatctcgtttggtcgggtatacatttgactcgggtattaagtccgatgtacattgagagcaccacacagcgatattcaaacagtccggtgcaaatacggatacagtcgcccttcgcgcgaaaccggcacttggctataaccctatataatacatgagttggaagtac

SEQ ID NO: 240482 - DNA, 403 bp, Gossypium hirsutum
cgtgtttctcagacgtacgtctgagtggttgttagcgcgacggacactcgtagaaccttagtatatcggtggttgccatcagcggactagtcctatgtggtcagtggtagcggagtcggtattgtatgatacctgggctaatggtcctattcatagtgttatgtaatcttaaggaccttgatggcgaggttgctccgtgtggtgtggtcgtattggattcatttccctggaatgaccctcctggctctacgtttacgaattggccgttatggtttagtcgaccatgcgttgattgtggcgccttcggttcttgatgatctggtgacgactattggtagtaatactattgcggatggtggtgttattgctaagcatcggttgtcgacgttatactgacgatgct

SEQ ID NO: 240483 - DNA, 398 bp, Gossypium hirsutum
  unsure (1)..(398): unsure at all n locations
gtttctcgncgtacgtctgagtggttgttagcgcgacggacactcgtagaaccttagtatatcggtggttgtcatcagcggactgtatattgatactttgtttgttgatcttttggtgacggctattccgcttgggctattattgaatgtcgcgacgcctctgcgtatttactgtagtgttgttcgtcggctggttaggttgcatccgttgatgttgattggatcgtttaatgttggaccggtgagaaactttaaggtacatagttggctacacggggcgattattatgacgctattatgggtcatgagttagtgggtgcagcatacggtgttgccgttggcgacgacagagttattgcggacctatattactattggttgaagggcgcctctgggcg

SEQ ID NO: 240484 - DNA, 416 bp, Gossypium hirsutum
tacgtctgagtggttgttagcgcgacggacactcgtagaaccttagtatatcggtggttgccatcagcggactggcgtttcgttggttggtgctgtgtcggtttcatctggtcttgctgttgtgcgtgtgtttgtattgctgcttgttgattctgatgattcgtagattggacctgattgggtctgtcttgatagtgagccggttggcgatgtggtgatggtgtcgattggattgctgtgttagctgtaggctgttgtgtcgattctgactgttgttgagtgcctggtttatgttgatgtgtcggttgttgagactattaggtcgattgtgggtgagggtttgatgatggtgattagtatgattttgattatgatggtgttcgatttggtgatggtttttattgctgttaaggctg

SEQ ID NO: 240485 - DNA, 270 bp, Gossypium hirsutum
agtacgtctgagtggttgttagcgcgacggacactcgtagaaccttagtatatcggtggttgccatcagcggactggtggcgcgttgattatatctggggctagctcgttgtattcctcgcttgttaaggctgaggtgcgtgttcatcctgcggcggctgaggtatcgattaatgcggttaacaatgttcatcttggttagcgtcgtgatatagcttcttctgatctgacactgaacgtctcgcacgctatgcggcctgatcatcggtgt

SEQ ID NO: 240486 - DNA, 328 bp, Gossypium hirsutum
tttctcagagtacgtctgagtggttgttagcgcgacggacactcgtagaaccttagtatatcggtggttgccatcagcggactgccaccggacatactgcagatgcggctggtccccgggtgttagatgcatatttctctgtaggtatactacattggagtgattcaacactcggaccatgataggttactgtaaagctgagcactgaggagtttgacaagttgacagtgtcagcggcctatagttaaggacttgacacccgcgttcgtactgcgtgtggtggatatcgggctgattagtacctagagggctacaacgacttgagtct

SEQ ID NO: 240487 - DNA, 365 bp, Gossypium hirsutum
tttctcagagtacgtctgagtggttgttagcgcgacggacactcgtagaaccttagtatatcggtggttgccatcagcggactcatagttagggtatgtcgtatttgtcgtttgttggtatttcgtagggggcgtttgtgtacgttgagctggcggttggaccggctgatgaggtgattgctgtatggacagttgatgaattttgttgtttgtcgaatcggtggttgggtgtggactttctggctgttgagtcgactggggattgtcctggtgtttaggctgctattaggctggcggaattgtcgtcgattggcgctcatgttgggctggttgctattactggggcgtgtgtggtgcctttggtg

SEQ ID NO: 240488 - DNA, 217 bp, Gossypium hirsutum
tacgtctgagtggttgttagcgcgacggacactcgtagaaccttagtatatcgctgggtgtcatcagcaggatactgatcatagtcattattcctggagtaagatctcgggtgctacggctatgcatgagtgataggtgtcgacgcttacgttagattctcaagtacatgtatgttatgatgaattaagttaatgatttactgtgtgatggtgctac

SEQ ID NO: 240489 - DNA, 407 bp, Gossypium hirsutum
ctgcagcacggtcccgcggtcgccagggcgaccgatacattcagactcccagcccaccggccgtccttactatttgagcctgagcgagcaactgtgaggcgggcggaccacgcgggcgacgagggtggctgccaacacgctgatcgcactggggttgctggccgggtgcgggcgctccaccgaaggcaccgtgtcgatcaccaccatgccgcggcctccgtttaccatcacgaccaggaccgatcctccggtgatcgccgttctgaccacatccactgcctgccccatatcattatccaggtatttcccactcggggctcgaacgttctggatgtctggctgacacccgatgcgctgacgattacgtgcgcttactacaaccaactcgacgaggtcacccaaaaggt

SEQ ID NO: 240490 - DNA, 362 bp, Gossypium hirsutum
gcaaggtcgcgatgaatccggggcgggcgtcggcacacgaatgaatcattgcgcgcaccgccccgtcagtcgatcgacggatagttggccaaaacgaacactactgagtgaatggacttctaccatccgccgtatgcggaacccgacctacatcgcaatcgcatcagtggcagtgctcacagccgcctgcggtgccacaccggaagctgccaaaaccagcacctctacggtcaccaacaccgtcaccgtagctgcgcctcaagcaacgagcggtccggcgcctgaggtcgtcagcgcgacgtggacaatgcccaatctgattggcaccaatcttcatcacgcacagaatgagattcaacgca

SEQ ID NO: 240491 - DNA, 421 bp, Gossypium hirsutum
cccacgcgttcgaagaatactgttaaaagcatatgcgtcaagtcgtcaatggtcaatagacacagaaatggcgaatccctcatgtgcttctcctgcttctagggaacctcaagcactgtcttcttccgatggtgccactacggtgagacctggtgagcgatctacgccgtacgcatctaacgttatgcgctttctagaaagcgtcgggatttccaatcccatcccggacaattacagttcagaagactcttattctgatttcttatgtaaccaccttaagaccgacactgtacgacgtggacacatcacctgcttcaccaccgtctagccctctatactcaattcgatgggtgggttacacggacgggtaattgcagcaatattcagaaagagtggcgattgcgacagctaaaaacggggt

SEQ ID NO: 240492 - DNA, 378 bp, Gossypium hirsutum
cccacgcgtccggtcccctttgtcgttcagggcagaccacacaggctttaccttttgccacatatatctcttgtttttgtgaaagctccatcaatgagccccatacccccaaattttctctccatttctcaacttcatttccatgtcttggtgagtttcttctcttttagtcttcactattttttcaatgcttacaagtgttaatggcttgttatgtttcaaatccttggatgcaattgattttctgagttggggattattaaaaggctaaactttttatggtaaagctttttttttttgaagatccacgtttggttttggagtaggtattaaaagaccctttattgaaatttccatggatactttacttagaacaca

SEQ ID NO: 240493 - DNA, 325 bp, Gossypium hirsutum
cttttagacactcagctttcttaatgtttcttacccacatcaatacttggatctgggtgttgacttatttacgtgtgcaagggccccatacatacatttcgataattgtgtcatttacattgtcggtgctgcgagccccaaaatactcagcccattcaacttgatgaagcgtacgaattgttttatgaaagtataagttttgtctggaccttattgggaccatgttttggggtactggaaagcatctaaggaacgtgcagacaagttaaggctcttgaaatacaaagacctggttgaagatactgtctcggatcttaagaaaaca

SEQ ID NO: 240494 - DNA, 380 bp, Gossypium hirsutum
ggcacactttcggtgatttatgcacaaatactgaaggtgcttgataaagggaacctactggatattgttgaagcaggatgggacattattgacatgaagctatctgaaacgggggctaaggccaaggtttaatacattgatctggagaagcaaccgagaccctaacagaaatgcatggtcacactctatgcaatatacgattctgactctaatgcatggtaaccactgtgcaactgccagcattggtgaacaagagaccaccttagaacaacggcaggcggtgatcatagacatctaagagtggaaagacaaaaacaacgcgtacaactgggttgtagctgtatacgtgcaaacactgataagtatcagcatatatatca

SEQ ID NO: 240495 - DNA, 374 bp, Gossypium hirsutum
  unsure (1)..(374): unsure at all n locations
cccacgcgtccgcccacgcgtccgcaaaacctagcacaactgcatttccttctagcggtttgggtgcatttggggattttcaggatgcttcaaaaccaagcacaatggcgtttccttctagcggttttggttcaacttcgaatacgaatgattctggtatgcctgcaaagaatgttggatctcaaagtcaaccatctgttcaaagctcgggcggtgatcctctcgatatgttcttctcgtcatcttcagcttctggaggttctgctcaagcatctggtggaggtggagggcagcaattttctgaagttgatgattggggattggattctgagtttggaggagcangaggaggaaatgatggtggctcgacaaca

SEQ ID NO: 240496 - DNA, 432 bp, Gossypium hirsutum
cctggatcgaatcgctgttgtcggcgacctccactatgattggaaccttgaacaagatgcaggcgcccttcaatcccttaagccggatttggtgctctctcacaggcaggttcctctttcctctttatacaaccaatgggtgctatgatttttaacttttggagtctttcgtctaatatttttgcagatccaattggggattttggtaaagaaaatatcaaactagttcaagatgacgctgctataaactgtcccaaagcacttatttaggggaatcatgattcttggagcactcagacagatttcttatcagaagaaagatctacatcaacttcagctagaatgtctagctcaggaacatgtaagttacaaactactggactctcctttactaaagatgagccttgatggtggactgtcattttcatgtgg

SEQ ID NO: 240497 - DNA, 445 bp, Gossypium hirsutum
  unsure (1)..(445): unsure at all n locations
cccacgcgtccggtacagaaagctacatgttcttcaactttaaaggattcgaagtttccagggtatcttatgcttaatcctggtggaaccgagtatgaaggaacttcgattgtgaaggtttgttcatatacttattgttcactcaatggtcatcatcatgctcctttgcctccattgaaatgtttcttgaaagcaagaagacgttcaatgaaagtacaaagaagcatgaaggtggaagctttgagcccaagaaaggcttgtggtgatggaacagaggaattgaactcctccatggacttttttgttgaaatatatggcaaaaacaaaggtgaggatagttctgaatgtggcaatgaaacagctccagagcctgaaactgagtcacgaggttcactaaacgctgagattgattntggtgaaaatgttgaacatggcagtgaagttg

SEQ ID NO: 240498 - DNA, 334 bp, Gossypium hirsutum
cccacgcgttcgaccacgcgttcgaacacgcgttcgttagttctagatcgcgagcggcgccctggtttttttatttttatgtgtagttttttttttttttttatttttaatttttgttttttgttattttttttttataatataagtgttttggtacattatatgtttttaaagtgatccttgactttgttgaataataagatgtttgatgtaaatgatgtaatcaaataatcaataaaaaactactttgcatatctttataaaaatattttgccttggactgaatttagatctttttattataacttaaaataataataataatttttaatta

SEQ ID NO: 240499 - DNA, 418 bp, Gossypium hirsutum
attttgttccatgctggttctctgctagtgctggtgttcctttgcttgctggttctttgttcctctactggtgcttgttctttgttcctcttctccacttctcaaaagcctctggtactttgttcctcttctccccaccaccgatgagtacttcggcggttgaagttagtgatgaaaaagtgaatgcaatgtgggataagagattgactgaaatattttgtgatatttgtattaaagagatattgaaaggcaataggcctggtactcatttcacaaaaaatggatggttgaaaataatgaccacttttgagaaagaaacgggcaagggtttttcacaaagacaacttaaaaataggtgggatgccctaaaaaaagaatggaaagcttggaagaaacttaaaagcgaagatactggtct

SEQ ID NO: 240500 - DNA, 453 bp, Gossypium hirsutum
aagaaatatttatacaagctaatcaagagcaaaagtcacgcagatcggaagattgagtaagggtgcaacatttcttactgactgtcatggggggaaaaggcgacagcactttgagctggtattttctatccgggtttcttagtttggacatggcatggaagtttatggtgggttttctatgttggcatataaagcaaagtgcttttgctatccaaagactcgtccaattttttcaccgccatcatcgtcatgtccgttccaagttttcctcctttttggcccctcgtgttgaaggcacctaaaaagaaaaaaaaggaagattgaaagtggctaagaagtccccattttatcgaggttcatacagatatagcaattacagggaaatctctcccaggtttggccagcatgatctgttggcttctttttaccattatagagtttacataccttttt

SEQ ID NO: 240501 - DNA, 377 bp, Gossypium hirsutum
tttttataatttaatccaaaacaggtctcacctgatgtggcctctatatttgctgctaaacaagattcttaaaacagacgaagatgaagatcgaatgaacaccacaacacgatgctacggttttgagcatcgaatcggccacaaatcgatgttgccacgatcccatttcgttcaagtgagcgaaattatgggattttttttgaagttaccttgggttacaagctgtaattatgaatttgttttaatggtgttttataggttccacatgtaaaccaattgttctcttgggattggggacttgcttgggtggtgaagggggtaactactattggggttaaagaatggagtattgaaaatttaactggacttttgtggac

SEQ ID NO: 240502 - DNA, 298 bp, Gossypium hirsutum
cccacacgtgctgaaatatgcacaacctactgcttatagcatgtgtttaggatatatgggggttctagaccagatgtgggacgacaccgaatacacacctggacccgatatatgggcttactgagctcctgaagcactacacttttactgtacagtctaacttctccaaggaaagtgatggcggccgtgtgagatcaaacattgatgagacgccggctgaaacaacgaaagagacacgtaccattatcatcgacaaaaccgcatgttaccagagccgaacgactcctgattcatcgga

SEQ ID NO: 240503 - DNA, 454 bp, Gossypium hirsutum
cccacgcgtccgcaaaagattatccgtgacaattctcgagtgaaaataggtaagtttcaggctgtagctttattacggctggcgcgtccctcccttactcacctgtttttagggtttcattgatttgggtttgctgagcatcgtcgccccccagaattttctttacttccactttttgccagaacattctgcatctcgatatttggagtcttttgtttcttttaaggtttcatctcaaggcaagcagaaagaagaaccggtttctggtggttctttctaaaccgatcgattcatttctaggtccccagaactttgagggggttagggtttttgctttgatggctctgtaaatgtttctaaattcctgctgttttttgaagggagagcaggaattatctatgtttttagtactctaaggtttagatgtgttagaaagttatgagatattcttctg

SEQ ID NO: 240504 - DNA, 338 bp, Gossypium hirsutum
gccgaagcttagtcatcatgatggggtgagaggatttggcttcgatcccaccacaaagaaatataaggttgtcgagatatcatataaaagaacaactcctttcacttttagtcaccgtgttgttagatttggcatgcgtcgatctcatcagacggaaacatcttcttcttctttaattgaatctgaggttcatatattgactgttggtagccccacttggagaaatttgggatgttttcctttccgttttatgtggcaaaaatctcaggttttggtcaataagaaacttcattggagaactactactaaccttattatgtcctttgacttggcaactg

SEQ ID NO: 240505 - DNA, 251 bp, Gossypium hirsutum
cccacgcgtccggagagaccgaggaaaacctttaccttaaactgattttacatgaaaagatggaaggatggattctgtatatgtgcaaaaactgaatagtaaaaacagtattagattgaggattgggtgtttacaacaaatagggctgaatgctaaacattatcaaaggtaggagaagtatacgaatcagcctaggatagatgtaaatacagctagtgattggtgccttactaagtttaagaacatttata

SEQ ID NO: 240506 - DNA, 189 bp, Gossypium hirsutum
tcgccccaaaccaaaacccatttttctcccattgtcttcaccaacacattgattaactttggcggggccaccccttttccttcaggggtttcctcttcaaagtccaaggtcttcaccgctaccccgttgcctaactttggcgccaatttttgtcaccctgttaacatgtctgctgacttgatgccttgt

SEQ ID NO: 240507 - DNA, 202 bp, Gossypium hirsutum
gtcagtctttggtgaggttgcatatctgattggttctctttggcacaatcattagatttgaagtatacacttggcttttattttttaaaaacagagaaaaataacgtcagaagttagacattgaaaaatcattttgagctttggcacattttttcctatacaaagaaaaagcttaaacgatgagcaaaatctcatctggaat

SEQ ID NO: 240508 - DNA, 446 bp, Gossypium hirsutum
attaacagttattcttgcccagatgagttggtttatgttaaatgcaaaatttctaatgcatggggttcttcagttgaagcagtgggtgtcacccacagatgtagaactgaaatatgttgaaaattctagcatatcttctgcagaagagaaacttgtggatttgtcaaaccagtcggttgaaaatgtaaataattacacagggatggagggacctgaaaccatatcaactattgacacaatacctgaaactccaactgcagcatctagctccgtgaactttgataatgattcactatccagtgtgaaaactggtcttgatgattttctggctggggttaacaagtttgcaactcttttctagacaagggagagaatgctgtgaaaaacttattggaaaaaattacttcttctataacttcttgtaagacgagtacttttgaagctgt

SEQ ID NO: 240509 - DNA, 329 bp, Gossypium hirsutum
cccacccgtccgagaaaactgtggaagacaggtttcaactccgacaacctgacgctttgctgagtattctggtttccacataggaacactcgtctctttctttctttatttttttccttataatccttattgggtgtaacatacgcttcctcttttatcttatatctacccttcttttgagggacacactattataaacgcgtatattatttcaccgacgtctttcttaatagcctattgaatatacacttgaagaggggtatgacattgaaacagcttgcctaacttgtatgatggcatttgtgctctccagagaagcatctttatga

SEQ ID NO: 240510 - DNA, 244 bp, Gossypium hirsutum
cccacgcgtccgggactgatcactgggattcccattaaagagaggggggagccaaattaaacatgagaaagatgccatgggtattttggtcccaagcttttgaccaacccttagggttcttccggttttcatcctagttggtggttttcctttgggtacttttctatggtatatgttggtggtgttggtttaatttctttgggattgtaaataatgagcaaattacatacttaaacttattatt

SEQ ID NO: 240511 - DNA, 318 bp, Gossypium hirsutum
caccaccgaagacttgaaggaaaaaaataatgatgttgtggaataccacaaagtatatcaattgcgacatcaaaaagtgacatcaatctattttatagatgtaatcaataataaagtctttaaaaagtagttttttttactgaaaaacaaataaaactcaaaaaataataagattattacttaatatcataaagtaaatatacgatagatttacattgaatttcattacacataattcatcgctctagatatgacttggatcaaagtcacgctaatcacgttaccgttaaagttttactctttaattataatttatca

SEQ ID NO: 240512 - DNA, 296 bp, Gossypium hirsutum
gaagatggttaagatagaagttaaccatttcttcagcacgtcaaggatgacagtaactcgttgttattgtaaaattctttcttcttcctttttatttagttttttttctctctctggctcttatttgtaatttatccgcttgttctcaacaagagcacttgtaagattcccccattgatcaacactgtggacttatcagggtacaggacgaggaggtagaatacactccctgcccaaacccgacctattgacatccctcaccagtactaaattttctctcaacttccgagatgatt

SEQ ID NO: 240513 - DNA, 376 bp, Gossypium hirsutum
cccacgcgtccgttctttagaagttgttttaacaatcttttgattgtgggagccatcttcaacgttcttcttgccatcgatattctttggaggggagattagagccgtttgaagagatttgtgaaatcttttaggatttcaaggatctttaggacttatcctttatttcttgctgttttcgatttctttctttacttttctttgcttatacttgtgccgatttctcatctaatattttgctgttcttgtttggttttcagcattgattaaacttaagatctcatcatttaaagttgttcctctattggcaggacccattccaaatccaaaaatcccaatttctaagggttggcccaatggatttcttcaatttggg

SEQ ID NO: 240514 - DNA, 296 bp, Gossypium hirsutum
aggaaatatatgtatggtcttgtaaatgagctgtagataggattctgtacccactcttaactgtatactcccctgatctttcgtattttcaaaccatcatatcctccgagcaactctcagaaatcgaaatagagaagattcgatatgctgtttcataattaaaaaaaaaaaaaaaaaaaaaaaaaaaaaaaaaaaaaaaaaaaaaaaaaaaaaaaaaaaaaaaaaaaaaaaagaaataaaaaacaaaaaaaaaaaataaatgataaaaattattgtataaaaaaaaaaaggggggc

SEQ ID NO: 240515 - DNA, 483 bp, Gossypium hirsutum
ggatgcatgagtgtagatatgatataggatgggagaatcaattatgaggaatttgtagccatgatgaaaaggggaactcaagatggggatgggatgtgaaagacagatgagaaagaaacactgctgctgccactgcatgttccatgaaaagctaaaaaggaacttcaccaaatttagatcatcttgttggctacttctgggctctttctctttccatctttaaacaccaattatgacatgatgatcatcattccgaatccatgtagtttttagcttttgttttgtatgtagatagaaatggcatctcaaatttctcaacaaaagtgggaggaaaggtaaataaaagaaaaagagtgtgtttctctctcccccaaatcatgtactctgtaatattattatttttcatatggagaaccgtgggtttctgagttcaaagatcatttttttttttatttggaaactttcgtacttcagaagagacag

SEQ ID NO: 240516 - DNA, 295 bp, Gossypium hirsutum
accacgcgtccgctcacacgtgcgaaccagcttgcgcgcgtttaagaccagtgaaaatatctacgctagagatgccatcgagccgaggcgataatgtggccatgaatgtaagaagaacaggagcagaaggtatagatgtgaaacgggccggagagctgtggaaggcgtccgggactgtaccgaatgatgatccacgtcgtgcaactatgcatagcatgtatgactgcggatatcagcttaaacaatggaccaacatgagttgatccgatactgaaactggctacttaaaactaga

SEQ ID NO: 240517 - DNA, 186 bp, Gossypium hirsutum
attaactcatccacccactcatccatccaagcgcaccaatttttttctccacaaacatactctctctctctatcaaaaaaacctctgggaagggctatcatctaacccagtaatagcatattctacccataaataaatctttttaaatcccctcatttcataatcaactttctattaaaataaaca

SEQ ID NO: 240518 - DNA, 212 bp, Gossypium hirsutum
cccacgcgtccgcccacgcgtccgcaaaatgctagtcccctaagtggatatgcattagtgtcatttgtatcttcactaacagtcgccatgactcgtctctaacaagtatattgaaaatgtctcaaaatgaggttctctgcaaaaaaaaaaaaaaaaaaaaaaaaaaaaaaaaaaaaaaaaaaaaaaaaaaaaaaaaaaaaaaaaaaggaaaa

SEQ ID NO: 240519 - DNA, 390 bp, Gossypium hirsutum
atttaatctcaatatttacacatctacaaacataatatgggtgaaatctattaaattaggatcaaattgataggatgcctaaattattaagagctaaatgtatattatatcaagctaatttatgttaatttgatgaaaaacattaacctgtaactgtccttaattgttcattattgcaattgatgggaattaattgctgtaactaagaccaatatgctcaatgttaaaattgaaagagatggaaaaaatgtatataccacatcatataagaatgtagctgataacagtatcatatgcaacctctcaaggaatataaagtttgtttagctcggaagaaatctgatttgggaaggtaaaaaatgaatattgatggtgcatataagttttcta

SEQ ID NO: 240520 - DNA, 407 bp, Gossypium hirsutum
cccacgcgtccggatttgagctactccgaggcttgcgattttcactttttgttcatcgatatagtgagaaaatttgatagcctttctggccttttgtgcttgaattttcctcttccaaagtagcgatgcatttaccagattgaaactgaattaagacttgaacattttctttggaaaaaacaagcaacacaaacacaataaaataaaaaaaataaaattgaattgacaaccccaattacatatagattataaaaatatttttatgaattaaagcaattgggtttagttgcttagtgcttttttggacgcacgaaagatgattccttggggtgttctcaattgctagttgagtgctgctgctctttaccttctcggcagaagcagtggcagggatgctgaaattctta

SEQ ID NO: 240521 - DNA, 391 bp, Gossypium hirsutum
  unsure (1)..(391): unsure at all n locations
atctgagtcaagaagcttgggtaagctggaagaagtgacccgagagatggctgaaagaaaggaagcactaaaaattgctatggagaaggctgagaaggccaaggaagggaagttaggtattgagcaggaattgagaaggtggagggctgaacatgagcagcggcgtaaggctactgaattgaatcatggagaaaaccctccaagggcaatctctgagggaaagaaagaaacaaagaactttgaacctgtacctgctgctcctactctggccgataccctagcaagcccaaaggcatatgatcacgggagcaccacagaaactgaatcatncccggaaccgaaggtttgtaaagaaaaagaaaagtcattggtcccgaagatttaaatgttt

SEQ ID NO: 240522 - DNA, 418 bp, Gossypium hirsutum
gcgcccacgcgtccgctgaaattttcttgaaactatggcatgtatagactagtttggaattggttcttttgagagtatatttgtattaaagccatgtgaatatggcttaattagcttgctctactcgattttggattggattaaaggccatgcacattttggtgttggtacgacattataggtgtgcgtggattattcgaactaggtatgagcttaatatatatataacatggatataggtgaaaggatacatgattttagagagggatgatgatgttggattctttttgcctggcagtttcagacaggtagaccaacaaggagctggtgttaatgttggacatgctcaaagtgcaaatgcttgtttaattccaatggtgcctactccaccacaagcttatacatctcctgatctcac

SEQ ID NO: 240523 - DNA, 363 bp, Gossypium hirsutum
  unsure (1)..(363): unsure at all n locations
cccacgcgtccgcggacgcgtgggtttgtttatctaattagactcggttttaactagataaacaaatcttataaaacataatcaagcttgaatttggccctccctaggctccatagatacaacaagtgcctggagcatatcaagctgtaattatggcaacattgttgtgcaaccctttgtcgtgaaagctgtaatatttaaagatacatcatcccgaatttcttaaataaaggccaacatttaacttgagcaaattagaagacatctaaaatataatgcactgccccgtactccatggcttccaaaaacgganaagaagtaagctctctactctntcccaaaatcagtactgtagtgtgcact

SEQ ID NO: 240524 - DNA, 206 bp, Gossypium hirsutum
acctagagcttcaaaaatctctcccaagactttttttttcaacatacacacgatttgtatctgggaggcgttatctcatgtacgagacctcctcctatcatcagaaatttatctgcagtctacatttaccgcgacaaacccgcatcttatatatagcgctttccaaggtctactcactcatcattgtcgaagacacaatcccctag

SEQ ID NO: 240525 - DNA, 327 bp, Gossypium hirsutum
  unsure (1)..(327): unsure at all n locations
caagaaaacacatngagccagccttaaaaatcatgtttttggatgtccccaactagccttgaaaaatctcttttggtgccttgcaaaatcgtccccttcgtggccaataatggtggtgtgccgccctaaaccaccattaggggctactgaattttattatttttaccacctttttccaaaaagtctttaatccgtattaccctactttaataagcatttaatcatgtgttatttaggaataatcgatccctatcattcgacaactcagatctgggtaacggattgagtaaaatgcactatcatgcgagatcttgcactggtttgatt

SEQ ID NO: 240526 - DNA, 114 bp, Gossypium hirsutum
cggacgcgtggggtttcaacataatcagcgaaccataatttgagataaagatagcagggactctgaattctataagattcgctcgatcaaccaaatggccaaatttttcatttc

SEQ ID NO: 240527 - DNA, 296 bp, Gossypium hirsutum
gcatgttcttggtttacatgcatatatctatttttcgttcttttcaagcaaataactagacttgttaataccattgtcaaaattcttacaggatcgaatgatgaaagaacttcattcccaaggtataagaattgaggatattgcgactgttctgaaaagatcaccaatacatccccgaatcatcgaagctattaaatcggctcatgctttaggatgtgatttgaagattgtgagcgacgcatacactttcttcattgagacaatctttggagcattcacggcctgaaggaatcctt

SEQ ID NO: 240528 - DNA, 437 bp, Gossypium hirsutum
  unsure (1)..(437): unsure at all n locations
cacaaggtcggcagcaccaccaccaccaccaacgactcgtcatcttaagatggcctatatactcttctcagagacacagcgataaaaagatataatggttaagaggaaaagagcttctcctagtcttttccctattgaaacaattattattatagtgtatctttatgatagatgtgggatggagttttttattttttatttttgacatttatttgcttgccatctttgtagctttaatgtttcttgtccctttttaagagttttagttttaaaaaaaattatttttnttttttatttaaatattaatttttttaattatttttatatttattttttcaatatttaattttattaaaattttaaatcttatataatttttttatattattttttactattattttatatttttttttttttttttctccaattttaaa

SEQ ID NO: 240529 - DNA, 164 bp, Gossypium hirsutum
atcaatttggactgaaatttaaatttttaggggtaatttcaggtaatgctccaaatattgtgaggttggattattttgaatttgtgtcaattggtttggggtcaaccaatttgaggttaagtcaattaaattttccggtccaaaaaaaaaaattgttggaaata

SEQ ID NO: 240530 - DNA, 380 bp, Gossypium hirsutum
  unsure (1)..(380): unsure at all n locations
gtaatcctatgaaagactcgtctggtgattacccttctgagaagagatctaagcgtgagaatgaccagtcttacataccatctcagaatcctcaacaagcctcagttccaccattctcgcatcctgaatcacaccaacataatgttgtgaccaccacccagcagttggctctaaatgaggtgccacctcctccatcatcgtctcctccacctctgccaccactgccgcctatgccaccgtatgctgtgccccagtacatgccaactgctggatcaataaatggngtgacatatagctatagcatgacatcacagcagccttcctttgcctggtattccatagctggagctgcaatgagtggcatcttcctaattggcaca

SEQ ID NO: 240531 - DNA, 184 bp, Gossypium hirsutum
gatcgacaatagctaagcattgcggccattacatgttcaagctacgtatggctggcgtacaagctacgggcttcttagccaaagaaaacaacaaaaaaaaaaggatgcctggtttggtacctttagtccaatcttagacaaagagaaaggtggatatgaagcactgctgggtagaccatggtcc

SEQ ID NO: 240532 - DNA, 376 bp, Gossypium hirsutum
cacactcgtcagaactggtatatgcagagtacgagagcaacatcaggtgaggggctttatgaggacctagaaaggctgtccaacgacatagctgacaaggcctgaaactatgaagaagatctttgcaatgagggaagtcctggaagcaggggggagcatgataccgtctgattagtattataatgtcattcgccgaatccctattgaccaagatcggaggcagagccgattggaagagatgccacatatatgcatcttagtgatgatcattagagctaggatgtgaacttatcggctatatgcggaactaagtaaactgtcgctggctggatatataatacgcttttggataaattattcctttgcgactggatct

SEQ ID NO: 240533 - DNA, 344 bp, Gossypium hirsutum
gttttgtaataatagataaggttttgggggaccttttgtttgtatatgaactagatttcgggggtttctttgtcattggagagatctatcaaacaaataaggaaaggtaacaaagcaaatcccatatcggttttgaattttattgctttttttgaatcttctttgttgtttttggcttgtaaaaaaacatggcttggtgggctggtaatgtagcaatgagaggtggtattggtccaataccttcttcaaccccatctcttcatcttagaaacccatctgaagatcatcaaatggctgtttttagagctaatattcgtccttcaaatgaagatcatcatcatcaa

SEQ ID NO: 240534 - DNA, 427 bp, Gossypium hirsutum
gttttttgggactatgatcctaatttcatggctgccagtttggatgaagcttaccttgatattactaaggtttgcgaaaaaagaagcattactggtgcagaaaatgctaaagaactcagatctagagtatatgaagagactggtttgacatgtagtgctggagtggctccaaatcgcttacttgctaaggttctattttctgttcttggcacataattgcagttgagaaggtgcatctgcaattgtcatcactatgaatttagctattgtagcattgtcaaatcaaaatttgaatattgcattttatgcagaaattctacaattttccataggatgttatttcttcaaattgatgaagtcagtaatgatgttggacgaaaatgtgacaactcttttggtgaataacaatactttggtcctgactggt

SEQ ID NO: 240535 - DNA, 360 bp, Gossypium hirsutum
  unsure (1)..(360): unsure at all n locations
cccacgcgtccgcccacgcgtccgatcctccagcataaaaaaaccccctttcatctctcattatgcatgtcccattgatttcactctacctttgcctccacttcgatcggggcttcctctatccaaaacctgggtgaagcgtgcctcctcctttcctcgactagaatgtgtgctgtttcatttgccttcctaggtacgtatctaaaatcaatcaaagcaaaccccctaactcgttctttgatttctttaattaaaatactaatggttgatttgtcttcctcaggagattttagcttattgataatcgttagggcatccccctncaccaaaatatttcaaaaccctagctcctcaataaaa

SEQ ID NO: 240536 - DNA, 272 bp, Gossypium hirsutum
tttaaaaaagactctttttatattaaatttttttttttataaaaagaaaaattattttacttttgaaacatacaaaactctaattatggaaaaatgtatcattacttattgtttttattttatattttaaaacccaaaatctaaatcttttcaagaccattttctttaaatacaagttcctcttttcttcaattttgtacaaaaaaaacatttttatctatcatctatatacttttttaaccacttttaaatatcttgactctttttttttt

SEQ ID NO: 240537 - DNA, 360 bp, Gossypium hirsutum
  unsure (1)..(360): unsure at all n locations
cccacgcgtccggccacgcgnacgctgacttggttttccaaggcgagctcttgctggctactgggcgcacttgattgagcccatgttttatactgcctgtgtgcactaattttgggcgacattactagccgcgttgtgccctgatgatttatatgcatatgcatccctcattaaagagaatatcattgggtttatttttcagttacagattgattttaagtctcgtgccactttgctaccaaaaaaagatgttattgaaaatgcttctatcagtcgatgcttacatactttagggttcacttacgaagagaaggggtttctctgataattgggatgttaaaaaaataaaaatacttggaa

SEQ ID NO: 240538 - DNA, 306 bp, Gossypium hirsutum
  unsure (1)..(306): unsure at all n locations
gtcagactcgcttttatggatctgaatctgannncactcttctatacttttcaaaaagggaggaataaaaaaaacaaaaactaaaccacaaacataaacaaaaccaccaataaaccccaaaatatattatctaatccccattatatttcttcatcctaaaaaacacccacaaataaaatcaaattacagtctaacaccctaaaatggtccccccttacttatatttccaaacaaacctccccccccaataaacaaaacactccttttctatattccccccaaaaataatacaccccccctccttta

SEQ ID NO: 240539 - DNA, 194 bp, Gossypium hirsutum
tatcaacaaacaccacccatgcctctttttatatgatcacgaccatctcttatcggggaggggaaatcttggaagcacaacatgcacaacctaaagcaccaccaaaaacaaaccccgacctaatgtgcatcttatttttattcttatgacatattaaactgacaaaaaacaataatgggacctccctacaaacc

SEQ ID NO: 240540 - DNA, 128 bp, Gossypium hirsutum
cttcatttacgcaactgaagttgtatctttggtgtttggtgttatacatggttattggtcagggttggttattatatcaatcctgtggtattaatctatttaataatacgtactcatatatttataat

SEQ ID NO: 240541 - DNA, 384 bp, Gossypium hirsutum
gacacacgttcgcccacacatacccttaggctgaagaaaatacccgtaccctcgcgagaggggttggctcttagagctggccacacgatccccaagcccatactccatgacttgtacatcactgctagagcttactcccttaagaacactcgtctcctcatgcacaagctttgcacatacctatgaacggctaacctggagagcctaccctatgcgaccaacatcgagactcagcactcttacaaccaaggctaatccgaatgaataattaacacaaaacatgaacaccgtccctacggacgctttcacaatatcattcctgccgatggctctcaacttctaagtgatgatattacagcgagcgcgaataaatcggcgaagtaa

SEQ ID NO: 240542 - DNA, 175 bp, Gossypium hirsutum
cccacgcgtccgaagattactaatgctattataacaaagattattgggaccacaatggggtggtatgacctccacatacatatggagaacgagacagatctcataccacttactggagctgttgcggaaaataatgctgcgggagctcttgaatgatgactgactaagaatcgga

SEQ ID NO: 240543 - DNA, 435 bp, Gossypium hirsutum
tgcatatcaaagttggcttgaagcacaagaatttaaacatctccaatcctcgagtagcttgggagcatgaacagttctcaaggctgagagttactgctgccactctttctgaaatttcgactgctcctgaactcctacaaggcactggaggtctgtttgatagcagacaatttgtgaatgaaactgcaatcactagaggtgtaaagttagttgctgaaagtcttgcgaggcatatctatggccaccagggaaaaaatgtccaaatttttgcagatggcggtagtttggctgtaaatcctgcttatatacaatcttggctggatcttttatcacaaacacctcgtgtggctccatttctttcaaagaatgacccttttgtcatggctttgcagaaagaattagctgatcataccgatgaagtgaacatgcaacatg

SEQ ID NO: 240544 - DNA, 388 bp, Gossypium hirsutum
gtgaaattactggacgccatccattccgtccaccaccgctatcctctgcaatgtcagaccggacaggcaacgagggagggatcgcgagagataccgagaccgagagcgtgaccgcgaaacgaatcgcaggcgatacagagatgttcgcgaccgagagcgagacagagacagggaacggacgcgcagcaagagatcccgcactccggagcgtacccgatcccgtcacacgcgctcttctacgcgttcccctgaccgtgaacggtaccgttcacgctcccactcttaggaacgctccgtccaccgtcattaccggcaccggcaccgaacaccgtcagatgaacccccgaggaaatgttaccgccatgaaagcgaggaaagggagaatgat

SEQ ID NO: 240545 - DNA, 458 bp, Gossypium hirsutum
cccacgcgtccgcccacgcgtccgcccacgcgtccgcccacgcgtccgcccacgcgtccgggcacgcgttcgcccacgcgtccgcccacgcgtccggttttacagttacagacacctcaagaagaattttaacagagaagccatgattgaagtcatcctccattgacgaccagatgaaatactactaaagaacaagcaagcaaatcgatgctaaccaggagaagcaaaagccaacctgagaatctatccttgttgctagcctagtcctgtaatgatacaagaaaaggtttgtaatattattttacagtggtttgtgttgtacccgtacgagtgtagtaacttaaagagcttgttaaagggattagagtcataaagtactacataccattagtgtctgttatatttcaagccaaaacagaggcgtggaaatcgagtctatatcaacagctttgatttcg

SEQ ID NO: 240546 - DNA, 455 bp, Gossypium hirsutum
gtaagacacatatcgcaatattacatctacctttgccttacctacagaaagccttcgcacagatttccttccaacgtttttagcaaaggcccggagagaaagcatagtctagttagtagtcctacagaagccagaatcaatcctatagattataaactgtaacctataatcttgatgcactataatacctaaaatattatatgcatatcctcaccagggaatatgcgcagaaaaaagcaccttttttcactttatcactggattgcgaacttacttatccttttgatgagaatgcaactactcttacttactatcttcaaacccgcctattggcgtgtctggatcaggtgaatcgcttggctagatatctccttaagcgagatatcgttaactccttagttccttagaaaaggataataagggagaagcacgaaaaaccctagctttctgtcgat

SEQ ID NO: 240547 - DNA, 331 bp, Gossypium hirsutum
tgttactctaccttcaaggtattcaaatttcatcagattataaaaatgaaaatataaatatgatggtcctaagggagtttcagaaggtaaggggaaaggaaaagatgatgactaaagcagctgttgaactatgctaccattgccatcttcacaattttaattccaagaaaaaatatgaaatcagtggcagaattaggtaatcggttgatatgccgacgtttgatttgatacagacagcatagaattgttgtaacaatagaatttgttattctttgttttacaccatttccccctttcgagcttctaggtgaattaatcggatatatttcgt

SEQ ID NO: 240548 - DNA, 337 bp, Gossypium hirsutum
cccacgcgtacgattcaacctttattaaattctatataaattacattgaaaaaaaaaataagaaggggctaaaaaaaaaataaaaaagcaaaaaaaaaaaataaacttatatacacacccttctgaaaaatctatactacctctaccatcttaacaaattggcccccccttttaaaatatcaaatctttctttcccttacttgcccactttaaactctcctcttttgaccccaaactcacattctatgcccttccttttacaacctcttgccttgaaaacccctgcactatccccccttattcctcttccataactttcctttttcctccattgcgt

SEQ ID NO: 240549 - DNA, 282 bp, Gossypium hirsutum
acaatttatccaaccattctgtcttttatttatgaggaatcccttcaaaaccttgcgaacggtgaccttcctttccgtaacccactgcaacttaacccatgcatacacatttgatataataaacaactgccctatacaccgaatgggctgccgccatctctactagtggcaatgagacttgaccaaggtcaagcaaggcaaattactttgacctttgtaaccacacaagcccgaatcttggtctcaaccaaatgcaattctaatgcctacgtcaaagtctca

SEQ ID NO: 240550 - DNA, 312 bp, Gossypium hirsutum
cggagatcattgtattatcaaacaatacaccgttcttgaagcttgttattatggggatggctcgccttcaacgtacactagcttcttcggtgtcctacacggctgccttaaccgtgcctgaatatatggtgtcaaacgaatacagcatgacggaaactcataaacgtagctacagcaaacactgacccgttcgcccaacactccagggtcttattgtccgacaccttctctaagcttctctcatgatggacacaatattcctaaactaatgatagagtcaatgcatcactatatcagataacttccggaaag

SEQ ID NO: 240551 - DNA, 390 bp, Gossypium hirsutum
gaaaaggaaaggaaagatgggaagctatataaggagctacgagacgggcttcgacttagttggatcgttgtatacctcgaagttaaacaagctgctaaccttgctagctgcagccctctttgcagacatagacattggccaacacacaaagatttcgtgataaggttcgggattgggcttcctgccaaggacattcttccatgtctagtagtgtaatgcattctgataatgaatttcatagtcgagaacacagaaggggacgccgtagagacgacactcaaatcgacagtgctaatcatgcagctggaagatctggaaggtgcacatgttaacgcaagaaacagcttgcttattactgaagatactctgaactgcacgataagctaaaac

SEQ ID NO: 240552 - DNA, 449 bp, Gossypium hirsutum
aggaaaaccagcatcctccccacggtggtgttgaagcagaagcagtcggcggcggcgccgggaacctcatcggcctccgccaccacaatttcttcaactccgtcttcatgttcgttagaccatcaaaattaattcactttcacatcccaatttttacaacgccattattaatttgtttcaggctaatgctgccgctcgggatataattaattaatactagtaatataatattaagcggtgtccgagccgagctgagctgtaaagtgtaaactgtacttaactatttctattgttttgttcttatatgggttggggtgggggtggttggagttgagacaatagagaagactgaagaagcttctgctctattattattattggtattattgtatagtcagacataatatagtccattggtgatggaatggactacatttatttttctctcc

SEQ ID NO: 240553 - DNA, 444 bp, Gossypium hirsutum
caacgctccaaacttggaaatcttcgtgcggtgtttcagctagtgggatactgaggatcgtctctgctacatcctccggaaaggatttgaatctggtaacggttccaatcccataagcctcgcaattatgcttggtggctaccattgtttattgttgtcatcctcctcatcttcgcgttggtttgcaaataatatggaggcattcgcatggatctcgtggggcttaaggcttcttttggcatcaaagacaactctgctatccagagagagcatcagaacttccttgaaaaatttccatggcgaccttgcgctactttctttgtactaaaaaacaggaagggggaaaggtgacttgctctaattgctatgcgtgggaagttctgatgccgaatatcggagctcgaatgtaactagagattgcttcgaatggtctagtgacgctgc

SEQ ID NO: 240554 - DNA, 327 bp, Gossypium hirsutum
accacgcgtatacacacacctccgccttcgccttccaatcaaggcatacatcaagcttcgggttgaacgtactaacaaacgtcatattgatgcataggatgaagaatgctgcctaggccgacaaggaagacatgaagtactggtaccctttagctgacagtgttttgttatttggcttgctgaacagaccctacattttgtattcattttgtcaagagaactgatacatctttagaaaactttattattatgacaaggatccattttgttgagcattttattaaattgagaagtttcttgcaaaaaaaaaaaatatggatttgatat

SEQ ID NO: 240555 - DNA, 249 bp, Gossypium hirsutum
tcgctttcatccgaaggagaaaagctgaattccatgaaccttcttctttacatggcggggagaggtggcgtatttctacttccagcaacactcattatggaagaaaaagtggtgggtataacccttgcccttgcccgcgaagatgtcaaaaacctattggaactactattcaattaaccacttccatcctttggaaatttaccaactttttggtcacgaaacacaccaacgccctaactttgcaggttc

SEQ ID NO: 240556 - DNA, 355 bp, Gossypium hirsutum
  unsure (1)..(355): unsure at all n locations
nncnnttttcttctttctttctttttttggctttctcanaaccnaaactaaaaaacatcgcgggcaggtaaggattacgatttttcatcattgacgcaagggatgttcacaaaacactgattcaggtctggtttccgatgaccaatggctttgtcataattactatacccaaaaannnnntttcacaggaatttatagctaattaagggcccctacagggaatttgattgtaaaccatgtgtagatgcagtttcagttggggnnnnncgccnnncttttcatatttgagtgatgtatgagtagatttatatgccaatactttaataaaagatagtttaggttgaattggctttct

SEQ ID NO: 240557 - DNA, 424 bp, Gossypium hirsutum
tttagatcttcatgacattgccttatacttttttccagtagacatggaaagatctcaaaggaattacaacaaactacttcagctcatggggatggaaaattcagtgatgataagttacattgatgatttggagttgttgatatttacatctgaacagttacatgcagattcgtggggtgtgtttaccgggtcaaataaggagttttttggtggagtcttccgccgagtgaaggaacatcagaagcttccttcattggtttcttgtacacaagatgcaggtgaagctgatgacatggtaagtggaaaaatggtagggatttcgaacatggctctttcgaaatgaagagaaggcagatagatttgtgtgttggtgaagtaaaaaacaatttagtgtaacacactttgtaagactgtacacatattt

SEQ ID NO: 240558 - DNA, 258 bp, Gossypium hirsutum
accaagcgttcaattgtttaaattattattttttaaagcacacaaattcaacccaccgagtggcgccttaaccctacaattgatgtttcctataaaaatgttattctttattaaataaaatattttcaaataaagacatttaaagctattcaaattcattcatatttatgatgagagtttaacaaagaacaattactagacccttagatttcttcactcttcctgataggatccaactaccatttacttattacttac

SEQ ID NO: 240559 - DNA, 439 bp, Gossypium hirsutum
cccacgcgttcgggcacgcaaaacaagcatcaagctcaggagcttctgtgaaaaatggaacgacaaagaatgctaatgtgccatctggaggccagtcttctggaggtgcacgaggcgatgcaacacataaacctgaatttgaagccaaagttgccaagcttattgagttggggtttgcaagagaaatggtgatagaagctcttaaattatgtgatggtaatgaagaacaagctgctggaattctctttggaggctgaaaatcacttccaattttctttcatttctttttagaactaatgttctgatttcagtcacccaattacaaacttttaacgcattgagatttatgtacttcgattatctatttcattcgaactgttcatacacaattgccaaattgttgcaattcaaaagaaaactgaaattactctttttaaaa

SEQ ID NO: 240560 - DNA, 338 bp, Gossypium hirsutum
gctacttattattgttgttctgtatcggcaaggacttgtattatttgataaagttgcagctgccaaggacaggtaaaattttctcgagttgtatacttttttttttcaaggtcatcatcagcagtgtgtttattgagaaaaaaaaaggacagcaaagcatagtaccatggatttgccttgcctacaatcatcgtcaatatgtcatttatactaattttgatacagtgttcttgcactttcttaagtgtgaaagcatttaattaataataatagtagaatctaaaatgtttgcttcggagacagcaactctaatgactgatacctaaacatgaaagaat

SEQ ID NO: 240561 - DNA, 415 bp, Gossypium hirsutum
gaaactttataaaaaaaaaaacagttatattaaatggttgatatatcccatttcaattaaagaaaaaaaaaaaaaaaaaaaaaatataaaaaaaaaaaaaaaaaaaaaaaaaaaaaaaaacaaaaataaaaaaaaaaaaaaaaaaaaaaatagtggcgtaacaactaaacatttaatactttacgccaaaaaacatttaaaacttttgattttttttaaatacaaaaaaaataaaatcactgtctgtacattttaaacaacattttatcaaaaaatctcaattaatctatcatatatgactgaaaacatatacactcttactcatttttaaaagaaatataaatttagaattgatttctacatccaaataaataaccactcaaaacttgcacttttattcccaccttatttacac

SEQ ID NO: 240562 - DNA, 255 bp, Gossypium hirsutum
accaaacgtactgactgttgtgacaagcctgtggatccgaagacgattcatggactgaaggacctgtcgctggatccatcggagatgactaaacttgacttttccgagactgatacacgggaggatttgagaggagatttgtgatcttcttgaatcttacaaaaagaatggaccaacggcccagcagggtctgcaccacccatagctgaacctgaggagctcagatggtcaatctaacactggaatgagcatcac

SEQ ID NO: 240563 - DNA, 461 bp, Gossypium hirsutum
cccacgcgtccgccattttatggccatagatctcctattctatctatccctaatggcttgaattttgaggtaaattgattcttgtaaccaatatgaatcttggtgggagttgttagggttttctttctcacggaacggaaggctgcaaattacacgcattccactgagatggctcatctttgcgtatgttaatgtggtgttgaaggttacgttttggtatcagtttcattttgtggttgagaattgagataggaagaaaactcaaaacttatctgataatcacagcctagtttgaaacagtaagagaagggacgaaatttgactcggattggatttccgttattaggaaaagaggctttgagttgaaatatcaaaatttattgattgggggtgatgtcaaagtttactcttctccagaaaatcacatcagcaaatagcagtttatgtttacgttttcattt

SEQ ID NO: 240564 - DNA, 326 bp, Gossypium hirsutum
cccacgcgtcctcaattagctctgctttctgaatttaagaaagcatataatcccttgttttgggggcataaagtattgtcaagcttatatgaataaatgtggatttggaggtacttatttggtaattttgggtgtgataagtttgttataaacgtcattaacagattatttgggaaccaaatactggggtttaatttttactgggttcttctgctttccaaaccaaagtaggtgtaaattactattatagtgtttctagaaattacatgatttgtaggttatttaaaaaatcttctttctgttaaaacctttgatcttttttaaat

SEQ ID NO: 240565 - DNA, 470 bp, Gossypium hirsutum
  unsure (1)..(470): unsure at all n locations
natttgctatggcaatgaaaaagttttggctttcttcgaatttgnatttcgaaccgcatgaggctgattgcaagatcaatgggtctttactaccctctcatctgcttcttcttctttggatgtgttgggctatgttgtggaatgttaggaccttgaaatcttctgaaaggaaagggaatctattattgcttgatattaatcatttggcgttgtctgctgttgttgcatgtgctgaacatgatagcagctttgatttatggaattgttatatagtatgcttggatgttcagcttcccgtgggaaagtttcttaattgtgcaataaccactgcgccaatactttcatactgccttacacaatatgttaatagaagacttcaaatctcggttcttgcagaagatgaaacatgatcttcaaaatctatttcatgaaatttgttttcaaacgcatttcatgctttacttttaaca

SEQ ID NO: 240566 - DNA, 466 bp, Gossypium hirsutum
cttttacttgttcggtttttgaaatctgctttctattcaatctttcactgaaaggaaaaggaaagaaaaagaagcaaagcgttaaaaatgaagtcggactttgtactgctgcttttctgtatgctttgaaactgtggtgtgttgactaatacttctttcctttttggtaatttctccttatgctttgaacttgtgaacagtgtggactaggtgatgcatttcgctgcagtacatgcccatacaagggtcttccaccattcaagctgggcgagaaggtatctctgtcagggaacttccttgcagcttgcatttgaactcccaaattaatggatttttggccaaaattttagtttttgaacccctcaaaacattagatactgattttggtttagtgtttaaatgtggaagtttaaaaaaatacatgcagttcttatgtaagtgttcaagtggatattttatttttaat

SEQ ID NO: 240567 - DNA, 409 bp, Gossypium hirsutum
  unsure (1)..(409): unsure at all n locations
gtcccacattaaagaagaggtccttgtgcctggacctctgtgttctgcagggactacattggagaatggaacagatcatgttgtcaagactgaagaggctcctataggagcatttcattttgttggtgcattgccagaagagaacaaagaatcaaaaaattatacgagtaagaaagtactggatgcagtggctgctgctgaggcaagaaagcggaggaaagaacttacaaaactaaaaaaccttcatggccgacatcgttcaccattgagtttgtcggcaaaaatctagacatttgtgactatggctgcaagcatatctctcagtcaattttcaaggctagaggtattttttctcaggctntcctttttcctttttttaagacagatttacattccccgttttttgttt

SEQ ID NO: 240568 - DNA, 378 bp, Gossypium hirsutum
  unsure (1)..(378): unsure at all n locations
aagaaccatgctctttgaagaaatgtgaccacatctttgaacccgcagcacactttcgcaagactgtggtcccatgcttatatctatgaaacagtgtgttcagcactttacttacaatccaagatacacacggacttgtaacccggaattagtgagatggatcctgttagatggtctggttcaaaatggagatgcctgctggtatggttgcagacattgcttatacatttccaaaatatgttcaacatctgagtggactgaaatttgctcttctgcttctcttgtacttttttacatcatggtatgtactagttntgttactataggtctgattttgcttaaagattttagctgaacctttaaatgaaatgcaataca

SEQ ID NO: 240569 - DNA, 361 bp, Gossypium hirsutum
ttttatttgtattcagtatgcaaaaatgtgcttgtgttcgtaaaaacgaagccccacaaaggaaaaaagatacaatgctttatagtcgagagaagaaaataataaaaatatacaatttttctgctattttcttgggtctgttgtctctttgtgtttggtgtgcaggtacggaatgcgttggcatcgtacggaggtgcggccatagcgtacgagggctgcgcactggccgtacggtgctgaaggcttggcgtggttactggaggttggagtgtacggaagcgcttgggggctcggctgcggcgcaaagtggaagagagccctagggtttctgaaatgttgacatttgggcttttgggcctat

SEQ ID NO: 240570 - DNA, 433 bp, Gossypium hirsutum
gcagttgcggccaagacctagagctactaatgtcgcttttgagtgtggctgattgatgggtgaagcaacttagggtcgaacaccatgacttcaattatttcaccggaattcgacgtggctaaaacataaatttactttacaagtaaattttcttcgtgaaaccaatcccatggattaaagcgactgatcactaattaccaaaaaaaaatacaaaaacaaaaaaaaagagagaaaaaaccaaaaaaaaaaaagaaagaagagaaacctaagtacgggttttattctggttttgtgctttgtgaagtaatagggggacctttaaaccttatgagcatttgtggtttgcacttaatatcgaaaaccctttcaaagtgtccaatctgaggccacccatacaagatacagcaagtggagctgttttagccctgtttcg

SEQ ID NO: 240571 - DNA, 294 bp, Gossypium hirsutum
ggcatggttgcacttagaggcaacgactgatcagctgaagcttgctgagccagaacgctcgggtgcgcgtagcagatatgacaggtcgatagaactccctggcctttacccatatatgctgctgacctacatggacacataacgtacgacttgtgaatgccatgctacatccgcagcagaccgatcagcatctgctacacattcttggaagttcatagaacctaacgtaaatgcatacaagcgatgtgctaccatggacccccagaggcctctcaagctctgaagtcaagacac

SEQ ID NO: 240572 - DNA, 355 bp, Gossypium hirsutum
ctttcacgcttcctctacctcactcgctgtgccaacaaaaccaggcatgtccatggattctgttctacatgtaaaaggtaagaagcctaaaaaaaattttatatgggttcaaattctttgcaccatcaatttttatttttatttttacgatttggctttaaaattaagatataataataataataataataataataataaagaaacacggaattttgatttaggctattcttgcttatctttgatgggcaagaatagtgagagagtgcccttgataaaacacacaatggttgataagcgagacttttcatttcaatgtaattcgctatacatttcctctgaggaaaagaaatat

SEQ ID NO: 240573 - DNA, 287 bp, Gossypium hirsutum
ttcacactttcttaatgattgtaggtttggtcaacaatcaatgataaacgatggggtatggtgcaaaaaagggattctgtaaactgaaaaaataatgaccttttgtatatgaattatgtggcttaagtggaaatgggggagagagggttgataaagagaattgaaggaggtggggagagattgtttgttaacaaaaaaaaatgtggaaggggttggggccttttagaggttccaatcattactgctatcatttttgtaccttattaaattacagtttgatcctttaa

SEQ ID NO: 240574 - DNA, 361 bp, Gossypium hirsutum
  unsure (1)..(361): unsure at all n locations
cccacgcgtccgcccacgcgtccggcgtgttgagtgtgtcatggttttgaatctggacaaagtatanagagaggactaaattagtgatagtagtgtggggatgaatctgttgcaagtattggtctctagggttcctttgacagcttaagatttgctaagcttttgtgctgtatacagatctgtatgacggatttttcttctagtggtggctttttctttttcttttttttggtaaaccannnnaaaaaaaataaaaaaaatattaaaaataatataattatttaattatataaataattatatgaggtgttggtttttatattattatatatatttatttattttcttcttttattatatt

SEQ ID NO: 240575 - DNA, 417 bp, Gossypium hirsutum
  unsure (1)..(417): unsure at all n locations
gaaagaacaggaggatggggttcgatcagctggaggatattccagaggagagagaaggaggaggtgagagggacggtggattctgttgcacttgtggagaaacggatagtgggggagaagaggtggatatagaagcggcgggtgtaagctgggcctttgatgtgggcatttggatcatttgcttcggggttggatattttgtttctaaagccactgccaaaagcttgaggcgcatgcgattactttgacagtgttaaaaaaaaaatttaccttggggaatttatattctaaggttgtgttaatcttttatttgttacccaaatttagaaattttgtgaaactccaattcgagtgatttattgtaacaaacgaattattggggaaaaagtactttgcaaaaaaaaaaatntaatttaa

SEQ ID NO: 240576 - DNA, 304 bp, Gossypium hirsutum
cccacgcgtccgcttccaagtaccctttctttgatttacatctacagggaaaattatgaacgagagaggagcaataaggcctcaagcagcctaccaggctgtcgactacggcgatgttttcggtgtcaccggtgctacgccttcatttccaactccaacgggtgcggttggtgaaagtggcatcaccattggagaagctttggaggcaacagctatctctgttggcgacaaaccggttgaccgaggtgatgcagctgcaatacgagcagctgaggccagagctgctggtggtaacgtcacccaa

SEQ ID NO: 240577 - DNA, 320 bp, Gossypium hirsutum
gcgggccgtactttgaacctagtcaatggatactacataacaccccaccccctacagcacacgggtgctcgacgcaatagcatccgcaaatattacacacctactcttccaacaaactacaaaaaccgcaactactcactaccataaacaatgtaccttctatattaacactcgtttcactgaaataccttatcaactaccatactgtcattttcattgtacttgcatatagcatgcttacacatcttgttgtaaaaattatgtaacagcactcacttctgcaccctattcccaataagctggcatttacacccacttct

SEQ ID NO: 240578 - DNA, 406 bp, Gossypium hirsutum
tactttctaatattgctactttcattggggtttttcaccactccctctttaggttgctatttttctacttactatgggaagccccctactcctatttataaacctcctaacgttaaacccccaccttattaacatcctttttataaacctcctaatattaaaccccctacttattaacataatccccctttctattaaccaccaaataattaaaatccttaactctaatccatcagtttatacaccttcaataaaatatattcctttacctcaaccactattatttgaacctccaaaaaattaaaagctcttacctaatccaccattttatacacctaccatttaaatataatctcttacttcataccatctctatattaaaccccctaaaaattaaattccctta

SEQ ID NO: 240579 - DNA, 333 bp, Gossypium hirsutum
  unsure (1)..(333): unsure at all n locations
caaaactgcanctggtgatcattcacagctgtcaggaatgcagaatcaacatcccaatgggggttctggtggagtggctggaaatctctcaaatgtaaaaatattgagcaaatctaatggagcaaattctgagagatcaagtctgaaaaatgttgaaaggcaggcctctggtcagggaaggtctaattctaattttgctggaaaacagcagggcaggtatgtggcttaatctttcagcggatagctgatggttatttataagtatgtttgtatgcctcaacttgttaaagcttaactgtcctgtacaatggcagggcaactggggcagcttta

SEQ ID NO: 240580 - DNA, 339 bp, Gossypium hirsutum
gcaaatgttgggagctttagtttcggcgtgaatgcataagtagatttccttaactaacttggatgacgtggtggacagaattacatttgaagctatataaggaatgaccttttttatccatcaaggcgaattccccgtatttacataagtattccaaacattgattctgtaggttcaagtttgaccctttttaatttactcccatttgtttttctgttgtctatttctgcccttttttttatttttattttaaaataattaatatgtttgagagttgtcatttagttagtcacctactttttctttattaatgataattattacacggcttctattttt

SEQ ID NO: 240581 - DNA, 398 bp, Gossypium hirsutum
tgattcatggctcccccactgctcaacctgcctccgctgaaaaacaaatcgatcatgaagagaacggtgctgtttcagataacaacaggtaactttgtgaatttaataaaataacagagtgcagcactttgtaaattgttatcttatttatgatcatgtgaaatgattgtgggtgaggcctcagaaaatacaaagatgatgcaaagggttgattctgcatattttttaggctttgattttttagataatgttttgttataactacttataagctatttgtcactaatacttcaaaaaaatttctatttgtttttaacaaactatatggccttttgtgcgaccatataagaccaattttttctttgaagagtacttatattaaagagctaattttgggg

SEQ ID NO: 240582 - DNA, 376 bp, Gossypium hirsutum
  unsure (1)..(376): unsure at all n locations
cccacgcttccgcccactcatactcccacgcttacgtaaacaccccacctacgcgcgggagggttattgtctacatggatcacatttcntatacatattacaacacaacaaccaccatattgtctaaagaatccttcccaagacatgtccaaaaagctcataatttacaacaaccaactttgcaacatattcatctatatgacagccattctccatccccttattaaatgttaactcatacctaagagtttcaacttctaaaactatctataataagcaccatcccattttttaaaaaaatattacaccacccctttttatccatgacaagttgatactcttcttaatatatagaacatggatgagctttttcttt

SEQ ID NO: 240583 - DNA, 363 bp, Gossypium hirsutum
aaaaaactaattcttccatttcctttttttattgaatacttaaaccctaacatagacaaaggtttaattcaatccagacaaattcttatcactactataaatactgccaacaacattccatctcacaatacaacaaaaagccccaccttttgcctaactctaaacatagatggaatatatggtaaaacctcttaacatgtaatccataatatcccaaattttcatgaatatatctaggactaaacaagaaataacataattgctattctaaatacatttaaccaacgtttaacccgataaaactatcctgtatcctctatattaactactcaacaactaatatttcttattacataacttcta

SEQ ID NO: 240584 - DNA, 145 bp, Gossypium hirsutum
ggaatataatggaacttttcctcttaagtcttatctgtaaaatctaccaagctcgacaaatgtggtcgtttcattgggttttggcttttattttcctatatgtatgtgccttaaataacagaaaatcccatggtgttaatttgct

SEQ ID NO: 240585 - DNA, 328 bp, Gossypium hirsutum
  unsure (1)..(328): unsure at all n locations
cggaancccggncgacgacgcgtccggcaagttcatcaggacaactagttaggagccatatgaagtacaatacgtcaagtaaggatggctcctgggcaacttaatgatgacctgatatttgggataaaagtggctatctcccatggtagaaacatactaaggagacaaatccctttgtaataagttaaagcactatgtaagtttctttatttattttgtatttttgttctttgctttcttttataatatatatttaatacaaatatttgtttatgtattctgatattattttttttaatattattttttatttttttattttttttta

SEQ ID NO: 240586 - DNA, 344 bp, Gossypium hirsutum
gatacattacttgtatctatcctttatacctacacaaactcaacaaccccaacagcctactggatctaataagatctaccacaccccgtccatattctcgtttcgccagcaaaataaatgaaggccccatgaaagaaggcagatttggacatcaaaacagttcctttttaagtccatggaataaggttctaagcattacagtggagagatacaatttttataattcatgcctacatgtaacttccacttctttggttgccatgttacacatgctttttatttattgtagtggcattagaaggtattgtgtgttttttctattttaatcacttgatttttacttt

SEQ ID NO: 240587 - DNA, 333 bp, Gossypium hirsutum
accacacctacatacataccagattaatcagaaatatactcaaagaaaaacctggcgtctgtggaataaataacaactctacactttaaaactgaactttgaatcactgaagctttccaaattctcatcacattccagaatcaataacatcaacactttctaattcatactaattttattatcgatattaataacatgcaagaatcctccaaaatatttttgataatcaaaattcaactttagataactttaaggtatcattttataaccctcctaattcatcaactactttaaatgctaccaaagatgctccaacaaaaaattaactttaat

SEQ ID NO: 240588 - DNA, 394 bp, Gossypium hirsutum
cgagtcggcaattcagccgagccagtagcggcgtcaacgatgatgaacttgctggaatttcaatgagggaaatgtttgctgaaatggtgatacacgaaagacctgtaagaaacatctgaattcaatatttatgtgaaatcgaagctcaactcagcttatttatatcattctataaatctttatatcgaactgtacgcaaaagatttgatatttgtatagaatagttatttagtttattcatgtttaatttttctgcttaaaaaaaaaaaaataaaatattaaatattttataatatttttaatatttatgggttgtttgttttatatttttttgatttttttttttattatttttttgggtggtcgtcttttaaatatatatgttattttattc

SEQ ID NO: 240589 - DNA, 455 bp, Gossypium hirsutum
  unsure (1)..(455): unsure at all n locations
ggaannnnccgggnccgacccacgcgtcgcgcccacgcgntccgggcatagctaaaacctaagatttactatggtctctagcagtaccgcaaccctggagnggggaattggggttgtcatgatattgcagtcctacaagggaagccctatcatnatagctacgaaggaagaaaacgttctttccagcacattacatttgatggctgttaggttatttgtcacacacacaaggttgtttttcacaggcgatctttatagctggagaaactgttctgatttgattgataaagggaacactaaagatatcntgatttttggccttagtcattgncctcaacatattatnggaaggatggccttactgcatactaacatgtggaagtctcaaactactgtcgcgcccagagaattttggcataatagaggggtatgattggtgcccacttcagacatat

SEQ ID NO: 240590 - DNA, 441 bp, Gossypium hirsutum
attgaattatattgatatgaattaaaaatgagatagtgatttgaagtatgaaaaaaaaagtgtgttgtgattaaataagaaagttatatactcatgaattgaatgttgaatggataatgccatggtataaaaaattgtggcttgatgtgtgaaaagctatttatatagtaagtgtgtgaattgggatatttgttaaataaattgaatatgataacatgtataaattgaatatagtaagaaatgatatgctattatgtatgaattcaaaagggtggcatatgttagttgtgatattagacattaatacttgtttataattcaattgtgcattttgtattctcttatctttaaatgttcaaattatagaaatattattgagttttacttagcgtacggttttggttttcgtgcacaaattagatatttttcttctgatagtcg

SEQ ID NO: 240591 - DNA, 381 bp, Gossypium hirsutum
  unsure (1)..(381): unsure at all n locations
cgggcgaccgacgcgtccgcccacgcgtccggcanagtcatctatagaaactgcatccactggaacattttctgcggatggaattctacatctcagacgtcttctatccnaacttgactcttcctcgaatccaatatccaattttgtaaaagtcaggtaatgcctttaatgctcacaataatactgactcatggatgattgattttggtgtgaatagacataccacaggttcctctaatttttttaattactccccaaattaaacaaaatatagtgccaagatagccaatttgtcttttattcttgtaataagataaagttttgtaaattttacacctaatatcaaactatcctttgttcttttaaaaaaatttattattt

SEQ ID NO: 240592 - DNA, 412 bp, Gossypium hirsutum
  unsure (1)..(412): unsure at all n locations
aatagcggcagttgtggctctggctgtggtggtggctgtggaggttgtggaagcattatcgatagcggtggttgttgactcaaagagcatcattangaanagcattaccaccaccaccaccaccaccaccaccaccaccaccaccgtcatcattaccatggagaggaagaaagggatgagacagaggagcacgagggcggcttcatggagaagttccggaagtattttattcatttttgaatataccctgcacgttttctaaaatgatcatagtgatctaangttgcatctatctatatgtttatttgggtaattttcactctctagtcaccagcccttaaggtatgcgtgcatattactatttagtgggccttactattggttgtaaataaaaatgcacttctttgagatg

SEQ ID NO: 240593 - DNA, 233 bp, Gossypium hirsutum
gcgaagttttgaaacccagcaagaaaggacaagaaaaatttctatgccttgcacgaggagctttgaatgtggagcactttacatgtccgagtcaattcccctagaggaaacccaataagaacaagaataacaaaggctgcttctttgattgcagtagcaaatgtgaagtcacttgcatatggaggaaaccgaactgtaatggatattggtctctcttctactatccaaggttt

SEQ ID NO: 240594 - DNA, 470 bp, Gossypium hirsutum
agaaaacttctgctgccatttccttgtttcggcgaatccttaaaccctaacgaaaacaaaggtttgatccaatcagaggaaattcttggtcagggctgtaatggctgccaacaacatgccagctggaatagacaaagagcaggcctttggcatggcggaaacagagatggaatatagggtagaactttttaacaggtaaggcagaattgcccaaattttgatgaatatgtttagggttaaacaagaaatgtcataattgctatgcgaaatgcatgtaaccttcgtttcgccgtgtaaaactccctgtatgctcgatattatctgctgagcaaggaaaatttcttagtagagaactttgaaagaggacctcaatggcccggtttgcttctgtgttatcaatagtgtggcagtattttctgttactttgcaagcttttatgccaccaatccttgaatttctgaattcagcat

SEQ ID NO: 240595 - DNA, 235 bp, Gossypium hirsutum
  unsure (1)..(235): unsure at all n locations
acaaaacccattttattaaaatttttcnttttaggaaccatanaaaatcacccgttagttgtgttatatattaaaagtccttcttatantcatcaacaacatttaccttctcataaacagtattcacaacctttaaaagaacatgtcatgaatcctatcccttagtactacatcttcaactaccatcctttcaacaagcttcaaagtaatgtttcattaattacttgatgttatt

SEQ ID NO: 240596 - DNA, 259 bp, Gossypium hirsutum
gtgcgttctgttatccatgctaaaaatctctcatctgcttcctcatcaccgaactcttcaggcttcctgatatctacattcatagtggttccatcaatgctcctgtcacccctccattgagctcaccaactgcgctaactccacgaaccaatactgattgggaggacctgactgcccctccaggttggagtgcacaacaacactctttcctgccctcttcaactccacctatccctggtcgtcacatcgttcctgaccc

SEQ ID NO: 240597 - DNA, 416 bp, Gossypium hirsutum
  unsure (1)..(416): unsure at all n locations
gcgacacgcgtacaaccactcgtacagaagacacataagttattgttcaccactctactgcaagcccggtggacaacgctgacatgctggacttcgataatatcctattcaaactcaaagatgcatatcacgggcatactctcaagcttcctatttctttcgctagacgtgcaaacgatacaaccgatgctataaccatgatacttgacatgctccaagctgaactggctctatataactgatcacactcttcaaagggagccacgtggatatcacgcaacaacttcttataatcacgttcacaatatatgaccagcaaagatctttcgtgntaatgctttggaaggatgtgatgttgtcatcattccaaccggggtgcctagaaagcccggatgactcgtgatgatcttttaaca

SEQ ID NO: 240598 - DNA, 367 bp, Gossypium hirsutum
  unsure (1)..(367): unsure at all n locations
cttcgttctcccactctttctatctctgttctgtctgtgtgcgcagaagtgttcgcgcaaggcggcatccagaatttataatgaggggataaattttagaaggtgatgataatttgtttattcagagtgccgtatgcatctattatatactcgtattcgatttgttcataacgtgaggtgttcttttaattattattgttattattattatttaggttcttgcatatatatgttgatggtcttcttgtatctttttttgtctaaatttaatcataaccttatcttccttccttttnaaaaaaaaaggagggaagaaaaaaaaaaaaaaaaaaaaaaaaaaaataaaaaaaaaaaaaaaaaggggggc

SEQ ID NO: 240599 - DNA, 371 bp, Gossypium hirsutum
cccacgcgttcgggcggcctcaaagaggatgtggaagatgatgttcctgtgtttccttcatgagataggaaaaagaagtcgaagtctgctaggaaggttggtaatccattcagtgccgccgcacttgatgaagttgaaagcgattcggagttgaaagaggatgaggaagatgatgttgcttctttttctttctcagataagaaaaagaagtcgaaatcaatgtcttctaagaagagtggtaattctttcagtgcagcattgcttgatgacgaagatgaaagagatgcttcggtatctgaatccactggtgctgctgctattgatgattatgatgacgatacttccatgggtgcattttcacggtagaaaaa

SEQ ID NO: 240600 - DNA, 251 bp, Gossypium hirsutum
gcgattacttgtacccctgatctcataactgttctctttcaatcaacaccctgtctgaccacatgtgagtgtttacaataatcctttacagaactcaaatcacttcctcaatagaagactccattctactccataaatcaaagacacattacgtggagctcttgatgtctatgttggcgatatcatacataccacctctctggttcctaacatacataaaattgatgcactcatacatcttactaatgcta

SEQ ID NO: 240601 - DNA, 389 bp, Gossypium hirsutum
cttgagcaacagcatcccaaagcaaagtcagatcttggaagctgtgactgttgaatatgctgctggtccgaatatagcatcttttaggcttgttgcatcaaagacaacaaccgatgcattagaggaacttcggggttacaaagtgatgaaaaacttgttgcttagtgaagggggtaaggcttacacatctaatgttgcctctgcagctgaacattccagtaccagcaaaggtacatgagaattatcgattctgaactactatattggtatatattgctcaaatgtacagctttaggtttcagagattactacatgttatacagctgaagccattatccccttttctgtagatagaagtatactataaagttttggataagaatcatgct

SEQ ID NO: 240602 - DNA, 192 bp, Gossypium hirsutum
ctcacactgcgcttgtatatacacctattgtacagctttccaaaaccatattaaaagtgtggcgtttaaaccttcaaaatagaccctctttatacactgaaaaagattaccctaaaaacaatgtgcccccactcagaacataatttctaaatcattcacaagagtcttcactctattaatactattcatatc

SEQ ID NO: 240603 - DNA, 154 bp, Gossypium hirsutum
cccacacttccttcaaatatccacatcttgcccaactaagcaccacattataaactgtcgggcttaaaacctacattctacaccctcttacttcaccgaataaaataacatactaaagcatcctcccatacttacaacattttggcccactcat

SEQ ID NO: 240604 - DNA, 271 bp, Gossypium hirsutum
gagcaacaacatcccaaaacaaaatcatatcttttaatctcagactgttcaatatgctgctagtcctaatataacatcttttagactcctttcatcaaaaacaacaaccgatccattagatgaacttctgggtcacaaagtgattaaaaacttcttgcttatcgaaaggcgtaaggcttacacacctaaagttgcctcttcatcttaacattccaatcccaccaaagacacttgagataattcctctcttctattatatataggtatatat

SEQ ID NO: 240605 - DNA, 377 bp, Gossypium hirsutum
gcgcctttgattttttttgaaaagaacttaagaattttttgaaatgttctctcaactcatgcacgcattgtgttctcttcatcagacaccacctccgacaaaggtcccatgtgcaatggccaccgacgacatgagcacaactccggtataatggacgttgagcgtgggtcatgcttcacgctagttgtccacacatgccacgtggagtgcatggtggtggacaacgttggtagcggaagcatggaagcacttggaggctaaggtcttggctgaaaatgttttatgcgttgctgtgttaaggttaactatttgagctggaaaatttaatctgcttttggtctatggggatagcatttagtttaaaaatttgtggcttt

SEQ ID NO: 240606 - DNA, 441 bp, Gossypium hirsutum
attcatcatctcaacagtcttcaacttctgttactgaacccaacattcctgtggaagcttgctccccactgtaaaatgagattgagtcagggaaaaccaatcagcatgcagcttctcctgaagtggggttggataaaaaatctccaaagcatgactgcaatgcaagtgtagatggaagtgagagcgggagagctatcactaaggaatgaagctcaatgtgctgataatagtgtcacgcatagctgctaatgcaactccgagagacgagttcttgttgattagcacatttggctgcaatcctcaatgtgttgcgggcgaatgtaatgatcgtccccagtagagacattttgcatctgataaaacaccgtagattgagcttcaaacttttttcttgaaatttttgatttccaacttcaaaccattcattgcttttttttaccc

SEQ ID NO: 240607 - DNA, 357 bp, Gossypium hirsutum
ccgttgaataggctcatgttcttaccgagtggcatcctcaacctggtgataagaagccgagagttggacttctcacggatgccgttgcttctgaaagaacaacagctgaactgcttaactttgccattgcatatggaaaaactcctgtggggcctgccaacgattgcaacgttgctgtacaatatgcaaggctcacaagtgttctatggtccatagaaggacaagacgagctttatggcagaaacagcgcttattggaacctcagaaactcgaacgggctaagacattgcttggaagggctctgcgctcaccatccattgctcattgtacacgtgctcagaaaggacatattgaacg

SEQ ID NO: 240608 - DNA, 350 bp, Gossypium hirsutum
cccacgcgtccgcccacgcgttcgcacactgtaacatttaaagattaatagaaggagaaggggcttgtgaaaacacagagagacatggatagaagatactctttctttttggtggcccttgccctacttttcatttccatggaagctagcaatgtgcaaggtagcaacagcaagaaggcaccctatgatgctgcttcaactcattatactgttttggcaccccagtactggacaggaaagagtttactgcctatcaagaggagcttgtaatggaaaggtactcacatgtccgagtcaatgcgctcaaaggaagcccaaaaaagaataagaaaggtcaaaaggatgctttc

SEQ ID NO: 240609 - DNA, 362 bp, Gossypium hirsutum
taaaaaaaacatattaaaaaacaccattaaaatatcaccaaactatcttaaaaatacaagaaagacttactcatacatgccacctcttaacctccttttcatactacatatccccactactctacccacacatttacatcttcttcacttgaatatccttccctttccccaacttcatcctttttatcaaaatacacccttctccctacttaataataatgaataaaacctctcacttcgcccttatcctcttttatacaaaatcacctcctaattccactcaccctttatattcacattaaaacccaaaggtgccaagaatactctcagaaccacctacacacttatcctcttacttacac

SEQ ID NO: 240610 - DNA, 215 bp, Gossypium hirsutum
aaccatcttaatcctaaagtgtgtattacttgaaagtagagccacaccatatccggagtagttttcaattgataaaaagaaaacgctcttactgacatacactttggtgcaaaccactacgctttgatatatgttctgcttatacataattttacttaaacttccctgatgtataatcaatctaaacttgctctaatatatcatttgttttatag

SEQ ID NO: 240611 - DNA, 141 bp, Gossypium hirsutum
ctgcttttaccgtcgcctaccctttttttacagcttcttaaatatcaaaaaaggagtataactaaaaacactaccctacgtttccttactaaaaagcctctatttacccaagactataaagaaacgattaatacaatgaca

SEQ ID NO: 240612 - DNA, 389 bp, Gossypium hirsutum
  unsure (1)..(389): unsure at all n locations
atcaatctgaccccatcccaaacccgcttttcatgcaaaacctaaaccaggcccagcagtagattggtcttcaccaaactatgcaaataccccatccacagggtcaagcaatggcccagccaagtagcagaaggggagttgagaaagttgagaatcacccaacaggttgaaaattctgcgtggctcactccagagtccagaaaggattcctctttctttcttaaagttctgtagtttgtctgagataaactattttgggtttcaactaggcattattattacaacgcactaacatgaatatatgtgtatgaatagtccctagtttccaattctcttaagttgttctattgtgaggtttnacattttaaaagaaataaatatgtataggt

SEQ ID NO: 240613 - DNA, 447 bp, Gossypium hirsutum
cccactcgtcctcccacgcgtccgtatgcctcttcctcgagccaaaagcagttttcagaaagccctggactaaaactttgctaactaacaaatgtgctgtcttattcccctcacgaatttgcaggatctaaacgtcccaaagttggcccatcgtcgataattgtttctagagagctactctcggttcatggctaggaggctttgctggtgttagcgatttgcattccgtcagatttcaattaggtctcatggattcaagaaggttggcagcatccaggtttcaaatctcagctcagtaatgtttgaatcgtaagttgaatgctaaaatagagtcggcttgtacctagtgttgtaatttagtctttggagtcaattatgatgccctcgtatcttctatgccttaaaatattcaagttaaacatgttcaataatctaaatggtcgatga

SEQ ID NO: 240614 - DNA, 333 bp, Gossypium hirsutum
ataagacctgctccatatcatacccaacactatttcaaatgctaaaaccatccctaaagcagctcggtgatttactaactacgcatattccccatccacagtatctagcaatgacccaaccaattagcagaatcgctgttcagaaagttaacaatcacacaacatgttgaaaatcatgcgcggatcactacataatccagaatggattcctctttctttcttaaaactctataatttggctgagatatactattttcgtttataactatgcaattcattattacaacgcaactaacatgtaattattatgctgctatggaaatagttacccct

SEQ ID NO: 240615 - DNA, 405 bp, Gossypium hirsutum
aaactggtaacatcagatgaccctcccgtgctgtttggctgcttagacggggatatggtggaaaagtcagggctgcatacagggaaccttttacggcttgctattggtgatggaggattgagttttgcagatgggaagcttgagaaggctgatttgatttatcttggcaagtccaaccgggcacgtgcttttgcagatagttactcaaaggttttgttccagttcatggttcgacattctcctctaaagatagatgatcttctagcatcaattaactccgcaaatgatcaagaaaagacaccaagtgacatcgagatggttggttgactatatatatatatattaattatacgaggttcgatatttgtgttctgtgcgggccaagtttaaaacccattgtggagt

SEQ ID NO: 240616 - DNA, 406 bp, Gossypium hirsutum
  unsure (1)..(406): unsure at all n locations
gactttcanaaagcaatgtctgttatcaggcccagtttaaacaaaagcaagtgggaggaagttgaactatggaatcaggagtttgcctccaactaaaatcttgcttgcctctatttagcattattaccgttgtctgtttgaagaacagcttaagcaagggacaaaaagcaacccgtatcatcgttggcgccagactagttgtgtaattataagaagtcaaaactcgaagccgaaagccaaagctcaaacgttggtcaagaatgtattttgttttggataacaattctttgacaatgtgtcatagaaagtattgcttgatattttgtattttacaacaaaatgcatgattttgatgggtaatcaacagccttcttgcctatgattagagggttataaggaataaata

SEQ ID NO: 240617 - DNA, 448 bp, Gossypium hirsutum
cctgaggaatctcttgcttcaacgaccgagaaccggttactcgtatatatcgagctggtgaatacgtcattctccaaagggctgacatttgccctggtatatcttccgttcggttgacttgctaactcgatccctacttttgaagaggatgctgacttcatcataccgggtgatggatatccattgatatccccctcgatgcaagaattttcagaactgaccatgattaaagatacctcgcccattcttgtcctgatattcatatattcccaagcactgtatgacatatacgattctgcataatgacctgttcctgctgacttatcattggtagttgacattacaagtttatgcatcatattgctgcaataagttcaaaactatgtgtgtagacaaggcccttggagcttatttaccataaatgaagggattttcggttgtaatctgt

SEQ ID NO: 240618 - DNA, 435 bp, Gossypium hirsutum
cccacgcgtactcggacgcgtggggccggatttcggagaaaccgactttttgaaggcattcgttgcctttcagcaaaggcagagacgttacggtgtatgaagttatttgtgtacgactgttgacacttagttattgatggtgacatacgaagggggttaacaagaagctgtatttggcattggagtattagaatcaacttgcacagagcatatattttgcagtgcaatcaggtaagaaactaaatgtaatgtccttgaaactggaagttgatcgtaaacaaggttcaacactcgaaagaccccccattgtgatttgtaactgtcattaaattctccttaccatgacttccctctatattctctagggtgatagattaataaccacgtaaattacgtgtagtgaagtaagatttgcttcactctgtactcctaatg

SEQ ID NO: 240619 - DNA, 160 bp, Gossypium hirsutum
atttttttttctgtgttaccatattgtatattgcaatcattgtataaatgcatcaattctggggggtccacaaatagattcaagaacaatgccaaataaaatcagagcttagtttgcatgtaggcattcgaataaagttttataaattttcccttctgcc

SEQ ID NO: 240620 - DNA, 317 bp, Gossypium hirsutum
gaagaactgggtgtatgattttatttgtagatgctccaactgtataaagcgtgtgtaattgggcagaatcagtctttgctcatggttagacatgaagggggaagatgctttgattatggcgctggtgaagccaaagtttttgtggcaattcttcgtgataaaaaagggcgagaaaagaaagggcagggagagaggaagctacatgtccaatttgtatttgcacattttgaacgctgttttaagcagtcatcatcattgctcattcacagcttctatatctatctgaacgaggaagatgctcttacggctgtaaatag

SEQ ID NO: 240621 - DNA, 221 bp, Gossypium hirsutum
acttatgacatcaacagcttggtaactggtatggaaatcactggttttgccagtttgaagggagcctcattgagccagcgaagcctcctatgagaagtaccgtgtatactttcttcccttcgaacttgttacagtaaaagttgaataatgtaaaaaagaatcctaaacagagtcaatgaacttattacagtagaagttaaataaattattgcttctgttgc

SEQ ID NO: 240622 - DNA, 339 bp, Gossypium hirsutum
cccacgcgtcccataagttttaacctctttacaaattatatgtgaccgtcttcaatgtggtgttcatttgatctgaaggcagaagaagttataaccaatgtcggtgaggtatgtccacaaaattttgctttcagtgttgggtaggttcactgaaaatgcacgagctttcttcatgtggcttctttggttaccagaggcgggaacagaagactgatgcttgagattggagggtttaattagtgagatattgtgagtagcgcttcctcttattattgttctcatgtttgcaaatgtttggcacattgtggaggattatgcaagaaaagatgcagttaacac

SEQ ID NO: 240623 - DNA, 307 bp, Gossypium hirsutum
gccacacatccaatgaatacaacaattattgttctatgcttatttattggctatattctggggtcgcatgcataattgaacaagtacctaacacgatactgtacttaacacgctcgggtacagtataaagcttaaggacagatggttactgtcgcttaaatactgatatgccacaatagagtcacctatggatcactaacttctatatgatctcgggctaattgaattatccactattatgctcattgcgcaaggatataaagtttgacttcgagcacatgaactgtatattatcaatgacaacgca

SEQ ID NO: 240624 - DNA, 315 bp, Gossypium hirsutum
accacactcattttgcaaaccgcatctttatatgtttcatgtccaatactttaactggcgtgctaaatttatcctgatgatctcctactaaattcttaaataataacatcttcatatccacatgaaaccaccacagagatcctttttgcagccccgactaacattgctcactagactatgctaattcttaaacgcagacgttatattaactaaacacacctctagactcaaaaatatcatacattgacaactgaatcatcttgagacatgtcccgactggcacacgtgtctcgtcagctcatatcattatcggaa

SEQ ID NO: 240625 - DNA, 288 bp, Gossypium hirsutum
  unsure (1)..(288): unsure at all n locations
acccacgcgtgcaaacactcttacanccactctttctttttacttccaaccgacaaaaccaactccaaagcccagtttttctcaacccttaatccatcccatcaacttactttttacatcccaaataacaaattctcatattactcttgatattattcatccctctacttccacgcataatcactctcaccatatactctacaattctcttacaaaatctacccccctttaccccactatattacatccttcgcaccccatacttaattttctccaaaaaatctactc

SEQ ID NO: 240626 - DNA, 411 bp, Gossypium hirsutum
gaaaaaaaaaacacccacgcgtccaaacccatcttaaagctacccaaaaccataacgtataatattcgtggaaaaaaactcgcttggtttcaactaaaaaaagtgggctccaaatatcaataaccagcaagatgatcaaacaaaggctaaagctttaacgtcatcgaattcatgaccatatttacatcatcgataccattaataatgcttcaaccactccttatctaacaaaatgcctaccatcttaaagccctttcactccaatttctactccttatattaaaacttattaacttaacatcaatcaacaacaacaatatgcttctacttcttttttacacatatattctggcacttaacccatcaaatttttttttgttaaactaaacccaatatctttatattttaatc

SEQ ID NO: 240627 - DNA, 245 bp, Gossypium hirsutum
cctgcaacccagttatctcactataaacactcgtcttattcaaaaccaaataccatactgggcggcgacattcttagatcaattctcataatacccatccatataatacaaaactcatttctataactcaacaattcacccattctacttatcttctccctatataatatactatcacaaccttcatagagattactcttcttcaatttgagccaaactatcaaacatatttctccctcattaat

SEQ ID NO: 240628 - DNA, 166 bp, Gossypium hirsutum
agaggattcaatctcttcaaactggtaaagccaacgcttagcacttcttcaagtgcgctggtatttaatgttgcattccatggtcctttatcttaatcggaacttgaatttttgtagctaccttagatactagcttctttaaccatgattgataattattatgtgt

SEQ ID NO: 240629 - DNA, 275 bp, Gossypium hirsutum
  unsure (1)..(275): unsure at all n locations
gcacacatnctaaatttaaacattaacttttaatactcaaacactgcgataacaaacctcgcctgctttataaaaagtatgaaaatgcaacaacttcctgttaacttcaagccgatactatcaatctcttactttaacaaaactcctcatcatgttcttaacaactcccatgcttagatcatcaagactgacactatccatccttactaccaagtcaaactactgccgatcatcctttcttaccttaatcctctttcaaacaagcttctccacct

SEQ ID NO: 240630 - DNA, 172 bp, Gossypium hirsutum
cgcatgcagatctaactttacttaccaactttcaatctaaattgcatctcgaatattccaggacggattaactataaagttcttccataataactaataatattcccttatacacaccaaaaaaattgccaaactaatcagcttatcacataaccatgcatacctatatatc

SEQ ID NO: 240631 - DNA, 321 bp, Gossypium hirsutum
cggaattggaggttcgacccaggcccacgcgtccgatagacaaaaaaggcatatgttatgttgacgccggattacgatgccttggatggggcagagaaaatcggaattatctaagcagttggcgactaccttgttttgaatgctttattttttgtgttttgttgcaaggtgagactgttattttcagattcagctggaagatttaagcttagtttttttgttttttaaggttgtaatcttgctttactgccacttaatcatctttggtataaacttaagtcagaaggtatttaaccattcttaaatatttaattattatat

SEQ ID NO: 240632 - DNA, 325 bp, Gossypium hirsutum
  unsure (1)..(325): unsure at all n locations
tccactcgtttcttatatctctttctttattttataangtggtggtgcattgncccttagtaagacgttatttccatttgtctccttaactcccttaactaactatacctcatccttctaactatctacacagtaatcatcctcctttactaccttcttaaatatactatttccttttacgccaatgaatttttatacaataacacctctactcttacatatcttcttaatataatcctccccaatggaacttattctacctataatcccaccaaccaaatatcttcatcaccaccgtatttctatacatcaccgccgatcattt

SEQ ID NO: 240633 - DNA, 127 bp, Gossypium hirsutum
gacccacgcgtacggcctgtattaaatcctgattttaaaaaaattttcttgtaccaacttcaatgcatactttccgatattttttaatgttggtgtgaatggaccaaatacattttccccttttacc

SEQ ID NO: 240634 - DNA, 261 bp, Gossypium hirsutum
  unsure (1)..(261): unsure at all n locations
cccacgctnttctttactctttgtcatacgcttatttaaaatcaaatttctatgaccagatccaattcctttaatgatcggaaggctactaatatctaaagccaaatttcaaaggacgagtctatatctactaatgacggaaacctgacctaaagtctcattcaaacgcattatacattcgtaagtactctttcttcacgcttgacaaacttacaagtgtgtccgcatttttgcgaaaaaaatgacatttaaggttccatt

SEQ ID NO: 240635 - DNA, 163 bp, Gossypium hirsutum
ttttaaatctacacccgaatccaaaagatgtttttaaaaaggaagattgtttgttttgggatggcatacattgcggtgacgatcaggacaatgaagttcatgaccaacaagctcctttccagtaaacaattcgtcattgatgttttgcctccagggaggccca

SEQ ID NO: 240636 - DNA, 220 bp, Gossypium hirsutum
aatcaacatttcaacaattttcaactacatttacttaacccaacataccttatgttgcttttcttccaactaaaaaatgtcaccgaaacaacctaaaccaatcaccatgcatccacttttaaaacacgattttattaaaaatttccatttcattactgcaaataaaatttaaatacatcccctaatttataaaaccatattcaatgaaaaacccctttct

SEQ ID NO: 240637 - DNA, 228 bp, Gossypium hirsutum
  unsure (1)..(228): unsure at all n locations
aaaacngggacgaccgacgcgtcacgcatgcataactctgcctcaaactttattattttctttataccaaaactatacttgtccgtgtttaatttaaacgaagtgaaccaaaaagactacttcttttctacgttcttacacctacctgtaactatagacgctggcgcacactcgcataggcacaacactcctaaagaacccctggtttcagccgcaatgtatattatt

SEQ ID NO: 240638 - DNA, 297 bp, Gossypium hirsutum
tcgcgtctctctttaaaacaatcccttcatctataaacccaatacaactgttaacatacccggagattgattaatattaagtatcttccaactattaaagagagaaaatatatgggaattccacacacatgcacctagttgagtcaacttccatcatctaggaaatacagactatttttatttctagaaactatcatcgatgcgtcttttatttttctgttccttacatgcatattatatttaccaatctcattgaaatttagcacttttatatcccccaatgatcatacttattga

SEQ ID NO: 240639 - DNA, 346 bp, Gossypium hirsutum
acccacctcccaactaaaaaaacaaacaaatcttccttacaaattataacgaaaacgccgtcccgtcttcttaagaccttctttcccccctcaaacaccactaaaatcattgcaaaaaatttcaatcaaattccttttaacaatatttctatccttctaaactctattaaaatatcttcactcttcctcatttcttacaaactaattcttatttatttaaaaaataatcttaattcattttttctacatctcttctcaataattctcaaaatttttatttccaatcttaattttctctacttattcatatcattatcaattctctttatatcaacaactatatttt

SEQ ID NO: 240640 - DNA, 384 bp, Gossypium hirsutum
atattaaaaagccactaaatcacactttggttcttaccaaacaagaaaacaaacaggggccgtgcccctttcacatgaacccggaccctacctaaccaatcatgatacaacatgaagggaggtaaatccaagtcagatactaagagctccatgctcgccgtgatcaaaaaatctatcgccaaagctggaaataaaattttgaatgcggtttatgatccaaacaagccaaaaaggcctgctaaagccttcttcattttcatggaggagtttcctgtgcaatacattaacgaacacccaaaaaacaaaatcttcgcttattgtgttcaaaactcgatgaataaaaattaaaaaccttgtctgatgcttaaaaaaaccccttatttt

SEQ ID NO: 240641 - DNA, 332 bp, Gossypium hirsutum
aaaaaaccgccccgacccacgcgaccgataaaatttaacaactttttacaactatttatttctaaacaaactagatatctcgctcgtaatcttaatattcttgaacaccaaatttcagcgtatatatataccagtttaacctaagaaccatttcaaataacacccttgaatcattagtttatacaattcacaaattaactatttacttaaaagcactataacaacttaatactcgtaaaatcagctcaatgacatcgattaatattaaaaaaaaaactccacgatcaccattgcaaagtataaatgaaatgtagaatattctaaccccctca

SEQ ID NO: 240642 - DNA, 247 bp, Gossypium hirsutum
aaattctaacgtttaacattatacgattatttcagcaggaactaaatctcattatggagtggagtctcttggcgaggtgaaggcatggcttaaactcctaaagaaaggcggcagtctgagaaaatgatatcagatgtgtttcgcttattcaatgagatataatgatattttaatcacccatcgaaacgcacaaaacaattacaacatcattacttgccttttccatagaaacttcttcttattaatc

SEQ ID NO: 240643 - DNA, 396 bp, Gossypium hirsutum
taggactcgtttttttcaatctacccgtactcttattattttgcttcacgcatctacaaggcagattaatctatcctaaatatcattcctctatcatcaattgatgattatgttgatttataataaacctatacatattcttagacaaaagacagtgcatttaaagattacttttatatatcctgaaacctttttgacattccttctaatttaaattttactcttaattactatttctaatgaacttttacattcttttttataaattaatacttgattaaatttatctttattatctataatattttttttatactttattcctctttttattttcattctaatttcaattttttcatctatttatttataactccttttgtcttttatatattt

SEQ ID NO: 240644 - DNA, 391 bp, Gossypium hirsutum
tctagatcgcgagcggcttccctttttttttttttttatcatttgcaatttcccattttttgggaaattgcatatatggtctaaaaacatgtattaaagtcaaaagatagaatacaagtgattaattggagaatatattttctcgagatttcttgggtagcaatatcaatttaaatctccttccggtaggtgtacattaaagccttcatccatgcatcataacacatatggaattacagctttgacttctttgggaaaatcttcaaactcaacaaattgcagcagctgcatttggatggtatccgcaatctgtgcttagattatattataaagagccgacgacgagatgataatatcagttgaaatattttggttatatgttccaaaagta

SEQ ID NO: 240645 - DNA, 340 bp, Gossypium hirsutum
gactttcaaaattcaatctcttttattaagtccaattaaaacaaaatccaatagctgtagcgttaactatggaatcaggcctttatctacaactaaaatcttgcttgcctctatttatcattattaccgttatctgttttaagaacactttattctcgggacaaaacgcaacccttatcatccttgtcaccaaactacttgtcttattataagacattaaacctcgaatcccatagcttaatctcaaacgttagtcaagaatgtattttcattaagataacaattctttcacaatatgtcatagaaagtattctttgatattttatattttacaacaaaa

SEQ ID NO: 240646 - DNA, 349 bp, Gossypium hirsutum
aaagacaccacactaaactctagcgtgtacttttacacataaaaaaaaacctcctcgcttggatataaaactctcttgatgctgcagtaacaagcttgtaggatgttttttaagtatggggaaagccttccacacctgaatattcttctgtcacatattaaccttttattcaacaactgctgactctgccaccccaaaccctctttgacgggtcctgcacttgtagatgggacactttatgttgtctatgagatttttggaaatttaatgatgtgccagaaggatattatggcatacgtggctatttggaggctttcccatacatagaacaccaccaccctacaagctt

SEQ ID NO: 240647 - DNA, 132 bp, Gossypium hirsutum
tatctaaaaaataaacttttccctgtcttctttgagatgcaacataatccttcgctgcgcgggtacttcttttacatgaaccctcaaaataaatcttgaatcatttttaatcccacagaaaaaatgatatgt

SEQ ID NO: 240648 - DNA, 256 bp, Gossypium hirsutum
tccggtccctgttttggtcttattgtttaaaaaacctttgccttagccaggggaccaaatggaagggtggttgtttttctgccaggcctcataaaatgttttcctgccttaaatacacatttggcgctcttaaaaaattaaaacacaatttttttgattgggaaatgttttcccggtggggtgttttccttcacataaaatgccccaattttttttcccataatatccctgattgggcaatattttaattgattgg

SEQ ID NO: 240649 - DNA, 368 bp, Gossypium hirsutum
  unsure (1)..(368): unsure at all n locations
ntcaatcatacaacttatctaaaaatttaattacaaaactcatgagatacctcggtgcgaggtcaatattctttaactccaacttctaacatatatatatacccatttagcattacaaccatgtaaataaacatttttacatcattaacttatataatttgctgtataacctcttattcaaaaacaatatgacaacgtgagactcgttaaatcaactcattgtctgtgtttaatatcacataaatgctttccactatcaccattgcatattataactgaaatgtaaaatttctttacctactcattgtattcaactttaagtggcattaccatatttcttctacatacaaatttggaatataatattt

SEQ ID NO: 240650 - DNA, 134 bp, Gossypium hirsutum
  unsure (1)..(134): unsure at all n locations
cgacgccacgtcgtctcgtcccacgtcgtcncnngggaatttcaaatcaaannatctcgaccaggctacccaatagnnctatgatgtcgcccatcacgcgactatatccttatatctaactnnntctttatccc

SEQ ID NO: 240651 - DNA, 242 bp, Gossypium hirsutum
  unsure (1)..(242): unsure at all n locations
ttcccggtcgccacgcgttcgccacgcgttcgccacgcgtncggtgattttccaaaatcaggcaacttggtatgatgattggggggctcaagattctagtgagggcagcaagaaatcactttcagcattcgccaagggttaaaagggctgttacaaaagaaagagatttgctcaaacaaacacacaggtgtctgataaaatataaaatgggccttcattggggaaatattggcaaaaaaata

SEQ ID NO: 240652 - DNA, 274 bp, Gossypium hirsutum
ggaaatttatggttgctttacttagaattaaccaattgatagtcttttaaagtaaccgagggccttcttcttcaacccaagattgaaacttgaaaggtctgctttatctaattcagttgtcattgttggtaccatgggtgtctcaggaaaatggatcaaagcattggttggcttgaaaagaacagacaagtcacaatcctcggagaagaaagaaaatagggcagctactagcaaatttcgtcaccgaaggaagcattccattgagttttacaca

SEQ ID NO: 240653 - DNA, 366 bp, Gossypium hirsutum
aaaaaaaaccggctccacccacacgttcgtacacacgtacaaataccttcttctttctgattacaccctattcaaacaatatattgtccttttttaaaacttttatgcctcgttatacaacattcaaaaatatttaccatcattttttttcttttaccataccctttctcacaatatatccttcaaacaccttagattatatttctagcactaccataatcactacctcttacaatatttctattattcatccaaaatctcacataaaccccaaccactagtcctaaactacattatataacacccaatccccatatctaacttcatcatattacctcttacaatacattcaccccatatattcaa

SEQ ID NO: 240654 - DNA, 382 bp, Gossypium hirsutum
ggaaactgaggaataaattgtgtgttggctatgggggtggtgttagggtcttattcggcttggttggggttacatttattacttgtattgatttgttagcttcaatatatggaatgttggtgactgagagagggacacagaaggagaaaaagaaagaatttaaggcatttacttcaactactgctaagctgttatggagagactccaaggacccattaatccttatgaaaatacttacatctgctactgcactactgcttcttcttactctttcaacattctactctcattctactttcattatctctttatctgctgagagagactgaaccatgtggcctccacccaattaaatgatatttttctttttcaaatatcttta

SEQ ID NO: 240655 - DNA, 172 bp, Gossypium hirsutum
gagaaatcaaaacttccctcaaaccttaactctaaaaccatcactgctaaaccctcgtctcgttttcaactggtcaaaaccccccccaaccagcataaaaaccactgaacatcaaacaaaagcttaaactttccctccatccctgttaagcccaaaaaacattaaccacacc

SEQ ID NO: 240656 - DNA, 222 bp, Gossypium hirsutum
cccatcgttcgatccaaaccttgtttagcgagagtatgccgtggctctacctcttaggggggatggtattgaccttgatgatcgcattaccgacctacatactagcccttttgacttcaattaggggggtgttcttggcaattaaatcccaacgaatgtcagtactgaacttgtatgattacatccacattgtttgcttattaaccccctctttgcccccag

SEQ ID NO: 240657 - DNA, 269 bp, Gossypium hirsutum
aaaaaaccgacccgacccacccgtccggaaaaagaccaagctacttctaaatatttttctccaccataactataatcaaccctgtccgtttaaaaaagtgctcgctcccaacacaccccatgttacctcacacaataactcactctcttttacagaaaccaaattcctcttaacaaaatataaaattcccattcttccaacaccaagactactactatcaatcctaactatacccagaaaaccttatctacaaaacaatctcacctttt

SEQ ID NO: 240658 - DNA, 374 bp, Gossypium hirsutum
  unsure (1)..(374): unsure at all n locations
gtgaggaaactccaaatattttttcgaccttattttaaaaaactacaaatncgcctttttgcaaacatttaaagaactcttactattcccacaactttatatgaggtcagtccaacaatgaccacaaaattgtatgaggaaactccaaccagtcccacaaacttatctgaggaaactatgactactcccacatcctccggtgtggaagcttcaacacttctcacaactaacattgaagaaacatcttctgtttctacaactacttaaatttaaactttacccccttctactacttaaaagtgagaacctgcaacttaatatctttactgtcaaaacaactcagaaatttcataatttctgtattatagaacaca

SEQ ID NO: 240659 - DNA, 232 bp, Gossypium hirsutum
  unsure (1)..(232): unsure at all n locations
gcgtacgctcctncatcttatgctgacatgtcaaatcttttattatcatgccccatacttgangcactgcatggtttccatacacctggggcccctcttcataaaaaaaacagcattctattttcaaaaccacccctcattgtattaccaacactagccaaatttacaaaaccatgtgcatcccaaagaccctcaatacacgtgcacatatatatgcaagaaactcctcaac

SEQ ID NO: 240660 - DNA, 308 bp, Gossypium hirsutum
cgcgtccggctatcttacttttattcaatatcttgttattcagatactaacaaaaattttacacgaaatgacacggcctaattcgctaaataaccaaaacccaattgcatcattacctatcacacctaaatgtggtgaccgcacaccatcatgatgatgacaacacttttgacaatgatgaggtatccatctactatgactaccctatccactatataacctacaaattattcatactatcggatcacaaactatatccagcaccccttgattcactgaccctttatactatattatcatacacaatg

SEQ ID NO: 240661 - DNA, 324 bp, Gossypium hirsutum
  unsure (1)..(324): unsure at all n locations
ttatcnataatgtatgggcttaacattgatacatttttttcaaacaccagtacctgtttaatttggctaaattgcgaactctctcaccaccacccttttgtaactaagattcaaaacacctataacctttaactcgcccaccaaaaacctttattgctactcgcattcaaattctatattaatctgatacttcctacaacaattgctgttttgtagatgcgtacacacaagatctatcccatataaaaaattaagtctatcacaagcctaccaaccactaatttagatttcatctctttgacataaggttacttaatcacttat

SEQ ID NO: 240662 - DNA, 130 bp, Gossypium hirsutum
gccgacccacgcgtactcccacacgtccgcccaattaattttaaagtttttagcaaacacaagtacttagtccattgtgagagattggaaactgtttaagcaactcccttttgaaattaagaatccaaac

SEQ ID NO: 240663 - DNA, 410 bp, Gossypium hirsutum
  unsure (1)..(410): unsure at all n locations
cacgcgtgcggttttgttatcnataatgtatgggcttaacattgatttattattttcatttctctgtatttgtttaatggggctgagggcgtctccttccaccaccaccctttggtaactcacatccaagcccattcttaccgcttgtacgcacgccaaatcctttgctgcaaacgtcgtatggattcgattattgacttccaatctaaaacaaagtatctttccttctgagtccctacaaacaatgcctattccatatttaaatatttgcttgtcaaaggccccatcaaagtacattatgatctcatctggttcaagtgggctccaccgttctactatcctttgacctggtaatatgaggtttacctcttaccattccctcatatatttgtaaataagaaaaactgtgt

SEQ ID NO: 240664 - DNA, 258 bp, Gossypium hirsutum
ttttattatctttgtactagcttttatttcttatatcccgaataatccaaatgctgagttatattgattattatacatcccacttcttattacttaagttattttggaacaactctaataccacactgctaaattcatcttaatatgctctatgatgtgttctatctcagacaaccattttagtatataaattatctatgattaaactatcataaatgaaaagaaactttctttatactcatcataaaaatattattt

SEQ ID NO: 240665 - DNA, 210 bp, Gossypium hirsutum
  unsure (1)..(210): unsure at all n locations
taaaatttttcaaactatatcaaaataaatacttattagagatagtttaatatttgataaactccacccacatnntaaaatttttatttaagttaccctccttcaatcacacatccacaactatcatattttcattcacctcgttctaaatacacagatatatcttaatcatataccttataaattcacaatatccctacctcacacctt

SEQ ID NO: 240666 - DNA, 223 bp, Gossypium hirsutum
  unsure (1)..(223): unsure at all n locations
aaatctcaacatctacctaatttccaatttaaacttaccaatcnanaaataagcgtggtatacattcatgatccacaactccccccacacatttcttcttatttgattctccactaaaatcccaaaattccaacaacaattacctaatttcatcaattccttcgatctattcaaaaacattaacccttactaagcctgctcatacaattacaaataacaatct

SEQ ID NO: 240667 - DNA, 397 bp, Gossypium hirsutum
  unsure (1)..(397): unsure at all n locations
gacgcgtgcgccgagaagaatgctccatgggacacttccaattgatattggccggctgctggtcancctatgttttggatatgccgggtcaaggaccacagttccattggtctttgatgagctttctcaaccaaagggctatcaagatgcttttccagtacagttgagttcaagtccaggcagtggatccctttggtctcgacaaccttttgaacagtttggtgtagctgagaagaaacgaactgctggtagtgaagtacctggaagtgggttgaactcaatgtcatgggatacagcttctggcatggatttagagtccaagcttcttcaatctttccgacattgtatagtaaagctcttgaaattagacgggtccgactggttatttatacaaaat

SEQ ID NO: 240668 - DNA, 338 bp, Gossypium hirsutum
  unsure (1)..(338): unsure at all n locations
cggtggatgaaaacattattcctgatccctatcagttgtgcgatgattttgaagaagctctgaaactcatgaagaaaactatcgttgctgaaggtctgataaagaagtgatttagaagggtcgtttcgagtttcagtacgtagtgggctgtgtggccataataaagttgcttaaatatctctaggattggcgtgtatgctttggttagttttcataccatgccatcatgttttgtgaactatacttactataataagcaaataaagtttggacttggacaacaccatgnaaatcctacttcacatcaagcgatgattactttcatgccttaaagcaag

SEQ ID NO: 240669 - DNA, 399 bp, Gossypium hirsutum
  unsure (1)..(399): unsure at all n locations
aactaaccttaaccttaatttangaccttaactcatcgacattatcaggggtcaattgggtatgttttcacactattcaaactcaataaatatgaattctacgtactgactgaacacaaagcaaaaacctacataaatcttaaaaaaagcaccacaccgaaatatatcctgcaaccacttttccatctaaattattaaacactaccattgaccaaaacatacatagaatattaatcaaactgatacctccaatcactacactcaaggtggtaggctacaaatctctctatattatttacaaatagaattcaaccattttaaaatctacagcgaactaatacttttaactacttatacacatattacaacgcctttacccaacacaatacgacctattta

SEQ ID NO: 240670 - DNA, 412 bp, Gossypium hirsutum
  unsure (1)..(412): unsure at all n locations
tccaccactttcacaaatcttcctttactctccgaatccaccactccctagctatgtacactttccactctagaaacctcccccaactttctcctttttctcaatcttcttcctattacctctttttcaaccaatcttataataacacctcttataatttactaaacaactcctcttctatataatattttcttctccacataattnttctcaccataatatatttttttttacaaccattacaattacaaccaccaccaccaccaccaccaccacaacaatattttttcatctttcttatatgacccattacaacattaaaattattcctaatttttcatcaaaactatataatcattcttccacaccatccttttttaccactcaaaaattttattattccctttaatct

SEQ ID NO: 240671 - DNA, 270 bp, Gossypium hirsutum
ataggaactctctgttcgcacactactattgctttgcctgcgacaaccgtacactgaagctctggtttaattccatcatgcaatcaagactattctttccctgcacctacttgtcaccaaacaattatacttggcgaattgctcatgcaagagctaacagaacctaatcaaaccatagctcctcgctcaacatactcttacactatcaaaattcaatccccagaaacctactgcttcatcaacaattcaacctattagatgcaagtatat

SEQ ID NO: 240672 - DNA, 201 bp, Gossypium hirsutum
tattcatccccccactcatccaatactctttctttttagacattacgaaaaccaacccatgaccagtcttaatattaccataccccaccccccaaaccaaatatcacatttacaaccctcagtaaaacaaaaaatactcacccacatatttaccatccaaataccaatccaatcttactatacacattctcttcactctca

SEQ ID NO: 240673 - DNA, 313 bp, Gossypium hirsutum
ctctcacatatagagtttaacgcctgtagaattcatttcccaccttatatcacatgatatcgtgtatatcgcctgtataaaaaactcaattttaaatacatacaattacaaatcaatatatatatattaattactccacattactatttcttattcttccatctaaatatcttattttaaattattcattattataaacattatatataacgtttattcttaaacatcctttttatatgccttatttataattaaaattctatctattgcctatcaaaaactctttatacattatttattttataccataaat

SEQ ID NO: 240674 - DNA, 106 bp, Gossypium hirsutum
  unsure (1)..(106): unsure at all n locations
cccacgcgtccggngaaaggaacgcanganacctngaacaacatacaaaatgggttatatggccattactgcacattaacgaaacttcaatgataaaaccctaaaa

SEQ ID NO: 240675 - DNA, 387 bp, Gossypium hirsutum
  unsure (1)..(387): unsure at all n locations
gacccacgcgttcgnnaactcttctggctcaaaagtatgatgcgctttgaatataattcctgaaatggccaacatgttaatgtatacaatcacaactttcctcccttataacaagcaccacaagttactgagtttctccgtcaaaatattgaattattgctttcccgtacaatcaaagagatgcaagaatgacctacacctaacgatttcagatcgcatcaattgaaaacaatcaatgcctcgctcaacttgagtaaaacaattcatcttgaatttaaacctgctccttataacttgcagaatatttctcttgactgttttgcttactcaatcatttttgcagagggctgaccaaaataaaagaaatttgaaaaatccaagtttctc

SEQ ID NO: 240676 - DNA, 219 bp, Gossypium hirsutum
tcctcaatttccccttccacccctacacctacaatccacccctttaccatacccatccatcccctacccttttttcttgaaaagccaattccactataaaaaactccaactctatacgtcaactccttcaaaataactacaattatacctccctcaaatataccataaaactttctatccttccacttctaaaatttcttaaaaaacttgctaaaaaca

SEQ ID NO: 240677 - DNA, 328 bp, Gossypium hirsutum
cccacgcttccgcccactcttccgcccacgctttcggaattataccctctgccaactgctaggccaatatgtagcttgattctgtattatgaatatacttctgtatggcagtcgaatcaatatttctcctgcatttcttatatgcttctatggaagaataattgttcataattttggctttttcttctcttgggttactgtaaaatccatttggagattcaattattgtcttactgttatgcttctttaatttgtctgtcgtcggctgctttagattttctgaaagatatgttcgactcatttctgttatcatttgagcatttaaagt

SEQ ID NO: 240678 - DNA, 377 bp, Gossypium hirsutum
  unsure (1)..(377): unsure at all n locations
cttttggctacgattgccgggttgcggatattcccctaacagctgattcactagcgagtgggccaacaggtcttactggaacagaaaagactattctccagagggggcccctcttccttttaggagtcacaatgtaaattcccttgatcaacggccatatttttagcacactggacttaccggccttatgcctccgaaaaggtactattctctagtatactctttctttatagttcgccagcaaggcattttccgaagcaggcagggctagagcgggggaattggccaatgctaagtgatctcctcgcccaaagaaaaaaaaataataaaaaatagcanaaataacanggagggctgttgacagggacttttggcta

SEQ ID NO: 240679 - DNA, 299 bp, Gossypium hirsutum
  unsure (1)..(299): unsure at all n locations
aactttgcctactttaacaccaaacacgcctccccacacnnatcccctcttccttttaatagtcacaatctaaaatccctacatcaacccccataaccataacacactctacttacccaccatacacctcccaaaaagcactatcttctacaatacactatccttatacttcaccaacaacacatcttcctaaacacacacatctataaccaaataattggccacaactaaatcatctcctctcccctcgacaacatcaaaacataatacacaatccacaacctttaggcctttttaca

SEQ ID NO: 240680 - DNA, 368 bp, Gossypium hirsutum
  unsure (1)..(368): unsure at all n locations
tcgctcaatcctttaatatgaagattatttatattaaaagaacaaaatgaaaacagaaaccctggatacgattttatataaaattttcatcacttctttttcttaaaaagaattctggaccactccaagtatcccattttcctcatctctcatttctttaatttaaccctttcttgggtcccttcccctgtcgtgatttgagtacataaattgagtgtatggttgaaacggaaagtgtcattatatgttactaatccttataaactttcgagcgtaaaaatcgttaattataattgatgcaaggattgatggattgtatttaaaaaaaacaaacnttccccgcacccatttatttttgcaccctttaa

SEQ ID NO: 240681 - DNA, 232 bp, Gossypium hirsutum
  unsure (1)..(232): unsure at all n locations
ggggcgacccacacctgcgaccgttttcctacaactacatctttctattttcccccatttactttcttnactgcaatgtgttcaatcttctttctcaacacctncnccaacatcccctccttttacctccacacctttcattcttacccactattcattttcaaccctttctacacatccatcaatacttcttacccacatatctattattccacattttacttcaactaaa

SEQ ID NO: 240682 - DNA, 378 bp, Gossypium hirsutum
gaccgacgcgtacgcggacgcatgggctacattcctgccattgcttctcacagatcaagacccataacacgttcaggtgcccttagattttacattagatcctcttctttttttctcttcttttattttttccagagtgggagagtttggaaactaaaataaaaggaataataaaatgacgttactgtttctgtggtggtttcaattaccatttgtagccaatttattgactcactcggtgttggaacttgtatttttttttttctaattatattttgaatattcaatattaattacgtacaagtattgaattcacaatacaacaatcttagtactgaaatttatattataaagaggcttaatgctgatttctcactt

SEQ ID NO: 240683 - DNA, 366 bp, Gossypium hirsutum
  unsure (1)..(366): unsure at all n locations
caccatatgtacaaaatgtgatggaaagggaaagataccttgtgcaacttgtggatctcggggcttacttaaatgcaagacatgcaatggaagcggttctcttttgactcgcaaaattgccgttgttaaatggaagacactttcaactcgaaaagtgagtgcgacgagtggagcagcatcggttccggatgagattttccatagggccaaaggggttcagttatgcaacactcaggcataccagtgcacccctgcctattttgccgactctttcttcctcaacacattntcttcggatgttattgcagacagggcatctgtacctccaactgcccaggtcatatgtgagagacatacaatctcagt

SEQ ID NO: 240684 - DNA, 235 bp, Gossypium hirsutum
aaccatcaaccataataacaacactagaaggattacacgttttacaacactatttgcacatgtgattccagagaaccttaaacatcaacttacccctcttctttagccttaccaaaataccacttaagtaaccaaccctatccatcttaacaccattaaggaccctatcagtgttaactcttgtcacaacaatatcatctacactaacgttacagctctctttaaacttaactat

SEQ ID NO: 240685 - DNA, 403 bp, Gossypium hirsutum
ccgggcgacccacgcgtgcggtttcagactattgaaagagcaaagcacaataaaaaaaataaaactgatcagatggtgcaggtgatgagggcggggaaaagggtatccgtgaaattggaagttgaagaatctctagaagaagagttggcctctcttcacaaaaaaagatcaaaactcgacccttgtttacaggaaggtaacgttgaaagtgggaaatttccaatctcaccatcattgtataatccactggatgagccaagtccacttggcttgcgtctgaaaaagagtccatcttttctggacctgattcaaatgaaactttcacagcaaaatggcgataagttaacagctcataacatgaaagatagtaaaggagtttcagtttctggggtacgggataagc

SEQ ID NO: 240686 - DNA, 304 bp, Gossypium hirsutum
gaccgacgcgtccgcccacgcgttctaaaaaaaacagtattaggttataagactataagactaaaatctaactctgcggttgtcatttttctgcttgtcgtaagtcaaaaggacaagaatggtggctgacaaatgaaagaacgcgcaactagaatataagcgagtccaagagaactctgaacaaatttacaaagcactcgtctttttcatcaagaaactgctatagatccaagactggcttgagaagatcaatgaacaatctagtcaaaaagttctggcagtgaagcataaatacaaccactta

SEQ ID NO: 240687 - DNA, 331 bp, Gossypium hirsutum
gggaagaaccacgcgtgacggacaactgtgaagctagaaaatctctcattttatttgactatactcgaacgcggacacactctttacctcgtttttggggatcgcttacacaactacttatatatgagatgtatatgcttacaatactagcgggcataaacttaacgatgataaaagataggggatccacctaaccgaaactgtttgcatacctgtaccatattccaccgccaaaatctgtcgcgtccagttacaaccataaaaagcgacgcttatatagtgcactgcttatattacatattacgggaacaaacaccgtatctgttaccat

SEQ ID NO: 240688 - DNA, 419 bp, Gossypium hirsutum
ggtaattttaagtcttacctaggtgtgccgctcgcccgcaggcgcgtattaatacaagaagagaggctttcttatcttttttttttcattttttaaggaaagtactttgaacctagctaggagtccttctatctggaggtggcttccggcgccctatgcacgtatcaataaagcagactaggccgacttttcgcgcaggtgaaaaagaaaatccaccactcgggtctttagacactcgccctaatcaataagcgggagaggggagggaagacgaggaataaaataggacttcgattcaggatagaagatcagtggagcatgttgggtcaactagaagcatctctttgaaaaccatgggtttcatgcaatcgaatgctatgttggcctctttttgtccttagtagtggccgttgatagtt

SEQ ID NO: 240689 - DNA, 407 bp, Gossypium hirsutum
cccacgcgtccggattctttgatgcccatgctatatggcatgccacaactattgcggttacgtgcctgtggtggagcttcattacgaaccacgcaaactttcagacttctatcctccttaagaaggctaagtagtcgcatgtaaaactaacatcatcttgtagcaccttcaccattcaaaagccttttgtcgtatcctttggcacaatgcttttacatataatatattttccgcttatttatgatgcagaaatggacatctcatctgctcactgctctgttggttgaaacttaaaaaagaccattctttgtggaagctcaacttcaacattaattctctagtacatttaaaacattatattttttttgaattgttacttgaccctcgtacgtttatcttttatttcg

SEQ ID NO: 240690 - DNA, 393 bp, Gossypium hirsutum
aaaaccggggcgacccacgcgtgcgccagcgtccgaaacacttatccagacaccaaaaaagcttcaagactctctatcgaaaaccccatgggggctcttaaactagatcgtgctctacggaagcgcacgttgatattcgatgtcaaaggctgcgtcaacatatatagatgctgacgtacatgatgtggactgtatctgacgtatgctatcaccaaaaatgtgttctggagctccatatcatttatacagcacaacaaaaaagctgacaagtgactgtttcctatggtaaaaacccaaggcactgtctaaacacatggatgctatcttcttttacactttgacaccggggacatgaactatctaaagccactcttcctaagcttaaattctttt

SEQ ID NO: 240691 - DNA, 391 bp, Gossypium hirsutum
ttttattttaacaaacgttaactaagaacattgatttttaagggggtgagaaatgagaatgatatgggtaggtgtaatagtttccttttgttctagatgattgtagttgtaagacaggtagacattgtatgaatgtagagcagtgttcaggtcttattaaattttacactataataactaattattttttatcttttttcataaaaactttgatagttgttttatttacctttatgagattattttttttttttattatttttttagattatttttgtttttttctctttttttatctaaatattattttttttttcttttttttttatctattttacttttttttttttgtgttatttttttatatcacccattttttgttttttttttt

SEQ ID NO: 240692 - DNA, 356 bp, Gossypium hirsutum
  unsure (1)..(356): unsure at all n locations
agaaatctatattttgagtggtttgttatcccctttataaaacatactgctatagttctagctctgtgaatgttatatctatatgaggatatgaaattagcctgcccaggatctactctatgatatggctccctttttctttttggggttttttgggggttaattactgatttttgttttgggttcttaagaaatgttaatgcatcacgaagaatgatgagaactgttttttttcatttctattntcagtatcactaatgtttaatgaaaatgacataaatggaacttactgnnnaaaaaaaaaaaataaagaagaggaaagaaaaactaaaaattagtattcttattgggttaat

SEQ ID NO: 240693 - DNA, 382 bp, Gossypium hirsutum
accacgctatctaacaaattgtctcttttgtaaaatatataccatcttacattaagacaaggtttacgtgtgctgaatataaacacccataattttcttaatatctaaaaggaaatctcattgaacaacatatctttctgattaacatgaacctcagcctacaacaaacacgtatggagaatactctaactatacaccatcatgctctcataacaagattttgtaccattagaaattatttttttggataaggaccatctcatcattttaataaactcttaacaactataacttgaatacataaaacaatggggttgattaaaaaaacatcaaaaaatttttttttttaaaaactaaaaaaaatttgatttaattaaacttt

SEQ ID NO: 240694 - DNA, 327 bp, Gossypium hirsutum
ctgacatttgttacaaagggtgcattgtaatcagctgacattacaaatgaactgcagaagactgtcatagggtcggccttaacatctaatcctgccctccccctccaggattctctggttcccccaccccaggccgatacccctgtcatcttacttttactttccttaatgttgtcaccttttcatgtatataattttatgcttttttattagttaatcaatgaaatcttcataagcttgcgctgctataaaaacttatgacccttaaaacatttgaaaaagaattacatcttttatattttgtttataattgctatggtcaacata

SEQ ID NO: 240695 - DNA, 338 bp, Gossypium hirsutum
aaaaaaaaaaaaaaaaaaaaaaaaacaaaaatttataaaaaaaaaaaaaactgggaaacacgcggaaaaaaaactgccactcaaaaatcttcccccctcactaacacattcatgcaaaatgatactcttgcgaccacatacccccaacttgaataccctggccgacctttaacacccttaacgctgcaaaaccactgcttattcctaaccaaaatgacatgccccaactaccccttctccaaacctttctatcttaaaccggacctcactaaaatacatgctcatccccttataaccccaactaacgaatgcaactcaacctgacaccgcgcatatac

SEQ ID NO: 240696 - DNA, 243 bp, Gossypium hirsutum
tacattatacactttctatattctcacctaaatttacattaatggccggcgttctacaacgatcacatcccataaatcttaatgtcactcaccttattggcattacagaacatgctagcttcactggcttcttttatcacgaagaagatcgtacaactaccgctactgaacaccttcgtagtcttaatcccgaactccatgcgttccatgttcatgcacttagcgccacaactaaggtgtgca

SEQ ID NO: 240697 - DNA, 166 bp, Gossypium hirsutum
gttactgagcaagagttagaagataacgacatcgcttcatcagaaaccggctctgagtctggtacttcgaccactttcaacagcatcaaactctctactaaaaaaggtaggagatccatacagaaaagagttgcgtcagcgcctatcatggatgtagaaagttctc

SEQ ID NO: 240698 - DNA, 299 bp, Gossypium hirsutum
gcaagggcggcaagcagaaaataaaaatttctttctcttaaggaagactccgggtttgcagggcctctatcatattctttattctctttctctataccatatgctttttttccgggcaagcaagtagtgattttaggcacgtaagcccctaaaatatatataagtgctagtttacagcctttactttctcccttactagcttagatttggagtttctttcgatcgacatcactcgtgactcacgaagggacgaaacttcacttgctcaaccaacaaagagaaaaggaggactttctgca

SEQ ID NO: 240699 - DNA, 384 bp, Gossypium hirsutum
cctttggctgctcatgggtatcatcggcgttcacgcctctacctctgtcgtggctcatgaggcaagtcgcgtaaaaacaagattagacccatttacttcctttggtccgatatccaagccgaagaatagcctccgacgattgaaaccgcaggtaaaccaccgtacagagaagcggacgtggcaatggtgctggagacccttgctgaggatgttgtggcgctggccctagggtttcagtctctgaaaccgaaagttgggccatctggtcattttcaattgggttttgggttaagtttatttaattgggttaaagatttgtatttgggctaggattaggccttggtcttatttgggcttcaattaatgtttgggtctttgtgtttc

SEQ ID NO: 240700 - DNA, 288 bp, Gossypium hirsutum
  unsure (1)..(288): unsure at all n locations
tcaatcatncacttctttttttcttttaactcaaaancccaacttatatgataatgattaattttaacacttattactattanaataccttcccattctccccatccattcttttcaaatcccttactttttaatctcctaaaatttttcccacattttcaccaaattcattcaatagcattttaatttaaactaatcctatctctttaaatatattaaaaatcaactttttttatatccttccatttcaaaatattaatcacctcatcttattacatcattaaaata

SEQ ID NO: 240701 - DNA, 297 bp, Gossypium hirsutum
  unsure (1)..(297): unsure at all n locations
acccacgcgntgcgaggaagccctaccagaaatacatatcaaatggtctcttatccgctttcaggacatacacaccagctcgtggatattcgcagggctacaccaacaacaacctccttacaacaagagatcaactgacccaataaatctgcatttcgtgtattggtgtttatcccaccaaacaagcccaatgccatacattaaattttgtttaacaattggagcaaactctagcttattatcatgctacttacaacgaaaatcctactattacatttatgcccgaatttaataaaa

SEQ ID NO: 240702 - DNA, 278 bp, Gossypium hirsutum
aataagtaaaataaatcattttataatgagtttttttttgttagtaaaaagaggtctatgggtaggttaattacgcaacataaaaatgttatcaaacctatacattaataggtataaaatcgaaagataaaaacccattgataattatcataatcaaacttccataccattaaatgtataccgtaaacaaattgttagggtatagtcacacaatatgataatctggttactatgtctaattatagattgcaacgcaactatatataaaagagttgtta

SEQ ID NO: 240703 - DNA, 397 bp, Gossypium hirsutum
ggaactcactaaagggaccagttttgtcagcttgcattgaggcaggcactcagtgcatactggacaagtggggactcttttttgaaacataatgccccgaacgacgtaaggagaaagtctagcttaaaaagcgatctgccactttaaatatcttacatatctgtaaactttaatgaaagaaaaagaatctatttattagattgaacactgggaatgaggatcctaactccaagcgcgttactgtgagccctgcacaagctggaaaagccaacgctcttgctaatgctgaagatctaacacaccacgtttggtttgaaggtacagataccttgaaccaaccattccctgatgaccaatttgatcttgtttgggctattgaaagcggataacacatgcc

SEQ ID NO: 240704 - DNA, 461 bp, Gossypium hirsutum
gggaaaaacaggcgcgacgcgcacgcgtgcggaaactcatacgaacacgctttcaattcattcttcactgacattgaacacacgggattatccgtacccgctatcagaatactcagacccaaccattgctcaaggataatctcttgccaaaacggctaattctttcattcatgacacacttcttcaatgactatctggaggataatagccttgatgatttaatttctcttctgaagcgagggaaaattgaggatgatctcctgcaatttttcccctccacaaagcgatctgctgaaagtttctcttagcattttaccaaggcatgtttgttacccttggttgaatacaatgagaaaaaaatatttgatgtataattgaatgaaatgaactctgctttgtcaacacaaattgttgaggaatctgatatttcttaaatcatttaaactgtcaaacaacttttt

SEQ ID NO: 240705 - DNA, 339 bp, Gossypium hirsutum
gttcaatcatacacttgttcttttcttttaactcaaaatcccatctcatatgataatgtattattttttcacttattactataacaatacctccccaatcaccccttccaaacttttcaaaacctttactctttaaactcctaaaatttttcccacttcttcaccaaattcattcaagatcattaatatttaacctaatcctatcttcttaaatatattaaaaatcaactttttttaaaaacctttcatttcaatatattaaacaccacatcctaatacattataaaatttattttttatacacttactatttaaattataatgtttccctttttttta

SEQ ID NO: 240706 - DNA, 332 bp, Gossypium hirsutum
  unsure (1)..(332): unsure at all n locations
ccgggccgaccgcacgcgtacgcnaacaatatcccttccagaaagaatgaatttgatcacatcgcaaaggtggaatcgctcttgtcatcatagaccttaagttatgctattaactggccatttgatttaatcatcaaatggcaagtctgaaaccatttcccgtaccccaattttttgtttcttttttaaagttatgttgtatcctggtgcaagattagtttgttcatctgtttatgattgcaactcttttggtagtagtggaatgataagttttgaacacaagaaaaactttttttaaacttataaacaaaaatataaataaaataatatat

SEQ ID NO: 240707 - DNA, 372 bp, Gossypium hirsutum
cccacgcgtccgcccacgcgttcgacctcttgaaaccctagatctctaccaagattcacctcgtgtaatggagcaatagcctccgtagcgaaactagtacgtatgttgttgtttattactgtattcgaagccaccactctactttcccaattttttgacaactatttcggtgcaagaatgcttaccactcccatcaaacactgtgctaaagttaagcttatggaaaggaaattcaggaggcctccatcgctcactccctacttattttgcaggtacatttctaaattttgatgctgggttcggcacgccggaggtctcgaaagtacccattttaaataattggtctaagcattgctttgaaaattgaaaatt

SEQ ID NO: 240708 - DNA, 361 bp, Gossypium hirsutum
atgccaaacaaatttctagggctgttatattctacatttaaaagatactcaacaaatgatgctcatgctgctttttatcactctttaacttctcttgcaaaatataacattccatccctcctatgcaactcatttactctatcggacattgccttcataccattcttcttatatttccacaccttcttatcatatacgatcaatcattacacaactacttccaaacctaaattttcctttttgattgatgcttctgacaacatcaattcctataaactgtcttcgaaaagttatccaaaacaattacctgcaaatttcattaaattatattctcaatcttataattctaatttttattttt

SEQ ID NO: 240709 - DNA, 436 bp, Gossypium hirsutum
  unsure (1)..(436): unsure at all n locations
cccacgcgtncgcccacgcgtccgctacggcagaattctggtgcaataggttctggtgaaacggtagaagaagcagccatcacaacagcctataaagttgctgaagctgaaaataaatcgtttttagccgctgaggccgtgaaggaggcagaaagagtctccaaaatggctgaagataccgattcaatgcttcagctagtgaaagaaatctatgaacaatgttcacgaggggaaactgttattttggtttgagtctttagctgcctangatgtaagtgatagttgtctttttctttataaattttggaatctgtgtatgtatgtgaattgtgaatccattgatcttgttcaatgaatcaatgcatgggcactgaaatgcattatgaccattcaagatccatgatgaatcatgtaggtagtatattacaaggtatta

SEQ ID NO: 240710 - DNA, 273 bp, Gossypium hirsutum
  unsure (1)..(273): unsure at all n locations
cggacgcgtncagccacgcggncacctgaaacacctaataatgttattaccattcctctgagcctattttgatctatgttttgactagtccttaaaacttaactggaacatgggacgccctaatcttatccattatggcctgaatagtgacatatctgggacataaaacataccattaatggtcacacacctctaaaaggaaccaaatgttgcctgttactactgagcgaggtactaagccattgatggcttgcttgagactggcaaaacccc

SEQ ID NO: 240711 - DNA, 317 bp, Gossypium hirsutum
ccaccaatttatacaccacctaataattataatcctgaccccaaaccaccagtgtaataacccccaaataaagaaaatcctcaacctaaaccaccatttttttctccaccaaagaaagaaaaaccccaaccccaaccaccattctattgtccacctaataaatttaaaccaccctcttattatccatctaaaaaaccacccagtttttaaccctatccacccaaaccaacctcttacaacccaacaaaaaaaaaaaaaacccaacctaaaccaccatttcattaatctcccaaaaaaacacctcattttcactattc

SEQ ID NO: 240712 - DNA, 358 bp, Gossypium hirsutum
acgcctggtatatactgaaccataaactccagatactacaacatatcagtcgaaaataagcatgctttcctatacctaacacccccacttaatcaaaagatctacccactattttcttcataccattcttataaaaaccacttataattcctaacaaccctttatattttgactttaataatagcttcaatatcgtttcaagacatcctccatactgacatttgaattctatacctaatatgaaacttccataatttagtatagaaattgtctcctcggtctgtaacattaatccattaggaacaatgttaaactgctatcatacattataatcactccttacagagaactcccctgt

SEQ ID NO: 240713 - DNA, 162 bp, Gossypium hirsutum
cgcgtccggcttgttactactcaaccatatgatctcagatgctacaacagaataccctcacttaggcatgggtttctctagcagagacccatacattctttaaaaatttgcctgctatactcttcatcacatccgcatctaggacactcacaatttctaaca

SEQ ID NO: 240714 - DNA, 384 bp, Gossypium hirsutum
cgcatacgtacgcgtaaagcttcacatgacctatgacattttattgtatctccatgtatatggacctcgtattaagcctcccattatatgttcaatctgtcttgaatcttggggccttgcaagatcacgagcgtacagtatttttacttctttgcaaccaaaacatgccttttatcctaatacttttaaatttatcgattgcaatactctttattctttttatttttcctcttgactatatccatttaacaaatctcccataatcaatccaaagttcccttatattgttcaccttataattcacatctatgattaaaaaaatcttcgaaaatttaaaaacctttagcctacaccactgtaactagatgaagatcttgaaccttt

SEQ ID NO: 240715 - DNA, 351 bp, Gossypium hirsutum
gtaaaataggaatataaaaactgctcttcaatcataaatagaaaacatctaaccttcgtaacagggtcacttattaccttctattcttatcattctttaacatcacattaacatcttatttgtacatacacaaagatcattctaccccaatcctacaaccctcttctatctattatataccacgttaacccaccattatctggtgctttatcatcctgacttttttcaccacacttattaacctttaactcttttaccaacatcctaccttttttctttatccttccttatttaaataaatcatacccccttttttacctaaccacccttccttttttgcctctttccttg

SEQ ID NO: 240716 - DNA, 330 bp, Gossypium hirsutum
ggaagcaacacttgccggtaacacccaagtatttagtgggttggtccaaggaagatagtgagagaggagaggccgcatttcatcttcatacttatgtgtgcatagtttaatgatattccagaactaaaaaaggaggaaaaaaaaaggagaaaatatgatatgctagtatgtagacagcattcctttgttttatctcttatttcatcatgtgtcagtattgacgttagattacattttatgcgggtgaaaatttttgatgtaaaatgccacgtacaagcatttagggtaaacgcttgtttcgtagatggttatttatataattgctgttta

SEQ ID NO: 240717 - DNA, 384 bp, Gossypium hirsutum
acaaaacactccaaaatcctaacccttttatctaaggttgcaatcaacaaacctgcgaccggcgtaactccaccagatccggcgtctgacagtgcagaccatagcctatgcctaccaacgatggagaacttacagcctagacaactctgcaagataaagctctactctctctatctcattaaacaaatgtgaattgtttccttttactcgttttattttgtgcatgatataaatgacatagaacagaagcttaatcgaaagaaaaacgggattaaaatcaccttgaggagactttatcttttcaatgcttattttgaattgattctttttatttgtgtgaggatgttttcgtgttccacgattaccaataacatagggctttta

SEQ ID NO: 240718 - DNA, 308 bp, Gossypium hirsutum
  unsure (1)..(308): unsure at all n locations
cgcgtccaaaaaagtanctttctcactgatgttctttcttgttatgggcatacatcaaacgcaaggattgtatagctttgacagacttatccttcttttaccattacaacaaccacttttaataacttaatttgcaaaaccttctaaatgaccctttattctcctcatattatccattgcatgctttgacatatccttttccaaaaactattattaaatcacaaccattctttgtcataataccctcttctaaccgatagacccaacattgcctatctcatatttatgtataataaaccaactcgaat

SEQ ID NO: 240719 - DNA, 198 bp, Gossypium hirsutum
ctcactcgacctgttcctaactttaaagccttcaaagtgagcctctaacgcttttacaaaagatcgaattctcttttaaaagatcaacttccatttttctccttttttcactcaacattctctttcttttcttcaataattctcttgaatcttgctcttcacccatccataaaccaatatcaaacccaaaccccaaca

SEQ ID NO: 240720 - DNA, 425 bp, Gossypium hirsutum
gcggcttcgcgctcctgataaaatcctctgacgttccattcgtcgcataaatcccaacaaaaccgtgcgtggttcaatttatcttgctctattcactccttatgaaaacacttcatctccatatgataatacaaacatgaaggttattgcattaacgatcaagattttgatgcttctttaaagacacaattccttctctgtggggaattctttcctaccacttctttttaaaaaatctctaaacattaaagtggcccaaaagtataaggatgaaaccagctaaaagcctttatggaaaaaaaaaaaacccaattaacctttgccccaacccctaaaagatgcttaagaaaaaattgccgcccaaattccacttttaaatcctattgaaaatttattgaaagatttttaaaaccttctcgttaccc

SEQ ID NO: 240721 - DNA, 435 bp, Gossypium hirsutum
tgaataacccacccgtcgcgcgcatactttcatacaataataaacatcatactatcttctttttaactactattgttatgcgtggagatgattacttacttgaccagtgacctactgctttttattacacaatcccatgttcaagttcgctaaaatcgtttactgacataccctcattcagcaaattaaatcttactaattccccctaataatatataataaacaaaactttaacctttaattccatacttaattttaatctcaaaatccattactaaacaaatttataaaaactttcttaaaatttttagcatcaaaaaaaaaaaaaaagaccgtcccttttaatgatccaaacttaaataccccttcattccacatcataactcttttataatttcacctaaattcaattctccgtcctataatttacaacct

SEQ ID NO: 240722 - DNA, 201 bp, Gossypium hirsutum
  unsure (1)..(201): unsure at all n locations
naaaaaaaaaaaaaaaaaaaaaacaaaaaattaaaaaaaaaaaaaaaacaattaaaacaaaagaaaggaaaaaagggcaccctatctaaaaaacccaancttactttatctgacataacaatttttacctctcttataacgtcatctactttcattacactgacctatcttttacaacatctccaccgataaaacccttcc

SEQ ID NO: 240723 - DNA, 375 bp, Gossypium hirsutum
  unsure (1)..(375): unsure at all n locations
cgtccggaatatttttgtatattcaataacagggccaaaaatatgtatgtaaaattttacatcaagganaggacgtttacccactcaaatgaatttttttcgaaaatttttctgggtaaaactgctgtttgtaatttaaaaaatagagatcagtttataaatcaaccaagaacacccaaaacgcccaaaatctgataccaaatgatacggggttgcgcgcggaccaagatcgagttgccaagtcacgagaaacttctacgaaaaccctaaacaattagatctgaaacgaaacagaaaattaaaagattagatttttgaattttcagatctgaaataaaatccccacatcagcaaagaatcaaattgagaatataa

SEQ ID NO: 240724 - DNA, 232 bp, Gossypium hirsutum
cccacgcatacctgttcagtgatctctactctatattgattgtgtctactcacactctttgcgctgataacacattaccttgacttcactgattgtttacctactttaaacacgaatattttcaccacaaaatctttctacatacctccctttgcacaaatatcttactttctatcacacatcatatacggccttataccaaagtgccctattacgactgcaatataatcta

SEQ ID NO: 240725 - DNA, 159 bp, Gossypium hirsutum
catttatctattaaacactactgcttgctcatactgctatgacagtcttttcacaggtgggggtggatctcacttctggcccggcaattgacatcaacgacattcctttcttcaccatgacttttctttctgcctcttcttatgtttacgaaatcctac

SEQ ID NO: 240726 - DNA, 323 bp, Gossypium hirsutum
attaatattattgcactgatcttacccagcagcacaaatctaatgggagagcaccacatttgccacaggctagcgaaaatgaatcccatcctctcattagcgtggataatgcaagtggtatgtttattgattgtgtatgtcctaaagaccctctctggaatactaacaaagacctgcatgcataaaatcttcaagatgttatattcatttgtcggacatgaaaaattacaaatgaaaagtgttccacccatggaaaatggtggttgtaaaggtgactcatatgttgcacatgcagcacagcaacaatagtcttgttatgtagg

SEQ ID NO: 240727 - DNA, 405 bp, Gossypium hirsutum
tggatctacccacgcgtccgaacataccgcctattaattgaccttttttcttttcattttattaataagtctcattattttgtctcaagaacttattaaaaaaaagaatggccttcttctctttctattacattttttcaatccatttcccttctaattttctctctttcttctacatattaattcccatttccttaaactttctttaccttttttctttttcttagacctcaattgtggattacattttacctttccaactcccctccctttcacttcatcaagctacaattattcttatgcttcttctttctgcatccattttatattcgaaagtttccccacaacccaaagcgaaataccttctttaaccttatcataaaccggcacttttgttaattaacc

SEQ ID NO: 240728 - DNA, 166 bp, Gossypium hirsutum
tacctaaccaaccaatttatactccatcatacaaataaaatccacagcccataccaccggtgtagggcccacccaagatcgtcaatccaccgacttataaccctcatatcaatccacccacctatcatcctattccaccatacacagctttttacactccaccata

SEQ ID NO: 240729 - DNA, 341 bp, Gossypium hirsutum
gcgaaaaaatcccctatgaatgcatctttcttatattcattctattaatacgtttcattattttgtatcgtgaaataaataaaaaaaagaattgcattcttttgttgctaatccattttttttattgatttagcctttatcttaccctctttcctatccaaaataatttcacttttgttagaacttccttggtttttttcttttctttcgacttcaattggggttgacatttttctttttccaattccggccctttcgcttcaacaaactccaattattcttatgcttattctttccgcattaattttatattggaaaattggccaacaacccaaagccaa

SEQ ID NO: 240730 - DNA, 236 bp, Gossypium hirsutum
acgtccacacattcgatcgtgcattgtttccatacgctgactattctatataaccaacggtccgtttctttataaaccacaacaaggactatctcttaacaatagcttatcctataccacatctcaacaattctttcaaatacctcaagttaatagatacattgatattaatctcacacctatatcaatttgggaggatcatttacagatcactattcaaatgatgtttatgacag

SEQ ID NO: 240731 - DNA, 327 bp, Gossypium hirsutum
ctaaaaactattaatgcctgcaatattgcaaccaaagaatcggtaaattaaagacgagcaagcctgacttctatgacttcctgaccaaatacagggcttacttaatcctatccccttcttcctcttcatccgtcttcagcgtaatcacccaagttataaataatgacacggataaccacaatgaaagcatttgatgcaatagttctccttatttcagaagaaaaccctaactagtcacatttcacacccttccttttttttttctctcttcctgcccggaccattagctaggattctgactagccaatcagtgcaacatctccctag

SEQ ID NO: 240732 - DNA, 386 bp, Gossypium hirsutum
atgaacttctaaaaatggaacgtcctggtccagaaaacaaagatgctagtgatacagagggggatgatgatgatgaagatgaagacgaggacaatgcagatgatcaagatgatgatggaggtgatgaggatttttcaggtgaagaaggtgaagaaggagatcctgaggatgaccctgaagccaatggagatggtgggagtgacgaagaagatgacgatgacgatgatgatgatggggacgaagatgatgatgacgacgatgatggtgaggatgaagaagaggaggacgaagaagatgaggatgatgaggttcctcagccaccttctaagaagaggaaataaatctagtcataggtcttaagatattctactaatttctgctttttt

SEQ ID NO: 240733 - DNA, 126 bp, Gossypium hirsutum
acccatacgcttattttaactgatagcttcactctacttaccttgtcatcattcttcttcaatggcccattgtccatttatcttatagactcaatgagtctaagcaatcataataaaaaccatcta

SEQ ID NO: 240734 - DNA, 436 bp, Gossypium hirsutum
gcgccaaaccccattttatgacatatacaaagctatgaaatcttgcatcaccataacgatactgctggatgagcgtttatgattgccgatatatgctccttgacactatatattaccttttgactttttcacgagtcgacaaatactgactcctatatactgcactctattcttactataaccaccctaataactactctgtccaaccaatctaagttgatattatccttataaatcctttaaacattatggtccaattgattcaattccttttccttccaaacccttttttaacccaggtaatcatttcaaggtttttttgatccttataaaataaaaaaccttacaaacacagtctttactcccaaaaaatgtttaaaaaacttaagatccttgaacctgaacaaataacacccccttttataataattcaccc

SEQ ID NO: 240735 - DNA, 275 bp, Gossypium hirsutum
ggaagatcaactttcacaccttcaactacattatttacagacaaatattttctgaaattcagtgggttgcaaatgcatgtatatttcgtgttattctacaagtataaattttttttaatcactcaaactataaaaatatattaattagtgttcacacttcacaagctttgaataagataatatttataacaatgtttaatcgcttcttttataaaaaaaaaaaataataactatcccacgatattcatgcttaaacaaaaaaatttctagaataa

SEQ ID NO: 240736 - DNA, 411 bp, Gossypium hirsutum
  unsure (1)..(411): unsure at all n locations
gacatatttcaactgccgatctatccccatattcggcaaatgaacatcgcatgaaagccggattgggccttgttagaccacgagttcactcanaacctttaagatcctcgcttaagctctgattacaacgaagcaagcaaggacatgaaggagccagcattaaggtactaacggagccagctagaggtggtgacgcacgtctgatgatgcatgaagacacatgtggggcttgtactgaggcagcagcggtttgttggaagctgctggaaccagatacgacgcaatggaaggcaccttagggttcaaaagtttcaatttgcttgggccatttgggctaatttcgaaattgagccattgggtctataaattaaatttagctggggtaataattggacctaaaaacttgaattt

SEQ ID NO: 240737 - DNA, 374 bp, Gossypium hirsutum
aaatgtaacgtcctggtcttgaatacaaagatgctagttatacataggagcaagatgattatgaagatgaagaccacgaccatgcatatcatcattattctcatggacgctatgatgattcttcaggtgaacaacgtgaagaacgagatccttaggatgaccctgaagccaatggagatggtgggagtgaccaacaagatgacgatgacgatgatgatgatggggacgaagatgatgatgaccaccatgattgtcgatgatgaagaagaggacgacgaataagattaggatgatgaggttcctcatccaccttctaacaagaggaaaataatctagtcatacgtcttaagatattctactattttcctgctttt

SEQ ID NO: 240738 - DNA, 261 bp, Gossypium hirsutum
  unsure (1)..(261): unsure at all n locations
cgcgtacgttactttcgaaaggttaatcacgctttttttattagagnatcctttgaaatattgggggggttcataatagatggagtcgaaagttaaaactaaagaacattttaatttttcatcacttttaaaaaaattgatgtatattcgattgtctatatgtatatatttctattctcaatcgccctcttttacaagtaaaaatcaaagtctttatagccaaaataatagcagtttcctgctgtttctcttgcttatact

SEQ ID NO: 240739 - DNA, 437 bp, Gossypium hirsutum
tcatgtggaggttaatttctatattcgtggaccccatgcagccgccaaagcatgtgcagaggggctcaaagacaaagcatacaacacatgtaattatacgtacttgatacttcacatcaattacccttcacgggcagaactaatgctttagtcttatttaccggcagctgagatgaggtcttacacaaactaacatgtgattgaacaatttcctggatgttgtactttgtttgagtcccctcatttatcataagcaccattaattgcccctctactttaagatgccaaaaaacaagcctttggtgactttatagatttaggaagtaaattgcctgcccattcaactaattaataatggatttaagttttcgttattcattttaacttaacccctcatttactagcgatacatcttattgattgattctatacaattt

SEQ ID NO: 240740 - DNA, 344 bp, Gossypium hirsutum
  unsure (1)..(344): unsure at all n locations
acgcctcaaaatataatcttccaaggcctttgatctgcaccaaacagtaaatcctgttggggagattgtgatagaacattacttggcctgtacgcacagctcattttattggtctactcaaaatatgttcaacatctaagnggactgaaattcgcttatctgtttctctcggacttttttacatcatgctctgtactacttttattactatagcactcattctgtttaaagactttatcttaacctccaaataaaatgcaatacaccctaaactgttcacaaatcctaaaaggaatgctagaaactcccattttcctctataaactcccctacccattaaaatt

SEQ ID NO: 240741 - DNA, 368 bp, Gossypium hirsutum
  unsure (1)..(368): unsure at all n locations
ntttttacaatttatccanctctcatcaattaacatcccaatttaaaccaatctgggtgagacttgtctatatatatccacatacccttcccctaattacatacctatcacataccaaacacttgacaatccacctcaatgcaaaccttatcacaatccaaactacaattctacacacaaacatcatatataactatgaacaatacctctatcctactatcaacttatcacacatctaactatcttatgtccataaaatcctgtcctttatgctttaacaacacaacactaattcatattgattaatcattattaattacacacgtacttacaacatccccactttttacaccatctcttaaacaatt

SEQ ID NO: 240742 - DNA, 216 bp, Gossypium hirsutum
gcgacgcacgcgtccgtcttacttaagcatatcaataagcggtttaaaatatacttaccaagataaccctattggcggcaaactaacctagtaaaacccagcttaataatcgatcgccacacccttaccatttgaatctttatgaatcgtgcacagcgacaaaccaatcccaactactctataaattctcgccaaacaacatgttatctccttccc

SEQ ID NO: 240743 - DNA, 295 bp, Gossypium hirsutum
ctcacgctttcgaagaaaactaacaccatttattatatacactccttttctttttcaagtcgtgtggtattttttggggagaaaaaaactttattattatttaacattgcgatattgtctccacccgacaatctgttggcagccgcttaccgaactccatcacctaatataacggcggatcctatggtgaaacagttactcgatactaactcctacgacatgtccatacccttcgaagaccatgttcaattcgcttattctcaccataacgataaaaagcttactccctacatca

SEQ ID NO: 240744 - DNA, 195 bp, Gossypium hirsutum
gtgaaagggaaaggatggcagcacaggttttccaacctgcttatctgatgccaactgtaaggatctatgaagctggactgaggtacattgtaattatcaacacctctacatgagaggaacgcaaaaatgtttgaagaagctagctcaccattgtacatagtctatccatacttgggacccagcggagatgatcaa

SEQ ID NO: 240745 - DNA, 277 bp, Gossypium hirsutum
gacgcacgcgtccggtggacctcattcaacctccgagcccactgtccaccaaggccctcctacctctgcggcctgcaccaacggtgtttgcattagtgcaatctctcttgcccacactttcttcgctggcgtttcggcttaagaaagtgaagcgaagtccagcttcttcgggttctggatcatgattcttccgaatctatactttcatgctctcttttcttctttcgagtagcgacgacttctcttactctatattgatcactgcaccctacttttt

SEQ ID NO: 240746 - DNA, 265 bp, Gossypium hirsutum
gcgtacgcccacccaatactaccactcatacgcttcgaattcttccaatccaaaaccagtaatcgtggagattacatactaacaacattctcaattctactatctaaccctgctatcttgtctccatcgctccacttccacgaaaacacattaaagaaatatgacaccttatatcacttcattactctatgctataccagccattgatacaaacaactcaaatcattccaaacactttgcagaccactctcacttttcttatact

SEQ ID NO: 240747 - DNA, 206 bp, Gossypium hirsutum
  unsure (1)..(206): unsure at all n locations
gcgtacgattactatntctaccacacacttcttaatattactactttcaatactcactctcggcacgccttctttttttacctcttactcacccctctcttctaacccccctactctcttttataaacctcctaataccaaacccccaccttattaacatacaccccctgtctataaaccaccaaataaacacaaacctcttccta

SEQ ID NO: 240748 - DNA, 309 bp, Gossypium hirsutum
actccaaccgctatcctcattccacctaaaaagtacttactgtacaaaaactttctgatttcgaccgaataacgcatcgatggactgaatggtttacaataacacccggatgcgccgttttatctgccaacaattctatctaatttcttgctacgaaaaaattacctttccgaccattttcagtgactattgccctttcttttccttgacaaccctttctaccttccttgtccattccaaggttccaaccctttcttaatcttcatttttttttttccaacccttactaaaacattgtccacgcccttc

SEQ ID NO: 240749 - DNA, 391 bp, Gossypium hirsutum
ggatcgcccatcctttgcttctacaaatctagttattgcatttcttattgataaggctatttaggcctatgctgtctctattgatttgcttaaactatatcacaaagacccttaatttctcattctccatacctatgtaaacatttacctacactcaaattaaaaataatgttttatataattcccgtccattattattatcctttccgttttattccacataaaacgtacttgttttcttttaataaccattaaagaaaaggatccacctgaaaattagcttaaaatttaaacccacaattttaacccatcaatttaaccctttaaccttcatttaataatttcttccaatattaggtttcctacatattaaaatttgatcaaagaaaac

SEQ ID NO: 240750 - DNA, 263 bp, Gossypium hirsutum
cgcgtccggtgagaagcgggccactgaattggtgaaacaagatgagaaagttaccgtgaaacttgaaaagtcgggcattgaacaatccaaagctgtagactctgctgttttgggcaaatacaatctattttgtactttatataattgctttttgatttattgtcttgcatgaagtgatctactacaccttcaatggagagaatatttgctttttgattaaattgtaaagttgggatattgactaatcttaatttatcaaatta

SEQ ID NO: 240751 - DNA, 319 bp, Gossypium hirsutum
cccaaaccatctacaaaggagggcgcattgtcatctttggtatcgtgcaccctgaggggtggaataattcctacatttcggacccattctccttcttggaactcgatatatagagcttcttataggacatgtcccattgacagctgaaagtatgtacgttacatcaatatacctatgtactctacatgcctattactattaaatatgtctagattaagatttgctgtctgactgaacacttgctgatattatattattcacgcctcattatattgcaaagagcactgctggtcggccttctcttaagattctagcttac

SEQ ID NO: 240752 - DNA, 148 bp, Gossypium hirsutum
atcaacttctaactttcaactgctcagacattccttttcgcttcgactattacctagtccatttcctttcacctacaatccttttcctatcaatttatcaaatctaaaccatctccatcttcatctacaaccacttctaaaaaacaaa

SEQ ID NO: 240753 - DNA, 391 bp, Gossypium hirsutum
cccacccgtccgcgaataatatctaatgccctaacttatccattctagcctatggtcataatgcctacactttctgcttaagaactcttacaactcaccatctttctattaaatccaaaaaaaaaacaattactcatatatacatacttaaccttaacccacaaatttcttccaatacctttaaaactatttccgcttcctttcatttatacacagcatttggtttcctccaagaccacctttttatcctttctttaactttaacaatcccaaaacccccaaaaatccaattcataatttatatgacaaaaatgaattaaaaattaacctttctcataatccttaagtaaaaacttaactttaatacttcaaaaattccatttatattttt

SEQ ID NO: 240754 - DNA, 361 bp, Gossypium hirsutum
  unsure (1)..(361): unsure at all n locations
attccaagacattttccattttttttttttgatcttaaaagggagannaacnagcgatagagttgtatataaatggctagaatcattctctaaaccataaccactaacatcattttcaaaatctcttaataaattataggcacttcttactgttaattctccttaatactctccccttcataccatgatgtcatccttaggctcttttgcaattaatatacataaaattttctcatatatcttctcagtaaaagtagctttcattaattcttttttccattctatgtttctttcttcaattacatctgcaactttatattcctgcaaatgcgataacctgatatacttcttaaaataaaat

SEQ ID NO: 240755 - DNA, 125 bp, Gossypium hirsutum
cccacgcgttcgctgacgcgtgggacgaaacagttgctcgattgattaatgagaaagaacagagtggttgtgtacttaagagtgcactgtccaggaggatggtatctggaaataggtccaaaact

SEQ ID NO: 240756 - DNA, 317 bp, Gossypium hirsutum
  unsure (1)..(317): unsure at all n locations
ccacaaatatttnaactaccaacatttgcagattcctttaccatcaatcttcccggaactcattatccatttaaaccatcttctcctntccctccccttatccatgactatacaccaccaaaaacatattccccttaacttgatactatcactaaccaaccacaactaattcacaatacttgctatctcaccccctctaaaaaagcaatgaccttaccatctctaattcatccactactaacaactaatgtatataccttgcatgaacccatctatacactgtcccttttcatcaggcatcatcatctttaacctac

SEQ ID NO: 240757 - DNA, 346 bp, Gossypium hirsutum
cccacgcgtccgattacatttatctctttatgaattacttgacttaggggagagtgttcgagcacatattcagggtctcacccaagaacttatttcattgctacctatttcaaaatacaagtgcagcttattctcaaggaagaaatcaaggaaagagatgataaactaactacactagattacggaccaagaacaatttgcagaaggcacataatggctgtctcctacctctacaaataccatgtgggaggcattgcagtagcgaataagaatgatattgatcaacatgcaattgacaccgtatatgctctgaatctgaattcacgtgtgagtttcagatatttta

SEQ ID NO: 240758 - DNA, 315 bp, Gossypium hirsutum
  unsure (1)..(315): unsure at all n locations
gcgtccgaccacgcctacnaccacacatnctaattcattttgagactctctaactaagtcatatacgcgtatcattgatttcaaaaaacaccaaaatttataatttccatattcttaaaacccctaattgttccaattatggacatctcttcttagctcacaatcataagccactgaagaaacttcatatacatggatggagaactaacacgaatgatgattatgcatatgattgctgtacccaagcattaatctaatttacaagaacttgttttgattgatgcaaatgctacccatatgaccttatcacccatt

SEQ ID NO: 240759 - DNA, 384 bp, Gossypium hirsutum
gcggagaattacatactaaaaaaagaggcatacatgtacaccatatttgatactactaatgcagggggtgcacgctctcattagggagggtaagaatgggctctaagcacggctgatgctgtacactaagaaaggaaaacgaaagcttaatcgttactgtttttacaggcctgtttatacatacctatcacagtggaagatcatgttgttgagccgatagatgacaaaccttacctcacggtgtctaagagcaccataaattgtatatacagttaaataatctacctaaacagtgagggctctctctcgcttgttagtggtgtgaatgactgtgacattgtcaataaaaatctcccgtgtatgtgacacaattattgtgctata

SEQ ID NO: 240760 - DNA, 371 bp, Gossypium hirsutum
cttccggcaatattgcttgatattgatatctttccttctaacctcttgagtcttgtttcattctttcactgcaacttaatactttacttatatcttctgtcattgtcctgtattacatatatatatggctagaattcatcaacttaataaccaagtattaattttatcatgccttctacgttcaaattaaacttcatttcttccaaaaaaaataatcataaaataactattttaaaatgaaatctataaaacaaaacctatatattatttttaaaaaatttaaaattaaaaattttctcttataaaaaaagggcctccccttttataaaatccaaatttactaacccttccatgctaatttataatttttt

SEQ ID NO: 240761 - DNA, 293 bp, Gossypium hirsutum
atcacttatagcatacaatgtgtactttcagcaatatgccttcactcaaaacaaccactgggagtcttgatgctgcctgtagcgtgaacccatccttttggcactcatttcatgtaatgcaaacacctcatgacacctgtaatggttaaacctcaacaaaaaggagttactataataccttgcttgtcgtatgatataaacttattactctataccagaattaatatcatctaacgtacttgccacaatcaaagtatgattacacaagtcaatgtatataactcaatactatt

SEQ ID NO: 240762 - DNA, 350 bp, Gossypium hirsutum
gtccggctttaccatatatattataaaactttatttattaatgcctcatctagggacaggtttttatcaacaaaaccaacaatcctcctttatctctttctccacaatccaattcattaatgacaaccaccataaaacctctattttcatcctttctatcacccaccacataaacatttctctaattaaaacactaaatgtttcttcattaaccttcactaaaacaaccacctcaaaccattgataaaactaacgtttaatccttaactttataccaaacttctcttcaatcaacctcttaacacaacacatttcttctacaaatttcaaaaaattctctttacacattt

SEQ ID NO: 240763 - DNA, 321 bp, Gossypium hirsutum
  unsure (1)..(321): unsure at all n locations
attgtctccaatagtgtattctcttactacacgttgttaaagaattttgcaanactattgtcaaacttgaatactgtgtggaggatatagattgatagctgataatctaagacccacatgaggaaaaagtattgataaaagttaccccacattgtaaacactgcagccacgaactgcctatatgcttcatgcactcttcatgaaaatacacagatatatcctatgcatgtcggccataaattcacaatggcattagctcacacatttaatttggatgggacacctgatactggctatattaatacgacgaggaagtctata

SEQ ID NO: 240764 - DNA, 301 bp, Gossypium hirsutum
  unsure (1)..(301): unsure at all n locations
gattcgacaaaccgcacgcctgcttgaaaggcctacactttttgcagcattggttcaagaggcgccagggctctttggactataaccaaatcttgtggagaatttttcactcatagattacaggtgcttaaactcccatagctgactataatttttacgtaccaaaggtaccatgtaagtgctgtagtttctccgatcttactgctaattaacctaagcatactttcagctatggagaatgttctatttacaattatttagcangacattatgggtatcattatataaatttattgcttta

SEQ ID NO: 240765 - DNA, 354 bp, Gossypium hirsutum
cattactaataaaaaataacatttttaatctttattcaaccaagccacccacagaaaaagttcatttatactatgaccccccatctctcacctaatctttttcaaaaccactttttccatccttcaatacccacaaaacaccaccttcaatatacatccatacatagttccaaaacacaaaaattcactttttaatattatccaccactcaaaacacgtacttcaataataaccaacatgttaagaaatcctttaacactcacctaatcctaacttactacataaacaacaattattctctacaacacgcgcacatcaacaatttacctctagatttattaggttaatttaccc

SEQ ID NO: 240766 - DNA, 231 bp, Gossypium hirsutum
  unsure (1)..(231): unsure at all n locations
ccgacccacgcatccttncacctatctattccgaaattttcctcatatatgaacaatatctgttcagaggatccattgacagtacttatgtacctcatcgcactatttcacctcctctctttccctctgccttgaacagtacctatacactctgttcccgttcacttataaccaaaatatactctcagataatttacaactatcaatacttaggattaacccgtcgagact

SEQ ID NO: 240767 - DNA, 373 bp, Gossypium hirsutum
  unsure (1)..(373): unsure at all n locations
cattaattttcttgacatcttatatatagnttttacactctcattaccattagatcctttctcttttttttaaagttctcttaaacattaatcctttttcacattacctaccatactttctcttaacatcattatatgaaatcattattgtcctatactccaatttctagcctctaataaaaaatctatccttattattatcatctttcttataacaattaatcctaattcattcaaatctactaattatttcgtccttttataacccacattcacaatttctaggccttcattaattcatactttttgactcattaatttcaaaactcttaattcttttctttaactcccttatttttactctttcttttcc

SEQ ID NO: 240768 - DNA, 406 bp, Gossypium hirsutum
  unsure (1)..(406): unsure at all n locations
cgaacacaagccaaanggggacaagtgctatgtttaaaagaccancatccaataatanantacgcaacaaaaaagctaccatatgcatatttaacccatatacaaccaactataagagacgctcaaaagcgtaaacatccaaaaactcctaaaaacacttacccaaagcttgctcaaccacttctcacatacatacaataaaatccgaccctaatacctgatttttcagaaataatatacaatcttcgacaaagaccaaaaaaggagggagaccatatcaaacaaccacaaaaatatctaccaccactaacaaaaaataaaaattttttcctcaaaaacaaaagttcacctaaaaagatccactccacccaaaggcatatattataaataatctataacctaccac

SEQ ID NO: 240769 - DNA, 231 bp, Gossypium hirsutum
gtttaagagatgatgctaaatgtgtaataagttatgcgtcaatgttaatggtagtataggggggtattggtttcccaatattaatccatcttcagttattaggttatccatgaaaataacgggaaggtggtcatggaaactatatagagcttaaaattttcagtatccgtgtcattaagcatgtccaaaacagtctatgcagcttactgaaactgttccttctcttcctcc

SEQ ID NO: 240770 - DNA, 302 bp, Gossypium hirsutum
caaagcaaatcacatccatattttccataattttctaaacaataacttttttgagcactgagtcgggatcttcaggcacatttatacaattacgcttctcctcaacgagtccatgaaatactttcccaacaacctcaacatattctccatacttgcgttgactgaatccaaagataccatttacattaatgtacgagatgctacttccgtcccatccctcaacataggttatagacttaaccaaacgcttagaatatcttccaaattgaagaaactacatgaccacttaaaacactttcact

SEQ ID NO: 240771 - DNA, 304 bp, Gossypium hirsutum
  unsure (1)..(304): unsure at all n locations
aacaaatcactcccatatttaacattctttataaaacaacnacctctgcagctcattcgtgtattcttaacacacatntacacatcaacgcttctcctcatcaagtccatgaaatgtttacccacaaaccacaccatgtgcaccatactttctattacaagattcaatgattccatttacattaaactaaattgtagaaagatctgtccattctctattgcatgtatatgcatcattgaaacgctaaaaattcatttcacgttattaaagcaataaaccctaattataattttttcactttcat

SEQ ID NO: 240772 - DNA, 375 bp, Gossypium hirsutum
tatccaaccatcttggccgctcggagcatataatcaaatttttgcattttactctccttgtcatctattgtaaattctcaaattaacttctgtatattgcaacttgtgcatgtaattcaaagtgataaaactatgctttactgtaaaaataaaaatcaaggcaaattttgttaattttacttaaacttccactatcaaaccacctatgttaggcattaatcttagatatggtaggtaacaattgtgctttcttatgataattttactttaaaatgtcttcatttaaaaaattaccaacacacttttttttttaaagcatttttcttaatgtcaaactcatcctctttatgttaagagcatttttattatttaaaa

SEQ ID NO: 240773 - DNA, 273 bp, Gossypium hirsutum
tctctttattactccaactatacgtacttccttctataaactcacaaaattctataccattattctctccatcttctttatctattatctcaactctctattacatttccttaatcatttcgcttcattcttaagaaatatataaccattctattaaaattttcacttaatacactcttttctctttaaattatttaataaacctctacctcatttaatttatacaatattcccttacattttaattacttttaaatatttattatattattt

SEQ ID NO: 240774 - DNA, 381 bp, Gossypium hirsutum
cgatgtttttgtgttcgtctttttacttctttggcttatattttctcgacattttccggcttcgttgttttctaaaactatggcttcaaccttgctactgtctctgctttttatgattcatctgattgctttctcccttgctgttgctgctgatcaaaggagaagtactgcctcttttggcaataatgtgaaataaagttattgcgtttatgatgaagatattgcaactggtttggacgctaattcatatcctattccttctgcttaatcatatactaataatggtgacaagtcggtgcttatgcttttgaaaggccatgataccaatttcatctagagcattgtcacttgttctgttcatcacttgttagttgttctttt

SEQ ID NO: 240775 - DNA, 199 bp, Gossypium hirsutum
ggccgacccacacgtgcaaacctacccctaacccaattctatccatcttctcctacacatcaacaaacttgtcctcgtggaaaccctaattaaccttaccaattccatattccttgaaatctactatacaatctacaacgacaatgccatctattcaaaacttgttcgtcactttaaacatccaacaactccttatctt

SEQ ID NO: 240776 - DNA, 246 bp, Gossypium hirsutum
  unsure (1)..(246): unsure at all n locations
gacccacacgcntncncagaggttaaacaaagaattaaaacatttttcttgtcacataacaaataagagcgattgcatcatatatttaccatccacaatatatattccaatagaaatccaagttttttttggacgaagtaggcatgccaacggggcttttgccacttatagacatctaataatgtgtttacgttaacgacacatgttttctgtggctcaaacaaaaaaagagcatcacccacaact

SEQ ID NO: 240777 - DNA, 313 bp, Gossypium hirsutum
gcgggacgcaatcgatataatccatattagtttggttctcgattccatttcttctgtaacctgagcttagaaggcagtagaaaagaatctgctttgagttggcttttgttcgaggctaaggatcagccagtagttttgttaaaacagaaattatgggaagtgttgtaaactgtcaaaaaacttactgacagatatgggctctaattccaacgactaacatatattggccattgcatttagattaaaaaaaaaaaaaaaaaaaaaaaaaaataaaaaaattaaaaaaattaaataagattacaataaaaataac

SEQ ID NO: 240778 - DNA, 320 bp, Gossypium hirsutum
  unsure (1)..(320): unsure at all n locations
atttttaattaagggtcaccctcctattatttattttnatcttttccaaactttcaaaccttattacttttacttcatcatatatgataataaaacaatttttatcctttttaccaaacacaaccaaatttattcatttaaattatttataaaaaaatatcctcaaatttacactcaaaaattcttaccatataacaacaaactatatatcttacatccttaaacacttcaaactttttataatattattttttaccacatacataaatccattggcctttcaaccatttattatctttttattcaaaaaattctaaaaa

SEQ ID NO: 240779 - DNA, 222 bp, Gossypium hirsutum
gcgtccgcttgaacttcttacatgagattctgtgttactttatggtaattggtacaggaggtggtacggccttatagatagacaagttcgcaatatgataatttggactgctattgcatccaaaaaaaaaaaaaaaaaaaaaaaaaaaaaaaaaaaaaatataaaaaaaaataaataaacctaaaaaaaaaaaacaaataaattctataatgtccctgcttt

SEQ ID NO: 240780 - DNA, 160 bp, Gossypium hirsutum
ttacaaaaaattccttttctttagtcaacacctattcttcaatacatatttatctatttaatcaactttacaatgaaatttacacattatttaccctatcaatttcatctatagatttttagaaactacttctacattcctgataaatataaaatatata

SEQ ID NO: 240781 - DNA, 385 bp, Gossypium hirsutum
cgggccgaccgcacgcgtccggccaagcgtacgtccacacgttcctgactttttttcatgtaaaaccaacaacgggcctgtcgagacttttaccagatacatgcttataacaaacactccttacacaagtcataacactcattatctcaacacccatgcttcatttcacacatatctatctaatcaactgcacatctaaatctacagacttttcaacgtaactataactttaactgatccttagatacaacttgcatttttctgccaaatttaaaatatatatcctcacaacagaacggaatacgactaatctgactctacaacgtcatctccaacaattaatgacacattatcctattctaatataatatatgcccaagtaata

SEQ ID NO: 240782 - DNA, 371 bp, Gossypium hirsutum
  unsure (1)..(371): unsure at all n locations
gaagacccgggccgacgcacgcgtacggttaatgatcatggctcccaaatctgtccagtatacaacacgcanagacttcgggcatcgtggtggtgttgtttctagtacttggtctggcatcaggatcagtcatagcttggttctgggtcatctgatcatcaaccaagatctctccaacaggtggccgctatgaatttgtgctaatgatgtttttacctttgtaaagtttatctaaaagtcgttgtttgtagcagcgtttttcttcaaatcgtatgatgaatactgtgcctgaagtgtgcatatctgctctcaatgtatgcctgtatcttaaaaacatgatgaaaaaaaatggaaacatttggcttattaat

SEQ ID NO: 240783 - DNA, 394 bp, Gossypium hirsutum
gggggtatcgaagggaaccccttaacttttcttttcacggaaagcacatcctatgaagatcggtgtaaaaatacaataggcctcaacttcatggaaagcccatgaaaatcgagattgtgggaacaaacattgctacccctgctgcaccaacagttgccaatgttgcttttggaagttctaatggagcccctataggtggccgtggcaggggtggaggattccgtaagcaacgtggtgtttctggaggccgtggctttggaagaggccgtggacattgaatgggccgttgagaaaaggtttcggcagaacatcttgacgctcatctataaaagtatcacactgaagcaatgcaaacaaattgaagcatttctcatgttctgttggttgcgtttta

SEQ ID NO: 240784 - DNA, 341 bp, Gossypium hirsutum
gtgaaattctgacgttctgcttactctttttgagaggtatatttgctgcattatgcaacggaaagattggttcttttggaatgggttatccattgttcatgcctggcggccctgctgattatctatcttacccaattttaaatcaatgttaagagaatagatatattttgatattatatttttaattttttaaaacaatttaaatatatatactcattttttgaatataagtgtaaaaaacatgaatacttgaaacataaaaaatagaacaaatgtttgtttcaaaaaaattgggcatactggttctattgggacatcaagatcaaattattcaaaaaaga

SEQ ID NO: 240785 - DNA, 402 bp, Gossypium hirsutum
cccacgcgtccggccatttcttgcttcattcgactctgacattcctccccttcatccaaagtcaggtggcttgggacgagagagaatcaaacaaccaatcggcttgggaaggggctgagtgggcccttactggttcagcgtgtgagaaggaggtatgccgaaatagtgcagtacaataacatcaaatttcaagtgtgggatttaggtggacagacaagtatcaggaagaggagctgagaggagcagcagttcttatttttcttatttttgcaagtaagcagattggttgaaggtagcaacaagaaggggaaaaatatcactcaagggtgtgctaaggtaacaacaccctcccaatgtctttgttgtaaagtggttatgcgttcaactttggaaagatgaaat

SEQ ID NO: 240786 - DNA, 235 bp, Gossypium hirsutum
cccacgcgtccgattttggattgacctcaccacccaattaaactctctcactcagtttatcttagctttgctttgtttttgaagtttcctgtattattcaacaaaacacaacgccactagagtttagtttgatcaacaactctctggtcttcttcttccctaaacaagcaaaaaaaaaaaattatgggtggagaagggaagggctattctttggctgagggttctcaacacaaca

SEQ ID NO: 240787 - DNA, 399 bp, Gossypium hirsutum
cattctcataataacggttacagtgttttactacttaaaagctggatggattgggaatgatgccatctcccctatcattggtgatcatgatccatacatgcatgtttttggacgggaactaaaccatctacgtgctgctgcgattcttatgacattcgttatggttctttccatcctaacatcaatagcaattgttcgccgtatcctaatgggaacatcagtgctaaaggttgctgcaaaggtcataggtgaagtccaagcactgataatttttccagtcataccatattcaattctagcaattttttacatggtctggatatcagctgccctccatctgttcagttcgggtcaggtcgtccagaataattgtaataccaactgctgtgcttacgatct

SEQ ID NO: 240788 - DNA, 364 bp, Gossypium hirsutum
cccacgcgtccgttttttactttatttcagtcaatttcgaggcagaacgtgctcctgccgtgtcagaaggactttccccgctacaagaatggttgaagatagggtcccggttcaaagctttctttgtggaagggctccctagattagcgagaacacgaaaaattagagtctttcagagtcttctccatccgcgtttctacttataatagaagtggcaatctttctagcgcctgaggcaaaagtcaagagaaaaaaaaagaagcaagactggtctttgccagaaagtcgggcatcctggatctatggggacatcaagatcaagtcgtccagtaagcgcttagtttagtggccaaaaaacctcttc

SEQ ID NO: 240789 - DNA, 273 bp, Gossypium hirsutum
cccacgcgtgcgtacatgtttactgaacacacagctaatatatacgctctgaggcatgaacgcatggaattacactcgactgatcagaaaattgtcaagctcaagcatcgactatggagagaaacgggccttatttatgtttctagatcaaaacgtgatgactatatgacacacacacagagtcccatctaacttactactgctagttcaagactctatgtaactacgattttgcgcatactatgtgctaacacatctattacatgctctgct

SEQ ID NO: 240790 - DNA, 266 bp, Gossypium hirsutum
gattgggaatgatgcacatatgcactatcattggcgctcatgatccatacatgcatgtttttaggcggggactaaagcatgtaacgggctcgtgcgatgcttataacattaaagatggtgcttttcatactcacatacatagcaacagttcgccgaatactactagaaacatgcgtgctcaacgttgctgcaaaggccataggtgaagtccaagcactgataattcttatagtcttaccacattctattctagcaatattttacat

SEQ ID NO: 240791 - DNA, 199 bp, Gossypium hirsutum
gccccataacgagaatgacacgttatcggagcgggaattacttgaagactaccctcttttgaggccctcctttaaaattttaccacctccttaggtcctaattagtggtttgtaaataatattagggtttgggaattttaccttagaagggtcctttataaattgactttggttccctttaataaaaaataaagtgggc

SEQ ID NO: 240792 - DNA, 266 bp, Gossypium hirsutum
gccacacatcctgggacgcgttgtgggggctttgaggcaagccaaagagaggtggaaaagggggcgactgattggtaaaaaggacgctaacgaattcggataagggtgggtaggcctctgataggtagccctgtaatgtcgagtgaaagatcgtgaggataataggtggcggatgggggaagatgggatttaggaaatgtaatccccttggaaccaatcccacaatgggtgattgggatgatagcggtgaggccgatttcgataga

SEQ ID NO: 240793 - DNA, 304 bp, Gossypium hirsutum
accacgcgttcgtccacacgtccgctatcttttccattttctctttgcaagccatgaatggtcatatgttccacatatgatcaccttttttcgttgactctgtttataacttgcttggtactgataaaacagagtgtgaacatggtgaattacctacctgcattataaccggactacttcacataaaatgctgtgtttgggcttgcacttacgcacaagataaagaagaggttcttagacaaatcccacatctcatgttcatatatctgtgcctaacgtgctttttaggctttggttggcggcg

SEQ ID NO: 240794 - DNA, 350 bp, Gossypium hirsutum
aggcgtacgcagacagcggccaagatgacgaacaagaagcatgagccgagcaacaacaaggacgccagcaacgaggaccgcttcaacatcaacaacaatatgaaagatagacaagttcttggatcctgacacaagacatggaaagagaggaaagagatggagaatacgaaggtgggagaaaagaacggaaagccccctaagaggcagagattacctctaaatggggcgaaggcggagatgaagaacaaaaagaaaagagaagagaaaatgctagaagagaaaaagatgctggggcgagacaaaggaaagcaaaagggtggtagaggcactcaaggaaagacagacaagcg

SEQ ID NO: 240795 - DNA, 434 bp, Gossypium hirsutum
gaactactcaaacacccaagtaagccactgtacgaagtctatgttttgaatcattataatattctgaagtgatagtgttgtccatacttccactataataggacattctcggaataaatgatccattgttttagctctttctccacatcgggggcagcttgtgttggctgccaacttcctgtactgcatatttacctttgtaagcaaataattccatgatagtctccagattgtaatcttatttttattggtagatttaggctccaaagttttttttttaaatttcctgtagatggtttgtaaagcgtaagctctaaaattttcattagaactctgtaatagtttataggcacttcggaccgagaattcacccgacaattcacccctcagatgaagaagtcctcgtgacatgttcatgccaaagggattggatt

SEQ ID NO: 240796 - DNA, 343 bp, Gossypium hirsutum
ctttcaattcggtgggcctttgtttggtcaaagaaacaatacagaggaagatggggtcagggacgattgatctggtgaagaaagagcttactgttgaagaaagctctttggatctttcgtaagatgttaagacaggtcttggtcttgttgatgttgtgaatggcttgtgcagcgttggagctagaaatttggtgatttatacgcctagaaggcactcgagttatcatatgttggaggaacaggaatctgggctttgcctgttgtttgttatgaatcttggtgtgtatacagggtgcatgggaaccgcgttaaaaaggttcttataactataaagaatctttgt

SEQ ID NO: 240797 - DNA, 321 bp, Gossypium hirsutum
ctcaaacctatgatcagaagaggatgcagttgatgatgtaatccctgctgaaacatgtatgctgacacatatacttgctgaacatgctgatgaacctacacatggtacatcacaccacatataaattactatggccattatagagaacaacggtgactctttcggagcctatgtgctaccgcaaatgttacgggtggatggatgccgcgatggactacgctagatacatcgcatgagatactgaataggaagctaaggctctgctgatagctgccttgggaaagagcgggggatagagatggccgtacgcatggatactgc

SEQ ID NO: 240798 - DNA, 175 bp, Gossypium hirsutum
cccacgcgtccgcaaaaccccatgattacagactatttaaacatgaagctcgtaccccgtggaaggtgatcgtatgatcgatggcggctctgagcgtgactagagcaccccgagacgggagaaagaaatgtctggactgcgtctgctacactttgggtttgttgttttaggaggt

SEQ ID NO: 240799 - DNA, 331 bp, Gossypium hirsutum
ctcttgcagttgtgtccgtcttttgcttgtcttcttttgcaggtacggaggcaacgtggcgggggtagctggcgcgtacggaggctgctggtggcgcaactgctgctagggctagggtttgctgaaatttggcttagatattgggcctatcgggccatcagggtcatgggttagagatggggttgattagttttgtttgggtttataaatgggctattgggtatgatatgtaatagattgataattggaccattcaattaatttatatttggtttgaaaaaaaaatatgggtaaaagaagattgttccaagtgtttgctgtaccatcattg

SEQ ID NO: 240800 - DNA, 264 bp, Gossypium hirsutum
gaatggacatgaccattgcagctggtgccattacctgcgctgtgttcctacatgaaaatggcactgtgggaactaatcatacctttattacatatcgatcactgattcttttctggtttgctttacattttttacatttgataatttcttggtggtgtgtcctgcctatgtgtatacatatacatacatacatacgtacatggctagggtgtagactttgtgtgatttgatttactggtgctatatgtttggacatattataca

SEQ ID NO: 240801 - DNA, 220 bp, Gossypium hirsutum
cggacgaagcccacaccgcccccgcatcggctgcgtgacgtatgacaaaaaacagccaacgcccgctacggggggcgaccccccccggatggcgggcgatccacccgacatcagaagcagggaccaccaacgaggggggtaccgcagaaacccgattcgtccaagcaccctatgaggcagacagctatagaagagggaaacacgcgaaaggcccattttc

SEQ ID NO: 240802 - DNA, 169 bp, Gossypium hirsutum
acgacacctctgcggctgcaaagggaagttttgttctgttaccacaacaagctgcccacggttggatggtaatatctcatggtcatgtccaagcatgatccaagcttccatacttgggactgggagagttcgcccatatgtatcctccgaaattctgcataccgatcgg

SEQ ID NO: 240803 - DNA, 325 bp, Gossypium hirsutum
cggacgcgtgggcggacgcgtttgcaagattatcaaagcgaccgacaaattaaccctatgaaggttgggtatgtaaccattcgcaccgctaacgttaacgaaggcaattgatcaaattatgaccggcaagtctttaattataaataagaatcatgtatacaattgatgtgcattctgggcgaactcatgtatatgttaatgtgttgtatttaaaggaccttgtgtaaaactggatctaatagatatactagctttgcttcattagatgcgatatactcgctatatattaaagggtgttgttcggcactatttcaataaaaaaata

SEQ ID NO: 240804 - DNA, 260 bp, Gossypium hirsutum
gttgactcatttcgtgctctgaattatgactatcttaactaccgagcacttaccgcctaaaaaggttgggagagataccattctcaccgcttacgtcgatgtggggaagatcacaatcggaatcaacggatttggaatgatcgggcgtaaggatgcctgaattgctctgcatagggacgaacttaagctcgttgctatgaacgatacttacatcaccaccgattacatgacctacatgtgataagtatgacatgtgctca

SEQ ID NO: 240805 - DNA, 391 bp, Gossypium hirsutum
  unsure (1)..(391): unsure at all n locations
ttccggtcgaccacgcgtncgccacgcgtacgaccacgcgtncgcgttcctgtttcattgtctttgctcctcaattcctgcgaaaagcacatgcctgctggttacaaatgtgcttaagctcatttccactgtttcctcagcaatgtttgggtttttcttttacgtgttcttttttttctgggcttgtttaatttggtattttgatatgtcaagggttagataaaatggtgaaggtttcttttaccttaaccaatagtcaattctcatctatttatacaatatttgtcatgttagtaagaaagaaggcttctcgccttccaatccataaattatgtaccttacaaatcagtgaaataattggatgaaaaaataagttaatttatatttgttt

SEQ ID NO: 240806 - DNA, 233 bp, Gossypium hirsutum
cccacgcgtacggtgcccacaaagcgttcgatgcggtaccaccttgggtggtaaaccaaatgtgtgcgggatatcatgcactagcgtgctgccacatttgtcccgaacacatgtgtgcaatggcagtcctaggatgatggccaatatagtatcatagctgctcgctgatcaatatcgatagagaggatcagatgccgcatactgatcatgaagccttcgataagaaaattgac

SEQ ID NO: 240807 - DNA, 372 bp, Gossypium hirsutum
cccacgcgtccgggctttctcttcatgcaagaaatttttgatgttggagttgaccatcaaaattatttttggacttcgatgcttcatatggttgtgtttgtttctcaacgatggagcatgagttgatgaattgatcctacagttgctgccaatgtgaaccgaaaatttccaaaggtggtcctttaaatccaagggtggagttgaagattggctctacttttatgtactgtctatggtgttgtatactattctttcttcttctacctttgctctaaggtcttctttttcttgttctattgttcttggttctgtacgtttggagacaatagtatgggtaatgatataaaactgaaatgagattcattttatttt

SEQ ID NO: 240808 - DNA, 289 bp, Gossypium hirsutum
cccacgcgtccggtggtcacaagcgttggatggggtgccaccttgggtggtgaccaactatgtgcagtttatcatgcctggcgtgctgccactgtgggaacaatgactgtgagccatgcgttccaagagcatggccagattccggtcatagatgtcagcatatgaatacccatagagaggatcagagcccgcagaatgatcatgacacatctcattagaaaattgaccagagatgtggagatggtagcaaatctatcagtagctggaaatgtagtgactctactgagac

SEQ ID NO: 240809 - DNA, 328 bp, Gossypium hirsutum
acctgtaaatatactccaattttacgataatcagtttcttgagactccgaagaagcctttctcccaggattgtttctataatttacaaaagaaaaaataataataactggttaatttcgtcaggggctaagcttgtttgctttcataaatagttctatttacattttttaatttattggttctgggtatactaggttctcggtcgatcgtccattttcaatatgtttgaggatgggttgcatggttttttccactggaagggacttgcagcgatacgataacctatgcctgcgccaaagttgtcgggtgcatttcctatagatacaaa

SEQ ID NO: 240810 - DNA, 215 bp, Gossypium hirsutum
gatatgttatattcaatgctaacgaggggaactagcttggtggccctggacgtgtactgactaattggtgagctggccacgccccgcatgttgaacatgaaccacagcatattgtgtcccgaggctcgtgctttgaaccatatgacacttacagtcagccacagtgcgccgcttagagctgggtctatcaggagttctatgataagcgctgcaaa

SEQ ID NO: 240811 - DNA, 235 bp, Gossypium hirsutum
gaaaaacgggacgacccacgcgtacgggcagaaaatatggagcaaaaaggaaacaagcagaaagggggaacacagaggaagacgaaacgggaaaagaagaccacaagaacaaaaaagcgacaaagggggaaggaaactgatagacaggaatcgaacagggaagagacaaacagtgacagtgagagagacagcgacgagaacaaaggagttgaacggagagcccaacaccaacgaa

SEQ ID NO: 240812 - DNA, 129 bp, Gossypium hirsutum
cccacgcgtacggtaaaacccttttaaaaaacactcattttcttgaaagatacgaaagaggtggatttatttgcttgaagcgtggaaggaaagacgatgtaaaagcggcaagtgatagctcagatacct

SEQ ID NO: 240813 - DNA, 341 bp, Gossypium hirsutum
cccacgcgtccgcttatggtggattcatttgcaatgagtgtatacaagaaacgttgcggtaaagctttaatggcggatgctaacaatggtggtggattggaaaatacgaacgttgtaccaatcgataattttgaacacggccatagccattcacttgagatgaatgacgacgtatcatcacaattgttaaggcatcgagttatagctcaggaatatatacatgtttgaatcctcaaattcgatgattttgcttttcaagtctttacattatatatttcctaaatgtaggtattagagttgggaattgtagttcattcagtggtgattggtcttgcaatggg

SEQ ID NO: 240814 - DNA, 233 bp, Gossypium hirsutum
acggggcaggcggacgcgtacgggtacataatatcggtgcagaataaacatgatttcatgagagagaacgtataaccgggggtggctattcagtactcaagaggagatcaagctgataaagcttgagagaaaactatcagatcgccaactgcggatagtgtatcggactatcttcatagtgttcaagaagagggggatggaggcatcattgccaagaggactctgctacaagc

SEQ ID NO: 240815 - DNA, 270 bp, Gossypium hirsutum
acccacgcgtccgaaaagttattgtaatttgcatgcaagttgtctttcgttctatgatttgagtcttgccttgcatcaagttgaattgtaagttttggtcaaaatttgtaattctttagcattgtactgcttacatacataaattcttatatatgaatactgtaaatttgtccggaagctttgcattattggatgaaaattccaaaatttcttgaaaaaaataaattaattaattatttttttaatattttgttatattaattatatact

SEQ ID NO: 240816 - DNA, 134 bp, Gossypium hirsutum
gccgaatatactaaatcatcggttgtttgcctattagctctggtacctaagctcagtttacacctccgttagacaacgtagttttactctagcgttgtctccgggcgcctacagattgttgcttgtgcgacagg

SEQ ID NO: 240817 - DNA, 385 bp, Gossypium hirsutum
aagcaccttccgttcgtgaaagggacggagcatacggagtgactgcaagcgtgggggttcatcaacagcatagccctatcggcttaatcacgagaactactctttgctttaaggcttgtaccacctcaagaaccagggcattagctttcccggagcaaagactgattacgctttcttgcttgaccgagctgatgcatgtgcatcggataataaagggccagtgagtgtcttaccttcatgctgatgaagaatatgaccctgatgcgaatcgtgagtaaaagaaaaaagcaaggctatatggatggaggatctggtgcataggtgtgaaatcttttttttctcatgcctaaagctatttttgatagcgggcattttacaaggggtg

SEQ ID NO: 240818 - DNA, 324 bp, Gossypium hirsutum
aggctttagctcagtggaatcacatcttaccatccatccaaatggtgcattgagcaaatttactagttcgatatgttgaccaaaggaccttatttacccagcttctaaccatgcttcagcttgttattagatatactcttgcatcctacatatatatgctacatttatctagacaaaatgctctggcattattagcaaaccacctcctgaagcttcattgaaaacaccgtgtggacgtgcttttaggcccatcaggcatttgcttgagttgacacatgaaaacaaacaaggagcacatattttgtagtttggaaactttttaaa

SEQ ID NO: 240819 - DNA, 196 bp, Gossypium hirsutum
ttcactcgatcaatcacatgacggatatcgtacatttgctaataatgcaaattggcggggaggatctggccaatccgtccttagggacctatgagtctcccacatatgggaagcccatggcgtgccgtattaaacaacctaaggggaagcccgcaccttatcaacatcctggttataaaccatgctgaggtgaaac

SEQ ID NO: 240820 - DNA, 163 bp, Gossypium hirsutum
cggctaatgctgttttagcagactacatgtcatgcgacaaatggcaggaagaaggggatggcgatgaccaccttgacgacattaagaaggactggctaaacccggaactcttcaaaaaagatcctatgattggtagcttgaagcagacaatgcatacgacaaa

SEQ ID NO: 240821 - DNA, 229 bp, Gossypium hirsutum
ggtgttccagttggtgctgtggttgttagatgttaaagtctgtggtttctttggggacaacagggtggttgttgctcgtcctgtttgtcgtagaaacttaatgtcgcttgagcaaagcatggtattgtatctctttctggatgtgttgatccattttcttgtattgagcaattctttggcttctttaaccatcgatttgttttgccatcgtcaataaaaaaaaaaatta

SEQ ID NO: 240822 - DNA, 251 bp, Gossypium hirsutum
gttcgatgcacgcgtccgaaaaaaaaaaaaatattattttgtaaatattcataataaattaaaaaatataaaggaaaatggggaaaaaatatgatgtaatgttattacttaaaaaatattaaaaaataaatggggggacacttaaaaggacccatctttacttcggcgtgaagggaaagacttattacatttattagggaccaaaattcaatcaaattggtcttttttttacaaggccaaaatcgggaaaa

SEQ ID NO: 240823 - DNA, 424 bp, Gossypium hirsutum
cccacgcgtccgtgttaatgtgttttgctattataccatcaaaattaaacttggatacaaggaaagagtatggatatatattttggttctgtaatattattattaatttggaaaaaggatggtatgaaatagtgacgtcacgtcatctgtacctttttctaataattttatgttatattaatatttttattttaaatttcaggattttatcctaaattttaatattttaatttagatttatttttttaagataaaattctaaaatttaaaataaaaatattaatttaatataaaattattgaaaaaatatacaaatgacgtagcgctattattttatacaatttttccctattaatttgacacaaaggaaaacaaagttgcatatcagttgtgtccgtgcacaattgaacttgtcttcgtgtgt

SEQ ID NO: 240824 - DNA, 274 bp, Gossypium hirsutum
  unsure (1)..(274): unsure at all n locations
taagcaaaacgggaaggaaaggagtggccttgggcacagaaaatatccagcangaggaggaggaggaggaggttagttgacctttgtaaagcgttttagtattgtcagaataaagcttaaatatcaaataaggtattcgattaatagttaaagcatgtcaatcagttttcatgtagatatcctttagttttccaaatatatttggcctgtctatgtacgttgtttgaaatgtttttgcatatagttgaggaatgaagatgcttgtcgttttggt

SEQ ID NO: 240825 - DNA, 279 bp, Gossypium hirsutum
ctcggattgtaatttcggggtgggcgtacgcgtgcgcccacgcgtccggccgacctttagaaattttcaggaaccctaagagcttctcaagggaaaaaaacataatttgatcatctaggatagattttagtttgtgggatctgaataatcaagttttggtataagttgtatttgcagtgttgaatgaagactttgattagatgtgattctctgtaattctgctgaaccttgtaaagaggtattcaaaaataaatatatgtttggatgttggtgtttttt

SEQ ID NO: 240826 - DNA, 221 bp, Gossypium hirsutum
gggcaaagaaagtcacaaacatacccgatatttagagcgccggagatagaagcggcggcaggcataaagtggagaatttccatccacttgctgtttccttcgataccgcttactcaggattagaatctaatagaaaggggtcaacattacgaaattagccaggttcagttctgactataactgcaacctatctcaattggggagaaatgtaccgccctcga

SEQ ID NO: 240827 - DNA, 193 bp, Gossypium hirsutum
ccggaggcaaactatagtgtaataatgtgtggggaagactatatcgatgcattttgagaagctttgacggatggatatgcctggaaagcatgaccgagatattatgcgggttctcgtggaatgttgcttgcaagagaaggtctataacaagttcttcacttgttcttgccgctaagttgtgtgagcatgaaaa

SEQ ID NO: 240828 - DNA, 398 bp, Gossypium hirsutum
cccacgcgtccgcccacgcgttcgcccacgcgtccgttttgcttttattttcttttctaggaagaagctgtaatttaaattttttccccctatacatgagtgttgtattaagacatcatctagagccgtaagagagaatctctacagctcttaggtaatacataaaaaaggtggtttttttggggggacatttcaaagaagaaaggcttcgtcaatagtatactggaatttgaaatcaaatgataaaatttcttttcaaaaaataaaatttttcatataaaatcatttttttttttttttttatcctttttttatttttttttttatttttttatatctaatctttttactctcttctttttttttttttaatcttttatacatttcttttttttttt

SEQ ID NO: 240829 - DNA, 369 bp, Gossypium hirsutum
gggatacgcaagagtctgaatcctggaaagtccttcataaccaacaaataattggtccacgggagagggttgtcggtgcgaagcttcgagggaagaagtgcgtgagttggagtctcgaccaaagaacaaacgggacttgaatatcgtccagaatcttcggtcctaaaactcgacgatgtgaatgaatgatttatgccgtaatcggacgcacgcaagaacagtggctttgactttgtgtgatgacttaagtctgcgactgctctatcaaatgaactttgtgtgtgttcttcactgtttgcatatggggtactggataaacatatttacttttcaggttaaagccgtttatgtttgtatcacatctgtgct

SEQ ID NO: 240830 - DNA, 217 bp, Gossypium hirsutum
gggagatctaaaagtaagaaacgaggatggttttgtggcgccaaccgataatcctaggctggggcaggttgatacccaccagacttcataggaaaaacacccagagtagctgaatgctgagagccaaggggagatctgaattgtctcgctaagcacagagacacagaattaggtgctagaacggaaggatccattgctttaagggccataaacgcaa

SEQ ID NO: 240831 - DNA, 429 bp, Gossypium hirsutum
aatttttgacaaaagacaaaaagtaatcaccacatggcttgaccctcttatcggtgtccccagtggagtcgccaagctgttgacaccattttttttatggaaaacggggtcgacttgggttttgaaaatgaaaaagggagtcgccaccaattctttttgaggtgtgattgggtcaccttggaaaaggttgcttttaataaataatttaattttattaaaacaacggttttggtctacgaaatttagaaaatgggttcgggagtcggttacgtacgaggaaggattagcatcctcgttacgcccagaaattggtacctacttgattatttaatgtctcaatgtcaaaaattgagaacttgaaagaattaaaaatacgatccttgtattaaaatgaaaatttttggaaaaagaaaatatttcacgttaatc

SEQ ID NO: 240832 - DNA, 425 bp, Gossypium hirsutum
  unsure (1)..(425): unsure at all n locations
gtgaacatcatgtttggtggatgaccggatgcagagacaaccttatacacttgtgagggagcaatctcatttctcattttggaatgtcattaaccaaaaacaaagagaaaaaatggaggaagaaatacagacaacaaatttatgacgttgtatgcacttagtttaaacgttgaataagtatcgagttgattgcatttagaatcttttccattgttgtgtagaagcctcattgttgtgtagaagcctctcttatcctgccagaatgatgctgttgggatagtttttgttcagactgaatcttgaaatgttaacataactttaggtatatcttaatcaatgttatcttcagaatantcnnntnnnaaaaattaatattaaaatatttatttttttttttttttttttttttttttattttttttttt

SEQ ID NO: 240833 - DNA, 250 bp, Gossypium hirsutum
cttgtatgtgtttgaaaagtgtttctcgatcaatcaaggtttgtaatgtgatcatgtgataacaattttgcagtattttgtttaagttttatttgcaagtatagctgatggaatgcaatacagaatttgagtgcttgttatttcatggctgaaaatgcttattcggttattacagtagacacgagaagatttagcacaaaacgaataattttattaaaaaaataataaatactttacttatttgccttag

SEQ ID NO: 240834 - DNA, 408 bp, Gossypium hirsutum
gggcggttcaatcttatgaccgagttcccgtattacagagaagtttattacaaaccggattttcgaaacaaaaaggggaaaccagttgttttcgatatggatatgagtgccggagatttcctggctctattttatctcctcaaagtacctgttgaagtgctcgacctcaaggcaatattggtaactccgaccggttgggctaatgctgcaactatcgatatcgtctatgatttactacacatgatgggtcgggatgatattccggttggtttaggagacgtatttgcaatgaatcaatccgatatagttttccctcctgttggagactgtaagtatgctaaggctatcccgcatggaagcggcggattcttggattcagatactctttacgggctagctcgggaatta

SEQ ID NO: 240835 - DNA, 292 bp, Gossypium hirsutum
gtgcggatcaaccttacacccgagagagcgtctgaccctgatgcacacaacataccgcatttggttaccaaactcggaacacgagctgaggcagctcaggatgctgctgccgatgctctgctggtactcaggcaagctcggacagctcgcccagatgagctttatcgagctgaaacattggctgctgcaaacgcaatgcctaaggtggaatacatgaaccaatctgatccacctctacacaaggagaaggcggaatatctgttgcaatgcttgacagacacattggcggtga

SEQ ID NO: 240836 - DNA, 288 bp, Gossypium hirsutum
  unsure (1)..(288): unsure at all n locations
ccgccaaccacaaaaaaaaccgccgcggagcttngaaagagaacagccaacaaaccncacaggangggaaagagcaagaacggaaccaagggcaacggaaggatcgggcgcaaggacgcgagagacgcacgccaaagcgaagagaacgagcccgacgccgagaacgaaccaagcaacaccacagaagacaggaccaacacgaagacagacgacagggagcacggccaagggaagcaacaagagctgaaggtgaaggacacaaaagacacccgcacgagaggaaaagcc

SEQ ID NO: 240837 - DNA, 335 bp, Gossypium hirsutum
cggacgcgtgggtggtaatgttatttttccatctactatgttaggtcatctttttgacaattatcaataactaaattgcttcatctaatgcatactctttatagttgtttctgttttattaaatgcatgcaatctttgagaaaaaaaaaaaaaaaaaaaaaaaaaaaaaaaaaaaaaaaaaaaaaaaaaaaaaaaaaaaaataataaaaaaaaaaatataataattaaaaatataaaataattatttaaattattgggggggcctttttaaagaatcaaattttacttacccgttctttcaaattaaaatttttttttttgtgtcctctaaaatt

SEQ ID NO: 240838 - DNA, 285 bp, Gossypium hirsutum
ctacaacctaaagcgaaggacttttttgagcctcaccataaacggacacgttgctgaatatgccatactcaggacgtgtgccacctgctcatcaactacctccccgggggaacgaacctggcccatcacatcagcctgcacaaggggtcctatattcgtatcacgaaaatcaaattataaggggggattcgatcctatcgatcgaacggcaccttgtggcgcacaaacacacaccttaggaccacgagctatacacggctcgtactcaatccgactatctttttc

SEQ ID NO: 240839 - DNA, 227 bp, Gossypium hirsutum
aaaagaaggaagacagcgagcaagatatccaggaagggggacataaggatgggaagccacggaagaaaaacaaggacagaggaacaaactagtggagggtttgactcaaggacgcagaacaaaatgaactacgggctgaaaacaggaactgaaacttcctggggagtgtatcaaaacaagaaaagcgaagaagggaggattcagagcaaaaccagacaaaaagagac

SEQ ID NO: 240840 - DNA, 320 bp, Gossypium hirsutum
acaaagttgaatctgatgatttatttccggcataagagggaatctaaacctatccttcttatctccttcttgacgctggaaagagagagttgagcttctattataggccttctggccttcgtgccggcatcaatcatcttactcgccgttaaggccctgctttctctttatgatttggtggacacaatcttccgtgggagctcatgcaaataatgtggagatattgcttctgctatcatacattaagcttcggcacgattggaacggacgactgagaactcacttgtaatatagacaacaccactgatgttaggatccac

SEQ ID NO: 240841 - DNA, 339 bp, Gossypium hirsutum
gacttcacccgaatcctactgcttttataggttctttaagcgcaacataaaaatgcaacaccgcgatactttgtgggtaacacaactaataacatgggtggtgaacctgacatgacggacgagttgtggttcaatttggaccacctcgaagaaggttcccagtgtgtcatatatcaccatctaaagctgttgttagatgcgtctatgtgccttgtatacggatgctgaacgggggtctgcagttcagggagtcacctaacatgtcttgttcttgaacaaaaaatattctatcttgtattgggctgcacttgcacatacttagattaaatttgttacttt

SEQ ID NO: 240842 - DNA, 302 bp, Gossypium hirsutum
cacagacgtgcgacaatagtggcaggtggtttatctattccaaaaaaagccctcggtcgcagaacacgataaatatgccagggggcaaaacagcatgtacgaggggaatcacacgagcggaacattgattcagtaagggtggtcggttcaaatcaatcctacaaagatgatagcggatacacgaagcacatataaaactaggccccatacaaggatcagcctgcggaagctgaacatggaacattgttaggaacagaagacgacttgaatgataacgattttgaacaagagctgaaagtttt

SEQ ID NO: 240843 - DNA, 409 bp, Gossypium hirsutum
cacggacgggaaacattagaagcatgctgtttatctgacgcagaacaagccagcgtacccaggactgggcacgaggaccatgggacctcaaagcatgaacaattggaatcgcttgagctgggctacgcagcagtaaaggaggaaggtacacatcgttccctgtaaagaatataacaacacacacgaaggacatataagactagggccactagaagcatacgcaagaggaggcagaacccggaagactgtcagggaacggaagaagcagggactgttaaagagaatgaagcaaaactgactgagatgaatgaagcccgaaaaatcatagtagagactggcatagatgcctcgacaaaacgccatgtgaaaggacatggaaaataccgaggaagggggccaaaatttaaac

SEQ ID NO: 240844 - DNA, 406 bp, Gossypium hirsutum
gaaatgattgaaatttctctgtttttgacatacatgagttcatttttctctgcggggtttcctttcagttagatgattgggttccttgccgaatctacaagaaatccaatgctttatcttcaacaacagcaataggagcagcaacaagtgatcaagatctagaggaagaagaagcagaacagttcattaaagatgcccttttaccagcagccattaaaagcccttcaaccaccaatgcccttctgcctcagaaatcttgttccttctccaacctgttagacgctatggattactcaatgctcagtagtttcctggcagacaaccagtgcaatgggatccggatatgatcccacttcatttacctttgagcagccactagtgaataattacaccattggaaacaaca

SEQ ID NO: 240845 - DNA, 151 bp, Gossypium hirsutum
gtaactcgaaaaatgttagaccacacgcaattgcatggttagcttctacagaagaaagaaaagggaaggagcagaaacacactacaaaggagaatgtgctctcaggacaaaactagaaatggtcaatcaaacatgcatgctgataaagcaa

SEQ ID NO: 240846 - DNA, 206 bp, Gossypium hirsutum
cgaggattgaacaggttctgtggcatcgatttgtatcattcgtcgcgtactctaaaggatgggcatacacccgatgcagacaacgcttatatcttgactctggacccatttcggagaatcaggtcggcgcgacgcatgctggatacaggatgctcctggctgcactgagaatacctcttgaggatggttccgctcgatcacccttc

SEQ ID NO: 240847 - DNA, 298 bp, Gossypium hirsutum
aacgagctaaatggcaatacttggaggagtctaataattttgtatgtatcagaatttattccagtactgaaaagatctcacgaccatataaaaaagaaccgttatggccatatatgaactgtaaaagaaatatatcgggaacaataaatacgttaaacgtggttaccattatcatataactcaccttttaaagcttagaagagccctcgtaatggccgctaccagcgataattgggagcgcaagttcttatataaaatctaaaaatgatggctttaccttgaacataaacttgtctat

SEQ ID NO: 240848 - DNA, 275 bp, Gossypium hirsutum
gaaaagtgctgagtccggtcccttaagtcgttggcctaaacgaaccgccggtcggtccgaatttcctcgacgatttgaagagcggtgggtggtttccggttcggatcgacgcgtatgagacgagatggttaggacccgattgtgcaatggcggtggtgaagaaaggggaggagaaaggaggtgaagtgtacgccgccattgtttttacgagtagtggggaagtggaagggtttttgaagggcttgaaggaatttgggtgggattgggggacggtc

SEQ ID NO: 240849 - DNA, 436 bp, Gossypium hirsutum
  unsure (1)..(436): unsure at all n locations
gtaaacaatgtgtcttcttgggagacgggaagatagcttagtgccgcttgaatgaaagatgaagctgaaatgactggcatggagctcgatccaattgcctcaggaatgtcttcttttggtccatttggtcttccctctgttctaggagtcaaatccatgtatgccaagaaattctgagtttcagatgaaattaaccccatgaagattgtagattatgtctgaaatgatgcatgaatattggtgctgaaagacgagggttttcgaggctttcggtgttgttcagaagctgtccacattttcatgctccaagcaactgcaatcggaaaactggctctgcgcttgaaagctacgaaggtaactactaaacagaggtaacaaagtcaattttttgctaaagnttgttggtgaaaaaaaaaagtattttcactatgaaaaa

SEQ ID NO: 240850 - DNA, 235 bp, Gossypium hirsutum
gccacacgttcgcacagatagatttatgactaatattgaagcaactcctgaggggggtaacatgcttaggcgcatgtactaaaatgtacaagagccgtctttgaatgctacgactatgggtggaaataatggaaaaagttcagatacaaacccatgagctgcttcattgggcaatcaaggagcctccgaagctagaaggacaccaattaacactactacgactgaatgtgaaacc

SEQ ID NO: 240851 - DNA, 440 bp, Gossypium hirsutum
  unsure (1)..(440): unsure at all n locations
cccacgcgtccgattcactaaaaattttataggagaagagacaaacatagaagtcttttctgattaggcagatattctctaactgattgtatatgtacttgcggatgcttatgtttaattcatgattttaattcattgatttcattgttgtgcttaactgccaaactatctccttgtattatctttctaaagtgcatccttttggaattgatgacatatttaagaagtgattgaggtatttcacgtaagctggtgatattgccctagggccttgggggtaaactatgttgtttccgggaaagatttagatttaatgatacttatgattcgagaatatagtgattatgttaaacaattagtttaatttactcagttgctacacctggacatttgccataaaaaagaggtccaggttggcgtgtttactangatcttgacac

SEQ ID NO: 240852 - DNA, 285 bp, Gossypium hirsutum
ctttcatgcagaaccaagtaccattactctattgtcaaacaaaaaaactgcatcggatgtcttgttcaacacagttaaaaaaaaggggaaaagctacatcgaaaaaaccaacagtgaacacaacatggtcctttcgtcaaacaacggacagtcagttaacgctataaagtgaagctaatattgaaaggagggaattagaggcgatggggcatcaataacagcgccaatcatcttaatggaggcacaacggttggaggaaataatagcattaacttcgaaaagaca

SEQ ID NO: 240853 - DNA, 320 bp, Gossypium hirsutum
  unsure (1)..(320): unsure at all n locations
ggcccggaaannccgggacgacggacgcgaccgcccacgcgnacgcagagaacaaaaggggccagccccggtacgnccagacagacaagcaacaggggacagcgcggcgaaaccaggacaccacgaacgaactaaacacagcgagagagagagccaccccgggagagaaaaaaagacgagaaaggcgaaagcgaacgcaacacgagcaaacgacgaggagcgcgcagaagggaagacaaaggcactgggaggccaacaacaagcgaacgtggtgaccaaggcggaggaaaaagagcatgaccacccgccaacgagagggg

SEQ ID NO: 240854 - DNA, 336 bp, Gossypium hirsutum
tggaccggttaccaacgtctgcgacttgtattataccttttaaagcttccaccatacggaagcaaagagcaactggaaaccaaattgctatatgctataaatgcagatgctggttttgatttgagttgagttgtactctacatatgcaactcgacacgtagacaaagaccggctccggtgtcaggtttgaatgaagtatatgtgcacatcggtaatttatattcttatatatcggaattggaatgtcagaaattttctaactgataccatgagagctggaagggggggatgaatggttgtttgagaccaaaaggccaagaaccataacagggagta

SEQ ID NO: 240855 - DNA, 342 bp, Gossypium hirsutum
ggtgaatctgctgctgttccaaaaggtgaatttcaagtgaagctggaggaaaaaggcaggggtgataacccaccctcttcatcatcttctgttaatacaagtgaaattgttttggggacaaacgaaagcctcagctcaaccccccctgagtcatctgcaagtccacttgttaccaaggatgatgatacaacttcaggaacagagtctgcccctgagattaccgaagatgttggagatccaaccaaggaaacaaagaactaatgtactttctgaagaaatggtgtgggtcagctattattactcattccgtggcatgacattgatctgatgggggggtgggca

SEQ ID NO: 240856 - DNA, 263 bp, Gossypium hirsutum
ggagaaaaaataatacatgtgtttatttcgctaaaaacagcttcaaatggttactttcagaccccacatattaaaggggggacttctctcaaaccatgaattaaaaaaaatctttcaacattttatggaaccgtggggtggcaagcaaaacaaaaattgctgtttggcgaataatacacagttatatttctactttaagcaatctccaatttataaagctgccagtggtggacatttgcccatttttcaaatttgaaaaggaa

SEQ ID NO: 240857 - DNA, 229 bp, Gossypium hirsutum
cccacgcgtccggtaatattttgtttttccttttgaagcaaaaactgcttctttgtgggtttccttaaccctttggccgccgttcagcccacgcctcgattccgacggaggggacaccagctcgaagacttcggcgaaaggtaagtctcccttttccccttttattctattattttcacaaaacaaatatattatgaataaaaaattaatttatttgtctttttatcat

SEQ ID NO: 240858 - DNA, 220 bp, Gossypium hirsutum
tgggcaaaatcttgattaccaactctgtacgatggcggaggctgcatagtttgcggactaattcggaactggcggtcgatcattatatcagtgaacagaggcatagttgctacataggggctgcatggagagacctgcacaggggaagacaccatgcaatcaggcagcacaacaggcacgagatttacgagacgtatcaactgaatgacactgatggctc

SEQ ID NO: 240859 - DNA, 161 bp, Gossypium hirsutum
cccacgcgtccgatcgtgttaacccctattacagaaatgaacttgctttttatagccaaaccattttacaagacggtataggtgctggcacacacactgattgcggctcatagcaagtggaagataatgggggaaccggcattgtgagggctgctgaacgt

SEQ ID NO: 240860 - DNA, 261 bp, Gossypium hirsutum
gtgaatgtttaagtccggtaacacctcgaaccctgtcccggctttggatacgggtgaggggagttacaaaaatccatagtgatttatttctacttccattcaggaatcatcataagttgtaataatcctgaagggacttgatgttccaccttaaattgttgacacaccaaatacttggctttgtattcggttatctcctttctaatgcttgactatcaatataataattttaaattattattcatcttaaaaatacatatc

SEQ ID NO: 240861 - DNA, 274 bp, Gossypium hirsutum
gctggacataaaactacgaaactgatgtaagactgtgtatctcctagtgaacacaggacacagaggacagtgctatcgctggataaccaccaccggtctgagcctgtctcatgggcgatgttattctgaagccagcctacgttggtcctttataatatgaatattagctctttgtgcaaatgcggttgatatatgtacatgttaccatgtattgtcgttaaagattaagacttttaagtgtaaaagaccatataacgttgcttatggggggaaa

SEQ ID NO: 240862 - DNA, 281 bp, Gossypium hirsutum
gcggtagggggtgatgaaattgaaaagcagaaaaagaagaagaagaagaagaagaagaggaacaaagagaatgaggaggctatagaggctattgctgaagccggtgtagatagtgcaatagatgcagggagcgatgaaattgagaagaagaagaagaagaagaagaagaacaaaaaaaatgaggaggctattgaagctattgctggtggtgacggtgcaaatgatgcaggggcagaggatgaaacccaaaagaagaaaaagatgaagagaaaaaggaaaag

SEQ ID NO: 240863 - DNA, 247 bp, Gossypium hirsutum
gtattgcccaaggtaaagttggccgtggctttgatgtcagttctgctgtctatgggagtcagcgctatgttcgtttttcaccagaagtgctttctgctgctcaggctgcagtgaaagggatgccattagaggaagtaattgggaacattctaaatggaaaatggaaccatgagaggactgaattctctttgccaccattaatgacacttttactgtgagaaccgggaaccgggtgggatcattaaac

SEQ ID NO: 240864 - DNA, 363 bp, Gossypium hirsutum
gaactgctaaatacgcaaggatttccccttccccattccaaactattaaccccgatgccgatctgaacgtttgactatcaaacgctgcatcaaaatgaactgttgcccatccccttttgaaaacttgttgataacagtcagaagtatggaaggtaggcttatctttttttgctgcttcgagttctgttaaatagtttctaatttttcttgctatttccaatcctgacattcgtttttttccataaatgagttgatttttactgaaccagatttaccatagtccacagcagaataatcgcaactgctcctccgtttctttgaccaaagaatccagggagccatttccataaatcctcatttatt

SEQ ID NO: 240865 - DNA, 205 bp, Gossypium hirsutum
ggcaaacttaatatagtttgttttacttgtgaaggtcttgttttatattttgttgaggtttttggaccataaattagcttatctatggattttgaagctctaagaacctcctactaaatattgcttcatgaacttgttcctggaattgagtttgaattgtttcagttttcctttagtttttattgatgaatgagccactattgtc

SEQ ID NO: 240866 - DNA, 159 bp, Gossypium hirsutum
cccacgcgtccgcccacgcgtccgggaacgcgtacgtgaaaaggctcaagctcaggctaaagggcaggtccctggggctaataaaccaatcgacgagaaacactgccctaagcatgtgtccttccttaatggacaggcgacgtcgcaactgggagccaa

SEQ ID NO: 240867 - DNA, 162 bp, Gossypium hirsutum
cccacgcgtacagacacacgtgcgaccatgcgtgcgttgtggacatcaacagtagagcacggggctaaaggttataatgggcagacctgacatcaacactcagctgaatactgcgtactaagacaggaacctgcacggggttcagaacacgaggttacaggt

SEQ ID NO: 240868 - DNA, 162 bp, Gossypium hirsutum
ccttaagctcactcaaaaacgcgtaagggggcgatattggcactgaaaggcatagaatcatgtgaatgcatgagtctcaataaagaaacagaacgtggttgcatcacccgaagagaccacagctctgacgagaacctggattacgacaggccgacgaccccg

SEQ ID NO: 240869 - DNA, 233 bp, Gossypium hirsutum
ccgaattcaccgatggatccacgcgtaccgcccgcaacatatgttacatcccaggtgatggcctcatcaacttaaatcgctgagacctttgccgcttgataacgcaagctcgcactctacccctgcttatcgtacaggctcaaattaaaacgtctggacaaacagacccatgcaaggttacaagaagaaagttaaagaacccatattggatagtgactcaacaagtagcacac

SEQ ID NO: 240870 - DNA, 114 bp, Gossypium hirsutum
gcgtccgaacatgttaactagatcattgtaattcgagctcaacgtcatgtttttgctagtagatggtgttcacgtagatgaatttgatcatccgttgtatgcggtataagagaa

SEQ ID NO: 240871 - DNA, 187 bp, Gossypium hirsutum
cccacgcgtccgtataatgtacaatagttagtttaagttgaatttccatcttgcaaaagtgttctggttttttttcccctgtattcttgtagatccttgccccttgaacaattcttttacgaaatcctgaattatgccatatgatgtaattttgtttctataaatttgagtgatcctatttgtgttt

SEQ ID NO: 240872 - DNA, 245 bp, Gossypium hirsutum
cgtccggccacgcgttcgcccacgcgtccgcccacgctttcgcccacgcgtccgctttgtctgaaaagactacagtgccgactcaaacacatgtcatgatttctggtgctagtgattttcttccaaaagaggccaagttggccgatagttcaatcgctcttacattctggaaatgcaatggctgtggagcctgaaatggtgtcacatgcagcggcaactaatgtcgggcttaagcggagtttcta

SEQ ID NO: 240873 - DNA, 263 bp, Gossypium hirsutum
attgatggatgggtccacgcatccgaacttaacacgctattggctgccgacaaagagctgagtgatcgcctagtacaacggggggtggactctataaaggtgctccatgacaggatgctggctccagaggcggagggtgtgtgtctgaagcgttaaggctctctttttagcacgcgatgcgatgtcataatatataagaagagttgatgtaccgaagcccgcgtaagtcctttccaaaatgaacttgtaccgtttcacatata

SEQ ID NO: 240874 - DNA, 261 bp, Gossypium hirsutum
ttttattctcattttttgcttaaactttgtttgaaatcaacgttcatcagtataattaatctgtttacagagaatgcaatacttttatatcaattttcctggtttctactgaaaaccctttaattactttttatcatcaatggaatgttaatgtcttttgtgttttttattccaaaatatatattaactcttttttattttttactttttaaattattacataattatttcgcgccccttctttatcatcctatctttctt

SEQ ID NO: 240875 - DNA, 251 bp, Gossypium hirsutum
ttcatataatggacaacttcacaaccgccgctttatattgatatacggtccaacctttctttaattttattgcatacccatctcctttattgcatgcctatccatattttatctcgctcgatttcattcacctttttgttgttcaaaaatttttgaaccattcgttccctctaaaatatgctacttatatattttatttcaaaatattaatcatctactctctacaaaattatattttaaaacaatatttt

SEQ ID NO: 240876 - DNA, 371 bp, Gossypium hirsutum
  unsure (1)..(371): unsure at all n locations
aatttattcagtgtctgaaaataatgacatggtatccaccttcattcggccattgctgggaaataaattgcagagctgaggcaaatggatgaattttcatatcagctccatggcaaagtcagtcaatccacactaatgccatttgaagcagcttgttgctattgaaattgaaagacaacaaacgtaaatgatggagtttccaacaattgaaatgggaaaaagaaaagntgaattgcatttatatatgtttatttgaccctgttggtttggatcatcattttgtgaaaaaattcaatgatagttgcaactcttttatgttgtaaaatattataacatatggattatgacataaaaaactaatgaaatcatgt

SEQ ID NO: 240877 - DNA, 239 bp, Gossypium hirsutum
tcccacgcgttcgcggaggccgttttgatgttttacggtcactctaggctcgtggggaccgggtctagtggcctatcctcttatttgcaacaaaaaccgaatgaaagaggactatttggtccttttacttatccgacgcaatcgtcaaagccaaacacaaacctgaaacggtcttgtggcccgtggctcttgtgaattgccctcttccactgataaacgtgtggctacttaaggtctat

SEQ ID NO: 240878 - DNA, 430 bp, Gossypium hirsutum
ttctgattgcttataaaatagtttgctcattagaaccttcattttctcgtcttttatttatttgtgtaaatcatttttctttgtttagtgacacaacgaatctttgaaaaatgatttacacaaataaataaaagacgagaaaatcggacgcgtgggcggacgcgtgggctcgaagaagatgatgccatcaccaaaagctcccaccgtggtgctatggtggctggcacacaacaatgccttgttctgcagtaacaatctggaatataactagagctccagcttatcggatctggggctcggtttctattatatcggcttggtgtctaggattaggattatgtttagaagcaatcttattcagatttgagtgttagatatgagtatgtattctaaggatgttactctttatgtgcaacttttatgtttattt

SEQ ID NO: 240879 - DNA, 194 bp, Gossypium hirsutum
tcgcccacgcgtccgtccacgcgttctgaatccgccctgccctgtatggatagtatgggatggcggacttggtcaaggttaacttgatagccagaggaatgcgatcctggtattcagtttgttcaaccattaactcatttttgcttccccccctataaatctgcagatcttacctagaaagctatctaggtttt

SEQ ID NO: 240880 - DNA, 238 bp, Gossypium hirsutum
tattgttcccagacctgggttcttgataggcggtggtgaggcttatctttggagtccatagtgtgtcatcattaatgttattatgccttaatgagctataaacttgatgatattttttgttcccttttttccatctaagtggtcctggagttttacctctcttcgtgggctgctttccttcactcaatgttctatctaaaccttatattatccaagtctatagcctgcttctgttttt

SEQ ID NO: 240881 - DNA, 285 bp, Gossypium hirsutum
  unsure (1)..(285): unsure at all n locations
tcgcccacgcgtncggacccttttagggtttcctcaaccctcatatgccaccgctcagcctcgcgccaaggctttcgtcgatgccccgatctccgatcgcgacagagaggggcaccaactcggcgattccggcgaaaaaggtaggttttctcttcctttctttatattttaagcaaaaataaataaaaaaatagcgaaagtaaaaaaatcaaatatatatatgtacaaatgaagaaaaaaaatgaaagaacgataatcgacaaaaaaaagaaaacctttttattt

SEQ ID NO: 240882 - DNA, 309 bp, Gossypium hirsutum
cttccgagtccgggcccttccgttccagcatgctccaataattctgatgctgattctttcggcatcaatgttatattggagagttggccaacaaccgaaagcgaaagacagtcgtcagcctcagcagaaacgggcacgtcggtgaataagccagaatctggacgtgtgccgcctgctaatcaagtaccttcccgggggaacgaagctggtccatcgaatcagcccccacaaggggtcccaaacaaaaaaaaaaaataattttataaattatttaaataaatattaataaataatatttaaaaagggcgg

SEQ ID NO: 240883 - DNA, 344 bp, Gossypium hirsutum
caagcaataaacaccatctctattaatgtatgtaacaagatgtcaccgtctctaatttatgtttattaccgatgcataccatttatggcatttataggaagacacaggtgggttgaatatgcgaaaaaggatcgttatgatgcttctcaggtaccaccagaatggcatggttggcttcacttcataactgaccataccggtgatgagcttttgatgctaaaacccaagaggtacggggtggagcacaaggagaacttatctggtaaggggaatgagtttatctaccattctaaaggacatgcacttaatccgggtcagagagactggacaaggtaccaatcatg

SEQ ID NO: 240884 - DNA, 230 bp, Gossypium hirsutum
atggggtttcctttcccttaaagtcagtgttgtgcttaaatgcttggcatatgctgtaatgagtaaattcggaaggaagaacaaactggaaaaaagaaaatggaaggaacaacttgaagattatatgttggagacattttgctttatattaaaagtaataattacttaatttaagttgtggcccttaatggtgccttttttattgctcattataaaatttaataataaaa

SEQ ID NO: 240885 - DNA, 183 bp, Gossypium hirsutum
atttttctttttgatgaaaaacaagaaaatagttattacatcaaattaaatcgaacaaaagcatcattagcctttttttgttgaataagctttaagacttcatttggagcgtcgtcttttaaaaaaaaaaaaaataaattaataaaaaataaaataaatatttttttaagggcggtcgttttt

SEQ ID NO: 240886 - DNA, 426 bp, Gossypium hirsutum
tgcttccatcatttccagctgttaatacaattttactagctggcgttgctcctcatatcaatcctgctttctttggtcgtggaatggcacctaatgggttgggaatgatgggtgtagctggaatggatgggcctcattctgggatgtggactgacacaaacatgggtgggtggggaggagatgagcatgatcgcaggactagagagtctagttatggtggtgaagatggtgcttcagagtatgggtatggggatgcgaatcatgaaaaaggaaggtctagcggtgccactcgggaaaaaagatcgggcttctgagcgtgagtggtcaggcaactctgagaggaggcatcatgatgagaaggaacgggaatcggacaggcctgagagggagcacaaggaacaccgttacacgtgagagaaagacagc

SEQ ID NO: 240887 - DNA, 338 bp, Gossypium hirsutum
gctaaaaatcctggtttgtgctgttctggttgctttgggagatgttcggagccggctcttggcaaaatgacccccctccccctggcgcacacgcgcaaagggaggatatgttattcactgtgtgagatcggagtaatagttcttttaccatgccctgtaagttcatcttatttcaatgattgatgctagcactgccttaattcattcacgaagcatctgcaataagtttactaaaacaaccccctcaccattttccaaatgaagagaggctttagacatttcactagtgcatgcaatctgtccagcggttcaagattgtaattctgtttttatgaatt

SEQ ID NO: 240888 - DNA, 147 bp, Gossypium hirsutum
ttctcgtcttttcacgcgtccgggatacttcggtgctgatcgatcaattttacagtgacaaaggccactgctcgaatcaatctctggatggagaagtatcggagataaactacgtagacttacgaggaacctattctagtaaaccgg

SEQ ID NO: 240889 - DNA, 255 bp, Gossypium hirsutum
aaggttcatcaggaggatctgttgttttttttgcacgaaccacctctaggggttgggggtaagctcttaggccctttcactcccaatttacagcagttcaccttcttcactgataccgccttctctttagaccataagagctgtcatcgacccttaagtgaccctagaaagcttgtcccctccgtccagtagcttgatttttctaatgtggaaacgcaccctgttggttctcgaaggaatccttcttcaagaaca

SEQ ID NO: 240890 - DNA, 129 bp, Gossypium hirsutum
gcgtgtagatagacatacccatttatcacgttatatttgcctcataatgactgaggatcattatataactggacaatgcctatgggaactggaaacagtgtgtgagggactccatgatcatagtgcacg

SEQ ID NO: 240891 - DNA, 251 bp, Gossypium hirsutum
caaggcagcgacaaagaggacaaggaagtgcaagacaaacaggcgacccgggaggaaacaaaacaacactgaggccccgcaacccgggaggcccaacgctacaaaggcggagaagaaggagaagcgagcgagaaagaaagaggagaaggacccaaataagaacctcgtgagcaaggccaggacacaaatcggaggggggaaaacgacaggaaaccgggcagaaaaaagaaaaacgacgagaacacaaaaga

SEQ ID NO: 240892 - DNA, 362 bp, Gossypium hirsutum
catcgatggagaggttaaagtcgacaaaatttattttaagaagacacctgctacaactcactctgctcattgaaacgttggggtttgttctctgttgctgttcacattttctatggattcgctcaaaagtttgtcttgctaatctaatgttatgtcctgttttggaagccattggtttggattaaattaaagaaaatgaaagtaaaagctaaggcaagctttgaaatggatttttttttttttgagatgttagtgtgcctttacatgaataatagttttgaaaaattattggttttgttatttttttttcatgcagattatcaaaactagataaccccttttttttttctttttataaaaat

SEQ ID NO: 240893 - DNA, 434 bp, Gossypium hirsutum
tcgcccactcgttcgaccacgcgtccgatctcttcttacccaaacctcacccacgacctccatcctcctcctgtcttcagccatcgcctccaccgcaccaagaggtaccatatttgtcagtttcctgatgatcgttcgagaatcaccttcaacctcaatctccctcaacccaagttgtaacctcagcttcagtacctgaagacacgctactgcttctgcagaaaaaacagacgagcacgactctttggtgtggttgttgaaagctgtgtcaaagttcactttcaatctggatccatcggcgcagaccatctgtcaacacagatccgtcttccaggtatagcactttttagatcatcaagttcctttaaatatacttgcacaaaacttgcaatctgactgccagtttagtttaccccatcatgaatgaatttgtt

SEQ ID NO: 240894 - DNA, 431 bp, Gossypium hirsutum
gggaagacaatttggtggacagaaacttccttacaataagaacaagtccatagctggtagtgttgcaatggcaatagctggtttttttgacctctgttgggtatatgtattatttttcctactttggatatatcaaagagagtacggagattgttttcggtttcttgattgtgtctctcgcatcagcacttgtggagtcacttccagttagtaccgagctcgatgacaacctcacggttacattaacctcaatattggtcggcagccttgtcttctgatttaagaatcagtcttagaatgcagaggctagttgtaggagcagtgtttatttggggactgagaaatgttgtaatttagtgtaacatataaaatgttgaaatgtggccaatgacgatattccactgatgacattgaagttcaagtcccgagct

SEQ ID NO: 240895 - DNA, 308 bp, Gossypium hirsutum
cattccttctatctgattattcttttcctttttcctctttgtttcacgtgtgaaaatggggaattgctgcacaagtaacaaaattctatcagaaaacgacgacctacaaggctgcagctgcaaccaacctaatcaactcatcaaggatatgggagatgttacagtttccaaatcggaaggggctgctgatggagttaagaccaacaacaacaacatggagaagaaaacgattaagaagaagaagaagaaggtggtgagattcaacttaaatgaagaaaacagtggtgatgatagatcagggaaacaag

SEQ ID NO: 240896 - DNA, 266 bp, Gossypium hirsutum
tccacgcgttcggtcagctattttactcattttgtcctaaatgtgagcactgggggcttggtggggatgcatgaaaaaccgtcacatccctgttaggtactatcatactgtaattacataatggtttttgtggtgagcaaccaaactgaatcatgcgagacatttgaggattgggaagttcaatacctaattaaagctattaactgtgtaggatcttggtttatctttttatcagtgatataaaacaggtcaccatctatattctt

SEQ ID NO: 240897 - DNA, 430 bp, Gossypium hirsutum
  unsure (1)..(430): unsure at all n locations
cttaaaagggcaaatggacttcctgcaaatagaagtggaatatgcaagttttatggggatagggggtccattccgctgttttatgtggatttttctgcagttccctatagttttatgtatatgcattgcggaatgctgctttgttcaaggcgtatgcaattagttcttgtaaatactgatgaaatatttagtgcatgtgaagaagacaagtcatgtctaacctctgttgtagatttttccaagcgtttgagtggttctaatgtagttaaggttgataatttcgggagcaaaggtgtttcagatcgcgcttccaaactaaaagaaataggtcgaaatggtcactataaacatggtctttcttgcattatccanaggaggaggagtttgatgcggagaaagagagctagaagtccttggctttcggcataca

SEQ ID NO: 240898 - DNA, 275 bp, Gossypium hirsutum
tcgacaaatcgttgcttacgccgccatttttcccatacaaaacctcctgcaatctcagggcatcgggattcccagtgcttacatattacttgcgacactcgtgcttgtcctactgctttgttgggtcgccccttacaagaaagggtagggctcgataggtgcatctcttggtgctcaccccgtcaaaccgcatcatagtgggggcccaaaaggagtatatctctgtaagtgacaaatgatcccttacatggaccggactgatttcgcatgcctat

SEQ ID NO: 240899 - DNA, 265 bp, Gossypium hirsutum
tcgcccacgcgttcgcccacgcgtccgtttgaagtttgcaacttcagtttgatgtaccgtaggcgcagcccacaaacaaagaaaaaagaaaaaaagattactaaaactcaactttgttattagtttaccagcatgtgctccaataaactataagatttgcgatactatatatttcaattctgatatttctttttctctattttcttttaatcctttctgctttcatctttgtgtaaagttttgtgttattcgatgtccttttgtt

SEQ ID NO: 240900 - DNA, 187 bp, Gossypium hirsutum
  unsure (1)..(187): unsure at all n locations
ttatatacgattatgacggtttgttgttattttcagtttgagaatcgacgaccatctcttattggttctggtcacggatcgttggcacgtgccgggaaagtgagagggcaaactccaaaagtagccttttntgtaaagggagaaagagagaaaccttgttacttttatgaagaagaagttgtttgat

SEQ ID NO: 240901 - DNA, 360 bp, Gossypium hirsutum
gtgcggaaaaagttgaacaggttttgttacaagtagatggtgacgttgatgctgctatagagtttctgatagcagaacaaggggctgaagaatgtacagctgcaaatgattcacttacttgtcatgcaaatggttcttatggtaatgatgaaaatggaaacagtgaacaacacaaggaagaaaatgtagggaagacctgcgaacaggatccatatagtgatggcactaaaacccttggtggtaacactcctcggctggatgaaaagaagattccaagaaacaagttatgcccctgtggatcaaagaaaaaatacaaggcttgttgtggatctgtctcagggaggtcctcgactaagatca

SEQ ID NO: 240902 - DNA, 282 bp, Gossypium hirsutum
  unsure (1)..(282): unsure at all n locations
cccacgcgtacgtccacgcgtccgaccacgctttcgaaatttaaaaaaaaaaattataaaaagggtgatatcataaaatagaaggggctaaagatagtaaaaatggaaggagagtcattttatttggaatgaatatggggttcgtggtgatgtattagttgntttttttgggggggggctttttattagattaaatttttcttccggtgttgcaaggaacggtaatagggttttttttgtgggggccccttaatttttattcctgtgggggggggttttaaa

SEQ ID NO: 240903 - DNA, 196 bp, Gossypium hirsutum
cacttctgcatggaccaaaaaaagcccatggttctgttctatacgcatccccatcattgctaggaagctaggttgcgctctagtggagtgcactggggaggttgagcctagaactgcagtcacaatgagacgcttttatttgacaagtgacgcatcaaaattgcaacatcgttcttgccatactgtgggggcctgc

SEQ ID NO: 240904 - DNA, 212 bp, Gossypium hirsutum
cccacgcgtgcttacatggcaaccgggaatgatgttcttccggaccacattctatcgtagcggcgcttggaatctatatggtgctggcggtattcatcgcggtcatcatcaggattggatacctcctgatatgagccatcttgtcagaaattgacagcggttgaatacacggtgcatgtaaagatgcaaaggacttgttgttagaccaagag

SEQ ID NO: 240905 - DNA, 291 bp, Gossypium hirsutum
gttaggctttgggccaattggagttaaaatatgccttaattcttgcttacctaaatcatgggtgattgggtaagttgtatttattagttatacgaacttactaagcttaattgcttactccattttattttccgagttttatattgattcgtgagctcacttggttgggagttgtcagaaactgcctcacactatcaaacacttattttggtacttgggattataatattttggtaaaatgacaatgtataggttgttttggctaatgtacccaaatggttttgttggtgt

SEQ ID NO: 240906 - DNA, 171 bp, Gossypium hirsutum
cgggcgcgtgggctttacgccggatgaaaaacctatggtggtaagaaggacacgagaacatccacaaggttcctgtctatgtagtatgacgctaaccccttgggatacggtggagacctttggggtttacggcgcttgataaaaaaaaaaacgggaagtcgctctacagga

SEQ ID NO: 240907 - DNA, 348 bp, Gossypium hirsutum
cccacgcgtccgatttgttaaagcacttgaagatctctttgagagacacaaagctcgggtcggatatgctgatcttccattaaagatcctttgagcgaatcatgctttgtttatttgccaatcccctatatttgtgcgattcaagtgcaatgtgttagccaagtaacatagctgtatattcatgcatctcaataggccttttttttgtattgtatggttatgatctgcaggttactcttaaaaactaattatcatgtaggcattaaaaagcttttagaagctgtttttattgttaattggggtcaaaaaggatttgggcaactttcaatccaataaaaatttaccatt

SEQ ID NO: 240908 - DNA, 294 bp, Gossypium hirsutum
gcgagcggacagctggaatggggtacttttcttaccctcgcatgggaaaaatgggcggtctggcctagaccttattccgcgcaagctctcatagcattcaactatcttggttctgtggggaacacctctattgtagacgttgtctcgctctatcaagatctgggctagctgggaagccgcaaggacagcgggcgcaggggccaaattggagaagcaaccaagcatgggatgagcgggaactaatacacatgcaaagactggtacacgaggtcgggcaaatattcacctgtcgga

SEQ ID NO: 240909 - DNA, 266 bp, Gossypium hirsutum
tcgctcgaaattaaacaagaatgcagaaaatgacacaacttggggagcagctggtatttctagacgctagcaaccctgccttctttggatggcaaagatggcagcctgataagctgaggaggaatgtttattagatacttgaggggtgtctttcgaggaaagataccatcattctcgaaaaagaaaagccagggaagatcaaggcaagaaacatctggatagcggtttatctccagtgccaggtaatcaacctaactatttggagg

SEQ ID NO: 240910 - DNA, 256 bp, Gossypium hirsutum
gcggcttatgattcgtgtaacataaaattcttcttgaaaatgactactcacctgggaagactcacgagcataggttcctgggttgaaactaatgtaattcgtcttcagtagcattttggagtgagtcctgcattaatgtgatttcagttcaactaagggataaccgaaatcgctattggtttcaaggttgaagaaagaaaaacgtagtcaagaataacccatgtattgtgtttaaaatggggtatgttaaaaattt

SEQ ID NO: 240911 - DNA, 208 bp, Gossypium hirsutum
acggcttcattgacatactgagggatgttcatgcttcctacgaacagaggaagccatatgttgtgtgctttgttggcaggagtggagttgtgaaatcaacgaatctcggcaagggggttctctcgcgtactgcagaacacaccaaacgttatgatggctgctggtgatacaataccttcagggactggtgagcagtggacaacacatg

SEQ ID NO: 240912 - DNA, 306 bp, Gossypium hirsutum
cccacgcgtgcgaaaaccttaaaagaaaaatatctatattctagccccaactgccatggcgactcctggataccaaattgctgaaatttatgtcatgcggaagcttcataaagagaaaatgaagaacgaagaagaagaaagagcaaagagtgaggatgttggatttgcagggaagaaatccaagggttggtgtttctcatcgatgttcaaaaaagttcattcgggtcatgcatctacgataggtcatgtaagaaatgaattaaaagatgatgacaagaacaaagcttgttaagaggatatgacaac

SEQ ID NO: 240913 - DNA, 182 bp, Gossypium hirsutum
gggttgtggtggcgatgccactaataaagacaagggaaagagctgtgatgataaacaagtcaagaacaagctttagcttttcaagcggttgtccaaggacttgtacatgcttcctcagattgctaatggcgaggatactatgaatggattgtccgctgaagttaaagccaccatcattcatg

SEQ ID NO: 240914 - DNA, 289 bp, Gossypium hirsutum
ccacgcgtccggtcggggacgcttctttgaaattgctgacctatccactgtccacgggaggacagtggagcggtgcgtgttttagtgaggtggattgctattcattgtcaggcgagagaaagagtgtggtaaccgatgcaccatttctcgggcatcttaaggctcaaccggcacttattaagcttcaagctcttatgaggcatgtgatcagtaacgtggaggaagccagggctaaaggtaggcaggcaaggaaagacatgatcaatagcttttcttcggaaattgttgc

SEQ ID NO: 240915 - DNA, 381 bp, Gossypium hirsutum
gggatagaagcacatactgcacccgatatgtcaaagcagcttgaagccctgcaactcgcgcatactgatgaaagggaaaaggccaattcacgcatttttcgcagagtacctgaaaagccctatgagctaactttccatttgacggaaaagagcaagcggacctgtgaaagtcacatcttttactaatataacaggcttctgagaggattctttaatcaaccaaaacctgcagtccttaatttctaccacttacaagttgagatttgttccattcccaatggcagaagaaggatgcaagctggaaggacttggacaagatattattcacttggacaggagctgcagcgcgctttagcgtcggaaaaatccctctacatgggt

SEQ ID NO: 240916 - DNA, 242 bp, Gossypium hirsutum
  unsure (1)..(242): unsure at all n locations
gcttcagaagcaaatcgtggtgaagatcggtgaagatttggagcgaggcttggcttgcggcgctgaagtttacccttgaaccctagggtttccgaaattattcttgggcttgggggttaatttttgggccatttgttattgtattttggtttgggttttgggtctgggccatatatgccacttgnaatttgagcccctttaggccctggcaaaatctgttattacaattatatttacctcaa

SEQ ID NO: 240917 - DNA, 254 bp, Gossypium hirsutum
tgctttctcagcccgaaaacccgagacaaaaggcttctcctccgtggacggtctcaacgacggggagggagggctctgatgacgcaagccaaggttcgggtaagcccttttttccccctctcctttattctatccttttttgaaatagattcgaaataaataaaaaaatacaagaatagaaaatcgaaaaagaaaaaaaaattacaatcaaccttttttagctttctttttcggttttttgaattgcttaaatc

SEQ ID NO: 240918 - DNA, 142 bp, Gossypium hirsutum
tcgcccacgcgttcgacagaattagcttgaattttacaaaatagcaccattgtgttccaatagaccgaaggaacacaatggtgctattttgtgaacagaattagcttgaatttcaaatgcaatcaaaggtgatatgttttgt

SEQ ID NO: 240919 - DNA, 261 bp, Gossypium hirsutum
ccacgcgtccgcccacgcgttcgcccacgcgtccttatctggtggcgcatttgccagatacgtacctgtagggcgtcgtttatctgacgatggcaacttggaaaaatttggtatgaccaaaaatgagttgtgtggagctcatatacttgcaagactgccggtggcggccctacatgctctaacgcaacgctgtatgaaaggaagacatgcaaaaggggggggagacacaggcaacaaaagcggaagcaacttaggaggagg

SEQ ID NO: 240920 - DNA, 234 bp, Gossypium hirsutum
agaatatctcgacttcatctcattccacaaagttgccaatggcatcgattggcgccgccgcaagagcagttctccgatcaagttctgctcgcaacgctgcggctcggctcgccccacaatctaaagctgcaccatcgcagtttcgtgtctcctccaggattcctctttccaactgcatttgcaggtgtccagttgaagcgagtttctgcttggaatcgatgctgccgaatactc

SEQ ID NO: 240921 - DNA, 332 bp, Gossypium hirsutum
cccacgcgtgcgcccaatcgtgcgtttttggctgagcatataccacatacctaccggcggggtctcattgcctgcggaagtccactggccataacccggcctgacccaagatgaccttgcaggccgagatactgagcggtacatcatagaatgactgctctctgcttttatgcatctccgcgtgggcattggacatgccctctatcatctagccctggtaatatcagggcaaggggtgtcaagggcgactccgccatcgcaatattttcaaaagcggcggttgcctataaatagactaccctacttactcgtatatacatccgcagacatct

SEQ ID NO: 240922 - DNA, 233 bp, Gossypium hirsutum
ctacgcgttcgggtggggctgatgcaaccgaaagagtgcttggtgccccagcattggctggcttacttcagacactggtgtttacaggtacgaaacgggcaaaaaaaaaggccgcatcacttgctagagtgtttcagaggtgcgagaaagcatacttgcattttggtggattgggtgtttgatattcatttaacaggcaactcaactcttcctaaaagggatccacgattcac

SEQ ID NO: 240923 - DNA, 257 bp, Gossypium hirsutum
ctcctttcttaggtggttgacaagccaagatcaagttctctactttaaacacctaggaaatgcatcacccatctctactttgaaatggcaacgtccttttcttcctctacccttttcaggcccaatcttaattcttccaagtctttcctcactcattcagattgtgcccaggagggaatctgtcgcgtgaagtgtcattacatcaatgttagtgcgcactcgaggagcttggctgcgaactacgccaggattcgcca

SEQ ID NO: 240924 - DNA, 110 bp, Gossypium hirsutum
aaaccttaggaactaagctcaaagagaaggcaggtgaaaagacggaaataagtcctcaataagctgatgacttttcaaaccgacccgggatggaagtggggctcaaagca

SEQ ID NO: 240925 - DNA, 214 bp, Gossypium hirsutum
atactgcgttctcctgaaagcctgacagggaggtgcgagggtctgaggatcagaaagagcctggccttcacccagagggatatgggacatcctaactataactcctccacttatatatcgaacttaagaggacatgtccgaggaggtaccccactgtggccaggactagccatagagacatattgtggtgcgctatatgtgatgaaaactctaa

SEQ ID NO: 240926 - DNA, 101 bp, Gossypium hirsutum
  unsure (1)..(101): unsure at all n locations
attgcctgctnccagataaggtgcangaattcaacactgnacatcaatatagggtctaggggcacactaagggatcggaatcataatacttaaacttattt

SEQ ID NO: 240927 - DNA, 192 bp, Gossypium hirsutum
gttaaaaaaaataaaaagaaacaaaaaaaaaaaaaaacaaactgggcagccacctcaaaagctggcgacttagaaaccctgggatgccacaaacatacatctattattgcttcaccttaattcatttcaccaaccttccaattacaccgacccaacttggaaaaccctaacgacaccaaactcattcgcctt

SEQ ID NO: 240928 - DNA, 167 bp, Gossypium hirsutum
tgggctgtgcaacttaatttgtggactttggtctacgtactgataccattggctgcattagacttacaggatgcttatgtggtattcttggctaacgatcaactcactaagctggatctactaatgggcttatttcaaattcccaaagttttgatactatctgatgg

SEQ ID NO: 240929 - DNA, 314 bp, Gossypium hirsutum
  unsure (1)..(314): unsure at all n locations
cacgcgtacgcccacgcgtncgacgtaaggctacaactgataatccatggaagaatgggcagcttggtcctctctatttacggaacaatcaccaaacagcccaaccggcatcatcaggaccctaccatatgcttcaacaacagcaacagtttaaacaaagattacagctccaccaacagcaaatgaaacatcacgctgagatgacgtttaggaagagtaacagtgggattagcttgaactttgaaaactctagctgcacacctaccatgtcatcaactaagtcttttatttcttccttgagcatagatggtagt

SEQ ID NO: 240930 - DNA, 440 bp, Gossypium hirsutum
cggaacgaccgaggcgaccgatcaaattgttggctcaacttaacttgttcctttcagttcccaacgtagatcatttctctggctcaagtgggcctttgagctccccaagcaaccataagagctttcacacaagttggacgaattaggccaatctaaacaattctatttagccattttagctcaaccatcacctcattaattcaaggctattagaagacatcaaatggctgtccattgacgtctccaaagctaggaatcttcaaggaagcttcaagggacgttctaggaagctacatgaaattttcaattcatttgttttgaaaataagctgactttttagctgctcaagtgtccattcggctagcctaagaatttaactataaatagtttgctttgtaaattgttttggcgttagacaatatacttttaaactttatatg

SEQ ID NO: 240931 - DNA, 349 bp, Gossypium hirsutum
  unsure (1)..(349): unsure at all n locations
acggcagaatcgagtatatttattgcacccaaatcggaggatccttgctctgcggctgcgttgcaggcttactaatgttttccatcgcttccatctccgcattcaacttgttcaggctgtattcccccaccaagttcatgcacttgaaactctaatcataaattacggttnaaaaaaaaaaccactaattttaacacgatattacattaatacgcgaataagaagaggggaaaaggcactatttttgccccccaaagacatatcttgtccgacgaaccatgcggaaaacataaaaaaaaaaaaaaagggggcccccttttaagagatccaatttatattccgcgggttt

SEQ ID NO: 240932 - DNA, 206 bp, Gossypium hirsutum
tacacaccaccgcccactcctgcgcccgctcttgcacctacctaccatgacaactgtgctttgggcaacataagcatgtgggacgcgacaactactaacactcttttgattagaggttgatctaacatgggatcaaactactagagatcctcaacactttcatctgcatcaccgacggcatcatactactaccactcaccttctcc

SEQ ID NO: 240933 - DNA, 291 bp, Gossypium hirsutum
  unsure (1)..(291): unsure at all n locations
actttcttgtttatggtactctatttgcaagncaagtgggtatttgcgtatgttggtgttgtagttgaatcagagctggtnncttgaaccattaaaacgaagtaaaaatttagttcacggactgaaaagaattgctttctctatgcttctgttttacgggttcttcagtgggattttaatctgggtctcagctgcagactggggttatgcagctgctgataaatggaaaagctgggcatttgttatacatattgggagcacttccactttgttcatgtagattatgctttc

SEQ ID NO: 240934 - DNA, 204 bp, Gossypium hirsutum
ccgccgcgttataactagaaatacttgtcttcaatggaacagctctgaccgagatcaataaatttaataggcttctcgttcagtttggaaaaggaggcgaacaactctgaccactccttacgtgacaacaaatacatacacggcgtgtcaagacaccttctcttttccgtgatgaaccactaaaaattaacggagattcagggc

SEQ ID NO: 240935 - DNA, 194 bp, Gossypium hirsutum
cccggtcgaccacgcgtccgatctcttcttgctgtgtactaggaaaggcgcttatgctctaatcaagtaagcactctaaaagggagctttgaaagcggtcaggagtgctccatatccaactataccttcgactctcaactcatacttaaaaaaaaaatgccatctctgaggtgtagatgtctgaccgcctattt

SEQ ID NO: 240936 - DNA, 337 bp, Gossypium hirsutum
  unsure (1)..(337): unsure at all n locations
atactgtnacttgcaagagaaagcacaatgttggatatgattcgttatgtggccttaaagtgatgatgatgatgactgtaacttgttttataatatggtttttaagattgttgctggtagaattctgatattcctctttctggcaatttgttgttggatgaaagtgaagggtaacacttgtctcccattgcggtgtatatatatttttttttttttggacccgcctgacaaataaattatttttggtttggggtagaatttaaataaagttttgttgtcttgtaacatttataatcttttcttcttttatttattttaatttttttttttttttatt

SEQ ID NO: 240937 - DNA, 196 bp, Gossypium hirsutum
  unsure (1)..(196): unsure at all n locations
accgaccggatcaccggtcgaccacgcgtatcgaccacgcaaccccccacacctcatttcagactaccgcanacctccattcacctcagtggatttcgttccctttaagccgctttctacaccatctccatcaatcccttccttcacttttcacataaaggcacactattcttatatttaaatcatttcaccatat

SEQ ID NO: 240938 - DNA, 231 bp, Gossypium hirsutum
gtggaactctggccaaggaaactagccaccgctaagttcttgcttgatgacatgaaagaggtgaaaaaggccattcccgatacaacgattaatgatgtcctgtttgggatagtgtcatgtggactatcaagatacttggatcacagaacaccaaatgccttgcatgaaggccttcgtatgacaggtgtagctatggttaatttaagagcaaaaccagggttgcaggaaata

SEQ ID NO: 240939 - DNA, 300 bp, Gossypium hirsutum
atcagttgcagtgccattagtagagccctgaccaaagaatccaggtttacttttggcatagcgtaaatgttaacaaacggcccttgtatgctaaattttgtggtgcttcagagaggtgctggagagtgtctactagtgttgcttttatcgttcccatttttgttttccttcttttaaaaagggtcatagtctgatagatagaagtccatataaatacctcatagtttttgctttcccgcttttaatattttgttgcgttatattaatagttcttttcccctttaaaaaaaaaaaaacaat

SEQ ID NO: 240940 - DNA, 332 bp, Gossypium hirsutum
atgcctaggggatctgatgttggtggggctccgactcatacatgtgctctagccacggtatgggtggtagcagatacatgggtcgtgggggtggttctgggtcatactactgatattatagagactgtgaggcttctgtatggtgtggagcatttgaagctttggtttttgtacccatggtattggatagaagtatgccaaatgctatagccttcatacattgtagtacaaggtcttttggcataagtttaatgtggaagaggcagcatgctggttcaaactgtttctagtttcacaaacaggatacttgtgattgtgagtattcaagttta

SEQ ID NO: 240941 - DNA, 110 bp, Gossypium hirsutum
cccacgcgtccgaaggcatcctgcactctactactcgccaaaggtattgaaagaagacacttgatttgatcctctccaaataacactcgaataatatcatgttttcaggt

SEQ ID NO: 240942 - DNA, 147 bp, Gossypium hirsutum
cccacgcgtccgttttaattggtgctatttgctttcaagtttacccaattgtatgagaaggggtatgggttttcgaatgatttggggcaacccattcggttttttcagtattgcagaaaatatgaatcagatatgaatgttcattaa

SEQ ID NO: 240943 - DNA, 267 bp, Gossypium hirsutum
  unsure (1)..(267): unsure at all n locations
ctgaacactctntatctcttgccacaactccgatatccgctttattttgtcctctttcatatgcggcatcgaaattgattgtgacaaaactgtccattggttttttccattttttaacagttatggaagtttgtcgactatttttaccaactgaatctaactctaaaatgtagctattaacaaatctccctatttctattccagatttactccctttgttatgcagnctgttattcctatctccccaaatggcccgtactgcaacac

SEQ ID NO: 240944 - DNA, 401 bp, Gossypium hirsutum
atctgctgggatagattgggtgcaagccacaaaaccagcagcgttttctgcttttccgatgatgggggctatgctcggtgacctgccgtcatttgacccccacaacttcagccaacttcgtccctccgatccttctaatccttctaaagtggtacctaccacctaccgccccacacatagacggacttcttcacctcctgatcaagttataactaccgcagccaagaatatacttattagaaatttttaccagcgtgccgaggagaagttgagaccgaagagagctgctactgaacacccaacaccggaacatggatgcaagcaacctatggcatccaccacatggtcataatgagattttcttttggcttttcaatgctcatctaaatgtatcttctcat

SEQ ID NO: 240945 - DNA, 449 bp, Gossypium hirsutum
gaaatgcaattataaggttcttaactgaacagaacataaagattggcaaaccgagtgactggtgtccttggtaattgctgtctatggcttattcttgtaactatacattattggaagtgtggcgactacatccaggtaatctcctatggaggttttaactaatttcaggtgacttacttgagttcataattgctgaacccacaagttctgaaaaccccaaataaagggtgaccccaatttggcaactaaaattgactcaacgattgcgtaaattaaaatcagtgctacaaatttaaggttcaatgaccaacggccagaaagcaaaggagcgagtcaaggacccaccaccatgtggccaacattcgaggtgctaactttcagtcgcgatccatgccactgggcatgctaaggcaatcttgggcccatcgtcaatgaatctttaaaatgat

SEQ ID NO: 240946 - DNA, 386 bp, Gossypium hirsutum
gttgaggtccagccgaaatttctgtattgatatcgtattgctgtgcatagttctgggaatagctgcctatttgtacaagtaagattctatctcatgccttcatttaaaaaagcttccctttaatactaaccacaaactgtgtcctgtattctcgatattcatacagtttactgtagtggaacttgctatactgcgtgcttcagttatatttggttggtgatagatgttggatttttcttagtaatgattttatgtggaaatgctgttaatggattaactgacttgttctcctatttcgttgtttttatcattgagaagtctcccctaattgttcttcatttgcagtgttctgaagaagtgaagtgataaaaggataaatctatgag

SEQ ID NO: 240947 - DNA, 317 bp, Gossypium hirsutum
tcggtttctggatttgagggacgacgcacgcgttcgcttactcgttcgcccacgcgttcgatttcctctgacagtacccgtaaaaagggaggcagacgtgggataaggctgtgattctttgcttcgtatctgttgctcactgttgctgctcctccaatatgcgtggaatttcttttttaaacaatttttggtttagatagaagcttgttttgccctgttatgttgctgcacattggttccagaatggattttgatacggaatttacatgtggtactcttggtagttaagctttttattgatttcgatattaccttgg

SEQ ID NO: 240948 - DNA, 329 bp, Gossypium hirsutum
ggtcacatcctgacacgcgtccgggcgaggagtggaatgcccttgagcgttaaatcaccagcgaagtaagccgcgtccagggagaggaagagacgagagaagagaggcgcggtcgacggaggggtaggtctctaaattcgagtgaagcatacatggggtatttgcgtccgtacccaggaaaataggacatcggatctgatctgtacttggaactttgattaagatgggtgattacgtttatatctctgaagccgattgacgctaaagaatgataattactaagtgaaggcgaattgtatatgttgattttaggaattattgattctgat

SEQ ID NO: 240949 - DNA, 130 bp, Gossypium hirsutum
aaaaaacccaacgttgttggattctaaaatcatggtggaaagtctacttattcttgtatgtatgggactgtattttacgctgtctgacatattaacactttctattctatatcggtgtgcggatagctct

SEQ ID NO: 240950 - DNA, 409 bp, Gossypium hirsutum
ccgaattcgagggacgcgccaggcgtccgggtacacttgcactactaggttttaatccaaactcaaaagtcatttgattaatctgaattgaaacctcaagtcaataactcaaatctacctgtgctccttctattgatgatggtataatgatttgactgacattttatatggaagcaaatgcaggactggtacggtgatgaattgaaggcaaagttggaagaagtggagcctaacaaagatgcctggaagaacctctgcacgagcttcctcaaggatagattatgaaggtttttattttaaccaagaataaaagaaatgtaaataggaaccctttttcaagaatcaagtcgttctatagagaggtttgtgatagaatagcacagatgcattattcatttaaacatgtagt

SEQ ID NO: 240951 - DNA, 396 bp, Gossypium hirsutum
tccgagaaaggcgcctgtagcgatccaggctgccgctttgaatggactggattagttgatgggaggggaactgtccgtgaaaaaggggatggagcgtggataacaggctgacttggagagtgagagttccgactctgatgtggattctgacctcgagaggatgattgctgacagatctgggatgaatgcctcttggaaagggcagaaatcattgataacaataagagagcggtgaagatgatagctcttgatccgcattatggggagagaaagattaagagagggaggccaaagcaaaggagtagttcgaagagaggaattagtgattctgatgatgaagatgaaggttgggggggagcggagggaaagaaaaagagaaagatgaggggttgattc

SEQ ID NO: 240952 - DNA, 311 bp, Gossypium hirsutum
ctcacgcgttcgattttagtttcgatcgtagttttgagcgccagttgtggttgctggggggctagcgaggaggataatgacaatgatgatcctggcatggatactaacattgaaacgaacaaggaaacgatcgacatcattatcggcggaggtcgtggtgaagctcctgataattgtcctgatgagtgacctgatccgtgacgtgcacctgaatggtctgcaccaacatctccaccaccaccaccaccaccaccaccaccacgactaccattaccaataccaaaaccaaaaccaaaaccaaaaccaaaacc

SEQ ID NO: 240953 - DNA, 378 bp, Gossypium hirsutum
  unsure (1)..(378): unsure at all n locations
cataagagaacgaggaatatcggtgtcaagtaaggctgttatcggagcgttttcggaacttggaagatcgacaacgacgagtgatggtctcattggctaggattatagacaaaccccatgttctgtcccaatttcatggcaaaaagagaaagctattgaacagtaaccacttcaatgatgaatgcaacattcaagatcttcacaggttggcttctctgaatcaaacatgggattggatttgaaacacattgaagaattggaatcatctataaaatgctgggaaacattgcttctcgaaatcggagaaactatacgtgaagaagtgcgcgatttcaggacatgcttacggncttcttcggttgtgttactgaaatacag

SEQ ID NO: 240954 - DNA, 291 bp, Gossypium hirsutum
gcgtcacgcgtcgcgtccgacacatgagtggccgtgcatttcaggtttcacctcgaggacagttgggagtctagctaaaaacgcagcttccagtgaccttcgttacgcttgtgaacatctacacccccaatattgcgatgataggcaatgctgacaatatatgggtgagcggatccatcaaagccctgtggcagctgtcacattaactaccaccacgtatggtttgggtacacagcacatatcatcctaaccgaagcatatggagtatatggcaaccacccatttatgtta

SEQ ID NO: 240955 - DNA, 218 bp, Gossypium hirsutum
cgcgtccgaaaaaccctcaagatcccctaagaccacctctgtctatacattagagtctaccttctgggggggggcgatggaaaagtacgcggaggaaccagggccccttccggaattaacggagctctaaccggtcagcatacttgtgggaactgccgtcattgttacttaggggtaaccggtataacaccctctttaaaagacttaaacgtatggat

SEQ ID NO: 240956 - DNA, 373 bp, Gossypium hirsutum
aaaaaatggaaaaagaagaaacaaaatctagctgcagtagataatcacctttgaaaatattctttggttgttttctattgatttttgtgtgtattttgtatacaatccgtaacctatttctctgacaaaaaagaagaaaaccatcccccttttacaatgaaagattgaaggctttatagccaaatacaatacagtttctacctatttctttgctcaaattgcaggtactgtgatgttgtagaggagtgcatgatcgtggggcgtggacgtgcgatctatgggtcgtgcgtgggcgtgtctatgtacgtggtggagaggcgtataacgtgggggctacagcgcaaggagaaagaaaggtttgttcgttctgact

SEQ ID NO: 240957 - DNA, 200 bp, Gossypium hirsutum
gcctttctgggctaagggcgttcatatgtacactctcattagtaatgccctgagcggacgcgtatgcagttcttaaactactattaatactccaagcagacaataggccacgacaagaggagctctcagggtttaggtgatggctttcaagcgcagctcgaacgagctcaaggatcttcacaaagatggggcggccgctt

SEQ ID NO: 240958 - DNA, 325 bp, Gossypium hirsutum
gcggaaaaccctaaactcccctaaaccacccgggcatacttcggagtctctttctagggcgttctcactgtcaaagcaagcggaggtaccggcaccggggcctcattcaccttaactctcaccggtcagattacttgtagaacacccgttcattctcatttggggctcaccgtgctgacgttctctttcacattcactaagatagtgactgtgacctttctatatacagtctaagcgaatacagaaaagaaacaagatgaaatcgcgttgtgggcattgctgtgtcaaataagaggccgacaatgactggtagtaacggtggaca

SEQ ID NO: 240959 - DNA, 187 bp, Gossypium hirsutum
ctggcatgcattaaagccggtccatgtcttgagcatcatcttccttacaatccgtggtttatgtatcgttccattctcgcataccataggagtggttcatatccatggcgcgcgcctttggacttgcataaagacgacttctccaacatttgtcacgtcttgggaacaatttgactgccttctgatg

SEQ ID NO: 240960 - DNA, 270 bp, Gossypium hirsutum
tatagcccacacctgctttaactatatccattactatcgtactctatttgtgaggtttgcgaaatgattcatctgacccgccccaaaactgttcctgccattaagagaatatataaatagatgggtgtgcatgagaatcttagaagaaaagcttgacgattactatagaaagatacgacattattacatgatttgcctaataagctatcctatttttcatgtttaaaactgtcatatctatgggtgttgaaagattgtctaaaaataaaa

SEQ ID NO: 240961 - DNA, 303 bp, Gossypium hirsutum
acgcgcacgcgctaaaaacgaagatccgacttgtggaggcacatatactaagcgataaatgcggctgaatggtgtatcaacaatctaataggcgcaaataagtggtccttcctgcagtaaagaactgttctgaataaaagaataaagatcaaatattagataaaagtaaagtaatcttatacttatgatggaagaaacgataaacaagattggcttacagattctccaataaaaaaaaggtagcaaaaaaaagcaaaattcgtgaaactgctcaaaacaactaaaaaactttaaaagggcggc

SEQ ID NO: 240962 - DNA, 370 bp, Gossypium hirsutum
cccacgcgtccggtaaaaaaaatacaatcgattccccctggctttatagccgaatgttcaaaataaaaaaaatacaatttttctttatttgctttcgtattggctattgttgctgctattgtttgtctgtttctttgcatgttcagtagcccgttggcgcggtgtttcgtggcgcttgacgtggtgcgttactggctgagcgctggaaggctctgagccagtctttgtgcgcatggaggccgtacatatggcgtttgctgctgcgcacctaaaaaacctagggtttatgaaattgctttaacctttgggcccttgtgccgcgtaatcttaagctatgatatttattttggatttgggttagtgattgggt

SEQ ID NO: 240963 - DNA, 360 bp, Gossypium hirsutum
ccacgcgtccgcagaagcatacacctgattccatcgagacaattatatctgatgtttcattagcgatttcactgctgacaaataggaaaacacgggatttaatcatgattctcaactctaaaagattcctagacagactggttagttcattggaggaaaagaaatatcacgaagcaaagttaaaagaaggattgaaggatgtggctgccaaacgtatggagcttcagaattctctatcttcttcatggccaaagcaagaagctgcacttgcaaaaaccagggaactgaagaaactatgtgaaagtaccctttcatcggtatttgatggaagacccgctcatataattggagagatcaatg

SEQ ID NO: 240964 - DNA, 277 bp, Gossypium hirsutum
caagaacctattttcattggcttacaagactcaccatctgtataataatcccttaaccaatccttctgcagcatgttgaagagaccccaacaagggctttgtagtgaattaattaattagtcaattattttaatttgttgaaatagaaaaaaaaagtataattataacacgtttgtaaataatataagatacagtcgttgtatgtaataaatactaaaaagctttacgtacactctaaatgagacatatcatatcaccatagcgctacctccttact

SEQ ID NO: 240965 - DNA, 308 bp, Gossypium hirsutum
gggcaagggagggggtaaacagaacaacggacacccaaggggctggggcccgcgcaacaggaaggcccaccaaggacctaaagaagaagcacaacccccggacgaaccgagccccacaccacaaacggcaagaggaggaaacccccagcccaagcaagataccaaagagggattctcaagaacaggcaatttagaggcgaatcaaggcgcaacgcgcccaacagggaaaaggacacactgagggtcaatactaacggactctgccaaggggggcacccaaaagaaagcacggaaggtggagaagcaaa

SEQ ID NO: 240966 - DNA, 370 bp, Gossypium hirsutum
ttaatttcgggggagacgcacgcgtgcgtccacgcgtccgcacacgacgtctcgttcacagcggacgtccacgcatgcggcaatcggggacaaccagacaacccgcggagatgaattgaacacaacactgacttcggcgcaggacttttatcaatatagaggccctcgcttaacaaaacattgcgtaaacagaacgctggatgatctgatcggaccgcggacacgcgagagcccatcacaagaggaatgcgtggttgccatccactaaatggtacaggcgctcacagtccccctccctctaaactaaccaataccatagctagccaaacctggcggcacaataagagaaagaaggagctaatctgcttgc

SEQ ID NO: 240967 - DNA, 411 bp, Gossypium hirsutum
acgcgcacgcgtacgcgttcgacaaggcgtccgtgcgctcgtacgaccacgcgtacggcaatcctgggccagccagtcaagcctgggaggtgaattgaacacaacactgacttgggccaggttcttctatcaatctcctggcccttgcttaactccgtggtccgtgaaccggtcgctggttgatctgatcggaccccggacacgcgagagcccatcccgtgaggaatgcgtggttccctggcgcttcatgggacggtcgctcacagtccccctccctctaatctaaccctaccttgctcgcccaggcctgccggcacaataagagaatgagggagctaatctgcttgcttgtgcatgcgaggaccactctgctagagcgcgcctgaggagcttctagtgacttgttatggc

SEQ ID NO: 240968 - DNA, 414 bp, Gossypium hirsutum
acgctaatgcattggggttcgggttgccgaaggaggaagctcaagattaaatgttggatcgggtcatcgatcatctattggggggtcatccacatgggctaaggcgtccattaacctacgagttgttcatatgcaaaatactattttgcttcgcagagttggacgagttctgaggaacttttactgtgacgtgctgggttggattgggtagtgtactgcactaacattcataagcatgctattagttatcgtgtttctatgaatattgtgatactaatatgtattgtatattgcaaccttgtgctatgtttatttactgctgtatatactcaccgcttaaggctttctttggtgcaccgcttaaagtcaatgagttgcagttggattcccaaccttactgggaagctgtttggt

SEQ ID NO: 240969 - DNA, 408 bp, Gossypium hirsutum
gaataattgaggaattaaggatttacgcttggtatgtagccaagcccaagaaagagggaacgaggggaagaatcgacatggaatccataacaaaaaaaaaaaattgtgaatgaaaaaaaaagcgcgacgagaataattttctcaacccggaggtgaaggttacaaaatgaacaacttatcaatcctcgtagtcgaaccttgtttttgtggaatatgtaccccggccatgtatcatgaacacatgaagggtacggcatcgggtcaaataggaagaattctccaaacactaaaatcctccgtggacggaaaaaggaaggcgaaagcctatctataactaaggaccgccaacccaaactttgatcaacattaagccaactgctgattctggtagtgaaaagaaagcccata

SEQ ID NO: 240970 - DNA, 285 bp, Gossypium hirsutum
tcgcccacgcgttcggccatgtcttgcggcattcgagtctgacatttctccgcctgcattcaaaggggggtggcttggaacgagagagaatgaagctaccgagctgcttgtgaaggggccgagtgggcccttgctgcggcacgcgagagaaggagggaggccgtcatacgtgcagaaaataacgtcaacatgtgaagtgcgggactttgggcgtcagacccgcatcatagaaaggaactgggatgagcatcaggccggcatgatcctacttgagcaaggaagcag

SEQ ID NO: 240971 - DNA, 400 bp, Gossypium hirsutum
accccccattcccatttgccgaaattgaaaagaaaataaatgagctttcacccttcttccatttgctagggccggtgaccacgcccatcattgcaactcctccacatgcgcgccgcgacggcggccggagagagagccaggtaaggtctctccaatcctttctaaaatcccttttaaaaactctgttgtatttcaaaaaggaaggaaaaaagatccgcgataaaataaaaaaaaaacttgaaataggaggactataatcaccttattcaaatgtatggaagttccgtctcaaaaaaacatgctatctgtctttcttttatgtatttctctcctgatttcgtaaagaaaaaaattccccttttacatttgtgttctcggttttaaagcctttttacaaccg

SEQ ID NO: 240972 - DNA, 198 bp, Gossypium hirsutum
acgctaaagcctccttttgactttcagagctttgatcgatcatgggtcactcatacgcgtggaattctcacactaagacccacgggcctggctcttgcgcctgtcgcgtgtgtggtaacccccatgccatgataaggaagtataggatcatgagctacagacagtgcatccgtagcaatgacaaggagattgtattca

SEQ ID NO: 240973 - DNA, 430 bp, Gossypium hirsutum
  unsure (1)..(430): unsure at all n locations
cggtaatcgtcgacctgctgatggcgccttgcccggcgcaagggctgcggatcaaatgggtgaccgagcctacgagctggggagcagcggcaagaagcggaaagcaaccgcagacgcctctcaccatctgggcagagcagcagcagcagcacattcccggaatgtcgccgcagcctccaacccgaacggcggcagctacccgcacagctcttcacaggccatagaagacgccgaatgctcggttgccagctgcagcgtggacgacctttaccgcctcggcaatggcggcaacgccaagcgttgcccccgcccttcagggtgccttcctgacgacgccatgtccgcgtgcccgtgcacgcccggngcgagggacggggaggacgaggacgcggcgggcgtgcacgggctggagctagaggcgtacgggtcg

SEQ ID NO: 240974 - DNA, 352 bp, Gossypium hirsutum
  unsure (1)..(352): unsure at all n locations
tttagccattcatgcgccccgaaaaggaattattgaggtgtggcagatgagaaccggaccgggtgtcttagctatccagtgtgctaaaggatgcagattgttacagccaacatacaggtttggatcattatcagactctccttatgttcctctcgaagtgtttttgttgaatggagactcaggtcagttgtcagtgctgaatcgttttcttaattgaaaattttacatagaaagttcanatgttcagtctctgttctcaatttgatttctttacctacaactgagtttgcttctcttagaaccacaaattaacgttctatgaaatgtatgtatgttgtagacagaattcatg

SEQ ID NO: 240975 - DNA, 126 bp, Gossypium hirsutum
ctcatgcaccctttcagtttgtttttccatttttttttgtttgcatgccttttgtatttggatgtaagaatctgtaatatattgctccaacattaagtaaagtccaatataaatgtgctctctttc

SEQ ID NO: 240976 - DNA, 292 bp, Gossypium hirsutum
aggaatttcattctattaaaaaagggggtggggaattaaccaaaggcgacgacaacccagcctgatagtttcagggattatccgaatccttttattcgaaatacaatcacctacaaaagattttataagaagattcatcaagtgatacttcttctctttttggcaacaattctgaatatacttctttctgtactgaaagcacacaaaattacttactggattctgtatttggcgattccgattcttcaatcttcccttcctctttttctctttactcaaagcattcaccctt

SEQ ID NO: 240977 - DNA, 384 bp, Gossypium hirsutum
cccacgcgtccgcccacgcgtccggttacactgctgtcggtgtttttgttcttgggccgaggtttcatgaggcttggggaagtaaagctggagagaagcacgtgcaattcaatgatttcattgagtggaatcgtatttgcatatcaatggagttggtaactgcagttcttggagaccatggacagcgctctcgagaagactatggaaatggaatttaattggcaacctgtgctgggaacttctattggattttgtggggcagcgtttgggcatctttgaaggcttaggtggaaggggccttgctgatcccattcttacccttattgttgggattgatccaaagtctgcaacagctatttcaaaatgtatgatcatgggtgcaac

SEQ ID NO: 240978 - DNA, 321 bp, Gossypium hirsutum
ccaccgacataatttacaacgttatgagggataagcattgcttgggctttgagcatgatcttctgtctgctatgcctgctgcatttcagacactactcgcgtaaacttgacatactccacatggatatgactaatgtgtatgtatgtcgcaggggtatattaacccacgggactttcgggctgttctagcgagcaagttggcctgataaacagtcttttacatgataatgcaataccttggagctatatgtggcgctccgacgaaagagcttcaaagaccaatacgaaggcttgcggcgggcaacacggtaactcggatat

SEQ ID NO: 240979 - DNA, 269 bp, Gossypium hirsutum
aaaacacatacgatcaatacttagacaaaaacaaacactataaataagcaaatactactgggggggtgtctaatgcatcacgacttacctacgcatcatgcactgtctttaatgtaaacaagaacaactacatttatttcttttagaacgggatctaccacatcattgctgatataatccatgattttatcaaattaattacaactgatatgcatacctactttcgcacaccagatccatcaacaaacgctgtctttatcagcactctc

SEQ ID NO: 240980 - DNA, 279 bp, Gossypium hirsutum
gctacacgttcggtcttactgtgactaattcgggcactgtgcattatcaaagcatgtgaaggggaatgcaatgcaccgcctggtaacgattggactaggacatgctaaactgaaagccagaccaactgcatttataccttacaaaaggtgaactgtggaaacccatgaaaatggaatgctgaacactggcgaattaatgaaacagagagggcctaagaactttcgcttacaagaggcagctgcaaatgctcttttacgctattctatgcaatttacaaa

SEQ ID NO: 240981 - DNA, 296 bp, Gossypium hirsutum
acaacagatattgacatgtggtcctttggctgtatagttgccgaactctttttaaggcggtgtttattcccaggtgcttcagaatttgatcttctaaggcgaatgattgaaatacttggggtaaagactacaggtctcagtttcaaatgggaaatggtgctttttttggagctagttatattcagaatttatgaagttgaacccgaaaaatcggaaactttcaagatgttgtgaaagatgggagcattcagttcaaaaaatcagcatataagttcttaaaatcgcattttaggttt

SEQ ID NO: 240982 - DNA, 188 bp, Gossypium hirsutum
cccacgcgtacgtattaatcggctgtagtttatagcctctagccatgactttcaagccgaggaatgtaggccgaaacaagcatgccctttgccatgtcaaatacatccgctgatctaactgtggcacatgctgccctaaggataagtcaatataatatgccaactgtgaggtatattgtaaaacaaac

SEQ ID NO: 240983 - DNA, 135 bp, Gossypium hirsutum
cgagaaagaaaatgatgggaaggaaattcttcgtcggcgggaaattgggaaatgcaatggaagcgcactgaaggaaagtgaataaggattgtgaagtactttgaatgctggaaaggtgccttctccggatgttgt

SEQ ID NO: 240984 - DNA, 428 bp, Gossypium hirsutum
  unsure (1)..(428): unsure at all n locations
cccacgcgtccgcggacgcgtgggctttactctgatgaagaggaggatgattttggtgtgggtgaggatgattgtgacgatgatgaagtaatgagcacagctcactctccaattggaattaagcgaagctttcagaatcaagaccatgataatgatgtaattgagcaagttgctagttctgatggtccaaacaaaaggcaaaaactactgaatggtgggcataagcaatcgataatggtggatgccgcttgttcagtgaaattggaaggctctcacgagtatgatagcgatgcagaatcaagctaccgaggggagattttacatactgaacagtcaatgaaggataagattcgcttgacactaaaaatccttgagagcantatacctggtacaaaaggaaaggacccattactggtccttgatgaatc

SEQ ID NO: 240985 - DNA, 195 bp, Gossypium hirsutum
tcagactttagatactactgtataaaaaactttttcttggcacttatcatcaataacggggggtactttgaaagggacctgataaaccttggcctgcgacgaaatctacaaaacgcctgcttcaccttattaaaaccttaaaaaacgggggaattggaacccaacgaaggaaaagtgttaacaccactttttact

SEQ ID NO: 240986 - DNA, 305 bp, Gossypium hirsutum
gacaatattaatggcatacaatacaaagctgtgcaagtttagcaccttaaaattgactgtgaaaaagtggcatgtgataatttttttggtccttgagataatgggctatttattgtttggaccttaaacctcaactataaataggccttctcatttcttatttcaaaaaaaaaaaaaaaaaaaaaaaaaaaaaaaaaaaaaaaaaaaaaaaaaaaaaaaaaaaaaaaaaaagggcggccattttgggggtcgaaagcttacatccgcgttcatgaaacctggttggttgttttttgggtgaccta

SEQ ID NO: 240987 - DNA, 148 bp, Gossypium hirsutum
gaccacgcgttcgcggctctttggtgataatctattacatcttttgttttactgcaagaaaacatttcctacgtcattgattttttgaagctcgtttcaagcttttatacaaattctgctggggacgttgtgcaattcataagtttta

SEQ ID NO: 240988 - DNA, 434 bp, Gossypium hirsutum
  unsure (1)..(434): unsure at all n locations
caaatctcatatgggttggtctatacaagctttgccttgcgcagcctgaacattgggagcgcgtactaggctacccatcggaccacactcaacctttggagaatgacttgactcacaggctacacttactccagcaatctttccaaaccgacactttgggttatcatctctcagtattgaagccaatttatcctggagggttaacaatgttatctgttttcagtggcattggtggggctgcaattgctctacatcggcttggcattcacttaaaaggtgttgtggctgtagagacttcggaagctaagcaaaagatccttcggaattggtggcaaaacacgggacaaactggtgagttggtgatcatagaagacatccagaagctaacaagtagaagactggagagctngatagataagttaggtagtattgac

SEQ ID NO: 240989 - DNA, 390 bp, Gossypium hirsutum
cccacgccttcgaggtaatcgaggatgctatggacgatacggatgccgcggatactacgggggatacggatgtcgtggtgggtatggtggacgataccgtggacgaggacgtggacgttatcgaggaggttatggataaggatgctcctattgatactattattcaaaatattaccgaagatgctgccctaactgctgcgattatgttaatgatgatacaaatgctgaaacacattattaaactatatactaaaataaaatcatgtctatatgcatgtatataaaaatatgaaatggtataacatattttacactatgctacgatgttaacttagaatattggtttattttctggaattatatatctatttgaattacttttttaatttt

SEQ ID NO: 240990 - DNA, 411 bp, Gossypium hirsutum
cccacgcgtccgtgatttaaaaacttgtgcacctctatcgctagcttctccaaacaatgtgctgacatcagcaaacagtaaatgagaaaccgacggagccccttttcttttcctttgctcccttaatcgacccctccctcaaggccatcctcataagcctcgaaaggccctcattataaattaaaaacaagaaggtattaatagggtcccttgtctattcctctcgccggtttaaaagctcgttatgtaaataaatattttaaatattttaacatgtgtttaaaaatattttgttcaaaactatgtaatttttttaatttatagatgttgctgtataattattttatgtattttcaaaagtatttcatattaagttaaaacattatttaatttgaaatgtaatatgcttat

SEQ ID NO: 240991 - DNA, 205 bp, Gossypium hirsutum
gtcatatctttaaaattaaagtatttaattttatacttccacccattacaacagcatcagaatatgaacatctccaacaaattaactccttactaaaccagaaaacctttatttaactttaactccatcatatactaattctctccatatttcaacttatgataaaattccaacctaagctaaactctaataattcttttctcct

SEQ ID NO: 240992 - DNA, 280 bp, Gossypium hirsutum
acccagcgtcccttatcatccataaaagattatccttcttatcaatattacccatttatcatgcttttggcttgcgcttctttcaaacactttccattccaactcctctttctaatcatcaattctttttactaaaaaaaataatgttgtataaggccattgctaatcttatctttttctgtgtttccatgcttaatttactatatatacttcgattaaaaatgttcttctttaatgatttttaagaatcttataatcaataaaaaacctttttcgtttt

SEQ ID NO: 240993 - DNA, 354 bp, Gossypium hirsutum
aatatctttaaaaaaagaatatgaagaaaatgctaaagtgtgagatcaaagaaaagggggggggtataccagaccactatatattcacaactgatgaacgagccaatcgtaatgttatatatctacacggagttatttttctaccaaaatataaacaacttttatgatattaaaagatcttactaatactaaacttaatcctgactacaaaagtgtatgccatatagcactcgctaaagaaaataattcagacctgaagagattttgataaggacagattcttacacctgtactgctacaccatttggtaactttcatacaggcattgggaatacagaagctcgctcagtatta

SEQ ID NO: 240994 - DNA, 312 bp, Gossypium hirsutum
aaacccggatcgacgcatgcgtacggcggatataacgtatgctgtggcttttatttcaaacgcggcggatgttgatatggtctgtgactctgaaatggtgggcctcgttactcgaggaggcggagcgtctgatgggatctgaaagacttatggtcgtagggatagcatttaagtgggctttggactttgctttctcagtgggatgatgacgtgtttcatatattggtactttattgttgatatgtagcatttagaaatctcttatttttgacccatgtttatgtgataaaaaactatggatggaagtatact

SEQ ID NO: 240995 - DNA, 429 bp, Gossypium hirsutum
  unsure (1)..(429): unsure at all n locations
aaaagagggaactcgtttttgaaaaccctaagcagaaggaagaaatcgaagtgaggttgtccactgcctttgctccgccgccagccatgaagttcaatatcgccaacctccagtacgagatgccagaagaagctagaaatcgacgatgaccagaaactcaaggggcatgcaaatgtggaacctcttttcaacagcttggccttgcagcaatacattcttttatgctcacaggtatgttaaaaaatttctcatttggaaggtgtgatgtggacctcttgttggatacattatgtactcgtaccattcaaatccgtgaaggaagcatagttaaagctcttgattgtaatgctgctgtggctagtcgggatgcattggcaaagacagattatgctcgattgnttggttggcttgttgataagattaatatat

SEQ ID NO: 240996 - DNA, 375 bp, Gossypium hirsutum
  unsure (1)..(375): unsure at all n locations
ggaaanaaccgggtccgacccacgccgtccgcatgacattgctaccagattantgattgtcgatctttatacggtacgttgtacgtttccatagtatgtgcggaaaaattccttggtgttcggtcttgtaacaacataatgactatggattctagattagcacatttgtaatatgtttataaggcgctacgaacatgagtattccccgtgttggttcgcaccctccagaccttggaagtcactcgtgcacctgatatcctgatagtgggatctattaggatatgtgcgagcaactcttcgggtgaaaggtatctgttgatcagctcttccttccatttcctagtcgtactatcaataagatccaaaacaaattct

SEQ ID NO: 240997 - DNA, 161 bp, Gossypium hirsutum
gtggagattacatgtttatatctttttgtactttgttatgggagagggttagtaaacgtgcacaagcttcattattttttcttattgctgtttcatttcaataatccaattcagaatttccaagtaaaaatacacagaaaaacatgaccataatttccttt

SEQ ID NO: 240998 - DNA, 370 bp, Gossypium hirsutum
  unsure (1)..(370): unsure at all n locations
attctctcttcaaaccaagaaaacaagataaaaaaagatgtctaagctttgttcacttggcggagctgcgcttctttttaatttcatgcaaagctatgctgctaggcccgagccaactttgtccttaacccaacatgagggagttgaggcagagaaagttgatgctgatgagaactgtgaaggaattggcaaagaggagtgcttgatgagaagaacccttgctgctcatgtggactatatttatacccagaatcacaagccatgaagttgaattgttatggtaaaatattggttcaatcgtagcatcaaaagccataaataaaatcacatatatttccattaaaaaaaaaggggnaaacaccccaggaat

SEQ ID NO: 240999 - DNA, 295 bp, Gossypium hirsutum
cccacgcgtccggtgaattgaagcttcaatttacactgtgtgtcttgagagttgtttggttgctgatgtaaagtagcatatagtcaacatttcagctccttaaaaaaaaaatcattattgataagaaattcttgggttgaaaatcatagattttgttttccatgcaatatgcatgtttaaatatcgaatgtaaagagttgatgttgatttagtatagagtttgtaaaatccttactttgaaacagtcaaaaaccatccgtgttattggtaaaagtattgattttctattctaagg

SEQ ID NO: 241000 - DNA, 438 bp, Gossypium hirsutum
cccacgcgtccgcccacgcgtccgtagggtggttgtggtgggattgttacggcaatctgtagatctcaaaaatgaagcttatgcatcacaaattagcttatctgatggtgctgttgaaagtgtattgccaacatatagttcaggcgatgagaatcaggatgatgattcggaggtgcttctcaaccaactgcagggcagtgcgtgataacctattatttaaaatctataagtgcagggaaagttttgtatctatcttatcatggaagtcatgagttagcatatgctctgatgttggcaaagaaagtgaacttatagccatttctcccaaccattttgtgcaagggaagatacacttggcaggtaaaaaactcacctacatgaattcttgctggagccctttcctttgcccttgtttcaaatgtatgaattttccaattt

SEQ ID NO: 241001 - DNA, 240 bp, Gossypium hirsutum
cccatcccttcaatcaaatccataattatttatggaagacaacgacatctacgtgtttcgttttttaaacttgccatatatcaaacattcctcatctataaaaacaatctctcttaatactaaaataattaaaaccaaaatctcaaagcttggttccatctacaaccttttactttaagtaaggatgacaaagataaaaatcccaatcttgtaaacgtgcataaaacctatttttaaaaa

SEQ ID NO: 241002 - DNA, 409 bp, Gossypium hirsutum
accacacatacactcactttccaattcctttggaatcgactacaccgaccccggggctgtggagttgatagtaatgacacttatacatcttgatgccatggatggtaagatcaacgtatccttgctgcaaaagtgttaaactttccacaatgtcaatacaaaacaagcatttgctaatgcactaacaacggctacatctataaaaacactccgaaacccacccataggcccattacagacactcccatatcaccacaacccggctattcgcagagcaccatactaaagcgacttaccaactaaagaaacaatgggaaatacaaaaaggacataccttgaggtttatcattaatatcaagccatcggaggacatacatcaagatgatgaatataactaattaagaacaaa

SEQ ID NO: 241003 - DNA, 163 bp, Gossypium hirsutum
ggtcgaccacgcgtccgaaaaatggagacaagcaaataaggaagactgttacatatgcataatatattgtctctgggatcgggtgtatcagagtttcttcgagtgatgttttgaagaaatagcacagcttttaatgaacattggctttctggcgttagcccta

SEQ ID NO: 241004 - DNA, 123 bp, Gossypium hirsutum
gaacaatggaccctatctaacacggaagtttccctttcgattccgtgtgcgatccaaagagctcggagcggtaaaccctatatacactccttagcttcaatgctactagtgaactcttaaaac

SEQ ID NO: 241005 - DNA, 191 bp, Gossypium hirsutum
gatgaatacacttcatatcatatattattctgataacctatatgatacaattatggcgggtaattaaaccctgtgcccttggcctataccaattacttttaatttaccgcttatctgagaatctattatatatcactaattcacaggatatcacaatgcaaatgaacaacctactggctttaggcacattt

SEQ ID NO: 241006 - DNA, 439 bp, Gossypium hirsutum
cccacgcgtccgcgcactttccgaagccgatggaatcgactacaccgaccccgaagaggtcgagttgttagtaatgacacttatagatcttgatgccatggatggtaagagcagtgtatcgttgttgcaagagtgttcgagttcccccgatgtcaatacgagacaagcattggctaatgcactagcagcggctccgtctatgtggacactcggaaacgccggcatgggcgcattacagaggctggcagaagacgacaacccggcgattgcggcggcagcatctaaagcgatttacgaactaaagaaacaatgggaaatagaagaaggggatagctggaggtttatgatgaatatgaagccatcggaggacatagatggagatgatgaagataactaattaagaagaaataattttaaaaagaaagtggaaattcatact

SEQ ID NO: 241007 - DNA, 116 bp, Gossypium hirsutum
acgctttgagattagccttcgtggccggttatctgtagcgatagcgctccactgtttcgacacatggctaagataaatgacggtgatgacttgcgggtctcgtttatggaacttga

SEQ ID NO: 241008 - DNA, 237 bp, Gossypium hirsutum
gaaaaccccaaaagaaaaaagaaaacagaagaagcaagagaacgattcaaaaatcaccttttttttgtattgatttcgcgtttttgatacaatatgcgtgggtattccccctttcaatttttcgtaatggctttatatagcccaaaaggaaatacaaaatccctatttttggctttcttttttctctgctattacaaattttgctcaatattgtgtgctattttttttatatgtttc

SEQ ID NO: 241009 - DNA, 277 bp, Gossypium hirsutum
gccacgcgttcgatctggtggaacctatcataatacaaggggtaggctttggaggttcgagtttgggtaaaaaaatgccgctgaaatggttacagctataatttaaaatgtacattttactctgcattgcgtgtgtttaggggatttgggattataggggaatatgaaaacatttttctttctttaatttatttcttggatttctgtctgctacccatttgtctttgtgcattttccccgtatcatataattaagttattatttatcgctttttttt

SEQ ID NO: 241010 - DNA, 176 bp, Gossypium hirsutum
gtggtgggtactgtatatggagttgttgggttaatcattttttggaggctttgttgcttaaaaatatatgaacctcttctttgatgctcaaaggaagatatagattacttggcttaatcttttttttttctggagtgtggatcagatgttggaaaaaaaaaaaaagagaatttatt

SEQ ID NO: 241011 - DNA, 313 bp, Gossypium hirsutum
tcgcccacgcgttcgaaaccagccaagcttcttgaaacctagagatatagctgaagccaagaaagagaaatatcctgcgaatggcatcttggatgggaagtttgtaaagacaatgtcaatgaattgaccaaagacatgcccttgaaagttccatcgcatagtataccgtcactagatatgtaaatatttggctaccattaatggttcagaaactttagacgttcctttgctgttacaggccactgatacaaatcatagtaatttaacagtggattacaaaaaaaatgcattgtgtatgccaacactagatatg

SEQ ID NO: 241012 - DNA, 446 bp, Gossypium hirsutum
acccacgcgtccgcttttttaatgtcctcaatgaccatctccttaagcagctgccagtgactccagcagccttccgaaacttaaacggtgagggttgtcataaagggtagggttcacggtgtgttctataagaactggaccatagagaatgccactcaacttggcttgaaaggctgggttaggaacaggagggatggctcagcggaagctcttttctctggaaccccggattctgttgaggagatggagcaaatgtgtcggcatggcccaccagctgccatggttaccgggcttcaagttgtaccttccaatgatgatcctggtaccggatttcagaggaagcaaacaggctgatcagactacacttaaagagattacccccattctgtattaacatgtatagtcgacttctctcacgaataaaatagccgagtcatctatgatta

SEQ ID NO: 241013 - DNA, 112 bp, Gossypium hirsutum
  unsure (1)..(112): unsure at all n locations
gctgtatgacagatgagtacgcacggacggctttagactggggagatatttaccaaggttttgcaaatggggagttcttggtgtcntcaatgatgaaactatggtttgatga

SEQ ID NO: 241014 - DNA, 300 bp, Gossypium hirsutum
  unsure (1)..(300): unsure at all n locations
gttaatgatggcaaggcattggacaaagagttgcggaccgagatcccgattcctcgtggaggaccgcatatttcttgtgctgcgataaacaaacgactgtttgtaatctgccgtaacaagggtgatattatttcaatactttgatactcccccagttcatagacatatatacgtgacattactttctgnggactaaaggattctcatcacttgattgccttgtttggagaagaaaataatgctgtgtgcaatatccccatttggagtcccactttaacgtatactatatgttgttacaat

SEQ ID NO: 241015 - DNA, 297 bp, Gossypium hirsutum
  unsure (1)..(297): unsure at all n locations
tacgcatacgcatagggtagacatacgagaagaataaattattttgtaataattggctttagagtaccccgtgttatttattggacaccctctctaacaaatctcccatctttgattgtgtagacacaatccatcggagtggagattatgttaaaatcttttgatacggccccagntcagagacatttatatgggacataactttctggggacgaaagganttttcatacttaggggccttgtttggagaagaaaaaaatgcagggtgcaattaccccatttggaggcccactttta

SEQ ID NO: 241016 - DNA, 407 bp, Gossypium hirsutum
gccactcgtacaactaggcgttcactttttctacatttggggaactggaaatggggttatggctattactagggagctgtacaattatgatgacctggatcgggggacgaccgatactgacctgaactctgataacacaaagaaccttgtgcagaagtgttttttttggtactagtaggagtggtcttcataggacataaactgtggaagaacccaatctgcttggctcggagatcctacgtatatggtaacgggaaatgctatggtacaactgaggaggctaaaaatatcattacaacattatacgaacatgaaattccttatgatgataacggggaggtcggagagaactctacattagtgcgacttacctttgtgaaaagactgaggcgctctgatttacatgt

SEQ ID NO: 241017 - DNA, 161 bp, Gossypium hirsutum
cccacgcgttcgctcttatttgaactcaacttcccagctaatattagcatcatggccgttgccacttatgactacgagaatacctccccagtcgcccatgccaggctcttcaaggcctttactgtagaagctcctaaagtttcgcccactgctgcacctaa

SEQ ID NO: 241018 - DNA, 170 bp, Gossypium hirsutum
cccacgcctccgggaacgcgtacgtccactcgggctaccacgcgtacgaaaaattagcgcagttatactgtgtacgtgttggtgatacccgtgtctaatgcttttatagctagtacagtgtgtactgcttctcacatttgaagctcgtcgtctatttgtatgctcattac

SEQ ID NO: 241019 - DNA, 225 bp, Gossypium hirsutum
cccacgcgtccgcccacgcgtccgcggacgcgtccgcccacgcgtccgcccacgcgtccgtaattttattgcatttctactttttttgtggtggtgatacccgtttctatttcttttctagcgagtaatgtatgtcatgttttccacatttgatgcttgtggtctattatatactcgggtatcggtaatagatgaaaataaaatttcccacttcactttcttcct

SEQ ID NO: 241020 - DNA, 378 bp, Gossypium hirsutum
cccacgcgtccgcccacgcgtccgaaaaaaaaaaaatttaaacctccaaagaaaaaatgaaaaaggggggggggggaataacaaaaaagcaaaacaaataaaaaaaaccaagggcgaaaagaacacgggtactgacaaaacaaaagggattacacatatagctggggggccgtgatagacgtacccattctaccaaggcctctcatttataaggagaacacctgtcaaaaaaacaaaccgtccatggtaaagccccggcgtgtcaaaactaactggctaggcaacccaaccccttttgaagataaagcgattattacaacagcgcccttacctaagcggtctcaaaaggaagacggccccaaccgtgagagctctcca

SEQ ID NO: 241021 - DNA, 105 bp, Gossypium hirsutum
  unsure (1)..(105): unsure at all n locations
cccacgcattcggncaagcgttagttcattctgacagacaattttagaatcaagcggcgggggtctaatgagtgcgagaaaagcacaccaggcgcacatgccagg

SEQ ID NO: 241022 - DNA, 165 bp, Gossypium hirsutum
cccacgcgtccgagatggcgtaagtttattctggcaagcatacttagtacctacatgcggagatctatttcgtgcgtaatagtcatactattagaagattgtatgatagccacgacattgtgctagtcaattgatgtctctaggccgtcgtttactgttatctat

SEQ ID NO: 241023 - DNA, 164 bp, Gossypium hirsutum
ctcacgcgtacgtgatggcgtacgggcagcctggcaaactgcaagatgaacggcatgaggagcactagctcgtgctcactcgtctcagaaattatgtgtggtatgttagcgacgaaatggggctagtctggtcattctacagtgccgtaggtgactgtgatcta

SEQ ID NO: 241024 - DNA, 415 bp, Gossypium hirsutum
tacactcgttcgctgacgcaaacattcacgcgtgcggccccacgatcaaaaaagcagggcatgattactctgtgcgcggtgaacaaacaaagcctgatctgctgcataacgaggtaaagataaaatgatggggatacataaggcgcgggggcgattagcaactctcttctttgtgatgagatgaatatggatgcatgccactttactgatggtgctttgagactctttcacttggactggaaggcaacaacttcaagcttaaaaaacttgagctggcaactttgaatttctgaactacacaatgataacaagccaatgcagaggaccaaagtatacacctgaaactggaaaactgcatgcaagcgaattgattgtgctatgcagaacacatcaacgactagacgaccgaatgcgc

SEQ ID NO: 241025 - DNA, 138 bp, Gossypium hirsutum
cacacgcgtgcgtgcaagcgtaggtgtcgtctggaaagcaaccggagtacctacgtgataagatcttacttgcgcgaacaaagcaaactagtaacaattttgatgttaaccacgggcttgtcctaggcaaaaaaaata

SEQ ID NO: 241026 - DNA, 269 bp, Gossypium hirsutum
cccacgcgtgcgttttatggtgggttccctcttcaactaagacgacatccgcgggcgcggtggcttatgtctgtacccaaaacccgggcacttgcccctgcctatctgacggattccttgcaggctgaaattattggccgttcctcataaaatgacgcttgtctgtatgtatacaagaacgttgtggcattaggcgtgtattataggatcctggcctggcttttaacagggcgagggggttctaaaactcctcccccaatgcatgtata

SEQ ID NO: 241027 - DNA, 421 bp, Gossypium hirsutum
gccacgcgtccggcacctttaaaggctcgagccttggaaagggaaatcgaggagaaaacaagatctttggccccctctcaagcccgaatccgatgacggcaaaggaccaatcgccggccgatctaagggccgattcaggtgcactccctcttcctttttttatatttattttccttattaaaatgaagttgcaaaaagaaaaagcataaaaaaaataaaatggaaatgaaaatggatagagaccgggtgaggcttaacccttttgaacctctatttttttttttggttttgaattctaaagggcggtttttacaaaggaaatttccccccttacaaaagataaaattcggcttttaaaggcaatatattttttttcggtccctttggttattacttcccccatcattcgcaagccttcttt

SEQ ID NO: 241028 - DNA, 117 bp, Gossypium hirsutum
cccacgcgtccgcccaagcgtccggttggtctgagaagcaaccgtcgtaccttcgtgatttgaactctctatcgcatgcccgacgctaacgtcgagggtccgatcttaaccttgagg

SEQ ID NO: 241029 - DNA, 424 bp, Gossypium hirsutum
cccacgcgtccgcccacgcgtccgtcttgattggtgatggggctacatttgatgaaaagagaacttcacgttcatacacgtgggcccagcatttggcaggaattgattacttacctgaggtttcaccattgcttaatatccaggaagcttcaaacaatgaaaccaaaagcgaagctgctatctctggtcttgcattgtatcggcagcagaacagaatgcaaacagttgtgcaaaggatcccgtcacggataaaaactgagcttgctcttgcgtgaagtaacggcccgtatgtttggaggttggatcttggaccaaacaattataaaaccaataggagtggatttcacaatggggtcaaaactgaatattttggctataaaaaataatttcctgtgctaaggtctttgttggcatctttatgata

SEQ ID NO: 241030 - DNA, 219 bp, Gossypium hirsutum
cttcctctatattttcctctcttgaataaaccaaaatctaaattgttgatttcaaaattcatcctaagcttgggctatgcaacaactcttgattattcttgatatttttaaaattcttcttgattttcatcgacttgattgctcaaggacgatcaatagtttaagtatgggggagtttgttaagttcaattttgagcttaacttattcaattaaattat

SEQ ID NO: 241031 - DNA, 275 bp, Gossypium hirsutum
accgctgatgtggatgcgttttagtgcacaatactcgggcagttagcagggggataagaagggtggtgagaaacaaggttttgaggtggggtgcgttacaaagagttacctgataggtgtggtggtggtagacaatcggatcagttacatctcaccttttgggatagctttctgtgtcgatatggactatgatgtcaaagattgacttgactgcacgatcactattctctgctattttagtactttttattatatttcacaactgtatgtaaaaa

SEQ ID NO: 241032 - DNA, 234 bp, Gossypium hirsutum
  unsure (1)..(234): unsure at all n locations
ggaaaggtggcttacaaattatccttgccttcttcagctcggatacaccctactttccatgtgttgcagttgaagaaacatattgggacggcggtgagtgcacccacattacctcccattgggtctgatggagctttgctcaagtccccagttcgaattttggatagacggttggtcaagcanggtaaccaggctgcagtggaagtactagtggaatgggcagacacgttccct

SEQ ID NO: 241033 - DNA, 401 bp, Gossypium hirsutum
gcttgcgttcataaaaaaaaaaaaagaagtttacaatcgaaatcaataggggttatagccgaatgtaaaaaaaataaaaataaaatacaattcttctttcttcgtatttttgctactttcgtttgttctcttttgcaggtacgagtacggggctgtgcgttggcccttggcgtgaggcgtacgaaaggtggacgtggcgtacgaggactgctcgctggtcgtacggcgctaaaggttcggcgtggctgctgagcgacgcttaaggttttccccttctcttttggctgaaaagagtttaggatagctaggcatacttggactttaggatattgggcctatatttgggtcttgggcattggtttgggcttgcaatgatttggtttgtaaaaagacattaaaat

SEQ ID NO: 241034 - DNA, 355 bp, Gossypium hirsutum
ggaagggggtagggttcttaacctgtcttgaataggtgagattggaatgagagatggtttgatatgagcggacagggccaactcaagttcttttgttaattaagggcgttcgattccatttctttcgtttcttttagcttttatccttcactgacatgactaaaatatatatatgtattatgtaatgtgtgggtataaccgtaaaacgaaaatggaaatcctttcctctaatgctcataaaagaataaaaaagaattataataacataaagcaacccatcaatagatgaacataaaaaggactaggaaaactttgaccgaacgaatagagatcaactcgtatgacattttcattg

SEQ ID NO: 241035 - DNA, 367 bp, Gossypium hirsutum
gcgggtagctaaggatcattccatatatttatactagcaccattaccaattcgccacagtatcccatctggggtaaatccctagcactacaaatgcttctccaggtaaacaatggaacgttttcggcagggcaaaatattgcataacgtaaactggtatagcttgtaaaatcgacttaacaaagacctttccccccatagataaatagcgcaaactctaacctttgttcgtcttctaaaccagcgaataaagttagcaaaagcccaagtatttttttgtccgaccatcataggcaaccctaaatacttctcaagatttgaagccaccctaacacccagtaatttgattatgggtttttttaacattt

SEQ ID NO: 241036 - DNA, 281 bp, Gossypium hirsutum
gtggaaacatgtctccaacatgttatgctagtgatgtatgttaagaaaaataaaataatgagcatggcgatgaaaaaaagagtatgggctcatccatacgccttcgtagccgccgatgatcatcccctgacggctgctgctgctgccgactcgcagctgggtggagatgtgcaggttgttgtgctcgcggctgcgacggctgcatgcagcccgcacttcatagatggaggctacaccaccgggatgtacagcggctgctctctcagcttatcaagaagggg

SEQ ID NO: 241037 - DNA, 313 bp, Gossypium hirsutum
aaagacggcacccggatttaaacttgaatgatggtgtaaggcgggctatccctaacatacttgcaggggaaatgcttgtagccgccagcattaatacgcaggctacctgaggcactgaaaaaatcgctacagacacagacaacatgctttgcattgaaaccaatacatgcatgccctgccatacatcatcctatcgacttttgacacccaactgtaaaaggagagcaagatacatcgaatcaagtatgatgcaccaacatcccagtgtcttaaatgcggacctatcacatatgtactataggcgacttgcatg

SEQ ID NO: 241038 - DNA, 320 bp, Gossypium hirsutum
aaaaaaaaacttatctggctcgttgacgtggtgacatctcctacttcgatatactccctcgccgccgaacactttcaagactacaacccccccacatagatgccatagcctcactgctttaactctcctttcttcgtgtcatagtaaactagacatgctctctccttcatccgttgcgcatacaatcatcggaagaggtattataacccagcggagatgaatctaccgctcccaatttttatatgcaacgtgcatttaatcaaatcctctaacaagaagggactgccttacactcttgctgtccattaatttgatgattg

SEQ ID NO: 241039 - DNA, 405 bp, Gossypium hirsutum
gcgtccgcctccattttgtcttatcccgtataacataacattggagttgtatgtagagtcgtagattgttttaaatggtgatgtaaatagtcatcgaatgaggatggtttgtgtcagccatattgttgtaaatgttgcttcagtccggaaaggatctcttctttactgaattatgatgatagatattcattcagtcaccatgactttttcaaccaaagagaatcaatttgttggaaatgatcaaacagtggaagaggtggggtatcccttcatatgtaaatatatgtatggtcacactttcttgaattcgggatggtcgtgtcaccatattcaatggacaaggttgcttgtgttgcgttaatcgtataatttaaagagagaaaaaatatatatatatttatatat

SEQ ID NO: 241040 - DNA, 392 bp, Gossypium hirsutum
  unsure (1)..(392): unsure at all n locations
ttttttattatctttcaaaaaaggttcaacccaatgaaaaaaacaccgttctagtcaaacttcattgtccatgtacaaaacctantccacctattacaaagattattaaaattattctctttcccaaattaaagcaacttataaatcctttgaatcaaaacaaaaaataacaaatatcttttcttctacctgtttttttttttttttttatcatgttttataattttgtgacaaattgttctttgtactctgaaaatatttattcaaaattaccctataattctattgtatttatcctacatagcttcaccatgtatttcttaactagtttgataaatattatttgtggtcgttaatttttccctttaaaaaaaaaatctggaattttgcac

SEQ ID NO: 241041 - DNA, 422 bp, Gossypium hirsutum
  unsure (1)..(422): unsure at all n locations
gcgcggncgctttgctattcttttttctntttgttgtaaaagaaaaaccttaaatagtaaagatcaagagccgcaaatcacgctgtccaaaagaataaaaattggtctcatttaattgaaaaactgttttgtatatgaaaaattcggattctgctctctattttctctatatctggactgtattcccccaatacaatggtttatttgggtttttatacctgaaaatacagccaaacctctattttgctgcgctttttccgcaggcatggcgacgtggggcgaacttggcggagcggcgcgcgtggaggtgaatgccgtgtgtggcgagggctgttggaggcggcatcagtanggattttttctgccaaaaatgttaaggttttgggcccttttgggcttaaggtttggtggtttatttttgg

SEQ ID NO: 241042 - DNA, 281 bp, Gossypium hirsutum
  unsure (1)..(281): unsure at all n locations
cgggcgngcggataanataagcaagctgcctatatggaggccatcaagccgggaatccctaactcaaaatggaggcactctggcgtgatggccatgccttgcctagagcgaaacttatagaacttcttcaatatttgctggtcacttatatgcatcataagtcgatgctaagcatatccaggtatagttggaaacgctgaaacctgacattttaatttctttgtctctnggaaaaaagcccttcaaaaacaaagcaccttgggagaaccatacccccacca

SEQ ID NO: 241043 - DNA, 223 bp, Gossypium hirsutum
gcgttcggagatttttgcgagaaagtgagaggtcgagagagaaaataattcgcagggaatcaacgagaggcggccattttactgcgagttgtctctacaatcttctacggctatctgatctatccgacatcatgacaacatcaaggcgtcttgcataaagaaaggtggagaagctccaaacgaacataacaaatgagaggagctgcgcctgagacacaccaca

SEQ ID NO: 241044 - DNA, 359 bp, Gossypium hirsutum
gtaactgacatacctgtctgaatggactttatagcctctcgtacaaccgactataaacatcctatgatcttttttaacacactagcagtgcttgagcttgtcatcgccaagttccccaacatgcacaaggtcccgatctttggaatgaatgcagacaagtgaatgagtctccccttaaagaatagttggctttgcctgctagaaagccactgctgcttcccctatgctaaaaacgggcatcttttgtataggaggacatttcgaaagctgtcttttgattttttggattttgctgagtctgcgagactgcatttacaagctctcttagatcaataagtgtacagtggagaaatctaatg

SEQ ID NO: 241045 - DNA, 267 bp, Gossypium hirsutum
tttaccatttcaattccttcgattccgtcacgttactgggtggcgtacatatgtacaaactaacataatatcttaaagacctgagcaaatacatggattggtaagggttactgtagttaagtcgtaattaaaggaataagcatgtattgatatatttggtgtacagcaaaaagtaaagtgaaaattaagtattaaattatacatgattgatataaaatattgaatatgaataaggtacgggtgaaaaagaaagtgctgtaaatatat

SEQ ID NO: 241046 - DNA, 296 bp, Gossypium hirsutum
gcggtcgctgacaaatatggcaggggagtacccaagatctgtactgatagcccttgttattttctctcggggggagtctcccatgttaccttgagttacggctcgtcctcctgttgtctgacctgcttgcgtatgttgcggtccttcaccaccaggcggatcctgctatagctgcggatgcgcttaggttcaatctccaccctccgaaatggcaactacttgtgattgattactggatttttgtcgcttcaagcatccatttagtagctacataaatcaacctttattttcttttc

SEQ ID NO: 241047 - DNA, 331 bp, Gossypium hirsutum
cccggggcgaggcaggcgtccgcccactcgtccatgctttctgatgtttcaatcttattatcctccggtcttctcatttctaaggatgaacactgacgataagttgctgtgatcgtcataaaggacctgagatcatttttttaccttaggtatcctgcctttgatagatctacatatgcatcatatcttacgaggttactaaaatttaaaaaagtaatgtatggtcgcattacagaattaacttgttcctttttaattgcttgcttgatgcatccctctaatctctgctaatcataatcttgattgctctaatgttttgagttgtaacaaa

SEQ ID NO: 241048 - DNA, 311 bp, Gossypium hirsutum
tcccttggcacgagaaaacaaaattatcttgaacccttttggggaggtgcatttgatcaggcaaaccgtttgaccataaggcaaggtatccaactctacttcccagtgtttgagtgttcatatatatgcatagaccataaggaaattatacatattgactaacaaaaaagtttactagctcggtagataaattagaacacgctttagagttcattacgatttaatcttcatatatatagacacacatatacatattgtgcttttgcttactcgggctagtgcttttattgtgccttttgcatgacgtaaaa

SEQ ID NO: 241049 - DNA, 395 bp, Gossypium hirsutum
ggcactgggatataggggaaagacgccatttttggtagggtttcctaacgggcaacgtagaatctaaccggtcaacagaaaaaacaagcggggttgattcatttgcaacaggtactcgtatttttacgggtagtaaaaggggttcactcttctccttaacttcagagctttcgtagctttctttcactcctggtaatcatactaaaaggctagctcgataaaataaagggatatttaaggggctattttatcatgctttctaactggcttacttactcacctcctttaatacagcggtttacgcgagaagggacaaggcaggatggatggcctatgaactatgcaactacaacctactagctggaccctattcgcgctcgcttagatcagcattc

SEQ ID NO: 241050 - DNA, 385 bp, Gossypium hirsutum
attgaaacacctttctagggcgtctgtatatagtcctacttacgaacactgagcttgccattttattcttcctggttatcttccatgggaaatcttccttaattcatgcaaacgcttacaaataatcaaatcatctgacgcacctttacttaccccaacaccagtacacacctgccttaacacatgctaaggtacctttaaaaacaacactcccaattaaaatcaagccagatcaaaatcaacattctatatcacatcaattaactttagaaccaacatcaaataaacggtttcaatctctctatcatcaacaacaaatattaataaaaattacccaacatatattttcatctttatcaaggcacaagaaatcacatcataaaaa

SEQ ID NO: 241051 - DNA, 347 bp, Gossypium hirsutum
gttttatatttgattttttttatgggaagctggcggaattgaagttttacgggtgggagtggatcatgtgactaaccattacgtaaaagttacaacctcccaatatatactttcatattctcaaacatttgtatagcatatttctgtacatcatctttgtttatcctctacactgaatttcaacttccttcatttattcgtttgtatctgtaggaaatataaacccatacaatcaatgggttctataaatacactgtatacacatttacgaataaaagaaaattcaatgtcaaaaaaaaaaataatttgccccttgactttcttcaaaaatgccttaaatctctttc

SEQ ID NO: 241052 - DNA, 310 bp, Gossypium hirsutum
cccacacatccggtctcttactagagtttcacagacacccctgttacaaaactcacgtaagcttcataagcgaagaaatcaaaattggcgacacaaaaacataaaaacgaataaagaaaaacaaaatcgtgccatgcggcggcagacctaatacgtgctatggtatcagactcatcatgattggattgtttcttacttacatagtgatgtgcttgcttataatataaattacggttaattacaccaatgtcctcactgaatacacatttacgaataaaaaaaaatacaatgtcaaaaaaaaaaaaatatt

SEQ ID NO: 241053 - DNA, 319 bp, Gossypium hirsutum
  unsure (1)..(319): unsure at all n locations
gcgcgggcggtcgctgacaaatatggcaggggcagtactccaatatcttttcttgatagacccttgttatttntctctcgtgggggtgtgtctcccatgtgtacctgtgtgttaccggcttcgctcctcctcgttgtgctgtccctgcttagtgtatagttgcagggccctccatccatccaggccggagccctgcttgtaggctgcgcgattcttcttcgtgctcatatctccatccctccgaaatggcgaactccttgagatattattaccttgattttatgtcgcttcataggagtccatttattatgctacataa

SEQ ID NO: 241054 - DNA, 420 bp, Gossypium hirsutum
gcggaaaatcttgagagagaaagtaaagcaaaaatcataaataaataaaaaatggagatgagtgagagatcggaaaattttagggttttcgattttcccttttgaagttttttttcattgattaaaagactttctctcttcgtctccgatttgttgaattttaccccttcttatcagtgaattcaacgtgcttctttttttaaaagcttcgattttttttccggtgaatttcttttctccgaccgcttgtttcgtcggtaatagcagctgaaaatcaacggttggtccttttccgatcatgggttatcccaaattttaccagaaggtcattttttgaatcaaaatcggattttttccgattataaaattttttgagctttttagcctgttatttaatttaaaaaatgggctttctttttt

SEQ ID NO: 241055 - DNA, 265 bp, Gossypium hirsutum
  unsure (1)..(265): unsure at all n locations
aattttcttagcaatttcctcttgaaatatactattcatcacatcccttctccntnnnaggggagagtattttaaaagagggcgagagtcccttctaaaaacaattttaaattaaataaaaaactttatctatcaaatctaccaacaccaaacttaataccacttgggcccccccttttaaacaatccaactttacttacccgctcatgcaacattataccttttttatattttcacctacaataaattcactgccccccttttt

SEQ ID NO: 241056 - DNA, 379 bp, Gossypium hirsutum
  unsure (1)..(379): unsure at all n locations
catgtttttttttctgaaatccaacaaggccntnatagtaggtccattttcgatacgctgagcgcacatcttnaatctttatatccttcaacaatagaacacctcttctcccctatgaccacttttattttacacctatttataagtaccttaacaatgccattctcattaattcctccaataaaacatcaaataaatctctctttatctactctctcaatctcttcaacttccaacatctaattcccaccctctacaccttccacatatactttaatcacatattttaccacaatgcacttcataccataaacaataaattttcttctttcataacaaccaattagcttttctaatagatatttaatactaaaaataa

SEQ ID NO: 241057 - DNA, 429 bp, Gossypium hirsutum
catatctttgttaaatacagacaaggaattttgtgagtggacttggcaggggttaggtttgtatcatcgggcagaaatctttcactacatacacgcaattaccagctccaaaatctttattgttggacattcacagggcacaataatgtctttggctgctctcactcagccagacatagtggaaatggttgaagctgctgctcttttgtctccaatatcttatttagaacatgtcagtgctccacttgtacttagaatggtcgcaatgcatctgcatcagatggttcttgctttggggttacatcaattgaatttcagaagcgatgtgttggttaaccttgtggattctttatgtgatgaccacgtggattgtactgattttctaagttctataacagggcaaaattgctgctttaataaaactcgcat

SEQ ID NO: 241058 - DNA, 407 bp, Gossypium hirsutum
  unsure (1)..(407): unsure at all n locations
aacaagacccacacgctctgtttcagatgtggtctccgcaacttccacctccataaaagccancgggcggccttatcatagggcgtttggccgtaatattacataaaacctgaagacgaataaactatctcgaataanagataccatacacctcatctcaattggttgagaaagaaaaccacattatttgaccagaaggatcgacaatcccgcaacgaaaaaaaactttccaagaacataacaccatcttagcgcggaaggaggcatccaacttagagttctactcaacaaaagaaacgcaagcacctattaatggatgattatgcgaattcgggttaaaaaaagaagtgagccagtaattttaactacaaattttgggcctaaaatcttttatatttattttggtt

SEQ ID NO: 241059 - DNA, 386 bp, Gossypium hirsutum
aaaacaaacatggcttccatctactggtgcgggaatgcggaaccaaccttaacctaccatcggggatgtatcccctgcggatgtgtatttcgaagcgggaacacaaaggtaccctttctttcgccaccaacgatgataccaacctcaatctccagaaagaacatatgtttcggcctctatttgagactcttgattatcgggggattcaacggtataggaccaccatgaacagtaaaagctgtgggaaaactagagggctacattgatgatgacggtcctacattaacggataggcctggacaatttcatatgggacctatacgagtggttcccaaatgtactatatctgggttcagaaccaaggccctgacgagctcatctgaaac

SEQ ID NO: 241060 - DNA, 321 bp, Gossypium hirsutum
aaccaatctacatcatctccactgtcttgtttttttctaaatccaacaaggcccaatggtgcttcaatccgatacgctgggcgctaacaatatcattatatccttcacaatagaacacgtaatccccctaggccactgttttcttcaaacataaataataccctttcaatgacatccgcaaggattcccccaagaaaacatcaatgaaatctctcgtcaagcgctttataaagctcatcatctaccaacacctgattcccaccctttacaccctttacgtatacttgaaatacgttcttaccggctatgcactttaaacca

SEQ ID NO: 241061 - DNA, 420 bp, Gossypium hirsutum
  unsure (1)..(420): unsure at all n locations
ncccacgcttccncccacccctcctagcttcttcaccttctccttcaatcagtttcgctccatttcctaccccatcaagctaacctgctccaacctactagcccactgcctaccaaggccctcctccctctgccagcctccaccaacggtaccttcattgatacaatcgatcttgccaacactttctttaatgcacctttggcttaataaagtgaacctaagaccatcccttttgggctcttcatcatgattctttagaatctttactttcatgctctcttttcttctttataacaatgtttacttctcttactttatataattcattacaccctaccctaaccgttttgattaaattaattgctatgtatgtttgatgattacgattctattattnttacttcccatggttcattttat

SEQ ID NO: 241062 - DNA, 475 bp, Gossypium hirsutum
gaaagacctgctgcgaaaagagacaatctctgaatctgtggctgacagatacctctactgcgggagagacccatcatacagagcaagctgccaactttcgcagttttcgattatataacagggagggagtaggtattagctattgctgacacgcgtattcgtaaaagatttggcattccgagaccccatcagagagcttagagagaatgtgagatactcacatctgtgaaccagagccctaggctgtactctgacgttggtcccccctaatgaaaactggcggaatgacaaggaaattgagaggcagcagcggcaggagaggcagccatcacctgagacctggcgtaagcctgcggagcagcctaaaccagtctctcctgaagctgctggtgttcgctatggaaaagcagcatcagcttttggagcttgctcaagccttttccaaatcattctcagatcagaaaacagatgatcg

SEQ ID NO: 241063 - DNA, 298 bp, Gossypium hirsutum
cctatgaatacttccgaccctatcacaatcattacctctaagtattacgctttcccacatataaactttgtacacttgaatgaacctacctgatacactagcacattcttcactatctctactaattgatcaaaacatgcccaaaatgatactgacagccttctacactaactattacccataaacaaacatgtatgcccacatcaatgaattgatacctttttaccctacactatatacaaactccttaataaaaaaaataaatgcgacaactatatatttctaacctcttatatat

SEQ ID NO: 241064 - DNA, 340 bp, Gossypium hirsutum
aattccggggcgagcgcaggcgtccggcaagacctggtgcgaaaagacacaatcactaaatctgtggctgacagatagatgtattggtggggggatccatcatccggagcaagatgcccactttgtcagttagcgattatatccagggaggagtgtaggtattagctcttgctcacacgtttattcgtaaaagatttggcatttctacagccgatcagagagcttaaagagaatctgagagctaccatgtgtgtaacagagcactaggctgtactctgacgttgagcccccctaatgaaaactggcggtatgacaaggaaattgagaggcagcagcggca

SEQ ID NO: 241065 - DNA, 312 bp, Gossypium hirsutum
cccacgcgtccgcccacgcgtccggatgaatgaaaggttcgtggttgtagaaatatgaactatggagctggggaaaaataaaagaacatttacaagcgcaactacctcagtttctggcatgaaggtatgttaacgtatttatatacttggatcatgacacttatggctttagtaatattgtcatgttaaagaacatccatgtttcctaagatgttacacttttggactgccattgctataatcaaatctttatgttcaatcagttttaaggctgaaaaaaaaaaaaaaaaaaaaaaatataaaaaataaaaa

SEQ ID NO: 241066 - DNA, 350 bp, Gossypium hirsutum
ggcgacgactgctattattatttttcaatgcatatcaaatcttttgcgctgtcagatttaaaccgaaatgggagtggaccgaatgataatcaccttgtcacaactattggattgttcttttatgtggattatgcatgtatgtattcgcaatactcctactgtatacagacaacctacctcttatattaacatagaaaatgatatcgctgcctgagcatcatattatctcttatgctattgctctctatgatcctgttaccttatcttctcgcaggcttggctgacgtaatagtgacggatgctgctcgaccgtagtgcatcaaactgaccgaggctacttaaaggctact

SEQ ID NO: 241067 - DNA, 465 bp, Gossypium hirsutum
  unsure (1)..(465): unsure at all n locations
ggcgaccccgcgtgcgccacgcgtncaaaaaaattccaaaaccccttcccctctcctttgctagggtttcaaccggggcggggggcacagtcatcggcccgccgtggtacggcggccggagttcctaaagggaaccctttttggctgatccaacctccccaatctcgatctaagggtaaagtacccaaactacccagccaaacttcaaaataaaagtgaaaaagaggagaaaataaaggggcctttcggctccctaataatgccgatgggattttcaatcgagtcccctaactcggtgaccttctaggccggagaaagcttcaagcacggcgcttaagacgaaagcgatgggacggggcaaagggtggttgaaaggtgtcaagcatcacgtgggtgagcggcgcggcgcacagggggaaccctatggttccttcgaaagtgttaaatttctgggctagggttttt

SEQ ID NO: 241068 - DNA, 336 bp, Gossypium hirsutum
cggacgcgtgggaaaattttaagggaacaatttcttttggtgttagcttcttttttgttggggtgggatggaccatatttggcatgatattggagacatatggattcgttgtactcttcaatggttattggccaacactggcagcgtttctgcagaggataccaattcttggttggatattccaacaaccatacatcagatcgttattggatcagtatacaggcaggagggtgcctgtctaaccatgccatatattaaagaattggaaatagtggggcgtcttatgaacaaataggcacatgctaaaagcgatggaatgaatggggtgaattatat

SEQ ID NO: 241069 - DNA, 189 bp, Gossypium hirsutum
gtttgactttcagttattctttttctttttaatgcaaaaacgccagctttttaatagagagatctggtatttagagatgaaccgaattcaactgacagtgacgttaacagcctgagtttttaggagacgaagctgtctttaggattgccaggggtgggacgatcgtcatctggagctgtataaatttgt

SEQ ID NO: 241070 - DNA, 363 bp, Gossypium hirsutum
cccacgctaccgactactcgtacgacaatcttaaggactactttaagcttgctgtcggcagaccggaatgttactgatgagtaggcgtgccacatggaatgtggaacctctggaggatattgaaggagctaaacccgtggggcacaagataactgaacctattactgccgtaccaccccatgattgatgatgatgcggctttgacttcgacaggacgtatgttcaacgattgtcttattgatgtggctgctgctgaactatgctctgctttgaaagatgtggcttcctcaagtagaaaaacaactgcgcagtctggtggttggacttcttctgatgatgaggctgatcctatggatcatgatg

SEQ ID NO: 241071 - DNA, 264 bp, Gossypium hirsutum
accggaattgaaggtccgggccgagccacccgtgcgattggacgctttatcaagatcgtgaatggcaaaatgaccccgtgtaatatacaccagtctcggttgatcgattgctgcagatttgaaatggtaggtctccttagagcctgaaacctgaagatttggagtttatctggtgatacccatggcatgttcgatcgttctcttgcgctatatgaatttgtgtaaataatgtgttcagagttataggtgggtattttaaaatcg

SEQ ID NO: 241072 - DNA, 241 bp, Gossypium hirsutum
gcgaccacgcgtcaggttatttctcttatttcaacacaccacctccacaagcatattaggatcaggggcgttgctacttactgctataaatcgacctctgcagacacccctacaaaacttaccaaggctattcatcttgaggctcacatggggtggcccaaacgtgctcttaataacgttaaatgcgttgagcttaaagctaagcttgcccttggaagtatcgtaaagaccacctttgttg

SEQ ID NO: 241073 - DNA, 430 bp, Gossypium hirsutum
gggcattttacgacccgacacaggaaaaagcgataggcgagagggcaaagactgaacctatccccttagtaagggagaacgggcactgccaaagcagctttctcttctaggtctaggaaagaacatcgtcctgacagacacgactggattcgattgattgaaagccttagcttgagccttttatcactatcacaaatagaaaaaggaaaaagcaccacaaaaggacccctgacttattagcgagagtcgagaattcaaaccccctcgggagaaagaaagtggtgatgattgccatgaatgctgcttccaaccaagatattgttctcctcgatgcggttcttttcccgcgagttatattgtgctttcatacccggacttcgcatattacttggcacctgccttcaacttcaaagacatctctgcaaatagc

SEQ ID NO: 241074 - DNA, 319 bp, Gossypium hirsutum
  unsure (1)..(319): unsure at all n locations
gtgaattttattcttagtttatcagttgaagaacaaaattccttgagacgggcacttaagcgggggacacctcgtattgaggtggatctaataaactttttgcaaaacaagaaagagagacagcgctctaagtcatcctatgatccctatgatgttgtaggaacatcatctgaagaaagatatattggtgtgcccaaaaagagtgctttccttgggaggtattcttccggttccattgatagtgaatgaggtatgaaatggggtaccacccangaatcaaccctgatcactggcagtattggccaggcaacatctgatg

SEQ ID NO: 241075 - DNA, 256 bp, Gossypium hirsutum
cgccaaaaaacataccaataactactaattgaattccaacaaataaataatcaaaaaaggaaagaaggatccaaaacctttcgaaagccctttctatcgttcgctttcattcgactgcttctatcgcgctttactaataacatacaaaggtctttcttttctcgcttgctaagtagggtcacgttattaaccttatcttgctaattaccacgacttgcagttgatggcccttaaagactctgccttcatgccaacc

SEQ ID NO: 241076 - DNA, 133 bp, Gossypium hirsutum
cccacgcgtacgttatcttagatgatggactgagttggaagttgaattttaaatgaactggacagatgcatagaaataactcatgttgaaatttaattttttcaatgcagagaaatctccgttgactctgttt

SEQ ID NO: 241077 - DNA, 249 bp, Gossypium hirsutum
  unsure (1)..(249): unsure at all n locations
gccacgcgtccgntcacgcgtccgcccacgcgtacttacaggtgtttgttcacaacagcaggtgcgtagttacaagaagaacattgataagttcaaggctaaaagaattgattcaatcatttgtgttgctcgttatgatccttatgttatgaatgcctaggcagacaaactgcatgccaaagatgtgattgaattctatggggactttgatgggagcttccaccagaaccttgtattgaaaaagatctc

SEQ ID NO: 241078 - DNA, 356 bp, Gossypium hirsutum
agacaccaccgagaagatctctcagcatgatgttagtgacattataggaaggtatattaatgacaataaccttactaacccagcaaaaaagaagagagttctttgtgatgaaaggctttattctatttttggaagaaaaacaataagccgaatcaaagtctatgacttgcttgagacacactatgcagaaaaccaagatgcatgggatgatgacttcttttttagctcagaagaggagaatcttggtgaagaaaaaaaaagtttgagattggagaaaaaaaattaccagaagaaaaggggttttgaaacaccaaaaagctgctttgctgcataaaaccagagaatataaactagtg

SEQ ID NO: 241079 - DNA, 258 bp, Gossypium hirsutum
acgcctaaccaaaacctcattctgtgtgacattcttagatcatggaggcgtcctattgaggagggtttttgctcaaccatctctaggatatcccatatatgtcgacccctggaacttaacctctatggcttgcccgtatcttccacaaagtcactgtgcactgtcttaaaccgtacgtcctgttcaaaacatcctcttccctatcttaacatgcttggaataaatacttcttttttaccttagaagaatagaattttg

SEQ ID NO: 241080 - DNA, 199 bp, Gossypium hirsutum
gccacgcgtcccgtcacgcgtcccgtcacgcgtgcgaacaggtgtgtgttcacaacaacaggggcggacttccatgaagaacatggataagttctaaagctaaggaatggactgcagcatttgcgtctctagatagtgcccttatgttatgaatgcctgggcagacaaactgcctgcccaaaaactgattgaattttaa

SEQ ID NO: 241081 - DNA, 135 bp, Gossypium hirsutum
ccggaattgaagggccgacccaagccacccgtccgcatcattacctaattatgcctagttattcatctaataatagttacagtatcttttggtgaggctatcaagcttaagtgacacaaaacccaacatattata

SEQ ID NO: 241082 - DNA, 167 bp, Gossypium hirsutum
ttctttatatacataaaaaggtcaatcttgcccagaataacatcgccttgtggcaaaatataagggagaacccatatatataatagctaatgttgtcaaaacgtgaaaaataaacctgctttcctgctaaaataaatatagctggtcactcctttccatttctatcc

SEQ ID NO: 241083 - DNA, 374 bp, Gossypium hirsutum
  unsure (1)..(374): unsure at all n locations
ccgggcgacgacgcgtccggacttngtggtaagaaggtgaatggtggttggtgtagttagatcaaatgaagtcaaaagtagcatttttttttttttgaaaaaaaatgtggttatggactggaaaatgtttcacattacatgaaatagaaacttgaaaggtgtcagaatcaacaaaaaaaagacaaaaaaaaaaaaactaataaaaacaaaaaaccttaaaaaaaatcaaggtttgggttgacgatctagagcaaccaaaatttctttcacggggatgcaacattttaaatcttttgttggggccccaaaattcattcaactggccgtcgcttgaccactttcatggttggaaacaccctggagtaacccaattt

SEQ ID NO: 241084 - DNA, 367 bp, Gossypium hirsutum
cccacgcgtccgcccacgcgtccgggatgttcctgattcccttccccatatctgaaaagggcagggagatcttcctctgaataacaacatgaagactgtgttatagctacttctgtttatatctgttttctgtactatgctatatatccagaatggagcaaacaactgctgcagaaaacaacactgctgtagctgcttccattctcctaggtaacattagtctgttgttttgaatttgagttcactgtaatcttttggcctcatgttaaagacctacatgtaagttttcttttcccacaaggcaccatatgaagattgtgtatgttaaatgcgtgcttataccagtgtgacagaaacaaaactatgc

SEQ ID NO: 241085 - DNA, 288 bp, Gossypium hirsutum
ccggaattgaattcccgacccaacccacccgtccgaaaaacaacaaatcgtatctctttatttcaatcaaaaacctaccagaaaaacatatggggggggcctgattttgacagccaagcttagccaccctgacattcgacgtactagcttttctatagtgacacctaacttcacttgattgtcctgcgctttacatcgaagacaccgctacaaccatggctgtaaccaacttaatactctttttaaaaattccccttttttatacttgcataacatctaacaacctca

SEQ ID NO: 241086 - DNA, 368 bp, Gossypium hirsutum
tcgagcacgcgtccgcttgaattaagagatttggggtcaagcattgaattggttttgataaccggattgaataagggctggatgctatatgaagttattagcattcttgaacaagaaggggctgaagttgtaagttccaccttttccactgcggggggcaagacttttcatacccttcatgctcaggctaaactttctagagttggtgtagagactacaagggtgtgtcagagactgcaagaactgattaagagttattaatacaaagaagtgctttcatttggtctgctatttgtactttgcttatcgttggagggggatctccaattttacagaactaaaagggttctgagaactttatcaaatcg

SEQ ID NO: 241087 - DNA, 362 bp, Gossypium hirsutum
gcttatgtatcaaactattgtagcaaaattgctacttgccttttaaccttttatttcatgtagcggtgcaatttcactgtaaaatatcttggcacttaatttatagctgatatatatataatgtgacaaaatttttgaacatgctgcatttcttgtctgtatgtacatagcaatgacatttatttcaacttttgatcaataaaaatgaagggtgaaatcatgttattgagcctccaacatatgaagacgatactgacgaggataggtcaaagagctattataagattgtaagttcggcagaaaactatgcaacaattctttcaaagctacgtgatgaagggataaatttcgagacggataac

SEQ ID NO: 241088 - DNA, 327 bp, Gossypium hirsutum
acgcgtcacactgcccataacatttccaggcgcgaagctcactggcacacctcgttctctttgcagcaggaggggggggtactgaatatacactttactcatcactcattgaggcggataacggctggggctgatcttaaccactagcgccatatgagaagaacatcttatcaagaccactactttcatgcccactttccctgtccgacatgctcaacacctgcgaaggaaaaaaatgctgaagagccctgattctttgcgagatcagcgacgaaaggagatgcaacacgggggactatggactagtgctctatttggctaaaagaa

SEQ ID NO: 241089 - DNA, 271 bp, Gossypium hirsutum
agtgagcatgacatacggggtgaagctggggacaccgaaagagtactacaatgaggagcagggggggacacatttcctggagttcatcaacttggaagaaggtgatactgtacaaggagatcgaaaggatacttttacttaaatacctaaatctgtttttaccaaagactccaaatactacaatgtatgaaatgaacgaaaaagaatatttgcattgcatactcactttattgctgaacccgcaacatttatagaggaggcttaaagcttg

SEQ ID NO: 241090 - DNA, 192 bp, Gossypium hirsutum
gaggtcggaaagttacgaagaaaaaactgtacttgccgttcgttatgaatccaacggcaagagaaagataattgattgcaacaaaataaaattaagtggaaaagagaaagcatgctaatgtttgatgagttccagaaggaacaatgatgcgtctgttttgatgcaaattaatgaattttgtgttttctctta

SEQ ID NO: 241091 - DNA, 276 bp, Gossypium hirsutum
cccacgcgtacgcctagctcgcaacagataaacttgtgcaacaataaactcaccgggattggtccgaagtcgcttttaaggttccctagtttgatgttagaaggtaacaatgtttcttttgaaagaatgcctcctcatacgtcaccatttggtgcaccctatggcgaaccgtatacgacatccaagaagtccatgaggctcggagaaactgcattgtcgagaataataattgcttgttgcattctagcgcttgtggcgttggtgtctttcgaaatt

SEQ ID NO: 241092 - DNA, 328 bp, Gossypium hirsutum
cccacgcgtccgcccacgcgtccgcttttttatttagttctatccattcttagtttctgcggcttggttgtttcgaattacatattagaataatgagggaaacaagtaggaaaaacaaaattaagaaatatcaaatataaattacaaaaattaattcgagattagaggattcaaatgcaaacatacatgcaactaagctgaatacagaatataaattaacatctatttaactttttttttaattacagaacttgcttattcggtggtcgtgaccgaaaaatgtgatgtctatagttttggagtgttggcattggaaatattgatggga

SEQ ID NO: 241093 - DNA, 286 bp, Gossypium hirsutum
tctttactttggaattccagtttactaaataacaagcaagggaggtaatccttgtaaacgaagagagcctagtatttccattgctcgctttacaattatggataggtcagaaacacattattattattattattattattattattcagtactaataaaggacttgcctcttaaaaaaaaaaaaacaaaaaaaaaaaaaaaaaagggagaacaataacaaaagaaaaaaaataacgcccgccgtctttaaaacaacaaaaatttttttaatatttaaaaatcaagg

SEQ ID NO: 241094 - DNA, 200 bp, Gossypium hirsutum
accacgcgttcgttaatataaacatacaagggaagatcacaatcaccaccaatcgagggcggaagatatattgccccagctaaccatgctaatacatgacaatctctaagcacaacttacatggattgctcaacagagagtagaagactttattcgcgttatgccgtggaggttctacccaaacctaatagtctgtatct

SEQ ID NO: 241095 - DNA, 268 bp, Gossypium hirsutum
aaaaaacatgcttctggcgagaagccagtgcggtatgctttgtatgtttcatgtataggcgatattttgttggttttcaagtttcctcaagaggttcttgtttattctccccgaaactaccttcgcacctgatgctatctttccatttgacatttacgaatatttatgatctgggtgaagcttaggggtaggtgtgccattctattttgtacgtatacgagtatttattttgtgtttatatcagtgtgtttagtttttatttttattg

SEQ ID NO: 241096 - DNA, 279 bp, Gossypium hirsutum
aatttatctatccttccggcccttttaaaaaaaactcaaccaccttatatccaacaaaacttcacatctttaatcttttactttctttttctcacctaagctatatcctaattctatactcttcactttatcttctaatcctttcaaatattactaaaccactttacatttcaaaaccttaccaatttaaaatcttatcttcataatctataatctaaatctaaactcttaaaatcattactctcctctctataatctttttcataaaacaattactta

SEQ ID NO: 241097 - DNA, 455 bp, Gossypium hirsutum
caagattatacctgaagaccttcattttgtgctaagaatgaggcatacctttgaatctcgtgggtatcaatctggtttctatctgtcccagttgttttcatccaacagaaacggtccgtctttatcgacgatttcttcaaagcaggctgccgttccaacccgtccacctccactcttcaactggaaccagagaccacttccgccagcaactaatccgatgcttgcttcacctaattttcagaacccggctagacttggatttccacaacccaaagacgaaacccacatgtttctactacctcgttcgtctgaaacccgaatggaagacatgatggttgagcatgaaaacgacatcaaatggcctaatggcttgagcttcttcagtgctctcaccggacgaaccgaagatgccaagcttttgttcaattccgagagtttaggaaacaaatcagaaa

SEQ ID NO: 241098 - DNA, 318 bp, Gossypium hirsutum
gcctcccccatgtgcgccctcagcatgcacgactcccgatgacgactccttcaccgaggttgcaccaaaatggcaatggtttctgcccgttgactcctcatgacctgcaaaatagacgaaaacaacatccaatagacagaaacagagatagcagaaataaacagtagcacaaaagatgtatttggctatataagcccaaaaaccaaacaaatgtagggggattttcttttatgctttttctttctttctttcgaaaagccgaatatgctgtaaaagggggattgaacaaagagaatagtaaagagcagaggttatttc

SEQ ID NO: 241099 - DNA, 319 bp, Gossypium hirsutum
aaagaacattgtatagttgtgtgatcgctaggggaaactgaatagccaatggcacacttccaaatgtcaggaataacacctcttgttttttcccctgttttacaaaaaaaaaaaaaaaaaaaaaaaaaaaaaaaaaaaaaaaaaaaaaaaaaaaaaaaaaaaaaaaaaaaaaaaaaaaaaaaaaaaaaaaaaaaaaaaaaaaaaaaaaaaaaaaaaaaaataaaaaaaagggggcggccgttttaaaaaatcaaaacttactaacccgtgcattgcaacgtaatagcttttttatagtgccaccaaaattaaattaact

SEQ ID NO: 241100 - DNA, 238 bp, Gossypium hirsutum
ggtatttgcaatcccatcattgcaaagatgtatcaaggaggtgctggaggtgatgtgcgaaggggtggtggtgctgagatgcctaacggtggtgggtctggtgggtctggtgcggggcccaagattgaggaagtggattaagttccatggcttttcttctgcatattaaattacctgctgatgtctctgatcttttttttttgcgtgtaccttggtttggcttgtattacgtgatgga

SEQ ID NO: 241101 - DNA, 347 bp, Gossypium hirsutum
aatattcgctgcgtatgtccgcaaagctgcaggagataaacgggaaagctagtctgaaaccgtggaggcaacttatgtacctgacgcagaaaaacggacagttgagtctgaaaagaacatggaagcccacaataagatacaagctgagggtccgaaagacgaacatctgaatcacagccataagtcattgaggagaatgatgaggatcatgatcaacaacgcatcggacacgaggacaatgactaataggaacgtccgctgtggataacataatcaacgttcgcagcgatagggctagatcaaaaccttatgctactgctttagaagattccataacattcttttag

SEQ ID NO: 241102 - DNA, 294 bp, Gossypium hirsutum
gtcagtcagtcacaggctgtcatggagttatttctattttcgagttaaataaaaaaatttggcactaggctatgttttaatagggtcgatttgtagactgatttaaaatatgattggtaaataaaaaggtctggcaatggcataatctttgcgaggggggtccctaggcaaagcttattgtcagtgtcacttggatgccttcgtagcgttagagtcgaactttatgatttgattgtaaggactgatctgaattgaaatattagtataaatgtgatttgtcgttcattgttggag

SEQ ID NO: 241103 - DNA, 435 bp, Gossypium hirsutum
caaccttacatctcaacacaaaccaaccaactatcccaaactttacaagaaacccaatgttgcaaacatcaaattaaaaccaaataattatttggatgcaaagaagaccagcttggctgttccaactgctgcccttctttccacttttgagctgccggcattagctgttacaggggtaaacaatgagccagatctcatcactgtgataattcaactaggaattattgcttttgggtacttcctcatcgtgcccccaatcatcatgaactggcttaggataagatggtatagaagaaatctgttggagatgtacttgcaattcatgtgtgtgttcttgatctttccggggctactgctctgggctccatttttgaacttcaggaaattcccaagggataaagtcctgaagtatccatgggacacacctaaagatcc

SEQ ID NO: 241104 - DNA, 368 bp, Gossypium hirsutum
cccacgcgtgcggggagacccggaatacggatatgcagtgcatgaaccggatcgacactggtaagaagaagtataagttagagaaagctaaaattgcagctggaggtgggccaagtaagcggttctctttcgataagttggatcaacttattgttccgacggagaagactgttgataatgttgatacgaggcgattatggtggcagtgtgagaagcactgacatgttgtctaaagtgcctatggggatttctggtgacatccgatccagtttgaacccgcttcaagttttacagcttgacgaagagcgggaacaacaacaacaaaagcaaccgaggatgggtgcattaaaggatcagaataagatgca

SEQ ID NO: 241105 - DNA, 167 bp, Gossypium hirsutum
ggcttcttatcatcccctgttcaatcaaagcctaacaggatatcaaagggaaatagtaacgagagggctatcagatataaactactaagagatgtatggatgaactctgaataaaccatcgattacatgttcatgagcatatatgcaagtaaattttggtttgtatt

SEQ ID NO: 241106 - DNA, 413 bp, Gossypium hirsutum
tcgcccacgcgttcgcccacgcgttcgcccacgcgtccgcgtgattttgatcgagaacgcgctgggggagaggctaaagtatggggtgagaattggagggagaaaaaacgagcaaacgccattggtagctttgacagtacaaatggctgatactaccaaatcctttaattcatgccgtttctctctttcgagctaagacatgtcttaacattctaaggataatcactcgcaaaaggtagctttgaagaacaccgtccgtcaccgtttcaaaccccggcaatcagagttcatccatgtatcagtaatccgtccaacttctataatcatccatgtagttcccggttgcttcaaaccttgtggttgaaggaagaaaacacagttaaaagaaggaatgaaagagtgacagattttgc

SEQ ID NO: 241107 - DNA, 172 bp, Gossypium hirsutum
gcggaagttgtattacttgattcatcaaatttttaatatcctacttccattaatgtgacatgtcttacatgtcactatccacttattctacctttccatcaatatttcaaattccctccaaagccatcttatattcaaaggattacttatgatatacaaatccctccatatt

SEQ ID NO: 241108 - DNA, 218 bp, Gossypium hirsutum
  unsure (1)..(218): unsure at all n locations
aatttttgggggaatttgtaaaccccataatttcctgtaaaattccttagattcgntcggtaatacataatcagtaggatttaaagtatcctcttgtaatagtttataggcgctacgtacagaaaattcgccggataattctccattccaaaaaaaaaaaatataaaaaaataaaaaaaaatataaataataataataaatttaatattggtctggcc

SEQ ID NO: 241109 - DNA, 392 bp, Gossypium hirsutum
tcaacacataaaattcctttttttaattcatctattataatcctaaaccctacctcaaaacagccgattattcaatatgcgccctccctccccatctaaatctaaattttactcctatttcaactttattcttcctaaataatattttaatctctatctcctctttttaaattttatctaacatttttattactatttttattccatttactttttcttatcaaattccattttttttttcttatttctattctatatttctcatattccttttattgcctttattcatttatctttttctttctttatttattattttatttttcattatattctatttatatataattatttcttaaaaatttttctataaaatatccttaaatatattt

SEQ ID NO: 241110 - DNA, 404 bp, Gossypium hirsutum
ggaaagggtaattcgtttcccttgttactgttcagtggaatgaaaaggaattgtgggtgctgctcaaagttgcttcatcatcacagcaacactaccaccatggttcattaatggtggtgtttttttatgggttttcagtcttcttcttcttctttttcccatatatatacatcagctgtgatcagttttctttgatcattttttgactgatcatagcaaatccagttccaacaaaaatatatatattttggatcttgattgatcttggcttttattaattaattggtttattttctccttaccaaacatgatattttatttaaatgcaatgttattgtgattttaagaagttatttttttggttctttttttttctcttttttttttattctgaatattctttt

SEQ ID NO: 241111 - DNA, 285 bp, Gossypium hirsutum
tcccactcgtccgttggacaggtttgattccattcttcccccatgccatgtagctatcggtgggtgttgtagcatcaaagccaactgctataactaatgcttagggattcttcaccgcgaaaaacaaaatgctggtgaatgttactgctgaccaccaaattatctatcgtgctgatttgacttccttacttcaaaccttctcaaagattgttgacaacgctgaaagccatactttgtatatgattctcaggtttatgcaatgaattcacacctagtcttctaatt

SEQ ID NO: 241112 - DNA, 357 bp, Gossypium hirsutum
cccacgcgttcgaaaatgtttatgtatagcagtgtagcatccattttgactatatgtatgtggcatgctccggaatgttttaattccttccaaatgaagctgaattttactgtattgcatcttaaggatctaaagaccctgcttctttccaacattcatagggagttatgccgacacatcacacgtctactctcaacatgcttacataatacctcgtggacccggactgtctataccttcttaaaagtcgtagtgagctgaacacgctttaattacttgtacgccgcgacagtagattttgtacgatatcctccagtccctcatctgctgttttctgctaggaagcaacttattgac

SEQ ID NO: 241113 - DNA, 287 bp, Gossypium hirsutum
cggatcccgttctacccacgcgtccgaaataattatataaatctccaattgcaaagtatatcaaaaaaatatattattaaaaaataaagagacaatttatacatattacacaccatatataatcattactataattccatctattctaaaattatacatcttcaatcattcctatttatactcattcttctcttgtcatttattttttcttacctcctattcttaattcttaatctcacaattttctctttcatctttattgttctattatcttttcttttattcta

SEQ ID NO: 241114 - DNA, 298 bp, Gossypium hirsutum
ggactggtctgcggcttgtcctgcatggctgaaaagtggtcgtgctgactggggggtccttaaattaactgcacaactgccatgtgatcacatgctaacagcttctaggtgaatggagacgtatagatagcctgtggacttgatgcacagtatttctcaactgctcatcttgggagggatgcacatctgaatgagccatatgctcatgagcatgcatgtgacgtcgattctaacatagcgcaatacgttgtcgctggttatccggtttggagaaagcttacttgctggattgacacag

SEQ ID NO: 241115 - DNA, 416 bp, Gossypium hirsutum
gcccctgcctctccattctcttttgctctcaaaatccggccatagtgactgtcgggctcatggggcaccaacgacggcgtaaccgtccgtggtgatcttaaaacgcccattttcgagccctcttggagatgaaatcttcggcctttacgaggagagtgaggaaggggggttttctttgaaaaccgtcgtatcatcaagccccgaatcggaccccacagtgttttgggtctcggcgccggaaaggtagaccgacggaggaagacgaaacgcttccggagtagttggcggtggagcaggtggccaccagtggcggtgacagagtcttggggctaggttcgacgccgaataggcaataggggctaggtttttttgttttttgaaaatgtcgggaatgggcttgtaattgggtagtgggc

SEQ ID NO: 241116 - DNA, 431 bp, Gossypium hirsutum
tcgcccactctttcttccacgcgtcctgtttgtttaatttctttgggatattatactttcaatgttagattccaatttataaatgttgcacccaatatccaaatcaattcctttgtgatccaaactttccttttgtcccctttctcatatttaaaattattaaattaacttatttctttatattttcctacttttccacttatttttattatttttgtctattttttatttataatattttaattcctctctttttggctttttttttttaattaattttagtttcccttttttatttttaattatttttttttaattgtgcttgtcaaaaaaattaaattctgttctctaatcaaaattaatatttttttttttataaaccttttttttttcccctcatcttttattatatttccttttcttcccccttt

SEQ ID NO: 241117 - DNA, 264 bp, Gossypium hirsutum
tcttcaatcaaaaaatttaaagttctataattctttattttgataaaaattaaagccgaagcatctttctcattctgttctccccccaatccttccaatctgtttcactcaatgctgctttatccgatttcatttcattgcttattttttttttctccccttaaatctcttacatagctttcaacaattttaccttctattgcttctttacactctcatttttattttcttcatcatattactcactccttgtcgttttttaat

SEQ ID NO: 241118 - DNA, 362 bp, Gossypium hirsutum
cttcagtatgtgattcggagctcgggtctccaccacatagctgaagtttataaatccagaggtggaagaggataggatcatatagttgcaataagtgtagactggattaatagcagcagaaccgtgtgttgtgaatatacgaaagaaagggtatggatagattagtgtacggattgtgaattggtaggagtcggacaggtgactgacttttgtgggtgttcgcatggaaatgatgttatttgccattgcggagagggagaaaagaagaaaccagtttgaaaattgtgtttaacttgtttttgtgtggtgttacatgtactgataatattgatagtagtagtattactggatttttttgcttg

SEQ ID NO: 241119 - DNA, 360 bp, Gossypium hirsutum
cgtttttgcaggtacggggtgtgcgtggcgcgagtacgggggctgtgtgctggcgtaaggaggcgcgcgtggcggtcgtacggagcgagggctggggcttggctgcggcgcgaggaagagaaccctagggtttctattgctaaggaattttgggccttgaacctttgggtctagatttgggcttgtagtaggtttgggctagggtattaatttgggtattgggttagtgatttgaatttaatgtttaggtttggtttggtttaagcctaaatatttgtaaacgaacattggacttttgatttttaatttatgtttctgggttcatttcgagccaggcaaaaatgggacattacacattat

SEQ ID NO: 241120 - DNA, 340 bp, Gossypium hirsutum
cccacgcgtccgggagtttccttcatggtttttaactgctctaccccttctcaactcagagccgtgtaatttgccccacgctccgatacatcctaacctcacatctttcatccctgttcattagaacactcccatacaaccaataactaataagcttcttcctctcatacccaatacaagctgccatcaacaaataatctctatttataccaacatccgacatttgattgaccatcgatgccgcttttgtgctacatccgtcgcgtcagtccgcctttggtgtactgtacatcttaaatctggaatgagcaactatatctatagtttgattgagtcagaa

SEQ ID NO: 241121 - DNA, 325 bp, Gossypium hirsutum
  unsure (1)..(325): unsure at all n locations
cccacgccgtgccgcnnaagtgttgctcggttcttaagaagtaactttcggagggatttggataaccaannnactcaacatnaaacttaactacgtcggttgatnctctttgagggggaaacctgtcgaagaacttttatgtaaacaacagaacgaaatannagctattgagcatacgngtagcttgatgccttgtgaagacacagtcacctcgttctcaagaaaagcagacacagtatttgtaaagcaccattatctgggaaaagctttatcacgttggccattggatgccttaannaagctttgtgccttcttggtgcgttgc

SEQ ID NO: 241122 - DNA, 105 bp, Gossypium hirsutum
  unsure (1)..(105): unsure at all n locations
accacgcgtccnggaacgcgaaaggaaacgcgaagagccaaacgaaaacgaagacacnacagggcagggagacaaaaggcaaacgcgaggcggaaagcacaaacg

SEQ ID NO: 241123 - DNA, 352 bp, Gossypium hirsutum
aacaaacatacgttccctgaaaataccaatattaaactccttaccaacctaaaactgtactgagctgggttactttgaacgatctcatacctttatataaacacaacacaacccttatctaatcccactatttaccaacaaaatgaaataaaaccactcccttcgcactcatcaactccctttcatacctaataaacttccaacatactctttctcattatgctcacaaattacacttcaccattttccaacttttcctccgcgttcatccaaacaactccatgcctccactcgaacatcctctcttaacctctttccagattccaccactcgtcaaagtttaactaccctc

SEQ ID NO: 241124 - DNA, 370 bp, Gossypium hirsutum
cacgcgttcgtttaaaatgatacttatatcacctttacttgccctgttgtctcccaaatgcatggtttaattttttccctttctctcacctcatatataaatgtttcttagtattagccaataataataaaccaatcatctcttgttctagttaaactactacttgcatctattatttaaaaaaataatatattcttcctaattttattaaacacttgaacctacttcctctattttacatattatccatttaataatattgagtatttttaacatcacataccgtgacatgtagcaataatctttaatcaatttttccaactcataaattctcatttataaacgatatattgactcatattatcttttt

SEQ ID NO: 241125 - DNA, 312 bp, Gossypium hirsutum
aaatggcggcgtccaactctgaaaactatttaaaaaccgaagtttcaagctcgggtgaatcagaacagcctcagactcaatctattcgaatgccaagcatggagtaaatccctgcccatgaagtttggaataactttgccgttcgtagtgtacccagtcgagtaatgggtggcattcttggattcataatgggtatggttctagctgccttgtataatcctgaacttcatgatctaatgattggaacgccacaattactctttaatttgaagcaaatgggttcaataaacttgagatctgcaaaaacatttt

SEQ ID NO: 241126 - DNA, 445 bp, Gossypium hirsutum
gtgagcctgcatgggatgggagtgaactaagatatgctggaaatccattttgcgatcgggatggggttcatgtgcacctgcgacatgattctaccattcttgtccttactttcttaacttcaatcatgatacttaggtgagacattaactttaagcacctgcttgatgaacccattgctatgaacaattcaactcgggtgttagtttgagtcgacggttgacatttcagtgacccccgatgctgattttgtgcgaccggagttgcgtcaatctggcaattgagtctatagaattctcataactggaatgggccgctatatttatagtagtgaatgatccagaacttgctcggcatgtatgtagttgatgaatttgttgcaatgacttgaggctggctgccgtttttatgaatcatttttaaatggtttaccttttggtaggacca

SEQ ID NO: 241127 - DNA, 257 bp, Gossypium hirsutum
cacgcttcctttaatttccttcatattttttaactgctctaccacatcactatttggatcgatttatattttccccactttcttcattacatcctaacccaacaatcttttctgtcttactacaatgtcactcccatcaaccatgatcttctcagcaacttcttgtcatacccacgtcatcatgccatctaattctgttcttattttagaccttccttttacatttcatcaacctcctatacttattttttgcgacc

SEQ ID NO: 241128 - DNA, 342 bp, Gossypium hirsutum
gttgcgtgcttcattcatgcggcttttctcctttggaagtgatgggaatctctagtatcctccctatgctatgggcgcttcttctactggaaggttggttagctggatccggataacaggaataagtagaaaggctggatggctgtacctgctttagtgacggaataaggcggcgacctttttctcatcttgagtcgatgcttaagacatgatagttgaaggctttcttcctgctttcaggggcttttcgcctgaaccaaatgaacggggcgctcttacgtaccgtaggttgtgtgaagaccgggaatttaatccagtaattcaatttttcccgagacctac

SEQ ID NO: 241129 - DNA, 257 bp, Gossypium hirsutum
ctacaatttacaagtataagtttccaccacctacacctccgtcaccacccaaggggccttacaagtgcaagtgcccaccacctttaccgtcaccacccaagcacccctacaatgacaagtcacctacaccaccaccatcatcaccccctaagcattcttacatgtacaagtccccaccaccaccgttaccacccaagcaccattacaagtacacgtaacctgcacctcccccactatttttccttaagcacccttac

SEQ ID NO: 241130 - DNA, 326 bp, Gossypium hirsutum
cccacgcgtccgaaaattaaattgatgtttgtatacatgctctaccacagtactatatgggatgggggatatggacacggggcggtcgttttcatggtatcccacctagcttcgcttgctttcgacaatgtcactcctatataccaaggtcttcgtggtatctattggccagacttattccatgttgccattgaaataaccgttcatttgacgaactcaattgccatttaagatacccccgtttctgattttgtgctactagcgtagcgtcaatctcccattgtagttcatagaatttgtgaactctaattagcaactatatttat

SEQ ID NO: 241131 - DNA, 328 bp, Gossypium hirsutum
cgcacgcgtacgccgacgcgttcgcgcacgcgtacgtgcgaatatcacacacaggcactttccaggtctaacatgcacttcgtgggatgggatcatatgcttttgctacatagttgcatggctgccagaaagtgtctctcttgtgtaccaggagccttacacaatgtacctcaagacatcacaatccattaggaagtgtgaactactgctacatggcttatgcatgcaacacagctaggttatgacatcttgtattagaatataaatagcttcatctgcgcggtcaataccgacacagtgatgatttataactttctcaaaccgaact

SEQ ID NO: 241132 - DNA, 457 bp, Gossypium hirsutum
tttccattactacaaccaacttactgccatctacgcaaaagatcgagcgactgggaaagatggtgcaaacaaccgctgatgttattgaagaaataaatgttcaggatgtacctactacagatattaatgaagaaagaaacgaattctatgactgtgaagctgatgtctctttggatgacatggatgtttctgctacagaaccgcaactagatagtcaccaagggggttccacatcttcaaagaagaaaaaaaagaattctgatgcaagtgatcatatttcttcttcatttcattatgctgccactatattggcagaaaacattgcggcccattgccaaccaaatcagtaggagtattgcttccgatgtggtacttcaacataagtcagaagaattccagatcattcaagaaaaagctataaattatgtccaacattatgtgaaatagaagtttacct

SEQ ID NO: 241133 - DNA, 460 bp, Gossypium hirsutum
gatcaatacattcttttttggctttatagccgaactttaaaagaaaaataaatgtctaaaaatagaatattttttcttgctttttgctgctttgtatgtcttggttgattgcaggtacggggtacagggcgtgtgctagcacttggcgtgaggcgtacggaggcgcgggcgtggatgtggcgccaggaggccgtatgaggcttggaggctggaggttactgttgcggcacaaaggggggtgacctatggtttctgaaactgtttaagtttttgggccgtttgggcccttattaggtttgggctatgggttttaaattaaggttttgggtctaggtaattgtgtcaaggtctgtaaatggacatttaatggactattaataattgggcttttttattctttatatggccttgatgtggaccccggcaaattggcctgtttacaaggggttcaataaccttg

SEQ ID NO: 241134 - DNA, 280 bp, Gossypium hirsutum
ggaagaccactataaattttcattccccccgcccccccttcttttttaaaatttgatgaaccaggttagctgcgaggttgcatggcatgattaagagatgtagaggtttgatgtatttttatataaacttgctaaaatcttaaactatgctaaaaaaattgatgctatgtaataaagagaatatttaatacaaaaaaaaaaaaaaaagatataataacattaagaatttgtcacgcattaaaatgattggaagaactcgatttctaagccttaaagattt

SEQ ID NO: 241135 - DNA, 347 bp, Gossypium hirsutum
ctcaagttcagattgttactcgacgaggatgttcaagtcgaaacaaattcccaaaatagattcgattttgtaaactagcaaactcaaaatttgtagttaaatgttgatccttaactttgaaagtaatttaatgaaattttgaaaataatttaatgaaaaaaaaaaaaaaaaaaaaaaaaaaaaaaaaaaaaaaaaaaaaaaaaaaaaaaaaaaaaaaaaaaaaaaaaaaaaaaaaaaaaaaaaaaaaaaaaaaaaaaaaaaggttttgggttttggtagaaataaatttccattccttcttttcccccgttttggctttttaattcctcatttaaactaagtttatt

SEQ ID NO: 241136 - DNA, 162 bp, Gossypium hirsutum
cccacacgttcgctgacacgtccgtccacacgtcctctagaatcttttagccctttactctggtggtttgacctgagatgtgtacattgacttcgtgcttgttcatgtttcaacactcatctaatacaataattcacatcttctgttgaatatcatttctta

SEQ ID NO: 241137 - DNA, 434 bp, Gossypium hirsutum
gcatgattaagtaactgacagatatgcgacaactggtcaagcttttttgaagctacgctgggatacttggatgacaactcttgaagcttgcgactatgctgacaactaatagggatacagtttccgactcatccactcgattcgacacatgtcataacgcttaagagagtgagttactgtgcttgcagaattcaaactttagcaattttaatagagaatagatcttatgatagaataaactaaattttctgatcatatttatgaataataaaagtgtattttcatttttattacccaattacttaaaatgaaacatggttcattagtagtaggtattgaaccttaatgcatatctggtgatgatggggtccctgctttgtagctctaaatttttatcccctaagtaattggctatttaaatggtttaatgaatt

SEQ ID NO: 241138 - DNA, 351 bp, Gossypium hirsutum
cttaacattattattcttaccacccctgggctccaaaccgcgagtttacactttcaatctgcccctaaagctttcaaattaaaaggcttcttttctcatacccttccagccaattctactgccaacataccttacaatattatcactttcactaactgcaaaaattccaattgaaaattattaatatacttctttttcttcatcttgcaatacataaaatttatctttataaagaataatataaacaatgtatattaattttttaatttaattatcaaaatccaaaattattcttcactttactttactgaacccttttttattttttgttatcttttgtaccccccattt

SEQ ID NO: 241139 - DNA, 347 bp, Gossypium hirsutum
gaagggaatagtaatggatcttggattacttgaggggagatattgacatacatcacggtgaaaagaatacatgtatgcatgtatgtatgtatggtcatcttgtcaaatcatctattcgctatatttggttgcttttttttttttcttttaagaataccggaagataacaaatattttacaacagaggttaaatatttcatcacctcgtatccatctgtgggtggaatgcacaaccatcctcctttcaattccaaaatcatgtattctatgcaagatgtagtagtttacaagacaactatgcagcaaatgtttttgctttaagtttgaagtggctgaaactttttgct

SEQ ID NO: 241140 - DNA, 234 bp, Gossypium hirsutum
ggatcaggtaagatgacctacccccttctggatgtcaaaaccacgacttcttcttcaaagcctgacatacatggggcgagtctacgattgcaaacgcaccacactgctataaagcccgagctagctatatctgcgcatgataaacagcggggcgctgcaaatgttgatgttcggacccgtgcttattgtgctacgaataatacgccctaaactaagactggctccaagggttct

SEQ ID NO: 241141 - DNA, 265 bp, Gossypium hirsutum
gccacgcgtcctttcacagatctcttctttttttttacctacctttataattcataccttccccggttcttccaagtggttttttcaacctcctctccacccttactattacaccattaattatttcatttttatccacatctaacaatcctttattcacaaacttttatttttcttttatctttacttcctataacaataaaatcacgctgacgattatatacccagttacaataccattatatgacgtgattattcttttaac

SEQ ID NO: 241142 - DNA, 256 bp, Gossypium hirsutum
cccacgcgtccgcttaggctcattacgattataaattatatatacaggtaaataatctaccgggacagcgtggactttgtctgggtcgtatgatgtgtgattgactgtgccattgtccataagaagctctggtgaatatgacacaattattgtactatataataaatactatcctgggggcatttatcattccagcaggtttattcatagaaaggatcaaggtccgtaaagatgagattcttcctgtaagaggcct

SEQ ID NO: 241143 - DNA, 148 bp, Gossypium hirsutum
agtacacatcgagagcggtgcggcttatagttatttttatagctagcttgtagtgctgtgggaaggactatcgggtgagcaaaccattgctcctctaatacccataggacgacgccgttaacataggggtggacaaatcagagtagga

SEQ ID NO: 241144 - DNA, 379 bp, Gossypium hirsutum
caaagaccaatgggagtggttatgggtgtggaccaatatgctaactcatcagatgtgtaactcaggggtttcggcaactgagtcagtgggaacgaataggaccaacaactcccaaactgcaattggagatgacaagatcaacatgcacttcattgattgccttggagttggagcttcttaaaacacccaccattagttcttttttttttcttaattactttttgtgtttttttttctttttgttaaacttgaaagtagagaaatccagcttgaaacagaagagggaaagaggagcatattgagtccattgtgcaaaaacaaaaaatgttatgcttctgcagttgattcatcatttttataatttttgtatatacagttt

SEQ ID NO: 241145 - DNA, 268 bp, Gossypium hirsutum
gaaagaacgtcgtcactgaccattactacatacttccttagcacctctttccctggaaacgtttggccaagaattactgagcggagactaacgcataccaataacccctacgaagactaagttgcgagtgtccagatcaacatgcactggattgcttatgtcaacattggcgcgtgttagaacatgcacgatgatgccgctgctcctgtttactcacttgctgtgtttgccactctacaggctaaacttgatagtagagaagcccata

SEQ ID NO: 241146 - DNA, 280 bp, Gossypium hirsutum
cgtccgaccacgcgtccgtttaaaattacatcaattatctaattacgagaatgaactagacattgtatgtattaatttagcggtttgagattttattttatgtgcaaggatccttgatctattttggaggttgagagaagttttcattaaaattatgaaattagcaattatctactatcttattgtattaattaaattcataaattgtatatttaaaatttaattttataaaaatcaaaataaatggtcttcccctctataggatccattcttacattct

SEQ ID NO: 241147 - DNA, 254 bp, Gossypium hirsutum
ctcacgcgatcatagatgcgttgggtctcgcgatgggcatcgagaacgtattggcttcgggcgcagtgtcgtcactgtggatgacctgtgctgagcatgcgggatacttggaagtcctggagtaaatggttggactaaaccagacgatcgttgagcatttatctaggatcatgatggttatagacacgaagtttacagttggaatggtgagagacggatcgatctcattttatctggagctagggcttcaccaa

SEQ ID NO: 241148 - DNA, 196 bp, Gossypium hirsutum
cccacgcgtccggagtagtatgcggtactgatatccctatcggttacgggtttgcttatgtgaggggctcccttgcgttcagcaccttttgtccccaattcgcctactatgatgcactgattaatttatttgagatatgcggggtggtgttggtatcctccactccaaacatgagcttttacaactttaattttac

SEQ ID NO: 241149 - DNA, 315 bp, Gossypium hirsutum
gactcgaacccattgattcgacctataacactttctgataggactactggtggttatgggggtagatatcaaaccagtgatgatggtgaacatagtaccagatatgcaatgattgattgagtgaggtgttacgagacatatgggggagtctgttggattcgttatatcctaaaggatttattcatggctcagaactatttaaccgcaactaattctaccggggtcttatctagacgcgccgatgatgcaagatgcaactaggacatgcagtgatgataggtgaatttaatattatatgcacaactgtgacaggat

SEQ ID NO: 241150 - DNA, 475 bp, Gossypium hirsutum
gggacagagagatcgtggaagggatcacttcttcaattccaggaaaggatacgagagacgaccagcatctccaccacttccaccaccacagcttccaccccgtggcagaccacgtgacatgagagaaaggagtagatcaccaatcaggggtgcacctccaccaaaggaataccgtcgcgatatctacatggagcgaggacgagaggatctacgaggaggtgccggacgagacagaataggaggcccgtattaaccaaatggcagaaaagcgtattgggatataaacttttgtatcgattattttaactaataaattcgggatttacagctttttttggttgggtttggcttttacactataaatgcagcttgttatcgttgtaaaccctttttcaagtgttatgaagacagctaagactttatttctcaatgctttggtaaaaacaatgattcacattgctttcctgcattcaaa

SEQ ID NO: 241151 - DNA, 426 bp, Gossypium hirsutum
cgcaaacgcagccgcttttcatgcaaccgcagccgccgcccccgccggaagaaacgcaaacgctgttcatgcaatcgccgccacagaaagaaacgcaggcgcaagttacgcaaccgttgttcatgagaaggagccctagaaatactgataaagatgggaatgccgctttagaaggagaggagcagttgggattaaagaataaatcgccggagcaaaatcggccggctgagccaacatggaggaagcagatgagtcagatcggtttagctgggtcgagtcaggtgaatcggacaggatcggttggttcgagtcagattagtcaggcgagtgaggttaatcggcctcagccgattcgaatgagccagattaatcaaacaggaaccgatagctcgagtcactttaattgggatgagccaactcggacgg

SEQ ID NO: 241152 - DNA, 216 bp, Gossypium hirsutum
gccaagcttgcattattactaccataaaccatttctttggtctgtaccaaaccgcataagggcgcggagcctcttggctattaaatcaactatacataaccctttattcctcgatgaatagaaagaattccaaaagactcgaccctgatttctttaattcatgtgatgcactagaaaatgctgttatattatgttgaaaaggaaacaataatgtct

SEQ ID NO: 241153 - DNA, 359 bp, Gossypium hirsutum
  unsure (1)..(359): unsure at all n locations
cccggtcgacnacgcgtccgcccacgcgtccgaccacgcgtccggccatcctatcattgtttttgtccagaaattctttatctaggcatatgagggtcctagatagaggctgatgtgaaatcttgcagctgaatttacagcttcatttccctttttttggcccattcccatgtatagtatgcccttatcgaacttcatagttaaaacaaaatccaaaccctgcatgataagcttgtctcctccctcttatattcaacacttgaacctgcaggagcgagatggtcatgttgcatctggttgttcagtttcagtaggcactatattcttctcttcccttaaagaaaaccatgcaatctctt

SEQ ID NO: 241154 - DNA, 385 bp, Gossypium hirsutum
ggtcgaccgacgcgtacgcccactcgttcgcccacgcgtccgttgtcctctcaattaatggacaaaataaaacagggtgtgaaggtgaagaaagtgacaaacgtgactttgaaagtgggattttgggttcttttcttttctttttttctttttctatacttttggggaaaaaaaaggcaagatttcaagaacaataactgaaaaaaaagggaaagagataaaagggaaaaaaactctctctctctcttttttttttttaaatattggaacattaataaagattgtgaagaaaaaaaaaacatatatatgatttgaatggatgcattaaagaaatgcactcactttacataccttatctttttatagggtttaattgtttgaaata

SEQ ID NO: 241155 - DNA, 273 bp, Gossypium hirsutum
atggaaactgacatattatgagaaatctatgtaattgtttgtcaaaaaaaaaaaaaaaagggaaaaataaaaaaataaaaaaaaaaaaaaaaaacaaaaaaaataacaataatgtacaaaatttaaagcatcaaattactaatgaaattgacaatctaaaataataattggaggcccttattaaaaaaaaacaatccgcacgcctctgttgtacaaatttggctattcaatagacgtcccaaatttaattctttggccgggatatataaaatc

SEQ ID NO: 241156 - DNA, 373 bp, Gossypium hirsutum
cccacgcgtccggcaagttctagcacagtgatgaaggcagagaatgggcagtcgagctcgagctcgagctcaagctctaagaagagggggagacgagcaacaacaatattaacgctaccacaaccgcgaccacatcagcctaaggagcggtcgccgttgaccatagccaccttacgattagtgaaagagaaggccgagaaaaggggtaaaaggacgtcacgggctgtctccgtccggcactttgataatactgatattaactattactggttgctccctggatgggttgcggaggagcgctatgttccgtctggccagaagggccttggtagggattataaatattactatgatcctcctgggcacatgtact

SEQ ID NO: 241157 - DNA, 285 bp, Gossypium hirsutum
acgcgtccgactgattacacattctcatgggccgtcatgatactcgaccatatgacttatgcaggggggccgcataccgaatgtataccacagtggggccttgctgctgttcggggcatctttacttgcatgtcttgctattacgcattatccgacaccgtggtgtgagcaaaacctattttggacgctgctgtgtagccgacattcgagaactcggattacgagcgagacgtcgatggtataactgacgtgcatgatgaatggttcatgcgtgcaccattgacc

SEQ ID NO: 241158 - DNA, 292 bp, Gossypium hirsutum
cccacgcgtacgtccacgcgtacaatcaacatcaatgctgttgctctgatgcattcttggagtatagcttgatttgctgcactacttgcaaaataacgagctgaacccgagctacaataacactagtgatttcaacactaaattaatgatagtcggcgcttggttcttttaaactctaaatataatggaggccaaacatgcctccttttagaaacctaatttggagggctgatgaggccactcattctgactccatgagagacaccttggctgaatgtctgtacactatcat

SEQ ID NO: 241159 - DNA, 220 bp, Gossypium hirsutum
gagaaagagaaacttcaagctagcagtggcagcgagaatgcaatgcagaacatcgcagacgcaccatgagataatactctaattcaactcccactattctgtaccacgaatcataggaatagtattcctaattcaatttctccttccatgtatcacaatccatgttcatctgtaaaaagagtacttaatggcattgttatgaaattaacaactttagatt

SEQ ID NO: 241160 - DNA, 408 bp, Gossypium hirsutum
cccacgcgtacgcccacgcgttcgaccacgcgtccgcccacgcgttcggattgagcaaggggtcgaggttcaacgaaaatatgaagaactctagcagcaacttagagcagaggcagcagagagggaggcagcggcagcagcgagagaggcagcggtagtaacaaacgtggcagaggcacgagctaaggaggcagaggcagcagcgatggcagcagagcagagcaaaaagtatgatgacctccagctacagcttcagcagatgatgcagatgtttcagcaatcgcaaaagccaccatcttagacattagttttctcattgtaataatgtttttaattttgtcacgtataacattattgtaagaatattttaaattatactttattaagtaataatatcatataactttc

SEQ ID NO: 241161 - DNA, 355 bp, Gossypium hirsutum
gagcaccacgatgacaatcctggacagcgcagtgggtgaagtctgacaattcatgcttgggggatattatagctataagagttcatcatctgcttgcgtagctagcttatgctgggcttttagaagagacctttctcaaggtatatgcacagatgtttgcagagcatcaagaaacattgatgatggatcttgcactagctcttgccgtacttatcaacctagctgtcatgattgatcctccttaggacatatgaatagacgattcggctgacacattgaagatggtcgctcatacctctaccgtgtaatggtaagtaagactgacaaggatcaggttgataggattagctatgag

SEQ ID NO: 241162 - DNA, 344 bp, Gossypium hirsutum
accacgcgtacggaaggactcgccgttgctgttaaaagaagggcaaaccgcgttcaaattgtacgcgggtggacgaagatactgccagggattggtggcaacgattgagttaaagagcagacatgatctgatatctagattgagtaatttggtggtcccgtgtaaagatgaaattacttgttgagcttatatgaatgaccatacaattgatcacgtggtaatcgtgggtgcaaataagaaagcgctctacgggatgcaaaatgaggtgagagatttacagagattctgcgggttgatgccgactcctagtgaaagaaaaagtggtgaggatgaactatccgtca

SEQ ID NO: 241163 - DNA, 414 bp, Gossypium hirsutum
  unsure (1)..(414): unsure at all n locations
gttttccactctatgcttttgtctaatgttgcttgttgtttgttcctagggagtgggcaacactctgaaaagacattatgagacttaccttttagagtatgaattggctcatgatgatgtcgatggggaatgctgtttgttgtgtcacagtagtgcagcaggtgactgggtaaactgtggagtttgtgatgagtgggcacactttggctgtgataggcggcagggtcttggagcctttaaggattatgcaaaaacagatgggctggagtacgtttgtccacactgtagcatctcaaatttcaagaagaaaccccacanaactgtgaatggttattgacaaacctttgactcactttagattccattctacacaacttagaaatatctctcttttagtttcacttttcaatcttt

SEQ ID NO: 241164 - DNA, 450 bp, Gossypium hirsutum
  unsure (1)..(450): unsure at all n locations
accatacgtcctgacgatagattactcaatctgaaaagacaacactttatatagacccaggtaatcgcgagtntaatgacgtatatgaatctttaacctcatatgataagatgaaacatattatggctgaaaccgcctctcagggagagggcctgattccttgtgggctacacgatcagattgctgatgatgatcggggcaggacacaggaacagaattctcgcggcaaatctaagggtctatccgagtcttcatatcgaggtcaaacttataccttctgcaagaagaaatgacacattaaatatgaatgttataagctacagaacaagatcaaaagggaggctacgaatcaaaagggaaaacaaccagaattctggtgaaactgatgttgtagaagactacagcgatgatgaatttctagtcttttctatcaacaattctaaagtgagc

SEQ ID NO: 241165 - DNA, 316 bp, Gossypium hirsutum
cccacgcgtacgcccactcgtccgtccacgcgtacgctcactcgtactttcaagcgacgggtatcttttgtacatctatggctcctatactccttcttatatggctatatcagttcaaacttgtatcctactgatgcacagatcgttgtctgctatgggatgctaggcattagtctccctagataatgggatgacattcaactggaccaatcatacagcatccgtcgactgaggctctacgatccatatcaacaatcattacacagctcttatgggctctaacattgaacataatgttatgatgttccaaatgatc

SEQ ID NO: 241166 - DNA, 466 bp, Gossypium hirsutum
attactcgcaaactctttcatgaaacaaactcatagtactgcctatgctcgaaagcggtgaaggcgttcgttttacactttcatacctacatgtcgtggaatagcatcaagtatgtaaacacaaagaatatgcattgctgcgttatgaaatgagatacatttacctcttacaaatcttttaattgcctgcaacctgcttttaacatgctagacaactttaagctcctccggtagtactatgtgtatcattagtaacgcacaccaaccagggacacgatgtagctgtaacctaaaaaaatagtttggaaggccaatgtgttcacatagggtaacgactctgctacttgaagaaattactccctttcacataacaggacccatactgagatcgctgaggtgctttacaagagttgctctcccattcctacttttgagcagcagtgcatcacactggtgtactactatg

SEQ ID NO: 241167 - DNA, 227 bp, Gossypium hirsutum
gttaattctagctatcattcaacatcatttatctttcatactgacccttgcatgggccgcgtcgttcactgtacatgaatgcatctatgccaaaagatccatcatcagtttcgtgatgcagcaacaaaacctaaatctcatctatgatgcaaccactgatcattatcaaaccattttaatacaatacatgaacacacaactgagcccacagaatatcacccactcat

SEQ ID NO: 241168 - DNA, 191 bp, Gossypium hirsutum
cagacgcgtacgatgatgtgcaagtgcaatccaaagcatgattagtacattcctggctacctgacatatttgtgtgacacgtttctcaacgatacaatatctgttgttgctaccatcacatcgccttgcaccgagcagtgtgctgaccggcccccaacagatatctaccgcacaataaactatcatctccc

SEQ ID NO: 241169 - DNA, 324 bp, Gossypium hirsutum
cccacgcgtccgctgagttaatactgtagagaagagaatgatgatggcatgattgaatatcgagaaagattgttaggagagtattgcggaagtacggtaagcttgggttggttggacccatcgtcatccacaagctgacatgcgaacctccccaatgaagatatcgaccacacattgtcgtacgtacttccatgctgttgctggtgaatggtcagttgttctgtcttttattatatgagtgcattactaacaaaccacgataaaaaataacttatatccaaatcttaaaaataatattattggtggaattattatgagtttaga

SEQ ID NO: 241170 - DNA, 234 bp, Gossypium hirsutum
aaaaaactgaagtacacaacgtcgtgctattaatgatatctctgaggctctatacacagccgcggctcttaatacgacgatctattgacaatgacgtgctcggaaagaacccaataaaaatggggtgaagatatttttatctatggttggaatctgcatcgaatgacaagtatgtctcacgatgcagagacactgaatcctgaaaggtggcccttagatctaccgaatcctaat

SEQ ID NO: 241171 - DNA, 304 bp, Gossypium hirsutum
ctttagttggtatagagagcatttgataccgtatcgagttttggttggtttgaaacattgttcacgtcaatttttttgcaacttgaacacttttagtttgcaatttcaatagattcatttctcatttaaaaaaaaaaaaaaaaaacaaaaaaaaaaaaaaaaaaaaaaaaaaaaaaaaaaaaaaaaaaaaaaaaaaaaaaaaaaaaaaaaaaaaaagggaaaacaaaaaaaaaaaaaaaaaaggggggggccgttttaagggacccaagtttacttccccgggcttgcgaagttttaatttttt

SEQ ID NO: 241172 - DNA, 401 bp, Gossypium hirsutum
gaactcgcagagtggtcgagcggcgaaaatgactccgacgccgtcatcaacgtgtcgtgtgaggtggtgttattcgaacacttgctttggatgctagaaaatgctgaccctcatcagcccgagtctttggcggagcttgtcgagttttacgcttgttgatcatatgacagttcccatgtggtcgtttgcatggttcgcaacttgtacattatgtaaggatatttatttatataataatgcatgtgattaggcggtgtagattaagaaacaagaaatgattgtagagagatttaaccaagttcacgccggctaaaccaaaagccctgtcggaaatcatatttgtgtatcattgttgttcatttttgttatataataagaattgaagttcatttttcttatta

SEQ ID NO: 241173 - DNA, 291 bp, Gossypium hirsutum
gcaatatgagttgacgctagcatttatcatacaacatcttgtggcacttcaaggacttgggcggaactttgatacgcatctctatttttataatacatcatcaatcaatcaagctgtcattttatgtaacacacaactataagcgtatcccttaccacagacaagtcaaactactaactgaacgttatgctcactacatgccaatgtttctatccaacagagataggcaccattcgctattgtgaggagtagtcctacgacacgacctatcacctcagatagttaatcata

SEQ ID NO: 241174 - DNA, 366 bp, Gossypium hirsutum
taataatgaactagcaagcatatttactcatatatgaacgcgcaacctcaaaggcatgcagcaaaaatgagagcataaaaaccactattatacatgaacttgcttataacgagttttctgaacatgattcatattttcatgcccttgatcaacagctgaatcaagaagctgctatcctagactggaccaaatctagcggccacgctttaattggaatcagacactccgcgaactatgaaaaatattatgatgaagatggcacaaattatcagaacgttggtggaaatatgtcaactttgctggaaaatgcccgcgcgtcttctgtagctgctgcctttctacgaacgaagaaacactcctgccaat

SEQ ID NO: 241175 - DNA, 342 bp, Gossypium hirsutum
tcataagtctatctgtgagctagtatactgctatttgtggatggaccttgcgaaccacgggtatgggtagtttgtgcgcgtagccgaacggatgagaatgatgacgctatgatggccgcacctgaagctcatattcgatgtgttggaatagctcgccaatctgttgaggtttgactgatgcagcatatgggatgggaagaacgtgaatggcttgggaaagataaacaagggaatcaaagttacgttagaattaaaaacaaacaggacacaattggggttggattggaaaagcacgatccgtgggctttcgatacagctcagtttgatagtattctcaagaga

SEQ ID NO: 241176 - DNA, 336 bp, Gossypium hirsutum
tcttaactctgtgtttaagcttgatttctgttatttaaagctgagccaaccgtaccacgggtctgcatcgttagtcctcgtagcgcaacggactataatgataaccctattatggccgcacctgaagctcctattcaatatgttagcatacctctccaatatagtgctttttgccttatgcaacaaatgggatgggaagaccgtgaatggctttgtaaagataaacaaggcatcaaaagttacgttagaattaaaaacaaacacgacacaattggggttggattggaaaagccgtatccaggggctttcgatacagctcattttgatagtattctc

SEQ ID NO: 241177 - DNA, 399 bp, Gossypium hirsutum
cccacgcgtccgtggataatgaccgatggatttcatcgacagcttggaggtaaaaatcaggttcttgacgatccgtaccgaagatcatactctctcttcctacctccgatgctgatgaatcccaccgtaagagtattttcttcgcacgaccgtagccactattatccttagtactattcgccggcgactgcataactatctttcacgaatccaaaatagaaaatgtgacacttgcagaactatgattataattactcctttcctttataaatgctggagaaaggttgtagcaaaatgtaaataattaagtttgaagctccttcagcttctgaagctgctgcctttcgtcgtctgataaacactcctgccaatgtggacgcatctgaaacacatgatgag

SEQ ID NO: 241178 - DNA, 336 bp, Gossypium hirsutum
gatccgcatccgggtccggatacggaagtgtgagtgggagtgggaatggaagtcgaggtggtataggtggatgagacagcatatcatactctcttttacataatcttactcatatgaaatttactgaacataaatcatattttcatgctcttgatcaacattttactgaagaatcttctagcctatactcatccatatctatcagccacgctttatatagaatcagacacttgcagaactatgaataatattactccttacattgctaaaatccttaaaaaagtttgtagcaatatgtcaaacttttctgtaagatctccctgcgtcttctgtaac

SEQ ID NO: 241179 - DNA, 451 bp, Gossypium hirsutum
gcttaaaaccgcaaccgatatgatgaccaatatgccaacagaagggctccaaagaatgtgggaaatggcagcttctattaaaggaaaagattctatcccagcatcaacagctgtaaacggtagcaggctcgattcagatgctgagataacatatcccacatctcaaacatcatccatcaccagtgaaaatgttggtttcggtgaaactgcctcttctagttctagtcgttttccaaattcaaagaatcgtcagtcgagttttccaccaacatcaactgctgatctacaagaacagatgagaaatcaaatgaaagatccagccatgcggcagatgtttgcatcaatgatgaaaaacatgagtccggaaatgatggcaaacatgagcgagcaatttgaaatgaagctttctcgggaagatgctgcaaaagctcaacaagctatgtcatcctta

SEQ ID NO: 241180 - DNA, 232 bp, Gossypium hirsutum
ttcgtattaaaaaacggcctggctagaacataggatcctcatgcatacatatgggagtacggacgtataacggtggtcaaaccatctattttcttaatacattactacgagagattataacgctgtttacattatgaagcttgctgagctaagcatacatgattatggaatgactaagacgtacataggatcattatcatagcccattgctggacctttaccattgtctacc

SEQ ID NO: 241181 - DNA, 300 bp, Gossypium hirsutum
  unsure (1)..(300): unsure at all n locations
gcncctggtcaagctccatcgtccaggtggttgctgttctctgtcccgtcccttaaggcgccccaaagggtaagagataacactttctattcttgtgtatgttgcctttagaaatgggcctgcgtttacattcttgtagaaacactttggattctgctgtagaagggttctttgattcagttaaacagtttgaatcgcactttgacaaagctatgaactggttgagaatacctggttggaatctcataatttctatttagttgcttattttatccaaaataatcttcacacctttgagac

SEQ ID NO: 241182 - DNA, 306 bp, Gossypium hirsutum
gcctgagaaacttgatgattctaaaagggggttggcaaatttaattgttgcaaaacttcgccagtagagcaagagccgctgaaaagcccatctaatcttcaagagaacgggatcctataaaaataagcgtacggtcatccctggagctctcccgggccatatgactgtccgaatctaaggaacacttctgcgggtatagtgaagctaaaagaaaaaactgacagagcagtcaaaaagcaagtcttgctgcagcaaggtctcataactcggtgaagtctatgagaatgccaagacaaaatggagaga

SEQ ID NO: 241183 - DNA, 313 bp, Gossypium hirsutum
  unsure (1)..(313): unsure at all n locations
ctgctttgatctttctttttattttatattagacggagaaagcatttctcaaacaccccagaggtgtttttaaggtgaactagcttcttccatgtctttattaattcttggttttgttgatttcatttttaaattattggtgtttttcgagatctgggttaaattagtgatggtttttttttctaaaaaaaagaatgcatctattacaaaatattttaaagttaataataaaaaccatttatngggtactttaaaggagaatgtccttgaattcatctgggttgttttgaatgaacaatgcttcttttttttc

SEQ ID NO: 241184 - DNA, 249 bp, Gossypium hirsutum
cccacgcgtccggcatattccatttagtggaaaatttagtcgtttacttttatgtctatggttaattaatttagaaaataatttgttgtggtaaatatgtttatttttaattatttatttcattttggttaattgtgatgaacatggttggttttatagagtaatatgtaaatagagaaacagtagaattttccctaaggatttttcttaaaaaaaaaaaaaaaaaaaaaaaggcgaacaatctaaaaa

SEQ ID NO: 241185 - DNA, 401 bp, Gossypium hirsutum
  unsure (1)..(401): unsure at all n locations
caaataccaaccctcaggaaaaacataatttgtatatttcggaagctgaactgcagatgcatcaagctcagacaccattgtgggcaaaaccagagatatactttcaatcaatggtgatggatgacatcaacatggctgatgaaaatgcttttgttggggaagttgaaattgaaatgttgctaactcgcatgattggaacacggaaaaaaagcttagttccagtttttgattaccttcaaagctttaaattccagcaagcaagggttccaactgtagatagcaataacaatggatgcctgctgcatcagaggtcaggtctgtctgaaaatggccggctttcatgtagaagtatttctggctctcttaattgcatgaccgaaaatggtgatgcagntgatgaa

SEQ ID NO: 241186 - DNA, 258 bp, Gossypium hirsutum
tcttatccagaaaacactcctgcaagagttcagatcatgtaccatgctcatcggtgctgagagactcaatacagtggttggctgatatcgtgttctgttgcttgattctgacaaggttctgagaatatgatacgctagaagaactattgtcatatgaaggatgttgtttctccatgatggttcagatgccacgttgatgcttatgcacaatactcacgaagcctagcactcggatgtggagaggacagggtccgcaaa

SEQ ID NO: 241187 - DNA, 388 bp, Gossypium hirsutum
acggaaattttctgcctctaccaatgaatggctatcaaaactacatgcaactgaagatttttgcacctggcagcgaatcattcgtttagacgccattcgtgccaatactgaatggatgccatactctgtttctcaggctgcagtatcagatcggagggcacgccgcttagctaaggctgttggattaaaggattatgatcacctggagccttacgtaattttacatgctgcacgtttgggtactatgcttgaagcttatgcgctttacgatcccgaaattgactactgccatggcatgagtgatcttctttgtccaataattgcagtcatgccagatgattatgaagctttttggtgctttgcaggtttcatgaagaaagctcgacat

SEQ ID NO: 241188 - DNA, 223 bp, Gossypium hirsutum
gaaacttgaaattggagtagactcgtgctaatttgtccaatgctttgtatgtttgtgggctatttgcaaagcctaagctgcacttggttttgctcttgtcatagcaccaagttatgggctattcattgttttctttttcttcaattataaatcttgagagagtactctttaatgtaatttcaatcctgttttgaaatgaatcacaatattgcttttcaaaaat

SEQ ID NO: 241189 - DNA, 377 bp, Gossypium hirsutum
gagagaaggaaaagagctaagagacttggagagatggcaaataaggctgttgagatagggggatcttcccacctccacatttcacggttaatccaagatatcaggcaaagggctaatgagaggaagcaacttagcacctgaaatgaagcggcaacctaaatctccatactccaaaagagcttagggagtcacttcatggtcacttatatgaatcgctatgtatgctttaccagagaaatataattgtaaaatgcaaatggcccaatctcaagataaatgaaaggagtacgagtcgcagcaaaaaaaaaaaaaataaaaaaaaaaaaattaatttttaataaataataattaaaaataaaataaaattattttatttt

SEQ ID NO: 241190 - DNA, 469 bp, Gossypium hirsutum
aaagctttcaaatctgcagcaatggaaaaaagatgagatcgggatttgatttgaggggaaaaaaatctggttgccaatactcgacgattgttattattacaccttttttttttagtatgaaatggatcgtggttatgatgatggcgttagctgcgtcactgctggttttgccgctgcttctgccgtcgcttccgcctccgccgtcgatgcttcttttcgtaccggttctgatcatgattcttctcctctttttggccttatctccatcacaagcccctactgccatcaccactgcagtatgaaatctccagatttgtatgtatttgattgcaaggaatatgaatatctcatgtaagttgaattattttctctctttttttttccatttttgttgtttgaaatcgtaactgagcaagattagaaaacaaaatccttcgtctagattttcatttcttaaaattagttgtag

SEQ ID NO: 241191 - DNA, 397 bp, Gossypium hirsutum
gctgggatgagcacgatgaccaatcaacccttacccgtcccctgagttgcttatactgcaagaccagacttatggagtcaactgccaccatcttcctgatgagctcccagttcgcggttttgacgaggcgggacactgtctggctcattttcgagaagctgtctctggcggatttggcacctgccagctgcgtatgcaaggacctggacgccgcctcttgcgaagacgatctggggggggagacagttcatgcttcttggcagctattagaggtgatggggaagcccaagtcgagaagtttctggagagataaggggatagggaagtttgctatttcccatggatttatatgctttgtgagacaatatgttatttgattgcatgtggattaatggat

SEQ ID NO: 241192 - DNA, 407 bp, Gossypium hirsutum
cccacgcgtccgcccacgcgtccgtatttatgttatatcaaaataccttcataatgggggaattggcttaatgacaaagttaatcactaacatttacatatttttgtcaaaatgatcataattgtattttttagctttttttggctattaatttttttttcaaactgttttttttttaaacagattcgatgaaagtaccattaaaaaaattaatgtggatgatgtggaatattttcaatgagatgtaatttattacttaggtgttcaataagatagttacatgtgaaaaataatgaaataaataaattatacattaaattaaaaaaataactcctaatttaaagataataaatgtaattatctaaaaaagttttaatttgaaaaatgcatgcctttgtttactaaga

SEQ ID NO: 241193 - DNA, 428 bp, Gossypium hirsutum
gttcctcgaagcctcttccccttccccattttttgccacctccatctagtccttgcggccagccagcaatgcttctcagcacctcgccggcgttcatatttcattttcctccttttcgcctttcattgtcgaaatctacactgcaccaatcgatgacagcatttatcttcctctctcgaaggttgcaggagccgctgttatttttgaggtacaaagaagctgtagatcagaagcaagaaaagaggagcgacgcatacaagaattggtgataaaataccacatctttattaagaagtgatgtctatggaggtggaaggatttgatgaccactttctttgtaatgtgattatcttgtgggtcgtgaatactagaccaacgttttcttagctaaaatgtcgaaacatagaaaattttggcttttaaatttt

SEQ ID NO: 241194 - DNA, 341 bp, Gossypium hirsutum
ctacaactcatgtacatatatatttagtagggatttgaacctctagattatcctaacttcttaatccttctatttttggttatcaagtaattaattctacttagtggagtgacaaaaacccttggaagtttgacagtagcagatatttctaattgtattttgttttaaagctaactttgttagtaactttctaagccttttgctttacaatttagagagtttcgacttaccatacgaatctgattaaattaactcatttattattaaaaaataattaaattaatctaaatttaaaatattttggttggaattaaaatgttaattaaaaaaatttaatttta

SEQ ID NO: 241195 - DNA, 205 bp, Gossypium hirsutum
gttggccgcccatctttttctgttcagataaacaacgttatcgagttctgatttttgggcgggcaacacctgctgttaaattgtatagatacaattgcagataaataaacaataccacgtgtgaatacccaaatgctacttgtgttaactacattaatctctgatccagcttttggggattaaaaaaaaataattaaaatttttt

SEQ ID NO: 241196 - DNA, 293 bp, Gossypium hirsutum
  unsure (1)..(293): unsure at all n locations
cccacgcgtccgccctggttaatgattaaattagaggctatggaagaggatcgagccagactccgccaattgaggaaaaatagagtggtagccgtaacttgcataagaggggcactcctagaggctacgcctcggaggtttagttggatcatgaaattttaaagttttaaattcaaaattttaaataaggttgtaaagaaataaatttaaaagacgtatatggtggtatggtttaatgtgtatattaaacaatcgagaataaaataagatttgatttaaacatgttagccgnt

SEQ ID NO: 241197 - DNA, 453 bp, Gossypium hirsutum
cggacgcgtgggcggacgcgtggggcgcgagcgagaaaatgaacatgaaaaagaaatgaaagaaaaagaagatgagtgggagatagagaaaaatcaaaggccttacgtggtgatcgactgccagacaaattttgggtaagaaaatagaatttaacttatgcttgtaaaatgtggtattttgttgagttaatcatctggtagtgtgttctttaaacccaattatgatgtattttcaacttccttaaggatgcaattgcaggggaatatcaaaacaattttttgttatccttttaatttgagtttaatatcttcttgcaatgatatggaaatggtaaccaagagcctccattggttactcttgaaggaatgagatgtctagcttaccactttttttttcttgtgtactgtaaaagacacttatgatgtttggagtacaaattcaatatgttcaat

SEQ ID NO: 241198 - DNA, 459 bp, Gossypium hirsutum
agggtttcaatttcaggtctcaatttttcaactcagggttttgtactgttttgtgaaggtggatatgggtgctgaggaggggacaagaaacggtgaaggagcagagattggggaggagattaagtgcttcaagagtgaaccagtgaataatgggtttgggtctttatttgtaaacgattctggtgatgggagctcaggagcaagtgagagtttgcgaacatataagagacggagacagttaaggtcaacttcaaatatcgaagtgcaagatggtgggagagcttctacagaccagatggaaagctctgcctggagactatcctatgagtatgagcagaaggtgtgactgggtcgttgggtgcataaaatacaatttcaagctactgtgttaagtctaaaactggtttgcataatatgagataaatatgtgattttttgatgtctagagatataatgaat

SEQ ID NO: 241199 - DNA, 422 bp, Gossypium hirsutum
  unsure (1)..(422): unsure at all n locations
cccacgcgtccgtttttatcatataaccaaaaatggaaagatagtcacgaagagttgtctatgaaagcttacgaagaagaggcggaggaattcaagatgaagtttatatattctcacatcgcttccacagaacgtgaggaaggagttgtgggcctgtggttgcattctctaaaccacagaaactatcccgatttacgagccggcagtggagactcagttgaagggaagaagagtcctaaggttgatgataaagcagacaccgttgaagaggacagtaatgtagtggagaaaaacggtgatactactgagatgcaaagtgccgaagagtagaatattatgatacgcatactcattgaacaaattaactattttacataatttttattaagttatagntggatggtcttcctgtttcatttgga

SEQ ID NO: 241200 - DNA, 452 bp, Gossypium hirsutum
gtggttgtgatgtgggtgctagtggttggatttgggttcggtggatgggctagcatgaccaattttgtcaggcaaattgacactttcgggttgtttgcaaagtgctatcagtgcaagcctccaacaccagcagctgcacagcaccactagtcttactcatgaatccaaaccccaacaaaaaaaaattgaattctctctttttactccatgttttgtatcatacatagggagatagcaaaacctcccctacatgtgatgtgtgttagattttgccttttctcctttttatatatatatttatcccctcccccctctctaaattagttgttcaattaaaatagtgtgcttaatagtaatgattcctttttgtgtcatggcaaaggcctaaaattaatcataaaatagccttgtatgtttagcttcacttcattctcttcttttggttatatata

SEQ ID NO: 241201 - DNA, 391 bp, Gossypium hirsutum
cccatcgaaaacattgtgggtagatctgtatttcgctattggcctccatccaaagtttcagccactatatatgactcgaatgtggggaagaatgctgtagcagtttcttgacacctgaaataacttgaaagactttatgtgagtctgagctgcagcgaattcgcacctggatttattgccatggtgcatgttttattatggataatccattcatcatattcgttgtttttgtaaatttattgacggccaattgtaggccactcacaatttttcctgtaattagagtgtcaaattttctttgacaaggatttgggcatcccttttgtactgaactgaattgagaataatctgaggtcttaagctgagtaaaagcagagataggagattgttg

SEQ ID NO: 241202 - DNA, 204 bp, Gossypium hirsutum
  unsure (1)..(204): unsure at all n locations
ccacgcgtncgaggggtgtataattaacttgcaaatggcctttaatggctgggtgtggatttcttaactttgccggcgggaccacccaattaaaatttccaccatggtttactttatctttttcccaaggtgtggtgagaaattgtggggtataaacttaatgtgggactttggttgagacactttaccccatttcttgcgcct

SEQ ID NO: 241203 - DNA, 327 bp, Gossypium hirsutum
  unsure (1)..(327): unsure at all n locations
acgctcacgcgtccgcccacacgatcgattgatggtgagttgcatcatttatataactggctctgaatgtactattatggtaaggtgattgagcacccagagagatccctaactgtactgcttgtaatcctgcatatgccttcgccatgaacggagacgatattgctgcatggagtactgattttaaggcaggaaactcatacatatnccccactaccattatactcgaagccgatcttgaatattctgctgcaaaggctgcataaacatacatagctgctgccgtacttcttagcatctgtctataacgtatgttatcacctaaag

SEQ ID NO: 241204 - DNA, 143 bp, Gossypium hirsutum
gttttggacaatttgccgatttttgttcaccagaggttgtttttgaggtcaagttagacgattttaacatttatggatcctcaaatcgctctatatgtgatgtttatttactttgttttcttaaagatccctttttgcatctt

SEQ ID NO: 241205 - DNA, 233 bp, Gossypium hirsutum
cgcctccgcgcatttatatatttccaatggatcaaggacactgatctgctcattctgacttcattccttggggaggcgcacttttcttgttaatatggggcccgaacttaccatcccaactctgggcccctttgaacgcgaataagtattggttgtggatcaaccgaccataataagattgtgggctaaatacgctatcaatacaacaagtcttttctggacaatcaccattc

SEQ ID NO: 241206 - DNA, 365 bp, Gossypium hirsutum
  unsure (1)..(365): unsure at all n locations
aacaaaaatacccctgcgaaggggtctctgtacatttaatttcactctaagacggcaaaactcacccagtatttcagatctaagcacccctccaaaagtaacacctactgcatgtagcagatcttttttgtcaaactctggtaagtaaggcccagttttaatccaaaacggagatgaaacaagccttatttgatctctcgccattgatttactcaattgatcaaaaaggattaattgcttcctaaacaaccatggctgaccttccaggaccgtttctaaatcctcttctgattcaaacgatatcataaaaagatnttgtcctaccccttgaatcccaaattttttatttgtctttcaaatactcc

SEQ ID NO: 241207 - DNA, 340 bp, Gossypium hirsutum
tctagatcgcgagcgccgcccttttttttttttttttttttttttttttctgaacatttaaaattgccaatcctaggaatgcttcactcataaacttctaattcatgctgaatacatttgaaaaagaaaaagaaaaagaaaaaaacattttgaaatcaatcccaaaactgcaaaaatgccttgaaatatacaaagcagatgagatttaaaatgtttgaaaatttttatcattcctgactttatgaataaaaattcaagcgcttaatctacaagtcggcagatattattagatccttacttcaatgcctttcttcaacaagggtccttttacagactggat

SEQ ID NO: 241208 - DNA, 229 bp, Gossypium hirsutum
tcgttcggagcccgaaaactttagccaagatgctatgaacagttatctgcgttggtggagccattggcatggcattgttcaaaggcccgaaggtaataaacacacaatctttaccaccaaagtctttggtcattccatgaggagaaaatgggttgcttgggaagtctatttctgtttgtaatcagctttttctggacacatttttatggttttccacgtcccaaatatt

SEQ ID NO: 241209 - DNA, 108 bp, Gossypium hirsutum
tgacaatggaccgcgtaattacaatttcatgggagtgaagcataccgtgagcatgaaatacggggtgaacctggggactccggaagagtactacaatgacgagcttca

SEQ ID NO: 241210 - DNA, 284 bp, Gossypium hirsutum
caaatttgaccctagatatttactctgtgtccaaacgccccccaaaaaatcaacagcctatgaaagaccagtgttttagactcttttttaaaggtacatttgcctttcgtttacccgttggattttgtttcaaaggtcgaagaaagctatgagattttggagctttttgctcttgaagagaggcggcatggagagagggaggattttgtactgcttatatggatcgtgaaggaggtatccacggcggatcttgttattactcctttcttggcattcggactgat

SEQ ID NO: 241211 - DNA, 330 bp, Gossypium hirsutum
cgcgtcgcgaccgacatagagacaggaggcaccgatacatgacgaccctcgtgaatatctggacgattaccatggtgaactatgaggctgtccaccacattatagtgagattcaggatcccatttagattacgaaaaagagaaaagccgaagctaggtcttcacgctgagagagttggaggtacctgtgtactgtatgttctcattgttgtcgacgttgtagagacatcgttcgtagaatatgaacatataagcttgggaactgttaacattgcatgcaccaccttatgtttggatgcatattttgttgaataaaatggaacttttaatt

SEQ ID NO: 241212 - DNA, 378 bp, Gossypium hirsutum
gtcctgatttagaggatcacgttgctttctttttatgacgtagacatggatactagtgatggcagtgcgtgtaaagctgttgataaggagcaatccaaaagtatcacctataattcgaggtgaagagatatattttaattttagctgcgcttaggggtagaaatagaatattgactctgttttggtgggaaggaaatagggggctagaatcaaaagtttcatagcaagatgtgtttgtgtgttggtatatatagtgttggtaggataagcggcttctaaatatgcgaataagtttccctattctgctgtcaagaatttaaagtagagttggaggacaagattcacgatgagtgtacagctttcctttttttgtttttt

SEQ ID NO: 241213 - DNA, 297 bp, Gossypium hirsutum
tgatgctggccctagcttcatgatgaatcctgatggaccatttagagggtttggtggtccaatgcgcccctttggtcggatgtttggaggactgccttatgatgattggggttatgcacttgggagcgggaggccatcgagagcagattggcggtacaggccatactaaaagatggagcggggacagttaaagcgtcactgttaaaacttaaattatctaaagattatttcgagaatcaattatcaatatcatctattcacagattatgaatcatatagtgtggagccttagatttc

SEQ ID NO: 241214 - DNA, 442 bp, Gossypium hirsutum
caaataaaattaagtttttacgaaagagccaaggtctcccctccaaaatcaactccagaaataagtttgtcccacccatctgatttcaaactttttccttgtcttccataaacttttcatatgagccctaaaactatctggattatataatttccctgcccaaaccgtacaaatcaatgttggtttggaacttggtaccaccagcgatcctttgactgatagttgaactaattcttcagcaagaagaccgatctcatcccctccctctctatcgtcgccaccgcttgcttccatccccagccacagtagttactgctatctctagggtttctcaaccaagcactcttgggagcagaagtctttagtttttaaatttaatatttatttcaaatttaatagtgtatttaaaaaagtttttttttcgcttagaaggtgaattatt

SEQ ID NO: 241215 - DNA, 288 bp, Gossypium hirsutum
gcgctctaaattttgaacacacccaccaacactctatttacaacgatggagcaggagaggacacttctcacatcaaacgaagagctcgtatctacgatgaagcggaggaagaagggccgcaaccgaaacggatgcatacggtttttatttttataatgggccgaccggcgaagaagcaattactgtggtgaactacttaaccaacctcctattgatttttttttgttttacacattcataaggagaagtgcatccatcaatgggcgtggataagatgcttaaactttt

SEQ ID NO: 241216 - DNA, 309 bp, Gossypium hirsutum
acgcccacgcgttcgctttcatccctttttgcataataagctgcctctatgaatgggggcgtaaaatccggggggttcacatcagggttatcaatgtttcctccagaaaagcgcccccaacttgagaaaccaatgcctgtatcagatgctttatacatcccaagcacaactcatttcaaccctttacagcagctggcaattaacaacatgccacttgcaccattaactggaatgcaaccaatgtctcaaggcaaccagatttcaagctccctttgcttctgctacaccttcccctttttttactgcaaa

SEQ ID NO: 241217 - DNA, 299 bp, Gossypium hirsutum
cccacgcgtccggccacgcgttcggccgaactaagccaaactcctttggccatgggcccatcgcagcctacaacggacgccttcgtccgtcatgggcgatttacaaccctgcgatttctcctccaccttcgacttctacgagacgaggaagaaccaatggcggatttgcgaggtaaggtttcgcccttctctcttcttttatttgctttcggaataaaataagaaaaagtagaacaaaatacatagcatgagaatgaccacaaagagaaagcccgaagatttagatcgaaaaaatcacc

SEQ ID NO: 241218 - DNA, 114 bp, Gossypium hirsutum
cactccctaggccagggatgacaaacaaaggcaatcgttagcacacaaggcacaggaagacgacagaacggtgaccggagaaagagcggagtgagctaaaggcgccaaaaccga

SEQ ID NO: 241219 - DNA, 200 bp, Gossypium hirsutum
accacgcgtgcgccaaagcgtccaggtattgttgttactaactggatacctctgcgcctccgcgagcaggatgatgagcttgaagctgatggagctctttatctaacccgccatgatgtgaactctcagggagggccatgtcgataacaacactgccgctttgtacccattagaagatatggctacatctcaaacagcag

SEQ ID NO: 241220 - DNA, 332 bp, Gossypium hirsutum
acgcaaagactcccatgctttccgtttttcaacaaccaataaaagcaaactatattttgtcactactcgtacagggaaaatgaaggctctccttcttttggggggagcggagaatgaacagaatgaaagaaaaatgaccacggctattcaatattcaaaagaatcttttttaaaatgtttgtcttggccttgaccaaaaaccgctggttctgctacccctggttttgctatcgctggcttagctaccgctggctcttctaatgacctgtgggtgggggggcaaatggaaccaccccaaccacccatcgtgcccagcccccttgagcaatgtg

SEQ ID NO: 241221 - DNA, 363 bp, Gossypium hirsutum
cccacgcgtccggattgattatacaagacatccgtcagcagcttcatcagctctggtagaattaacaacccatctcgactttttcaaggaaaggcgttcccaactgatagaacagcttcacaaccttgatctgaactatggaacatcctctcaggagtttttatacaaaccatcatcatcacccccttggaactaaccggtgaatctggaggagcaacgttgtctcgtgttgttgtacatcctaatttgttgcatgtaatctcatttcttatcttttactctcgttttttcactttggtttgtgaaggtgatcggaagtgtaatcagaatgttttaatttttttatgggacattgtaaagaaa

SEQ ID NO: 241222 - DNA, 369 bp, Gossypium hirsutum
tcggccacgcgttcggccacgcgttcgaacactcgttcgttcacacgtgacggtttttttttttcagtgagaatggattctatggaaccagggcagtacctaacacaaacagaggcttactctcggcttcctcatttcattaatggctctatgcgccaagcgcgctagccggcttttcaagaagctaaagcctaaacataacaacttagcttccggcactccgagattctacgagccgaaatcgcctttgaaatcttcgctgagatcgccgatgccgaatcaatttttggcgacgataagccacaaagcgatcacgctggtgaaccggaaaaacataggcggcggaaacgggaaacacgtggaggagga

SEQ ID NO: 241223 - DNA, 263 bp, Gossypium hirsutum
gcagcataaagcgcaagaggtgactcaagggcaagcatcttgaatttagggttttaagaatgagggcgggtgtgtttgggtggtttgagatgttttatgctttgtttggttggtgtttctctttacatgcattcacagatcatatgttttaagctttgtaatttgtaagggatggttattagcatagaatattctggtttctttgtcaataaaaatggaagaagattgtaaaaccagcatcacttcaatcttccttctttttt

SEQ ID NO: 241224 - DNA, 446 bp, Gossypium hirsutum
cccacgcgtccgaaaataaagaaccgcagtaacagcttaatcagcaactttggtaccgacatccacttttttttgttctatactctccacttgatgtggaagtcttccaatcctagtagttgagatgaagaaaggacaggggaggaagtactttatattccccaatctgataaagctgagccagagactttatttaataatttatctttgtgattgaccttaaagtagattcttaagtagtttagattcattcctatccctcaacagaggaagttaggctaagaaagagtagaaggcagactaagctggatagctagctagattaatagacagtgaaagttacggctacagtaagcacttttctttctattgattcttttgattctgaaactcaatcttgaactcaagcaggcgagcaagggtagagaatttccagtggagctacg

SEQ ID NO: 241225 - DNA, 257 bp, Gossypium hirsutum
gctttttcattaactgccataaataagataggctttatgaaggaaacacaattcaataagcctgttgttattgctgactgtggacagctttgaaaaagggcttattgaattgtgtttccttcataatatctggtctttttaggctccttttttttatgctatgctgcttctatggctactgggttttggtgttttttaagaagttgcttgatgtagctttttcattaactgccataaataagataggctttattttc

SEQ ID NO: 241226 - DNA, 248 bp, Gossypium hirsutum
gcgtgcggttggcggtcggacggtggaaatcggcgaccccatacctttcgacggtggggggtgcaggtatcgatcatgtctgatctgccctggacaaagcttgccctcgtgacaactcatgtgccgatgttaaggcacttgctgctcaaacttctcgtttctttgggtggaggtacgacacaacaagttccgtaagggagaagggattgtctgactgcgcacctggaagggaccggatgaatccctac

SEQ ID NO: 241227 - DNA, 297 bp, Gossypium hirsutum
gaagctggtctcactagtctgatcacacactggaaacaagcactctttttgcaagagcacggacacaatcctattactaggtgtatacccacttacgaggatagacagacagcttgcaaaaccatgtcaaactcaaactcatcattgctgtcactccgcgatgccattaagctttactgggatgcaaggtcatgggttaaatattaagccaaaacagcgttctcgtgatgcaccagcaacaaggtgcgctacttgagactgacgactcctggctgatttagaaagagaactggacgc

SEQ ID NO: 241228 - DNA, 222 bp, Gossypium hirsutum
cggacgcgtgggaaagccttatgttttgtttaaacgacaagaacaaattacaaggtgttattcaacttataatttaatgtgtgccaacataagcatcaacacacaagtcatttgtatatacagccaggaaatcgacatcttttggaagggtcctaaaaaaaaaaaaaaaatattaaaatgaataatattaataaaaaaaggccgttcatattatatataatt

SEQ ID NO: 241229 - DNA, 285 bp, Gossypium hirsutum
cccacgcgtccgcttcagatgaataattgacctgaaaattgtgtagaaagccattactgaaagcttttaacctcttaccaagtaattgactgtttgccaaaaaaaaaaaaaaaaaaaaaaaaaaaaaaaaaaaaaaaaaaaaaaaaaaaaaaaaaaaaaaaaaaaaaagggcggccactttataaaaaacaaatttaaaaacccgcccacacgaaaaaatatgtcttttataaaactcccaaatttaaaaaattagagcgcattaacaaaaaatgcatagggaaa

SEQ ID NO: 241230 - DNA, 395 bp, Gossypium hirsutum
  unsure (1)..(395): unsure at all n locations
ccggaaaaccgggacgagccacgcgaccggagagggggagaggacaggaagaaaagaacatggcgggggacaacggcnnngcaaccaaaaggggagacagcacaggcgggcgagacgacagagcaaacgagacaaccacacgcggagaaacacaagacaaaccaaggcgaagcacgtataaatgcaagtaaacagaaagagtgatggcggaacaaagcttttatagaatagaaggaacaaattggacgaaaatccagaagggaagcgcaaacgcctgaaaacagagaagggatcaactcggcgacctgggccaaagcataaaaaaaggccaccttatggcaaaacacgtatgggacctggaaatgcgagagggcccgaaaaggaagatctaaagg

SEQ ID NO: 241231 - DNA, 333 bp, Gossypium hirsutum
ccaaaacagcttccaagtcttcctctaattcaaaacttattagaaagagattttgccctgctgattgaatctcaaattttttctttgttttccatatacttttcatttgtgctataaaactgtcttgattattagaaaaaaaaaaaaaaaaaaaaaaaaaaaaaaaaaaaaaaaaaaaaaaaaaaaaaaaaaaagaaacaaaaaaaaataaagaaagaaagcgaaggcattaactcttctatagatgcacataaatacaatgtaatggccgtagttttataaaattttgtcggggaaaaccaaggggttacccaaattaataaccttgaatta

SEQ ID NO: 241232 - DNA, 367 bp, Gossypium hirsutum
cccacgcgtccgttctctcgaagaaaaacattaatcttgttctcccggaaaaaacacaccaccaacaacaagccaaacaaaacgtcgaaaatggacctggatgatttgggagagctcgacggttcaagtcaggccaatactcgaaccaccaaattcgcgcccaaatcttccaaattcgcacccaaactcaaatccacctctaagccaaaacctgaaccctcatccaaacaagagcctcaagactccgcgcccaaaccccaaccaccacctgtggaagcagtttccaaaaagaaagaaaacgatgaagaagatgtcaagccgccgatggttgctgaaccgaaagccgaacaatcgatatcaaatggcg

SEQ ID NO: 241233 - DNA, 454 bp, Gossypium hirsutum
ctgcactgccggtccggaactgcgtttcgacccagagcgacccgtacgatggaactcactgtagcggactgatttgctaataaggagccagagctccttcccagtggagaaatgtctaaaccacctccgttgacagaaaatttggatggcttcaatgagaattcagagggctcaaatcgtatattcaatgcttgctgaactgatactgagcctgtagttggatgatcaaataatgaggaaacaaatgtcaacgtttcccgcgtattgaagtccaagaaggtggaagcagtttccaaaccaaaagagaggacacggcatggctagacgtgatagacaatacttgatatgctaatcaaacaatatataattcttacagtctaaattcgaagcacctgatgccggaaagcatagttctaaaaagcttaaaaggtgctttcaagcttaattttgttta

SEQ ID NO: 241234 - DNA, 222 bp, Gossypium hirsutum
ccggaccggtattgaatggtcgggtcgagcgacgcgtccgtattggctctcggcaccgggcggagatttatttttggtgcagaatatggctggtgcgggggaggtgcttaatgacaccgcatggtgtatgatttaaagcacggttataacagaacactcgggttgaacaaaaggttatgaacgcgttggggtctgatattgggcacagatacttaccatgta

SEQ ID NO: 241235 - DNA, 368 bp, Gossypium hirsutum
gccacacgtccgtccgagcaaatctggagttacccctatatcatcttatggatacaacccgcaagacgtctcatgcactggacgatcaacaagggtgacaaaaagtcgcctggtttaagaaaaaacgagatgtttcaaaggaatagacggtgttacagatttcgatatggctgggggcgcatgatccttgcaatatataatcatactgatactgtgagacaaaatttttaatcatctctgcagtcattatggaagaatatatgacgacaaccagtgactattacattttgaactttaagatgccaattgctctcaatggtgtaacatggatgttcacgtcttcatctctagcagtataatatgaacaa

SEQ ID NO: 241236 - DNA, 169 bp, Gossypium hirsutum
gacccgttcgatcacacatgcggtatgacggtgaacgttctttcttgttgagaactggggctcaaagggggacattgtgagaagcaaaataactaatgggacttcatagactgctgctgaattttctgttggacatcccatcggaaaaaacggtgggattgcttaactt

SEQ ID NO: 241237 - DNA, 218 bp, Gossypium hirsutum
gtcagacaacatgagcgaaaggacgtgcagcttggtcttggaacaaggcactacattactagggggggtggaccacatcaatgagctcaaaagaaactcaaacaagacatgaacgactccactttaggatgcagacattattcttggaaatgaaactgatccagtctataatattgaaacccgtgcattgaaaactgttatgaataagagaattgtac

SEQ ID NO: 241238 - DNA, 169 bp, Gossypium hirsutum
cccacgcgttctgggggcgctgccccgaagtttaactttggatagtttacatcccagtttggggaggggctcctctggcaattcgtttaggttcgtggcaatccgaacctcgccctgtttccctaatgaaaccatcgactagagagaccaacggcctttgaaaagacac

SEQ ID NO: 241239 - DNA, 439 bp, Gossypium hirsutum
aacagcagaccctaaacccaccattatcaaatctcgtgagcaccatttcctcctacgaaggcaacgtcctgctggctgccatcatctcattgctcctcgtcatcctcttcgtcctgctcctccatctctacgccaagtggttcttggctcatgctcgccaaaggagccgatcttcctccactctctctcacgtcttcccccacgaccggttccgccatttccacgccttttccttcgacaacaacgcctccgactcctccccatccaagggtctcgatccttccctcatttcctccatccccttgttcgttttcaaactagatgaacacagcgacaacaacaacaacaacaacaagaagtatgggttacacaacttagactgtgtcgtgtgtttaagtccgttcgaggataacgatgttggaaggaacttgcccaagtg

SEQ ID NO: 241240 - DNA, 351 bp, Gossypium hirsutum
acccgtccgacaaactctagcctacagaataccaagtttgttctgtaacactagccctgctcatatagggggccatgacgacagacatgctctctataagccttcatacaaacttgtcagaaaacaactcttggatgactacaggaaggtggggattgcatctcaaacaggatcgcgaaaagagaccggtgccttgacatgggattcgagaaccatgtgtaggaaccaatgctcagacctcaggagattatatctttcaaatgcaccacctacataagactgatgcacgttatgctagatatcgtcccgtggaagaaagaaacagggctgtaaacgttcataatctacaca

SEQ ID NO: 241241 - DNA, 358 bp, Gossypium hirsutum
  unsure (1)..(358): unsure at all n locations
cggacgcgtgggcggacgcgtgggcgcaaggtatagatctcgcttttccctctttcttttgtttttaaatgcaatgatgaaaaaaaaatcgaatgaagtagataagaaaattcaacagaaaatttaagaaactaaaaaatagaaatcacctttttcagaattgcttttgaaatccttttttgatatttagtatgcataatcttttcaagtacaaacgatggctttttatagctggaaaaataagaattaaaattaaaagaaatctattttcttttcttttttgctatttttccattgtattctgttattgctgcttctcgtgaattctgntgcaggaataatcgtacggaggaagtcg

SEQ ID NO: 241242 - DNA, 234 bp, Gossypium hirsutum
  unsure (1)..(234): unsure at all n locations
acgcatgggcgatagggttacactattaggtggttttacttttggagtgggacattgcttttttggctgggttcggataactaaattgcaggggacagggaaactctacccaagtgtggatgcgggttagggaactacgctgaaaggtattcatggtaatggatcgaaccctaatgcgtttgnngtccacagcacattttttaactcagataattatttttatacgcagattcg

SEQ ID NO: 241243 - DNA, 387 bp, Gossypium hirsutum
tccacgcgttcggcgggggatgccccaaagaataagtggggaaagtttacagccaagtatgggtagcaactcctctggcaattctttacgtaatgttgcactccaaaattcgacccttctttcctaagtaaaccagcgactagaagaaccaatgtccttcaaaagacaatcctctaacgttctaccaaatccatcacttttagcctttatccttagtataccttattgcttttcatgtgctaagagaatatcattaaaatctcccccagccaaccaaggccatgaattatttctccgcaatcgggtaattaaatccgatgtgtatactttactaataacattcggcgcctcataagaacccatgaacaggcatcgatgtgtttcttt

SEQ ID NO: 241244 - DNA, 181 bp, Gossypium hirsutum
gtgctctctaagaacatgtaatcagtaaaacctttcccatgaccaccattttgatgtttgggtgctgttaggtaccgtatacttgcacagaagaaacaagatgctaactagctttttttgatgtattgacataaaccttctccttctgtgtcttaaatatatttctcgttcttttctaaaa

SEQ ID NO: 241245 - DNA, 415 bp, Gossypium hirsutum
cccacacggaagcccacgcgtccggattgagatcaaggatctccacaagagcctcagagtggaggactgcgagccctgaaacggaagacatatttacatcgcaagcaacgatgatgggtgctccggaggggccgtacgccacccagaggggagcttagtcaccaacccttggcctacacaacatgcatacaaaccactcaaggacgcatacaaaaaaaaagtatctgacgctagtgctaacagcaacaccagcacctgacaaaaaaaccaaaacgagcacatgaagcgacgcccacaccagatgcaatgagacgctggcaatctgctaactgctgaccgatccaaatactgaaggccctggactgccatacactgaccacatgtacttgatggatgggaacaaatgttaaacagc

SEQ ID NO: 241246 - DNA, 426 bp, Gossypium hirsutum
cccacgcgtccggcgggagatgccccagagaataagttggaaaagtttaaagccaagtatccgtagcaactcctctgtcaattctttccctaatgttccactccaaaattcgcccctttttcctaagtaaaccagggactagaaaaaccaatgtcctccaaaagacaatcctctaacgttctacgaaatccctcagttttagccttttcccttggtataccttattgcttttcatgtgcaaagagaatatcattaaaatctcccccaaccaaccaaggcaatgaattatttctccccaatcgtctaagtaaatcccatgtctctactttatttctaacatccggagccccataaaaacccgtaaacagccatcgatgttttcctttatcatcttgaatttccacatcaatgtgacttttgagagac

SEQ ID NO: 241247 - DNA, 393 bp, Gossypium hirsutum
gagggctccgatcgaagggctctatcgtctatgtgaggaacatggcttgtggaatgaatatgggggcatgaagccgagagcgacattgacgggctctgccgtgtactattaacggaagcatagctgccactgtcttggctattacaccagatagaggtctctgcactaccctctttataacataacaggcatacaactctttgctctttggatctgcacatgtactcaccagcacttcttttgttggctgcaagtagacctgtgacaaaaaccagatttttattattgaatacatgaacctatgttgacccgacacacatgcacctgaagaaaggtgatgcgtcttaaagaacacgggggagggaaagatatgcgctcaccacaccaattgct

SEQ ID NO: 241248 - DNA, 381 bp, Gossypium hirsutum
gtaaagatgtccatgcttcctcgaaatgcttttttgttggtccatgcaacttccggaaaagatggatgccaacttcgtgcttattggactaaatctgatgggctctcaatcctaaagagatgtggttcaaattccaactttaggaacatcattgatctagagaaagcacggatgggttcaaattggttagacacattggaggggggaaagtttatggaacataccgagagaagcttcacttagccgtcggcttgctgacgatgaaaagagtgacaaaattctcgaagttgatacttggaaacctttcttgaccttccaacataactacaggaatggttaggtcattttaagcattttttaagctttgggattataccccag

SEQ ID NO: 241249 - DNA, 153 bp, Gossypium hirsutum
attgtgttttgtgcctttatgcactatttatttcaatttctgtttccagattctaatgtggcgtatgatgattcggtggacttgaaaaatattttttggcttgctgcattgccttgctattcatcactaggcttgattgctgcagggtggtct

SEQ ID NO: 241250 - DNA, 249 bp, Gossypium hirsutum
cattgatgtctacgatgggcggccgcataaaaggaactgtcttgacatatcacagccttgcagagagctaggctctacccatgggatcacaaatcaaacacacagccctttgctttcaggagctgaaaatgtacaacacccgcactttccccgctttatgcgcgttgacctgagacaaaatccagatggttgttattgaatacaagagcctatgatgacccgacttacatagcactggacaaaggtgaa

SEQ ID NO: 241251 - DNA, 301 bp, Gossypium hirsutum
gcccgctaagtaaagcggcgaacaaaattatgttaaagtgtgaacaaagtgagagtagggcgagcatatatgtggggggggaaagacgacaacttgccctacaacgggtgggacaagaatactcacaacttaaacggagacgaacccgaaaaaatgaacactcaggcatggtcagcaaaaaaaaaaaaagaaggcgatgggcacaaacttgccgctgaaaaaaagcagacatacccccgaaaagaccattgaccaaacatagatgcagttccaaaaacaaaaaaggggggggcgtctttga

SEQ ID NO: 241252 - DNA, 343 bp, Gossypium hirsutum
gccccccaaaggtgtggcatgaattctatgtttctgagaagttggttgactgtttccacttttaaattgtgtattttgtaggccattgtattattgtgtgtttcttattgtaatgaactgcaaagatgatctattacttctcagacggagctctttctactgtgctctctatcatgttttccacagtgcaataaaaatatgtttatagtctaaaaaaaaaaaacaattacataactctatttaaacaatttaaaaaaaatcctcttttttttaaattgaacttatttttaaaaaattctatcaccaactaaaatttatattgggggggccctttttaagaatc

SEQ ID NO: 241253 - DNA, 451 bp, Gossypium hirsutum
  unsure (1)..(451): unsure at all n locations
cccacgcgtccgcccacgcgtccgatccaattcatgcaagagtgtgaacaaggtggtagcaaaaccaccatattttttgtatggaaatgttgtcaacttgccttacgacggttgggtcaagatttctcagttcttatacgggatcgagcctgaatttgtgaacactcagtctttctcggcttttaatagaaatgaaggctatgtacacaatcttcccgctgaaaataggtttcacatccttccgaagtcaccattgaccatacaggatgcaataccaaatacaaagaagtggtggccatcttgggatccaaggaaacaattgaattgcatggggtctgaagttctaggagcatcaaagctgtgtgctaggcttgggaacatgttagctgattctcgaggattactctcatcggatcaacanaaatatattcttcgtcaatgccaaatatca

SEQ ID NO: 241254 - DNA, 243 bp, Gossypium hirsutum
cgtctcatcctgaatcctgcaactaggatatatgttgctttgaattctcattcttgcttttaaagagcggtcatttcttttaatggagggtcccatatattttctctttccttggaaaacctaaattgacttcttattctttacctaacagtggtggtgaaccaccttttctctttcaactaataacacaaaatagggcttttttcacaatcttccaaaaggaaaaaagccttgacattctcc

SEQ ID NO: 241255 - DNA, 384 bp, Gossypium hirsutum
ctgcctctacctcattagatccgttgcataatgatcgtgctattaatattactggtgagagggatgcaaaaaagtatgttcctgccatcggatactatattttgaaaaagaatccacaattgccggtttcactaagagtgaacttcaggggcgacactatttgtgctgttcttacgcatccggtcacccgtgtgacatctcatgcagacatttcttactattgaggtttaatcaactataggcaaaatggtgaacttgaggaagcacactggtaggctagtgagttgattaagattgggaactggggtgaggctactaatgctagaagtaaagtcttaagcaagctacacaacatttttgggttatcaccattgtttgactttt

SEQ ID NO: 241256 - DNA, 201 bp, Gossypium hirsutum
attctcacgggattgttcacgtgtagattgtttcacgcagcaagattgtgccgggtctgaaagcccactgacttggtcctgaaaaccccgcggatctgtacctcttgatcaagacagccggtgccttctcaaaacatcacgtgaggagcatgctagactatgcttccatcaatcatgttgatctttgtcgagagcaaaatt

SEQ ID NO: 241257 - DNA, 378 bp, Gossypium hirsutum
atttttatggcgttttgcctcttttttgtgtgtcaaaatcatttgaactccagctagtcttgtgcaataactgaaaggtaagaagttaagttatggaatcatgcttaagccaaaatcattgaggtttttgttgaaccatgcagaaattctggagcatttatagtctcttaagtttgtcctaaagtattgagtttctgcaggtttctggcaactcatgaaagctatgcccaccccacgtacaagctgaaactgattgaatacgataaaaccgagtattacagatgtcttttgcagagcaaggtggtctggtgcaccacaccgtgttcttgaaacacccttctttctgtgattggaaaatgcctttagtgcttcaagaaa

SEQ ID NO: 241258 - DNA, 283 bp, Gossypium hirsutum
cccacgcgtccgtggagcaggtggattgttgccacattttggtaatgttttcccttcccttgctattattacaatctgattagggtggatatcttggatattggtaatggatttagttatttaatagatacaataagaagcattttgtctttcaatttttgccatttccttgttaatctgtatctgtaggcggtttagcatacatttcagtatgctcgatattgcagaaagtagtatctttttgtatacatataatggtttcaaaataaaccccatatctttg

SEQ ID NO: 241259 - DNA, 284 bp, Gossypium hirsutum
cccacgcgtccgaatggaaggggacaacatattagagaatcgttgggtttacaggtttttgcttcctctgtatgctggtcttggaaaggctgatgaagtagaaagaatttggaagatctgtgattcaaaaccccgctttgaagagtatctggctggtattgaagcttggggaaagttatgtaaaattgaaaaatcagaggaaaatttcaaaggctgtaaaaacataaaaaagcttctgcagatatataccattcttgaggtaactaaaccatagatgcctaaaa

SEQ ID NO: 241260 - DNA, 289 bp, Gossypium hirsutum
ccgcgttctacaactatgtagttatcatgtttgctgttaatggtattacactgtttgcttctggtcttgctgctattggaataggctttagcatttggtaggttctgcttttttcctcttgcgattgaagcatttgatgcctagtgattgtcaattatgtttcttgaagcaccagtatattcaggtatgggcatggggatatgaccttcagatagacctgttaattttaatctgaaagcaaaaacacaaatccatctacctaagccgaaactcaattttgtcttaaaaa

SEQ ID NO: 241261 - DNA, 363 bp, Gossypium hirsutum
agaagcacatcccctcagtcgccgatattgtaggttactgaaagtaggaagaaaattgcgtgaaacacgccaagctgtaatctttattttagagggtagatctaagttccatagctttttgtaaaattgtttgtaatttgtctttaagtcattttgatcattgtgtaagagaagtttatggtcactccgcaccgaatattcctcagtcggcttaccccgtcagataataaggtcatcattctcgtacaacgacagaggtatgcatagaattcgcttctgcttctgctctgaaaagatgtatgctgaacttgggaattctcattcccaaggatccatgcgtcttttcaaaatggagacatgttt

SEQ ID NO: 241262 - DNA, 340 bp, Gossypium hirsutum
cttccttaaatgaaccctagttgccgccatcttagctccaatcaagcaccatcaaaacactcctttccgccacttctcttcaaatcgtcgattagttttccaagaatccgacccaagtttgatgaaacaaaggtcaaagctttgatctctttctatcttcgatctcccttttacaccgtcagattctatgatatgtggtacatcatgtcatgattcgccttaccatcgttggaatcgccgaacgaagatctggagtttcaaaccctgatcttgatcagataagtccttcgacgtacctatctatttttgcttctcttttaattatttattggttttttgg

SEQ ID NO: 241263 - DNA, 444 bp, Gossypium hirsutum
  unsure (1)..(444): unsure at all n locations
caaaaacctattcatctattttattgaggctttccttccttatttcctcttctctgaccgtgctcaatttggttcttgcaccctatcggttttcttttggttttcgatatatccaggacgcttttaaccagttgccttcgataatgttctccggccactgcatttcgattcctatttggactgcttttcgacatgcaaacgtttcaacagtgaaagccgatgccacctctngatgaatttttgaacaagataagaggatgatcggttcattatttctggccacaatccccgaagtcgattggaaatgatgcccattctatgcttcgtcaaatatgatttttaccgactcacaggctacttttcttatcatgcattctagcattcctttcttcctaaatgggccataacacatagtaaaaaagtttgctttgaaaatggggattt

SEQ ID NO: 241264 - DNA, 178 bp, Gossypium hirsutum
tcggtgagaacaatgaactgagagggcctgtaatcatttgagccaaacacccccaagagtcagcaccttctctctcttttagttgcagtcgttcatcgcataaaccaagaacaggcgcttagagaacttgcggatactacacatgaagacagaactggcgaggctgcatccgcgccaa

SEQ ID NO: 241265 - DNA, 238 bp, Gossypium hirsutum
ctgaaatttggctctgcctcaatatttctcttttaaattcttattgggaatcttttttccttttaaaatcctataaatataatgccttttaagatctcattaaccctctgagattctcccaaattttaactcttttgattttttttgagagtgctcaaagaacaaaaaaggctccctgtgtattcttttgggtatgatttagcccttatagcctcgagtatcacttctctttattaac

SEQ ID NO: 241266 - DNA, 224 bp, Gossypium hirsutum
gcaggaacggcgtacggaggccagctggagtcgcggggaggcactgcatgcgtcgagagtggttctgcacgcgcggaggatggccttggtggctgcggcgctggaagctgcagctgctagggtttctttgaaactgctttgggcttgaattgggctaacggttatggtagtttaggttaaatgatctgatgttattgcgctaggctagcgagctaaaacgatat

SEQ ID NO: 241267 - DNA, 381 bp, Gossypium hirsutum
cccacgcgtccgataataatttgtttgcaaggtgacgaggaaaggcgttaggcaagaaaaagcctaactcgttcgagtgaactcgctcctttgcaggctcagtcctttaatctttgcaagtaatatcgtcgacattacaattttcaaagaggaaccagatccgacgttgtttcatcctccgatctccattctttcttgaggattcaatatagaaaagttaattcctctattctgcggagatttgaaaattcgggaaccctttttgtgtttttgttttcaattattgattgtatctaattgagctggtgaatttgttttcttcaacaatgagtttccgttttcgagggtcaagaatcggattagagagtggattttcagtgc

SEQ ID NO: 241268 - DNA, 419 bp, Gossypium hirsutum
gggagtacaaatttttcaggtactctaacagatagagctttttctgcggcatattgagagccatatagtctcccgccaatcaaaaaccccctaacattatcaggtaggcccaggatctctaactgcgaatcgaatcaaagcgttctccaataaaggcatcatgagatgtagcggtatctctcctcagtctatggtctcgattgtgggtgggaaaatggatgctactatgctactctttcttcaaatgcttcagcttgagcttgagaacccaaactggcagaaaaaaaaaaaaaccccttggcggaaactgactaccaatatatacccgtaaccgacacgttgggatagacctacagccatcaaattataccccgcttttggaaccataaaagagctactttttattttaatgacccttg

SEQ ID NO: 241269 - DNA, 375 bp, Gossypium hirsutum
cccacgcgtccggggcagagaaggaaggaaagaaagaaagaaagaaagaaaaagaaaaagggaaatttaaggttttaaggttccaagctcaattgatcaagaagaacgaaattcgggagtagatcggggaaaagaaaaagtaaaggactaaattgtaaagtttagtcacattttgtatcaagtacttatctagccacttggggatcgaaggaaacgtcggaggccgatcacactatcaaagaaataactcggtataattagacgttttgttttgtgtatggcatgtatagaaacttagctacttttggtataatatgaacaatgagtgatgtgtaagtagttgatgaagtattgttattaaaatgattaaggatg

SEQ ID NO: 241270 - DNA, 262 bp, Gossypium hirsutum
cccacgcgttcggcctgcatgataaccctacgacaagcattttgcgacgctgctttaacaatttctatgtgcttttatcgctttacggatgactatatagcccatacaagtacccaaaaaaagagaatcaatggttttagtatatatattttgaattgtcataccgctactttgtggtattggagtcattcgcaaggctgttgtgaatattgtcgttttccacatttaataaataacatggatgatgcttctgaaccttctt

SEQ ID NO: 241271 - DNA, 187 bp, Gossypium hirsutum
ctcgcgctacggatattatttcagtcgatcgtggatctgaacgccctgctgtcttccagacgctgatgttcgtcgcttgtgggcgaacattgaactcctgagaacggtgccgtggggctgttgcggaacggacactgccacgtttgccaagcggcggtggcaaccgttctgcgaggaggatctctac

SEQ ID NO: 241272 - DNA, 347 bp, Gossypium hirsutum
cgacgaacccttgaggcaactacttcatcaatcctgctcaaaatcttccaaacctgctgccgcaggaatcatttccaaacgaaaacttgacgcttcttgctgatacagatgctgggggatgcatttttggtctcatgattaagtgattccatagttttcaacctaatgaatactataatgtacgatcaatggcaaatgttagtgataaatatatgaaaccgcaaaataatgattgctatatatataattgagacgagccctcagtatttttgtactatgagagacacagagaaagagaggagatcattatattagaaatttttgttaaagaaagaaaagatccaagt

SEQ ID NO: 241273 - DNA, 189 bp, Gossypium hirsutum
aatccggtcatcgacaactggcacctgctctcactcgatttgttgtctgacccggtacgacccgttgcatccatcggcgccctcatccttgtgagaccaacaaattgtacagatcttcaattagctctatgtaacccttttactaggcaatttaggtaccttccaatgtcaaatatcaggagaacgaat

SEQ ID NO: 241274 - DNA, 207 bp, Gossypium hirsutum
ctcgctcgttcgagcttaaggactgggacgtgattggagatcactccgctatggtgcgtcgttataatgaacaaaactaggcgttggagaacaacgtctcaacgttagatcacgagatgcatgtttgagcataggaggtgaaagacactggcgtgacgagtgaccagggccctgatattgatatacatcacggttgtaaccctatat

SEQ ID NO: 241275 - DNA, 300 bp, Gossypium hirsutum
gaagtcggcaaaatttgagggactggatggcaattatgggcaagagagcaatgatgggtatttgttgtagtcaccaaaaaagggtcaagaatatggtataatcggttcaacccgacttagaaaattgagcattgttgtttgatgttttggggttttctcttgttttgatgaacttttactatgggggggatgtctccgtggctttatatatactttcaatagcccaaggatgtttcttagtttattatgtgtgtcttttatccatttagtcttcaagttttaaatttttcagcatttggg

SEQ ID NO: 241276 - DNA, 110 bp, Gossypium hirsutum
tgcattcgatagtcatgcagtggattgaatgatctgacagggctgtcatggatactttgtatgacaacgacgatcgtcttaatgcggtggctgctggacatgaaagaatc

SEQ ID NO: 241277 - DNA, 259 bp, Gossypium hirsutum
cactctcttccgaaggataaatatacccaaaaagagaaaccgcaaaaacaaagctcggaaatcctggttttttttttattcaaagttaaaacccagttttcattttggtctgtttcagcttcctctttacctaatggctatggaaccaaacttctttgaacaagaatcacatttcgagtctgatggagatatttcactgaagaacaaatggaatccaataccagaaccaacataagaccttaaaaaagattccagctgc

SEQ ID NO: 241278 - DNA, 346 bp, Gossypium hirsutum
aaaagattctacattgctcattcgtcccttgattgaaaaccaaaggtacaatcagaagacatggttactgtctccttcaccttgatggcatctaatacactgatcctcaaccattactcttctcatcttcagattagaaaaaagtggggatggaattccacaaaattttccacattgtaattttgaatttcgaaggcatgtataggttccgcactttcttgtaaaaatttttagtatcggcctgtatttaattactagggatcaatgtagtattcctggaatagtttatagggcactttcttacttggaccgttttctaaatggacttcccctcttcaacaccctg

SEQ ID NO: 241279 - DNA, 382 bp, Gossypium hirsutum
cgtgaaacattcataggtgaaatcataggtgcaatattcatgggtggagatcatcacaatctgaaacctaccattgaagaaatgccaatcaaagtgattgctgaaggtgatgaatccatggatggacagattttgatcgacaacaagcaagagaaatcagtaaaagtattgaaaaatggtgacactatggcttatcaccatctatttgcagatctaatgggtcatcaaaaccagtctgctggcttaggaagcctatgatgaacaaaaaaaaatggtgagttcacccccaaatgaaatggaatgcgaaataactttggtaatttgtgaaaacaaaagttaattatttcaagattattaaacctttttaatagactttgtttaa

SEQ ID NO: 241280 - DNA, 209 bp, Gossypium hirsutum
gtggatctctcatctgctataacaaccttcattatggtcgtgttgttttgttttgttttgcaagagtccttgtcttgtaggtttttccctgtatttatgaaactgcaactactttgttattatcaataaagcttgatattttactctaaaaaaaaaaaataaattattaaataaatatttaataaataattattattatattaaaatgg

SEQ ID NO: 241281 - DNA, 191 bp, Gossypium hirsutum
cccacgcgtacgtcgaggtctgtgggaaaaggtccacctaatactgcttagcatagtggtggatagagaatatgacaagcttacgtgcatacaatagtgcgcaagtcctctgaggctgcacaatctaacggtggaacatctagcgaagtcaatggcgaccgtatacagcatgccgcagcggaaagctcctg

SEQ ID NO: 241282 - DNA, 373 bp, Gossypium hirsutum
acgcgtacgcgtacgatatcatgctatgatctgtgcgtctcatatgaatctcaaatgaagaagaaaaaaaaatgacagcaaacaaggaagagaatgtaccaataatatcacaccaatcaaggctaagccagtgttgttgcatgtgtggagattctggtctcactcatgagctttttcaatgcacagtttgccatttcagatctcagcacagatactgtagcaatctgtatccaaaagccgactcttatgaagtttgtaattggtgtttgaatcaaaaggcggattccaagtctcagaattcttctaattcatccccgtcgtgtaaagataacagcgaagacgatggaaagaaccaaaaaaagggtgatcaaaa

SEQ ID NO: 241283 - DNA, 216 bp, Gossypium hirsutum
acgcgcacgcgttggatgtcctgctgggttctctgagtgttacacgcacttcatgcgaagatggaacagaaacgacagacatcattgatgagaatgcaccaataatatggcacctatcaaggctattccagtgttggtgcgtgtgtagagaccatgctttcacttatgagcctttacaatgcacgagttgtcatatcagatctgaacaaagatact

SEQ ID NO: 241284 - DNA, 380 bp, Gossypium hirsutum
aaaatggctttcgaatatttcctattcaatctgcgtgtttagtatgggtaacccccatacaatgagaatgtttatggctttatagccgaaaataaaaaaggaaaatacaaagaatttttgttgttttttctctttgttgtgttgtcctttttgcatctgtgcgtaggtaggaaggtacggagctcggtggttgaacggcgctgtgctggagatgaggacgaggagttgcagtgcctattatctagggttttcgcccttcagctgaagcttgtttcagttttgggccgtttgggccaggggtatttttgggctacttgggttaattccggttttgggttttaaatttgggtttgggtttgtaatgttttgagtttaaaaat

SEQ ID NO: 241285 - DNA, 338 bp, Gossypium hirsutum
ttgtcactgggtcaccctatgtgaaagcatttctacgcgagctttgcttgaacactcgcggttccgagtggctcttatggttcgcgaagcctatggtcttaatcagtcgccagagcgggccctaatgctttggaatcagcatagcgtaatgcagaactcacagaagagtatgtggcggaataagtggctgtagctcacactttagcgatatatgcttatcgaactggcaagattgtacaaggacatagttgctgcctcaggtgaacaatcccaatcctagggctgggtcactggacgagggtgaccaacagaattggccaaataccttgagagagcat

SEQ ID NO: 241286 - DNA, 414 bp, Gossypium hirsutum
tcggccaacccgttcggccaacccgtcggccaacccgtccgaaacctcaaagaacctggattaggggacatattttcctggacagacagctctctacttggcaagctgaaaggtgaatctacagtgcagaagccagatgctgatttgtttcagagaaatattggtgacaatgacataaaggatattgaaactgggttactcgagccattattacatcccagtgtggaagtgccaccttcgtctcaaacaataacagaaactgaacatagaggtagtgatgctggtgaagttcgtgaatgggaaattctgaaaagtatcgtctatggtggattaattgaatcaatcacaagtttaggggttgtgtcttctgcagcccgtgcttgtgccgatacattgaatgttttggctttggga

SEQ ID NO: 241287 - DNA, 405 bp, Gossypium hirsutum
agtcgaactggatcgtaatatccggggtgtcccacgcgtacgtttgctcacctctattttttgacgcgtcatatgcagaacgattgctccgatttgtcgggggcccctagttttaacagctactactccgattagaaacttggtgacatcgccgccacggtttgccgagaaagcaccggcgtttcggatgatgaagaattcgagttctctattgaactatgggagagtccagaaacgtcgttgttttcagtcttaaatcgccatctcttatcgagccggtgagggaggagggaaagatgatgaggtgaaagaggctgttcggattccggtgaggaatctgttcatcagcggtggagatcttccatcgtcatcgtcgtcgtcggaggtggacgagcttgaagcact

SEQ ID NO: 241288 - DNA, 196 bp, Gossypium hirsutum
gtgaaaggttattatgctaagcttggtgaaggtgctatacatcatcaagattactattcaggcttgtgacaagacaaacctctagaagtaattcacggagcattaatgagacgacttcagtcaggactctactcgtgatgccattgctgaactggcagtttatgccgaattcacaaattggatgattgagcatact

SEQ ID NO: 241289 - DNA, 237 bp, Gossypium hirsutum
aaggctatatgttctggctacagtttttgttctttctacggatatccaagtcaataagagggaggtgggtccctgcaccactctgcattggggatcgattatctcacaccttcccatagaagacactggtttttggatatgaaccaactaactttttctaaaagacatatttagagaatgagcactgggaatgctgaaacaacttggggagcctcaattcaatggagtccattgaac

SEQ ID NO: 241290 - DNA, 410 bp, Gossypium hirsutum
gctgattgcaacaatcgatcaattttaccaagatgaacagaaaaaagcctttcattatcagccattatgctatctttatcagttgtaggcttcttgggaacatcacttggaaccaaattatccttgggtgaaatgactgctgctttcatctcaccattgaaaagcttcctagattgcatcgatggtacctgatagatcaaaacaaagacaattacaagcaaagcaaggtttaagcgagccattattgggatcccaagtaacctctatctcttggttttgaaggctttagatagtgtgtagtatcagttagatttcgaggtacatatatatatagatgaattcagtgatagattgctttacgtcatgttggctaagtcatatcatacttagaacaaataagaccttaaaaa

SEQ ID NO: 241291 - DNA, 278 bp, Gossypium hirsutum
cccacgcgttcgaccacacgtacgcactatttattgttgcttggagaaagtccaacatccggacagttcaagtgaggtaagaggcattgttgctcgcacagactgaatccaagatggtgctccatcctaggtacgagcacatttgcctaggaccatgaattgctgctttaacacatacaaggggcagccgattcaattctggtcttaaccactacagacattgtcatgaccacacaggccttaatatctaatctgaaggctatttatatacaggtcgt

SEQ ID NO: 241292 - DNA, 128 bp, Gossypium hirsutum
ctggggcattgagtctccacagcatctcgttttatcttaagattagcaagagtagggatggggttccaggaaattttccagactgtaattttgtgtttagaaggaacatgaaagtttcatagtttttt

SEQ ID NO: 241293 - DNA, 342 bp, Gossypium hirsutum
cgaggaagttgggtttgaaaggtgttattctgagacatgattgtctatagcttcggatgcacagatatgatcaagtgatgtttataggctttcataatttttgtgtttttttttatattatcatatttcgtatcatgttttatttaattttttcaaatcatatttattaaatctccaaacctatttgagtttgggaaaaaatcgaatatgatttaattattaaaaagttatgttcaagctcccacttgtttttaatggcttgtcgtaacttgatttattatgcactatccatgcagtgttcgatgatatcttttgagtttaaagcacaactatagccttacc

SEQ ID NO: 241294 - DNA, 322 bp, Gossypium hirsutum
tcgcccacgcgtccgcaaggatgtatcaagcatgcccggatcccaaccatcttgaactttatccacagggagaagcacaacaggacatgcctatcttcagcttggttccacataaaaatggaatttatgcaattgagttcagttcatcaatcactgcattacaagcgttctttgtctcagtaacaattataagttgtcggaaatcctctggttttccagaatttggtgacctgcctgaaggaaaacttataaaggagacaatgttgaatggcagccttgagatggacaacatacataccgttgtccttggaaccatgcctgc

SEQ ID NO: 241295 - DNA, 404 bp, Gossypium hirsutum
gaaaggagcacgacgatgaggagaatgagtttatggggctcgaatcgaatgcttgcatagattcgcagtacctatcagaccattatgcggatgaacctgatagttggcaacaaggaaatgctgatgattgttatgaaggagataatgcgttgcttagatcaggtgatgaatgggaccaaacgagatatgcgtgtaatgatgttaccggtgtccgaacgtggttggaggacttgggattcggtaggtatgctggtattttcgaaatgcatgaggttgatcaagaaactctgcctttgcttacactagatgatctcaaagagatgggtgtgtttgctgttgacatcgacggaagttgtacaccgcaatacaacaattaagagggggcaatgctttctcgtgaaaac

SEQ ID NO: 241296 - DNA, 318 bp, Gossypium hirsutum
cgtccgaaagtacctattcaaagaactaactcaattgctcacttgttgctggatatcattcccattggggacagtgagttcagaatctttctggctctctatttttatcttgatggcttatatagcttcatctacttagatttttaagtacttaatctgtctcttatttttacccatctttagtggttgcttcatccatattgatatttttattttcttaaaccctacccttctcgtccccggacaacctaatctttgtatgtatgtaaactaatgtacatttgtactctttcaaaaattatatttatgatatgataa

SEQ ID NO: 241297 - DNA, 370 bp, Gossypium hirsutum
gtcttgattgggttcctggatgtatggatcctacttcacacttatataaccctttggctaatgtagatgatggatcttgccctcttgattctgatgttgaagagtagtggtcatacacctgcatttcatacaatgtaacattttaattattcagtatagtcttcttaaagattaaaatgtgaccattggtgtatagaatgtagcatttagcatgaagatatattgaaaatgggaaaattttcctttagtccctcttataaattaaatcatttcaaagccccttttggggccaaaatcatttgaggttttcccattattcaattgagtttgacttggcataatttattccatcattttttaacatatatta

SEQ ID NO: 241298 - DNA, 339 bp, Gossypium hirsutum
tcgcccacgcgtccgcccacgcgttcgcccacgcgttcgcccacgcgtccggctcaatgcaaaatgcctaagcatcagctcaactaagatgagcagcccaacaaagccaaccccaaagcccttctcccttctctccatgcagaacctgcccaaaggcctcaccatctcaaaaccggccaacaactcaaacctaccgtcttcactcgctggcagcgccattgctggagctatcttctcaaccttgagctcatgtgaccccgccttagctgcacaacagattgctgaaatagctgaaggagacaaccgtgggctagctctattgcttcccataatcccagc

SEQ ID NO: 241299 - DNA, 242 bp, Gossypium hirsutum
cgcgttcgccacgcgttcggctcctcatcattatgcttgtaattcgcctcgaaagcgagctgtatatgtatattacaaattttacatatatatgcatgtataactatactaagtgttggtttggatatagaactaacctcttcattattattgttcccgattgaaaaaaaaaaaaaaaaaaaaaactgtgaacttaaaaaaaaaaaaagaataaaactaaaaaaaaaatagaattgaacaat

SEQ ID NO: 241300 - DNA, 295 bp, Gossypium hirsutum
gcgaggcacaatctcgaggcgtagatgctgtggctgatactgtaccaaagatcactgccttgactggtacacgaagacggacgcatgggaaacctgagaaacaacagcctgctacactttcttggcatgggaccaaaaaccaagaacctgctgctttcaatgggaataataggcggacttgtctaggggctagttaacaaaatagcgcacgatcaggctcatggcaagctggcatgtggatcaaatggaaaccgttgtaaagatactaaacaagcccccggatgacaggctatac

SEQ ID NO: 241301 - DNA, 200 bp, Gossypium hirsutum
tcggctaaaattgattcctctttatctgatactgatacaaagaaggctgcggttgaagcggcaaagaatgccctctccaaaggaaaaatatcacatttactgttagagcttcatttaacttttctctcctttgttcttttaattgatgttgtctgggtttttatatttgtcagttgatgttctaggcctcaaactttcat

SEQ ID NO: 241302 - DNA, 260 bp, Gossypium hirsutum
aaaagaaccccaagagtggggctagcaataggggtgcagcaaaagatatagcagtgaggtctgagggcagagcacctgcaaggacttatactatacgtgccagggaagaggcagagtctcccgatgtgattacgtgtactttttctatccatgatctaactgttgttgctttaattgactcgggatctacccacttgtacatttgtatggaattgatacctcatataggcatggtagtagagtccattgagtttgtgatc

SEQ ID NO: 241303 - DNA, 172 bp, Gossypium hirsutum
  unsure (1)..(172): unsure at all n locations
cccacgcgtncgggtgatcataaccattctctatctgttgcacaaaccaccatacttgtatcttcatagatgaacaacctattttcctgttattaatgctcgctagccaaactgtactttgttgggatgggagggttttatcccctctgcaagaagctcttcttttgcttta

SEQ ID NO: 241304 - DNA, 171 bp, Gossypium hirsutum
cgttactctgcggatggagcagatcgtgtgtttcctgatagaggggatggccgtgcacccgctgtcgggccagcattggctgtgggtggcatgcaaatatttattaggaggccaggggagatcaaattgacagcggaaacaacatctggtgcttggaccgcgcttcttatg

SEQ ID NO: 241305 - DNA, 386 bp, Gossypium hirsutum
acgaaaaaaaaaaaaaaacataaacgggacccccttcccggttgtacgatctatagcttccacgggggggggcgtctccttcacctgtagccgatatttacatcttgttctccagcacctactcactagtgcgtcttgaaagatcaacctcactggcacaacgctcatgttccagtttttcaaaacgaataaaaaaaggctcctatgagcgaaaaggaggccatgaaagatgcccatgcccactgaatcttacgaacggacagcgcatttgggagcgccaatggggctcgccctagacatcctgcttacaactctttggtggccatgttacacatcatcttaaccggttcaatgggccggttactaaagcttgatagttaaccttc

SEQ ID NO: 241306 - DNA, 328 bp, Gossypium hirsutum
tcgcccacgcgttcgcccacgcgtccgagacggtctcgtagctattcacctcgacaaaatgacagagattatcattcaaggggtagacgagggagatcccgttctcgttctccatatggtaggagaagagatgatcctgacttacataggaggcacagagagcgctccttggctggtgatggcaagggtcatcggaaaataaaaaaaattcatttttcaatttggacggaaaagcgataaatatgactttatattggaagggcgcgctcaaagccaaagggcactccctggtgtgggatcattatgaaggcaaccctttattttaatt

SEQ ID NO: 241307 - DNA, 238 bp, Gossypium hirsutum
gggcaggcctacgctttcctccaagcgttcggtttgcttaaaccatttattctagagggctatcttctttttgaggtgcggaagtgtatggaaacgtattatctatggaacctgaccaacactgcgatggtatacaacctatagctttttgggatctaactatttttagttatggattttatatctgaacttgagaaaccatttagggatatttgatgattgaaagaggtcattgttc

SEQ ID NO: 241308 - DNA, 336 bp, Gossypium hirsutum
  unsure (1)..(336): unsure at all n locations
gaagttccggtgttggatcatgatctacgtactgaatgcagcaccgacgaataaggctgcagcagctgctgcttgaggnattacaaggttgttttggatgaagccttctctttttaggaaaactcttacgagaacattactcttgaggggtgtcattacattgaatgctttagttgtttatagtttatgattatggagttgcataaaaatttgaacaaggatgaatgctttgcattgaaaactgatgctggaaatgttgtatgcaattaaccgtttagaattccaaggattctatctaatcataaaagatcaactaattcgtgaagaaaatggcta

SEQ ID NO: 241309 - DNA, 431 bp, Gossypium hirsutum
  unsure (1)..(431): unsure at all n locations
gcgatgatgggttcaatctctgtcggtacttcttcaatccaataggatgggttatcaaggttgtatgctcgagttgaaagggcatgcactacgtcatttgtctttcgaggggtatactcaaaagataagggcatctccttcgacaaccacatctcgaaagcccatttcttccccaaatatgacggtctgtagacatgccttcgcttcagcagtggtcggatcccttgttcttcctagtgggtgtccaactcaacttcttgcaggacctgttttgtgaattcgcaatctcgaaagaggtgttccacagtttcttcttcaactgagcagactgaacatgcaacatcgttcttgattcttcgaagtctaagagtactgagcgtcngaagaaaattattggcaactcttcacagatgtatttttattttacttgg

SEQ ID NO: 241310 - DNA, 468 bp, Gossypium hirsutum
acaagttgtattttgccgctatcggattatatcgatcatcacaaggggaaataaaaaaaatgctgaggcaattttggagaaagagaggttattacagacaagttagaagggagaagggtgaaggtgttgttcctaaagggtatgttccagttatggttgggagggaggaggagggagccaagttttttatccacatcgatatgttcgaaaatgattatttcgttagcttgcttgaaatgattgctgtggaggttgggtatgaaaatccaggcatccttagaatcccatgccacacccaatgtttcactcacatacttaaccagatttcaaggatcaacacctagttttcattgtttcgccttccaccactgttttcattgttgcgctctacttttattttatagtgagtttctttttgtgagtttatagttaaggcattaataaaacaaagatttattgggtcaaaaa

SEQ ID NO: 241311 - DNA, 320 bp, Gossypium hirsutum
acgcccacgcgtacgcttgctggcacacagactctgaatgcataagttgatgaccttctacctggcatggtacgtgcggtgctggataatattcattgcttagcctcctacgatgcctaacttgattccattgcttcatttggtgcatcacttggctaaagtgctcaactgggccggcggacacccaaatcagcttgcgatgacttatctttgagagcggaacactgagcagcgtataaaggcttttacattgggataatgatacaaataagatctaatgattgaaacatcagattgttgcttcgtgcatagctctcaat

SEQ ID NO: 241312 - DNA, 178 bp, Gossypium hirsutum
gctgggatggattatattcactacttgaccaacttgcttatcgaacacaacctattgctttttgtgggcgcatcacttgtagtaagcgctcatataggccaatgtgcaaccccatttacgggtaatgactgatcgatggggtccattcctcagcagagtaaaaagctctgagatcgtg

SEQ ID NO: 241313 - DNA, 394 bp, Gossypium hirsutum
aaaaaaagttgtgttattaaaataaaaatacatgatttgcatgatatgcaataggcctaagggtcttatcgtatttgccaagattgagagcagcacacgcttttgttaatctataagaacctcctctcctcaaccttcatatcccctttcaacaagagcttagaatactttgccttattgtcatcttccaagacttatagtcccttatcaccatgcagcctagtgaggtttcaggcatccaatacctagttccttccaatccatccccatattcaccccatttcagcatgaatcagagcaacaagcctgcactcgactcgaaccagttcttgaaccccctgtataatttctatatccctcctcacattcaagacatcagtccccactcgtgctg

SEQ ID NO: 241314 - DNA, 402 bp, Gossypium hirsutum
gcagaagagaatgacataacaagaattcctaaggaatgcagagaaacaatggtggctattgatgaaaataagggagattctcacacttcaagtcttggtcaatctgatgcatttcatggttctacggaaatagttcctgtaactgaactgacagaagaaatgttgtcttcgaagttcccaggccagtctaagaggagtcttgctgagtgcatctcggttgccgatgatgaagagtggtcagccttagaaggtattactagggttaatagcttattaagccttccgaggtttctatctagtcataaaagatcaactaattcgagaagaaaatggttatgagaactgacacagaagtcatttagcaaaataaacatgttttggatgatctcacattaatgaatt

SEQ ID NO: 241315 - DNA, 459 bp, Gossypium hirsutum
gccgctgccgctggctttctcttagccggattttatctactggttgacatctatggatatcaacgcatgacattggtattggaatggatggggaagcatgcattggtgatatacatccttgcagcctgcaatctcataccaatcgttatacagggattctattggaagcagcctccaaataacattcttagcttaattggcattggaagatgaagtgacgattttgctgcaatccatggaagtataggttttctctttacctcttttatcaactacagttgtgaactctctctctatttagattacctaagtgagagaggggtggttaggcaggacagaaagggtagaaaatatggtttgtatgtaaaaaagagtgagcagagcaagcttgcttgagctttctactttcatatattcttggaaaaatggatataatttttatgtcgtctgacctcgtgt

SEQ ID NO: 241316 - DNA, 321 bp, Gossypium hirsutum
gttcagcgatacatacgaaaagattgaggatagtaaaaggcagcagatgttggagttagagaagatgagaatggattttcacagggagttagaaatgcagaagcaacacatcatggaacgagcgcaggccgaaattgcaaaaatacagcagcaggctgacgatgacgagaatgagaaggcaagcgggtaatgtatgcaaaatacagttttatttcttattgctgattcaatgtcgactgctgaatgttgttgtataatatattggagccttttgccgatctccaacaataacactgaatatgctgcatcgattgagtagaa

SEQ ID NO: 241317 - DNA, 385 bp, Gossypium hirsutum
cgacccggtggtcaaccaaaactcttttagcacctgtatactctcactacatattcaggaacgatcataactggttggtcaaaaactgacactgcattgagacatttgaaagggactatcatgtggtctcactaatcgctcaggtaaccactctgaagtgtaagtgggaaagagaagataaagacaatgggttacgctgccttcagactcttgactgagactctgcaagctccgtcgtcgctggcagccgtaattctctcgctatttgtgatgatggcaagttgtttacttggggatggaaccagagaggaaccctaggggcccctccctagaccaaaactgataatattccaagtcaggctaaggctcttgctaatgttaaaat

SEQ ID NO: 241318 - DNA, 248 bp, Gossypium hirsutum
cgcgtccgaaatctttgggcacttaattggtctttcctatttttatatttcatccatggcttatagaataatagatgttcagttttcaaagcttaatttttattctggtatgtgttgcttatatgttttttattggattgcatttttatcagacacactgagaacagctctttatgttcctaggaatctacaaacatgcaaattgtagctgctgcatttggatggtattcgcattctgtgcttatatt

SEQ ID NO: 241319 - DNA, 369 bp, Gossypium hirsutum
gagaaatcgagagtcagcatagaggtggcagctggcggggcggcctccgcagctgcccatagtgcgtccaatgtgagagctacttatgatactgacactgctcagaatatacaacgggacttgactgctgcaagtaccagtctccgccacatgggatgccagagagccatcagctgggcggcaacactatgtatagcctgctttttagaatcgctgtgacacctcaggggaacactagcttcgtgtcctagctcatagacaaccaacacactcactgcaactaaggcaaccgtgatgctcgcgcatcaatgtaaccgtgtaggtctggataaggacgtgaatgtctttaaccaactcgtcccaaatctg

SEQ ID NO: 241320 - DNA, 263 bp, Gossypium hirsutum
tgctgcaagttttcgagccaattcaaaacaaatgcagacacaaaatcaggcatgtgtgggcacattgtctagtggggatgcccctctggctttgctgggggtgaggactttgttgataaatcataggagtcacagatttggatcagccaggatcttctaatccagcatattcttgttcttaacatgtgagaagtcataagactcgagagtgtgctaattatgtttgggacactgctcattatagtttttggtgtcttcttgag

SEQ ID NO: 241321 - DNA, 305 bp, Gossypium hirsutum
acgctctggtgtgagttctgagatacgatcacctattaaatatgccgtagaatatacccgaaaggcgaaacatggtgcatgagtgcggtcatgtgatctgtccattttttttggcaatgctgaaggcaattaatcagcgtgtgaacaagaccgacaactgtaaggaacaactacagacatactgtcggccctcgtcgacggctgcaacgccgtctgacactgccttaaacgctatcgtgttagtacgggttctcgtgtgcaagcctccttcttaatctaatgtaacatgtaacgggagctttctt

SEQ ID NO: 241322 - DNA, 433 bp, Gossypium hirsutum
  unsure (1)..(433): unsure at all n locations
cccacgcgtccggttcaaaggccgaaaataaacaaaaaacagaaaagggtaggtctaatcttgaaatctcagttatcaatgagaatttaagacaacgaagaagcttacttgatgattcatcgacatcgagagtgggtcacgagcttatatcacctataggagctgtatacctgcagttaacgaggagaagttatcagtactcggttttgagggaattatttttgggttactgctcattagtggttcggttgtattcttgagaagaaagcgggccattaccatgcctggagtttcagcagggaggatccaaccaaactctaggttttgattaataagccctttcatatgaaaccgactttgttgattgttgaggctttggagtaatttagtataaaactacatctaaaggtaaatgctntagctgctcttcctt

SEQ ID NO: 241323 - DNA, 312 bp, Gossypium hirsutum
acgcatgtgaccacaagcgatggaaggacgcgtgaccagctacaacgaggcaccgtgatacaggcggtaaggacatacatttgatggtcatcagttctagagtttcacgacacataatgctcatcaaatggaagctagtatatgaaatacccaccgcttgagataggggacggtatacaaaggagcgatagggtaaatgtacatgctaatccggccccataaagatgccaatagctaatgtgatttattggcaccccttatgactatacatatatctatactagatggaagatgatccacgctattaaaatt

SEQ ID NO: 241324 - DNA, 165 bp, Gossypium hirsutum
gcagactgacattcaccaagctatggctgcagctgcgctgcaagaaatgagagcagtggatccctccagatcagcaactactacccttctgcaattccagcaaccccaaaatctatcctgcaggcctgctgctttaatgcagtcccagatgttgcagcagtctca

SEQ ID NO: 241325 - DNA, 324 bp, Gossypium hirsutum
cccacgcgtccgaatccatagtatagcatatagatatcgaactgaattgctgttgaacttggtagtgatattttcatgttcaagtttctttttacagaaatgttttagctggatctaattagagatttgtcatgtttgtcctatgtgattgcagctgttttgcctgtgacttttttcttcaacaatgagaaaggacatctaattgggagcttagctttaattagatttgacagatagaaacaacaatttgaaagagggttctgatcaaatatgaaaaagaaactctctacttgaaaggggggccccttctgaaatgtcaacgtt

SEQ ID NO: 241326 - DNA, 178 bp, Gossypium hirsutum
cccacgcgtccgaaaatgaagaattttgatcaatgatgtatttttattacatggaaaaaaaaaaccattcttgaaataaagttaaaccttgaaaacaactccaaagataattggagttgaaaatgatttttgttaagactaaaatctcttgatgatgaggaatttgattatttcattt

SEQ ID NO: 241327 - DNA, 276 bp, Gossypium hirsutum
atggcatggggtagtaaggtataaaacgggagtaagagatagtggtgggtatatgttgttgttctgagatgtaaattaataaaaactgcatgtaattgaaatgtctgatcaaagaggagataaaatgcaggtgacagaaaggagttaggtgtttacatatgttgataatgggggcattgttaaagaaggtataggcatgtaattgtggaaaacttggcatgaattcttcacttaaatatatgataatggaatggtataatcctgcttttgaagcca

SEQ ID NO: 241328 - DNA, 463 bp, Gossypium hirsutum
gttgaattaaaaactcctaattcttggagcacttgttgagtgaagttacaatcccgaaagagatgactcaccgtctcctcttcttcttgacacactggacaagtcgtgtttgccaccagtttcagaacttttagatttttcaagaccggcataaattcattagcaactttccatagatgtattctgatcttgtttggtacctttatttctcaatttttttttgtaaaatttagatagaagattagattgtatgttggtaccctctgctgtattcagccaactatatccagttttagctgtataatctcctgtattatctcccctccaagttataacgtcttgtggtgcactactcgccagcaggattgagactatcttttgcatttgctcatccctaaataataaacgattttcctcttgctttcagctcccagtaaccagacatcattccagatattaacac

SEQ ID NO: 241329 - DNA, 303 bp, Gossypium hirsutum
acgcggacgcgtgaggtacttcagattctgacttgggcggagatttactaccatgcacaaacggtatcagctgatggagcgcggcctactttctttacagtataagctgcagtttatactcttcaaatagcaagcgtggctgatattgcagtgctaacatatcccagttctaggcattctatgtaacacgctatttgcaggggcgtgacatggagcagaactgtgctatttacgagatggaggaaggctcctgttagcgcagcctaggaaccctgtcgagtcccaaggacggcaaacgaagct

SEQ ID NO: 241330 - DNA, 431 bp, Gossypium hirsutum
gaacaggaggttcatcagcatggactataaaagtgatgtgtgaatcaaggttcgtggcccagacttgtgcacggaggttagcgtatcatctagaggagttgaaggaagatactgtgatcaagaacattttggttttggagcgcggcttcaatggctgggaagcttcccgacgacctgtttgtcgctgcactgacatcccttgcaagggcgagagtgcatgaccaaccatccattataattaattccggctgataaggaagcaaaaacatatatcatctacttggtgccaaccatttttcccgttattctctcttctgattgataatgtgtaatggagatatactatattactgggtttgcgttctaccatacgtgttttcactgttgcctcaacaaaatcgcacgcttgacccacatattgaggaacaatt

SEQ ID NO: 241331 - DNA, 228 bp, Gossypium hirsutum
cccacgcgtccgtaatgatatatttttagttcttgctcccagttttacttcctttgggctggctctatttatgagttacgggctcttttgtctgtgcgtgtacgtgtttacgtcggttttcatatatgataaatttatcgttgacctaaaatctggcagaattcaagcctaaagaaatccagggattggattcggcaaaaaaaaaaaaaaaaaaaaaagacccaactt

SEQ ID NO: 241332 - DNA, 342 bp, Gossypium hirsutum
aagaaactcatttagatcaggcacatattcccttaggcttctctctctctctctctgtctcccctttctgattaattttggcattgcagtgagtttcacggaaccacaaggaatcttcaaagattatgtttatctgcattgttcactcttaaaacaaagacacgacatggggtaaatttaattaagaaccaaagttgcagctttgtaaagaatttattagtcaaaggtggagggatgctgctgttattactttcagagtgacatcatccagttgttattaggcttgtaaaatatctctatttttccttagcttagagtggtttaatgacaaccctggtagtg

SEQ ID NO: 241333 - DNA, 314 bp, Gossypium hirsutum
acggctcgaacagtggggatagcgatcggtgggtataagatgaaattgcaattaggacggtgggcacagcgactgaagagacttgtactatgcgtgccagagaagaggcagaggctcccgatgtgattagcgacacgttttatatccatgatctaactgatgtggctttaattgaatcgggatctacttacttgtacattagtgtggaaaagatacctcatataagcaaggtaggagagaacattgagtttgtgatcaacggacatacagcgtgtactataaggcgagcacaaggctactgatatagacgtagg

SEQ ID NO: 241334 - DNA, 284 bp, Gossypium hirsutum
acgcggaaaaattaaccagcttttctgctcattttcccagagaaaacatgaaaacatgcagatgagaaaactttcaagcaggttcatcctcatattatgcattttggtctacttttttaaactagtgcaattttcctcacttgtgtagatttcgtaatacataaaactatttaaggttgtttaaagttgtactgactcatgcccactcattgccattttgaaatgtaattaggaagttgttctaaaacgcacaatacagatagaagaagccatacaagtttctc

SEQ ID NO: 241335 - DNA, 327 bp, Gossypium hirsutum
aagaaaaaggactgagaatggaactgtgcgaattgacatagtaagaaaaaactgtcatctaaacttgatgtctcgacgagaaagaatccctcatggatgaacgcaaaaaaaaaggatgcatacacttgataacggataaatgaacatttggggcgcccgttttaaaagatcaatgttcgagcacgtgctctggtggaagaatggctttttttatcgggaagatatgtacaaagagcaggcgggggtttaacaacccggactgtgggaaaagcttgaggtgcgcatacttaacggctaggatctaaacccgacttatggcgatgggct

SEQ ID NO: 241336 - DNA, 450 bp, Gossypium hirsutum
cgcgagactccaaacaagcagaactttcctttttcggctccagaaacaaaggagagttgcgggtcagcacctcagggaaacagagaaagctatcctacagcagagctgaagattttatccaaaccaagatcgaagtcgacttgaacacgccaacattaaaagaatagaaacggatcgctctctctacaacactaatctaatgtctacctccgatgacgatggaaactctaacggcaactccagacgacgatattcaagcggataacaaggaagagggaccagtggaataataggaggagcggtaaggatcgcatgtactccggccaatataacaggggaagagatgtctcgcggagctaaagagaaggtttcgagggttcccgaccctgtgaccggatgctacagacccgagaactgttccaatgagatcgacggggccgagctcagatc

SEQ ID NO: 241337 - DNA, 317 bp, Gossypium hirsutum
acgcccacgcgttcgcttgctggcacaaatactctgtttcaaagagtggatatccttctacatgacatgttgtgtgcggagctggataaaagccactcctcagcctcctccgatgcctaacttgattccatttcttcttctggagcatcacttgtttcaagtgttcaacttggccgatgtacacccaagtctgcttgcaaagacttatcttttagatcgaaaccaaggttgtgtattaagctctgagattgtgatagtgatataaatattattatatgattgataaataaaattgttccttcttgcatagctttgaa

SEQ ID NO: 241338 - DNA, 158 bp, Gossypium hirsutum
acgctggctggtgtgtaatacctaacatctttcttatgtgttttggggaaagaaagcggcgacatctattaaagcaacacgtcgttgtagcttcgtatatgataaagaaaaggaacactcttcatatttattccatactttatcacccgaatgaaacc

SEQ ID NO: 241339 - DNA, 110 bp, Gossypium hirsutum
ctcattcgttcgtacagacgaccagtagtaaataactgctctgacaggtataaagatagcgggggtgcgtcatcccgtaaacctgcttactatagagagccagattgagg

SEQ ID NO: 241340 - DNA, 187 bp, Gossypium hirsutum
cgaaatatgattggttaggagaaccctacttttcccttgcttgggggcgggttgattcactaggatgcgactgttactgtgagattttctctatgtgcatgctcccaggaactcaagagtatctgtctgccatagagcacttattatatatatatatatagctggtcatcaatgattttaaaacaaa

SEQ ID NO: 241341 - DNA, 312 bp, Gossypium hirsutum
cttacttttcttatactttggacattcatattctggtcatcgactctaatctacaaatctgggaaacaaaaaagaaacgacaatactcatactaggcttgaaaaacacacaaactatctacacgcaaagctgatacttctaggggccgttcttttttggtgccgatcgcccgaacaaatgcatcaagcttcttagacttaaatcattcttcctatcctccaacaatgggccgtcctataacagctggatggtacatgaataatcctgcggctaccgactctattcgtctgttagtatccaacccttttcttc

SEQ ID NO: 241342 - DNA, 429 bp, Gossypium hirsutum
gagcgttggttaaaagattccaaacatgatattaaatttacaccccactccttttgactcctaaatagatgcttatcgtggcttggcttgaaaaggttagtgatttttctggggaaagaatccagtttagtatttgatgagatgccaaatcttatttcttgaaagcttctttgttaatatatctgagacatcaccattgatctaaatagagatgttttaacgattggatcttgtttatcttcgtctcatactacattgcattaataacagtgatatggaaagccggagctcttggataatttaatcatatctgcaaactgttctaatatgtgtaactagttcatatatgcattgatttatgcactgctttagtcgacaacttaataaaacacatggctcttaacttatatctctgcgttataaatttgg

SEQ ID NO: 241343 - DNA, 430 bp, Gossypium hirsutum
aagaaaggttgtgtcattcagatatattttctatattcgcacgacatactaaatcgggcatgggctttatcgtatgcggcaagacttagagcaactgctgctaacgttaaattataggatacctcctctcctcaacgatttaactcccctgtagacattgagcgcacacatacgtctgccttattggacgccatacacgcttatatagaaacaatagcgccatgcatcctagtgctggtacatacttccgacatcctacactctctggataataccgatattcaccccattgctcgatgaataacagcaacaagcctgcactccaccctcactctatagtataaccgggggtgtgagggtcattcccctccttagattcagaacatcagtccccactcgtcctgaatcataatggtttccactttttgac

SEQ ID NO: 241344 - DNA, 139 bp, Gossypium hirsutum
gcccaaccatcgtatactagccacgaactggactggataggaggattcatacgctgccggtgcttgagctaacctcagtgctaaacatgtcgctcctggtccctacggaacctgatcgcgaggaaggacccaccctccc

SEQ ID NO: 241345 - DNA, 215 bp, Gossypium hirsutum
aaagagctttgcgcgagacccctttttctatttccagacgctgcctaacggcggccgtgctataacactgtttagggtgagaaggaccataatggagtactgggacttgccttgcttaataaggagacctgctttgagaactcttcgtagatccttctatatttgttgacatgggattcgatgctttgcatcttgaataattgcaagaacatctt

SEQ ID NO: 241346 - DNA, 348 bp, Gossypium hirsutum
gaagagggtggtagagcgacaaaatttcttgtactcgataattgccttccagggcgcacgttcttgtaagtatctatcataatttttgaccatttcgtttaggttctttcttttggtctttgctggaagctaattaatgaattctggctttctctgatcttttagattgccgatatttaatatgatccaagaccttatgaggttcaatcaagaaaaactgaagaagaaaatgatgatgtgatgttcaaaatggtcaactaaatgcatgaacatatattaaaagtgaccaaacaaacctgtagcatttattcacataactcgatccatcacggtgctagacatgcgggg

SEQ ID NO: 241347 - DNA, 179 bp, Gossypium hirsutum
ctacgcggacgcgtgtgcggacacgtgggcgcaaggtttgatctcgcttttacctctgtcttttgggggtaaatgcaatgatgtacaaaacatcttttggggtatataagacaattcatcagaatagttaagaaactaagaaatagaaagcacctttgtcagaatagcttttgaaatat

SEQ ID NO: 241348 - DNA, 175 bp, Gossypium hirsutum
acgcccacgcgttcgagatgcgtcaaagggtatcttcattaaaggtatatccatgcatgcgcagcaaatcgtacaacggctcaatgcgtcaggatccacacctaaaaacaaacctaacatctaagaaaggctgggactaaaacaaccaatggcactcaaaaagacaatcctataa

SEQ ID NO: 241349 - DNA, 306 bp, Gossypium hirsutum
taaagattaacttaggggttaaattttatttgccgttagacttgacaatctttttcggctttcatgaagaaatgacactattctaaaaaaaaacggtcttacgtgaggatcctgttcgatgtcatagtatgggttaaactcgggagatatcgtcaagggctagggattgatgtcggcaagagatttaagatagcaccatgagaacattacttattttagggactaaatattcacttatctcaagacatacacttatggggttgactatacaggagggattttgcacagcatcacctcaagaagagc

SEQ ID NO: 241350 - DNA, 342 bp, Gossypium hirsutum
cccacgcttacctatgggttaaatttaatatttgtcttgactagagcatatgttgggtcggtcacgaatgcatgcttcttcaactccacatgcatacgtacaaacactaaggatagggagaaaaaaaattatactttgcctgatcagaaacaatagcctccacatgagaaagaaccattactaatattttatgaatcttcttgaaaacaaatcccaacttgtgaaatggaacaatcctggatgaaggaacatgcacttattgtcccctgtgagaggtagaaaagcgtgtgagaagcaccacagaaagcacaatcggatcgggccggcactccaattaaacct

SEQ ID NO: 241351 - DNA, 394 bp, Gossypium hirsutum
gccaactgtgaataatgtgaattgacattcaatcgttccattccatttacgtataggggaaagacacttgagtaccttcgatcatattttaatgtcaaaaatggccgaggagcataccagtgaggcccctgcgttggagagcaacgttagcggtgaaagagcaccggatagcaaggtccgacggttgatctatttcatggggaagaaagaagaggataagcctcaacaggacgtgatcgtcaccgagtttgaaaaggttactatcgaatagacaaaggcaaaggaagaaggtgaggagaagaagaagcatggtctcctgtagaaacttcaccgggcagatagcatcagcttcagctcttcaagcgactaggaagaatgtggaggagaagagaag

SEQ ID NO: 241352 - DNA, 446 bp, Gossypium hirsutum
atcatggtcttcacaaggcaagtcaaagacgaagaaaaagacaaatgttaggcataatcatcctaaagatgcccaacaaggaatacaacaggcttatgagagcatcagtaacgggcttgggaaatctgcttctgctttggttcagaaacctttgaaaaaataccaacgaggagccagtgcaagttctgctctggcaactgctgttagggcagttcctactgctgctatagcgccagcttccggttgtgcaagtgcaatacactgtgctctccttggactcagaaatagccttgatcctgaacgcaagaaagagtcgatggagaaatattttggtcccactctgccacaggatccaaattaatcttgcaagcaacagtgtcacttctgggatggtgtgatggatcaaagagtgttctttcctcgaggagaacacggatcgtcatgta

SEQ ID NO: 241353 - DNA, 392 bp, Gossypium hirsutum
gctaccttctcggagatatgacgattcttatagatgctggacttgagggattgaaggatgtggtagctctagccccacctcctgaaaatggctcaactgaaagataccctgaggatgatacttacttcatctgtacatgacctgagaacggccctattctgatatcaaatgacgctgtggctgttcttgacccacaaactaggcttgctagggacgaagtggcatactgtgtgtgcgcaccattggtaacacttatcttcaccgtgagctcaatgtctttgagctggacaagtgtaatataggatatttattgagcatgttgtcggaagactgatgggtacgttgtgtagcttatgcgcacttacgtacagttgaggattgaatgctcatca

SEQ ID NO: 241354 - DNA, 339 bp, Gossypium hirsutum
  unsure (1)..(339): unsure at all n locations
ctnnntttttttttttttaaaaaattaaaccccattttaatggcttatactttcacttacattttcatattaagggagccttttcatttaagacttatgcccatttatttattaagatacctgcccaccgtgaaagcgcaagggtcatttgggggaagttaactttacagagtctccagaataagacagaccttggcagcctttccggatgatctgaacgaagcaccataggcgcacctcttatacctctcatgtcacggaccgcgggccaccacacgtatctcgggccacacatccctcggggcacacacataccctcggcccactcatccctttttc

SEQ ID NO: 241355 - DNA, 393 bp, Gossypium hirsutum
  unsure (1)..(393): unsure at all n locations
cggacgcgtgggcgactaacttcttttacaggaagagttatccacggactacttttatcaactttggatgatcctaataaaaaactttgcatagcaatcagtatggttgtagcagctattgcagtctacgactggccagaaagttggccagacttggtgccattctcctaaagttgattggtgatcaaactagcatgaatagaggagttgagaaggaaagaggatgcaatagcacaggtgaccgagattccgtttaacaattttctttattgttggaacaagtcttaaccaagatcaagancaaagtacttgactaagttatgtatgcaggcatgtcaatactttggctttatctaagcttggaccaacccctcgttggatattgggtcttct

SEQ ID NO: 241356 - DNA, 434 bp, Gossypium hirsutum
gtaactactataaatcctacccttgtgggtgatcctcggccttctaaacactgtagggggtttgcacccagtggatgtgttccttctaagattgggttctgtagttcacatgaactgaacggtgaaaagttctctggttctgggaaatcttgcaaccagattaatgcttctgaaacaaggatcagtatcacatctgaagatggtttgcatgaagatcatgaacatgaaaaggatcccactttctcttctagtggaactgttcttcctgaatcacacagtacatgcttttatcaatgctgctttgggtgcctacatgccctccttagttggatgccaaaggctctggttactgaatggacatcagatgagagccattggacagctgttgatgtatatgaaacagctgcgttattgtctgcgcatcatctttcaac

SEQ ID NO: 241357 - DNA, 232 bp, Gossypium hirsutum
acccacgcaaacgcccaagccgttcgcgacccagctccacaccttagaagctgccgtgtcatactgcagcaagcatgcagctgccacgagagtttactttgttcgctgtccttatgcagaccaatcaaatagcgctgtctcatataccaaaggctaacaacctggcatggtggcaactacattctacgacatcgatatacaaaaacatacccgctgtatttatgatggcagc

SEQ ID NO: 241358 - DNA, 315 bp, Gossypium hirsutum
gagggattgagggataagctcttgctatgggctctactaaggtttctgcgctgcgtgtgctggtgagaggtctggacgatcgccattccctggtgaaaacccaacttggacgaagcgccaacgcgtggctgttgctagctatgagaagaagctggtctaaatgcacatataattctcactctactactgaatttggaaacggatgacaccctgcagaatattatatttagtgaatcagctcgagatatgccgctgcttcttttttctcatttgatatatgcgagagcacgtggtgcttaatccttttagactggg

SEQ ID NO: 241359 - DNA, 250 bp, Gossypium hirsutum
cccacgcgttcgcagttcaaaggatgtgaaatttgcaggtggggggcctataaagagggctgctgaaagagtcatgggtagcagggtcttttgcaaataaagccaattcacactatggatcaaggctccttgctgcggcgaaggtctaccatctgttaaccggagagaggatgcgtgcccttttaaatgatagaggaccaccttccaagggatataatgagaaactgtttgctcacccgaaatgcgtaaa

SEQ ID NO: 241360 - DNA, 137 bp, Gossypium hirsutum
gcggactcagccacacatgatatacaatgttcagtgttcccgagcaatcgggggaaccgtgggggaggaaccctgaaaaagcacaatcgacaactcgtgtgaaagagaactctacaatcttgccgataccaacacta

SEQ ID NO: 241361 - DNA, 273 bp, Gossypium hirsutum
acgatccctgttcccgacggaccttacaccggttttttttggaacacgcaaccaaccaacgctccttggagctgagtcaatgtggaagatgacaactcccttggggatctggatggtcttacggaatctggtttaaagaagaaggggtgatatgaatcatgcaacccttttagctccaaagcatgtatttgagaactctgtgtttggataggctaaatgacaagtttatggagctggaatctatttgggtacctttttaggacgatccaaaac

SEQ ID NO: 241362 - DNA, 233 bp, Gossypium hirsutum
gttggatgtggtctaatttccatctcaagcagaatatgatagacttttatgagatgagaaagagaccctcttatcgttctttggttgagattacaattaaaagaaatgggaaaaaattcctgcaatggcaatatgaatgtgaacgaattctttagacctcttagtttttgttttgttattgtttccatggtgtgagtttgcaggcattatttaaatttgtgttgaatctgagt

SEQ ID NO: 241363 - DNA, 315 bp, Gossypium hirsutum
  unsure (1)..(315): unsure at all n locations
gcccgtgtttgcagagtacatcccgcagagaggctatcatctccatgacgttaaagcttatggccagatgcttaaggatgctggacctgatcacgtcattgcagaggaaccaacccaccagcttatacacgatctggggcgtggattagacaaaactgagaaggacaaggattccttcatcaccgacttttatgaggaagactacgacnaatatccctgggggacggaacgcaaagctgattaggaccaaatttggcgagctaagatggggccttttcattggcaacaaaaactaagtactgcttcgtctctaat

SEQ ID NO: 241364 - DNA, 151 bp, Gossypium hirsutum
cccacgcgtccgctctttgagtttagcatatatattaaagtttgacacaatcttgctgaagaaagggaaaaaataaaaaaaaaaagagacaaacggcgttcagacatgggaatacatgccttcgtacgcgaacaaacaaagagaatatagg

SEQ ID NO: 241365 - DNA, 350 bp, Gossypium hirsutum
gcacatttatatgccgcattaaaacatattttagtgcctttgttctcacaaaggttagtttgctgatttcttgtacattactttgtgaatcaagaattatggtgagagaaagaaaagaaaaaaaggtaaaaggaacacgacttgtcagctgtttttttactaactggtgtctggtttagaaagaaatccaaaatggaaggttgcagctcttctataggctaggcaaaaggaggttatatctaatacaaatgtcctacgaatgcttgtctggtcgtgtttgtttcacttattcattctctgcaatgggaatgccatctcatatataacattagatactttttgcgtgtgta

SEQ ID NO: 241366 - DNA, 339 bp, Gossypium hirsutum
ggcgtcccaagctgctaacattgagagaccgacggctgtgctaatgttccaatattttgccgccctggcgtgggagacctatggatttacatgtggccggacactatacaaccttacatgcaaaaaccgcgcgaaccctatgctggatgtgggctaaccaatcaagggaccgataggaactaattgattacaaagaaagtgggaaaagctcatagctttcttgttacacagacgagctgactacagacccgctggcaccactgtgggcttacaatcaaagacagcgctgtcaaaaggctttactccaccaactggggattaaatgaacgcttagaaaaa

SEQ ID NO: 241367 - DNA, 342 bp, Gossypium hirsutum
gcagatccaccctccttgttcaaagatagatgttcatcttcattttgtgtcttatttaggatattatgatgacatttgatgggcttatttaggatatctatttgtgtcttatttaggatattatgatgacatttgatgggcttatttaggatatctattgttggattcaacaaatttcctcaagcatatcatgatgagtcaatgatataatttgaaatgaatggatttttttgattgatagattcattaaggtattaccacttatttgtgggaatgcttagtgattatcaccatagatacatttactcaagtattaaccacttgtttgtctagttgacacaa

SEQ ID NO: 241368 - DNA, 413 bp, Gossypium hirsutum
gccacgcgttcgatactaatgtacgcccgacaattaacatgcacggcacttcaattgtctttatcacggaaaaaagtctgggacagagtggaaactggggccgacgaactggatggaggagagcccttggactgtgtagttgcaacatattcctatacctgctcacactcgaaagcaccacatctgtagaatcaggatcattgcgtctatccacggaacgcacactttgacgtaccatgaatagaattcatttctgataacggtagataaatgaaaacaacagtcgcctgctcccgttgataatccaatgattggaaaccatattgccttctatctgacactctatactcctctggatgaaagaaacaatagctaggagtgtctatgggtttttacaataaatcagacttgac

SEQ ID NO: 241369 - DNA, 339 bp, Gossypium hirsutum
  unsure (1)..(339): unsure at all n locations
cccacgcgtccgttacgcattataatagattatatatattggctgagctgctccactgggggtcagacattcttgagtccaatatcatgtgagcagngcaccaccttatggttaagtcaggatctagaatcccagatcttgagcaacattttcctaatgatcgaaaccttagtatttggaccacaagaacttaacttagctctgaaaccttactagctgcttatatattatcgcgtatgtggggtttcagcatgcaaactgtgaaacccacgagccttaaaaatacgagatattaaaattttaatcctcgtgtgtcggggccttaaggaaattaattaa

SEQ ID NO: 241370 - DNA, 247 bp, Gossypium hirsutum
cgggcgcaaggcccaacttgttcattgagctcagtggctaaatgacctttggagcaaaccgccactggcatgatcacctttaactgcggctccactcaccgactctgcttagtacgtacttaactgacaaaaccgtagttctttgtgctaaatcacatgactcacacggaaaccagaggggtgaatttaatggcgacgctcacatactctttaaagaaaaaaagtgagcaagtcctataccgctcgg

SEQ ID NO: 241371 - DNA, 386 bp, Gossypium hirsutum
cccacgcgtccgggtggattgattggaagatgtggctccaatatttcaaggatcagaatcgagtctggagcaaccataaaggtttatggcgggaaaggagagcaaaatgtgaggcatattcagttcagtggtagttctcagcaggttgccttagcaaagcagagggttgatgaatgcatatattctcagatgattcaacaagctggtactcaaccaccaggtttgcagatgtaatgaaggtgcaactgaatatctttgggatcattaacagttgaaggctagtattgtctcaatgttgtttcaccttctgaccttgtagctaagattgcaaagtcattaaatattgggtggctttttgtttctttcaatggatgaacaacgtgatt

SEQ ID NO: 241372 - DNA, 204 bp, Gossypium hirsutum
gttagaagctaaaaatgattccagttcatacgcattacattggcttaagtattattacctggttatttccatgttgattatcatctgttctgaagagactctattcctttagtaatgttacaccccttaatcccttccttaattgttactactactgcatcacatatatctgcgatttattatattttggactctcattaaaaa

SEQ ID NO: 241373 - DNA, 275 bp, Gossypium hirsutum
cttttagaactcttaaggagggttcagaaatctgttttggaccaaaactttgtgctaacacgaatggggtgttttgcaagggaacaaaacataccacatttgtcattgtctctttacatggaccgaacaatctctaatatcttgcttgcctgctgacatctggatcagaacattatctttaattgggatgcagactgctttattaaataaaccctcttgattgtgtcgctgctattcttatcattgagagtttttctgaactgtttttgatacaa

SEQ ID NO: 241374 - DNA, 261 bp, Gossypium hirsutum
ggcaggaaaaccagagcccaaaccacacaccctagaaggcgggcaaagaaaccaccagaggcagaaccccaaccaccaaaggcaccggggtacacaccaccaaagaaggaggagcccgaacctagaacaccgcggcatgaagctcccaagaaaccaacactcggacaatacgcaagacacccaccactggggaagcctcaacagagagatcccaacggctgaccatcccgaaaacaggaccaacaacggctacatggataa

SEQ ID NO: 241375 - DNA, 255 bp, Gossypium hirsutum
agatgtcgagcgaaaaagccctgaatgcactcaatggtggaacttcaaacaacgacttgtgttccttagcttatgcagaaaatgaaataaaaccctttaccgtgagcaaaagaaagtgaccggatcactcggcctgttctgtttcctgagaatgagttctctgataggatccccttttccagcaatttgaatggaagttggactttctctttcaatggcaagggggggtctttttatattaaccaagattacctt

SEQ ID NO: 241376 - DNA, 262 bp, Gossypium hirsutum
ccacgcgtgcgaccacgcgtgcggcttaaaaccctaaccctataaaattattcgtaattgatcgctggtgctatctgacctcattcaaaaagcctcgccgtaactctgaaaagtatgcttatcgccctgcccctcgtcctgctcctgctcgcaaccctccacctcaaccagctcatcatgctccgtgctcaaatactgctaatagtgaaagtgaaggaaccttgctgggaggcataggctctaccataagtcagggcatggc

SEQ ID NO: 241377 - DNA, 254 bp, Gossypium hirsutum
cccacgcgtacgcggacgcgtgggattttatccaggcgggaagcgccagctttatggttatatggctatgaaggaagacctagacagcttcaaccagcattctcaaggcaaatctatgctgaaatttgagatgagatcctatcaagagatggttgttaagcacatcacgcgcatgagggaggacaaccagcagcttatgttttacaagaacaaggttgcataataacaaatgctaaacgttgtttttgaaagtc

SEQ ID NO: 241378 - DNA, 141 bp, Gossypium hirsutum
aagcctacttaggttttaacttttttggacagaagtctgaaaccagagtggaatagttggccataaatatgacgacttgcaatcttcaatagatttatatataaaacatcacgcgttacatcggaaaaaaaaaaaaacaac

SEQ ID NO: 241379 - DNA, 248 bp, Gossypium hirsutum
gtgattcttcaacatatgacactgaagggaggtttatgccaatgaaccttgggaggattttcaggggggtcccctcaaccggggtccgttaagttacctttcaagaacttttggacatggcttgaggctattcgaaactcatatgcttcattggctggataatatccgaagggggaaggggacacttggaatgacctgcaaaagatgaaaatggggtttttgtccaaaaaaaccccgggggggttttt

SEQ ID NO: 241380 - DNA, 168 bp, Gossypium hirsutum
  unsure (1)..(168): unsure at all n locations
gcgggcgggacagtgacaagaggaaaagggatactgctttctataacgaatgcaggggggatggaaacattataaagatgagattcaacatnaaaaagccacgnncatctgatgcatcaatgagcagcgaagaaccagcctgctctagntctgggaggacagattcaa

SEQ ID NO: 241381 - DNA, 290 bp, Gossypium hirsutum
cccacgcgtacgacatgatattgacaaggaggcttgcaacaaggtcaacaaggaataactgtcataacatctgtgacgcatgaagagctcacttgacgaatcgagccatttttaagtgtggatgggtccaccttgtaacagaatgtgcaagaacagccatcgcagtgttattgattcttagagatgacactgtccaaagtcacgggaactgtatgaaggaatgaagccatcctctaatgactaaatccttgttagttgctggtatgaactgttaaataatatactttaat

SEQ ID NO: 241382 - DNA, 356 bp, Gossypium hirsutum
  unsure (1)..(356): unsure at all n locations
atgctttgcgtgcctntgngagatgaaatgccaaaaaaagatgagctgtactatttttttcatcaaaatgttccaaataccgatgaaacgagaagtctttttgaacttaggtccagatgttagggtttggtggcttcgacgtgagtatgctgaacaaaatccaattgcgtcattttcatccttggtagcaacatcctcatttcccttccaaccataccatcaaccacctccaccataagctccttagaattattattgtaatataactatactactttttttatatgtaaaactaatgaatgatattttttatgtttggtatttntatgctatgcttttattcaagttnnnnaaaa

SEQ ID NO: 241383 - DNA, 294 bp, Gossypium hirsutum
  unsure (1)..(294): unsure at all n locations
cccacgcgtccgcttcaattcccatgatgaaatacggtttaatatatgatcaaacagaaaaatgtataacttaacttcaatttaagaatcacataataatttatttggccctccaatattaaaaaaaaatattttatccnnnanaaaaaaaaaaaaaaaaaaaaaaaaaaaaaaaaagggcnggggctgtaagatgtaagggatctatgttcgcgtacacgcgaatgcaacgtttttgcttggtgataccgaaacttaaattcaatggcactggccttacatcgacaacggctg

SEQ ID NO: 241384 - DNA, 409 bp, Gossypium hirsutum
caactgagaagactgacgtttacagtatgggcattgtgctgatggagcttgtcagcgggaaaatgccaactgatatcctttttggtgtagacatggcattgccagcgggaacattgtgtgaattgggtgaaataaataattgtgattctgtcaaagtttgcttcgaaccctgtaatagttgtttgataagtggtgattgtctgttctcattcaagcctcaaaataatccccattttatctgtttgatcaacatagatatggtgtgtgaagtttagtttcataggaataacggacaccatttggatgattataatttgtcagtttgatagtgtggcaggcaccttcattaccttgctgataataagcttatttcatgtgtaattttcattttcaggacggaatgtttatt

SEQ ID NO: 241385 - DNA, 254 bp, Gossypium hirsutum
gcatatgcgcattgcataacggagtaacgacaccaatgcgatgttctaatggcgactgccctctatttgctttaatttatatataaaaaaatgggagaagaaaaaattggggtctcatttcttttaatttggggattgaggtgactaatagtaggagcagggcttaacttgatgtaacagttttttgttttggttgaactgatatgtatttcccatatttgattaattggtatctctctgcattatcgaccccc

SEQ ID NO: 241386 - DNA, 186 bp, Gossypium hirsutum
  unsure (1)..(186): unsure at all n locations
aggtaatggctatacttgggggatgtttacttgctaaagatatatctgctaagattcaacacaagaagccattggtgcttcataaggttacttttttttggttagtagcgtcagatattagtgttcaaactttggattatttgcatgcatgctcatgttggnccttttaattttagtgatttannt

SEQ ID NO: 241387 - DNA, 418 bp, Gossypium hirsutum
gccacgcgtccaagcttctcgagaaagtcaacgtcaatgatctcatcaccagcgttatctccggcggtggttctggccctggtgccgatgctggtgcttctggtgcagctggcggtggagctgatgacggtgctgctgctgatgacgagaataaggaagaagagaaggaagagagtgatgatgacatgggatataacatgggtgactacacacatgacttaacacaacggatatcacttcggatatgttgatagaaatgacgcaaacatacgactaagcttaaagattagttgaaattttgtatggatatttgagaagctatgcagaaactcaagaagtgacatagcaactactacttcgctttaaacttggcgaaaacatcgaaacgtttaacacatgggcggtcgttgtagaggat

SEQ ID NO: 241388 - DNA, 152 bp, Gossypium hirsutum
ccacctcccacgctcggaagggaagcaatatctttagatgctctgatgaagagagttgcacatcgattgatatctattgagcctatatgattgagttgtcttttgagcgaatggcttaataactttctactatacgttgaatcaatcataac

SEQ ID NO: 241389 - DNA, 106 bp, Gossypium hirsutum
cccactcattcttatactataaactatctattcttcaccataccctatatataggcgagctgggttaaatatcaaagctcaattgcacctatattactaaccatgt

SEQ ID NO: 241390 - DNA, 357 bp, Gossypium hirsutum
atccaatctaaattcaaaaccaagtggtagctcagctctgcggagaagatgaagcacagtggaaagaatagcaaaggcaatggaaagccatctgatgtgaggaaagataggaaatcgggtacgggaatgaacggatcgcccaagaaaggaggtcatggtggcaagttcacttgggttggagatggcctttcgcccgccgagatcgggggtgaaacagagcttgtcgatgccaaggaccctaatttcgaagatcccgatgagatcctggccgattgattgagttcatcatcgctcttgcttctatactttggttagaaatatttcagcaactcaatgaataaattgtaatgcttgcca

SEQ ID NO: 241391 - DNA, 411 bp, Gossypium hirsutum
cccacgcgttcgcttttcgaagcagggatcatgcttatctgcttctctcaatttgtcttggttactttttacttcaattcaaagcaatggatgttatcgaaacacctaacatcaaaagataaacaaaagaagcttatttgattgtgcactaacattaacttcatgagactgatttttactgggatgtatcaacagattgatttgttagttcttggttgatgatcacgatttacatacatgcatgtatgtatgctttcttgatgaatttctttcgagtatacagaacttatgtttgtctcttactagatgttctctggctaaacttgcgccgtcataatgttatttttatttggtaccaagtcggaattacagtaacagtctcaatttttggtcattggggtgtcaacaagg

SEQ ID NO: 241392 - DNA, 315 bp, Gossypium hirsutum
  unsure (1)..(315): unsure at all n locations
ggccgccctttttttttttttttttttattttttttntttttntttattttttttttttcggggtttggtttttttaaaatttatagcatcaacctttaggtgtgtgctgtaaatttataaaaaaatatgagcttatttttgtgttggttttttaggcaaagggactgaattgcaaaaatttcagtgtacattttttatgaaacagctttgagcaaatttttaatcactttggggatattggctcacatcaattcaggaatcaattcatattcttttacctgtttttaataggaaatgacagtgacgaatttttt

SEQ ID NO: 241393 - DNA, 200 bp, Gossypium hirsutum
gctgcagtgacccgttgctgttagaaagcaaatttcaaagttatgtagcaagtacttttgggttttagccccatccatgtcatgactgttgtcttcttaacttttcaagcacatattattttccataataattgttgggtctggattggaaccagatttttgatatttcgatttcaatgttatactttacacgtcctttt

SEQ ID NO: 241394 - DNA, 440 bp, Gossypium hirsutum
  unsure (1)..(440): unsure at all n locations
ccacgcgtncgaccgaatgatttctttataatgtggttggacttagatattgaagcagtactgcaacttgtcaacagagttgccttgtttatcccattgagaggaagcatatgctctcattctgattattagcatcctcatggcattcttttcgcctgatttatcaatggaccatataaatgcatgcagaatttggcagagttgctctcatctcaaaactcgttgaatgaacacatggagcctggatgttattttcaatgccaaccctatcacatttttcattctcaagctagattgatgtttaccccatagaggaacccaacataagcacctggaaaaaaaaaatccaaatgattttggtttagttggaacttcaaaatgaagagttggttccatgacacangctattgacttgattgtcacatcagtttgggctaaaa

SEQ ID NO: 241395 - DNA, 174 bp, Gossypium hirsutum
ctctatcttctacaccgtcttcgtttctatctatatctctctgaacctaacattctctagggcgacgcttcctgagaaaccatgttcttttaccaccttctcattttctctcacgaacttgtgttttactcaattccttaccaggaaatcaatcatgggatcctgtggtaactt

SEQ ID NO: 241396 - DNA, 459 bp, Gossypium hirsutum
  unsure (1)..(459): unsure at all n locations
tcgnccacgcgttcgnccacgcgtnncgccacgcgtncggatagcttttagtgaccggaaacctgagaggcgncgcaccgctcccgctctcgggtttcctcgcgttaggttcttccgtttccggcgcttgacgtaatcgtcgactccgctccacccgtattcccaacaagaaaaaaaaaacggagaagagaagttcatttattacttttttttttattttcttctttatatttctcggttgaattattgtataatatgacacttggaatatgccgaattccaaaaataatcgtaaggagcaggagaagaaccggaaggaaacgtcggaggccgatcacactatcaaagaaataactcggtataattagacgttttgctttgtgtatggcatgtatagaaacttagctacttttgggataatatgaataatgagtgatgtgtaagtacgtgatgatgtat

SEQ ID NO: 241397 - DNA, 319 bp, Gossypium hirsutum
ctcacgcgtacgtccacgcgtccgggttcttctacggccttttgttgaaggatatggacatggcggaaccaaacgtactatggcttatctttgggatccttcatatgatactttatgcaagctacaagaaccacgcaaagaaaatggtggtggaagatccaaagcttcaactacgagatcatcacattgtggatgtcattaaactcgagtctggcgagtctacagatgaaaacacaacggatccttaaccgtacgaaaatagaggaagagctagaggaggtgttgaagctaaaatacgaaggaaaaagcatcatatgct

SEQ ID NO: 241398 - DNA, 280 bp, Gossypium hirsutum
cccacgcgtccgatttgatgctaagtcagaacccagaatttaattagttttagggtgactacttatatatttttttcatgtcaaaccttagagaacaatccaatacacctgatttttgtacctttagtaaacacatggtggggaagttgctgattataaatctcagaaaaatgtatatctcttgtgcctgaataaattcttcttataactttagttagtatataaaacatacatttgtggggttaaaaaataataattaatatattataattatttatat

SEQ ID NO: 241399 - DNA, 360 bp, Gossypium hirsutum
acagccttgaccccttgtgctatcttggatgtcttatctccgccctactccgatgacttgggcaggccctccacctacttcttagacttccccatcccttctcttcctggttatgcttggcttgaggaaagagaagtaaaactgccatgtgacttggttgttaaaggggcaccttaccttggtcctccacttgatgtaccagatgatgatctttgctaactggatctacaagaattctcaatatatgtatatctgtaacctttttgtttagtattgtaaaagaagtatacatgtacaacataccccagcatctcataatgggcgaacccatcaaactgaaaaatcatctattgcagttcc

SEQ ID NO: 241400 - DNA, 196 bp, Gossypium hirsutum
  unsure (1)..(196): unsure at all n locations
cggacgcgtgggctcgaatcaattttttgttatgtcttaacaattggaatttcacatttagaatagtgaagaactttcattgtagttgggaaataaagatgaaatgcactttgctttatttaagtngacaaaatcagaaactacggtccacccgtatatccaacaagaaaaaaaaagcccgggaagagaagttcat

SEQ ID NO: 241401 - DNA, 228 bp, Gossypium hirsutum
ctcacgcatacgctcggttctttttcataataaactaaactcaaaagattaagagtggagagctaacggatcatattaatttgatgaatctccatcttaaacctaaactatcatcctcaaatattctgcaagatagacgcacccgcgcattaccacattagtaccccgatagaatgaacttctcgctatatgaattgtgagctttcattgaatggccatttaacaaaa

SEQ ID NO: 241402 - DNA, 439 bp, Gossypium hirsutum
  unsure (1)..(439): unsure at all n locations
gaaactctctgcagaggggaaaagaggggttccagtctcggccttcggcctccgagcaattcaggctcacgcacctcacgcgccaccatatacggtggtcggagggttaaaaccctcgccctttcaagcgaaatacaggtaaccctcttcccttttaatatttcagtagtttattcgatgtatgcatgtttccgtaaaaaggaaaaaaaaataaaataattacctttactctcaatcgactgttggtatctgtaagtttgtgtaacactgtgttttttattgaatctatgtattctttttctctgtaaaaaaaaatctcgtccctattacagtaaaatccttcggcttttatagcctctgtttacaagtttgaatattctctgctctatttcttgcctntgttcgcttagtttccttttctattacattttctttttct

SEQ ID NO: 241403 - DNA, 407 bp, Gossypium hirsutum
gcgtcgataatttcaggattaatacttatttattctttttaattgaattaatacatgctgtctgtcatttatataaactttttaaatatatcacgttgaaaggatagctttcatattctatagcttgtaaaatggatgaaaaataaagagttagtttttatttaacttaaaagatgataccaggttgattattaattttgtaacagatttatgattgattgaactctttcctcgtgattgaattcattggaatctgggttttcattgatatctatgtttctgaagttcaattgacaaaatggtgttgccttgatagaaagaatatgcttgctcgacatgaggaaagctgtttagattttaaaagtatgcgttcgtttattcccacttttccggatccctatttttta

SEQ ID NO: 241404 - DNA, 192 bp, Gossypium hirsutum
  unsure (1)..(192): unsure at all n locations
gaagaaaggacggaatncggaaaatagattacgttgacgctgccgcgttcttgtcagtgaagggtatcggtactgcgttgtggaagaacgtttttgctcggaagcgggtcggacccgggaccccatcccgctctgtaatggtgctttgggcccgaatatctgtttgatgaatatataggaggtttgaaggtt

SEQ ID NO: 241405 - DNA, 202 bp, Gossypium hirsutum
  unsure (1)..(202): unsure at all n locations
cccacgcgtccgcccactcgtccgaccacgcgttctgctttgtccaagtatgaactattgtcgtgagggtttggcattcaaagaaaaacttgtcagataatgttcttgttgaatctattatgggacattaaagtgtcttaccatcagtgcattattgtttttcaatgaacggttaatgcttgcttgctcttgngggcatcta

SEQ ID NO: 241406 - DNA, 174 bp, Gossypium hirsutum
gccacgcgtactgaaaatccaaatcctttttttaccacgctcacattttaaaaacctatatcaggtctggctgttcttttctcaaaatttcccatcaactatatggctctaaaatgtgtttatttaggctgcaccctaccctcttaaaccatcatgttggttctacttacacta

SEQ ID NO: 241407 - DNA, 282 bp, Gossypium hirsutum
cccacgcgtccgagggaatgaaggtggcaaaaacgaaaacatatggacaacaagatgggctgctaaaaggatgataacaatgatgttatttggctttggggttggcttcgtttattacggaatccaactaaacgccgagaatctcaatttcaatctctacttaacagttataatcaacgccgcaatggaaatccccgccgttttcatcggcggcatactattgggtttcaccgaccgacgtctcctttcatcgttatcagcaatttcagccggcgtttcatg

SEQ ID NO: 241408 - DNA, 314 bp, Gossypium hirsutum
tatcattattagaggctagataagaaaaatattgtatggctcacttaatctgttatgttccagactatcagtcccacttgaagcttggggcaagataagatcaagcaagagccatcgggttttaggtttttcataaatctttagacattgaaggaagataattgttgtggtgataattcttgttccctcgacaaattgtttaaatttagtgtttagattcttgaatcatgttgtagatgcaaaaataaattagtatacaagtaaaaaggcttctcaactttgactcaggtctgggtcattgttattttggattc

SEQ ID NO: 241409 - DNA, 429 bp, Gossypium hirsutum
tcgacagaagtcaaataagaggaaaggcagaagcactgcacttgcctcaacattggctggcgttgaacctcctccgatagaagaaaatgaggtgagcaagaagctcagaaggcatttcattcttcttcgggacattaaagagaacgagagattaaggggtgagttggataggacagcatcagccctacagttatatgaagaatacaagaagcaacggaagccagccactctgacaaacaagaaaagcaaaaaagcaaaaacgacggttgggatgtgaaatatgcagagggagtgttttgccattgaattcacttcattttagaagttggcgtctggtaatgctgataattattcccatttatgttttaggttttacgtgcatccatcatgggttttatttcaatgagtataagtctttttttttctttt

SEQ ID NO: 241410 - DNA, 392 bp, Gossypium hirsutum
tccggtttttgctcaaaaatccatctgcaaggaaacaaatggggatggaaggaagaaagaaggtagaaagaaattatctaaagaagcacatgtacaagagatttgtagaggttctgaccaggtgtatgagaagccgatagcatcctattgtgtctattttaggtccaccactctcattcttttatttattttcattaattaggaacttttctatcagtcatcagcaaccccctgtcatttgacgcacaatttctttagctatttcttttttctgtcaggagatgtgatattgccttttaattcagtttaaaagactttaaaagcacatataaacaattttcaactttgtaatctctccaatagtaaactcctttaaaaagatatatatattt

SEQ ID NO: 241411 - DNA, 274 bp, Gossypium hirsutum
atcagcgacatactcttttggtaaagatcgcatctgttagagaagtggtattaggggccccggcaatagtaatcctaaaacaccttgcttcaagaacagatgctcctgatatagatcagattgttgcacttgtgcatcggccaaatgagaccttcttgcttgttccttaagcagataaggtgactgtgttgtttacaatgagactcaaggactctatagatactgttttggcaaccgccttcctccatgaattaatggactcatggcgctcagc

SEQ ID NO: 241412 - DNA, 321 bp, Gossypium hirsutum
tcgctggaggagcggcctaaggtcaggagttgtcaagaatatcctgctggagaaaccaggtccgggtcccaaactgatggttgctgtggagacaatgaatctgacactgtaatgaaagtggagtctgtgcagcagtcggatcctgtttgtgtcgataaccatagtgctaaaatcgatgaatgggtacttgtgacgccagaacagcttttggaggtgtcctgtgaagaacaagaaatggcattagcttcttctagtgttaaagaatcatgtatttgtaatggaacacacgtgtctgtacgggaaacaactgctgaaagactg

SEQ ID NO: 241413 - DNA, 416 bp, Gossypium hirsutum
ctaaatcctgtcagaaccaccttcctgtgttaatagacatagggtatagagttataagctggagttttctagcagccaaacagaaaataatatttttttttcctgtggacaatgattggagttgggaagataaagcaatactcaaacatccttgagaagcccctcagcaagggcaaacaagaggttagcttgagtgcctttgcatttttgttctctgagcttattcagtaatcaaactcgggttgaccattgctgaattagaaagaaggttggaagattaagggtatgctgttggggcataacttttatcctgttggtggttatcttttcaagctggaaaagcctaatgcttatcacttctttaagttctagtgttaattaatgtttttattccattgtttgttattttattcata

SEQ ID NO: 241414 - DNA, 308 bp, Gossypium hirsutum
  unsure (1)..(308): unsure at all n locations
attaggaactctcaaccctccacttaatatggaaatgtacgaatcttggcggaaagttgccaagtgttgagtatgaggtctgtatatgatgtatatatctctctcttcaaattttccttgttttgttccttggttttcagtaatgtccaatttgttttagcagttnaaaaaaaaaaaaaaatattatataacttttatatatttatatataaaaaaaaattataaaaataaaaatataattaatataaataaaaaatatatattattaattatttatttttattttaatttttatttattttatttta

SEQ ID NO: 241415 - DNA, 317 bp, Gossypium hirsutum
gcgctaacctgaaagaaaatttgaacctggagaatcatctaggagtcgatttaaagtcgaagatggggaaggaaatacattttatgacatccaagatttaacatttagtgactaggaaataaatgaatattctgacccacctccctgaaaatataaatcaaaaatttccatgaaaaccgtgctacttccacattggggcgtgaagctgccggcgcgtttattacgacatcaacttcctcttcgaggagacccggggcctccctgcttgccgaacggacctctgagtctatatcttttccaacaaatttccccgcgta

SEQ ID NO: 241416 - DNA, 294 bp, Gossypium hirsutum
aagactcacaggaaacctggtctgttatgtccgagggggtccctttgttttgtcggacgtcggttcatttcatgtgaatttgtccaccgagtggactttattttgtctacattaatttttgcttctcttgtgttagagaaaaagggctccaatgcctaaatttctggccggggaaaaaaatataaagcccacgtcaataaacaacaattgaaatgggacactcatgatctaacaagacctcgtcactatacttgaaaaaggacaaagcttttaactagacgccgctactttgtt

SEQ ID NO: 241417 - DNA, 259 bp, Gossypium hirsutum
cggacgcgtgggaaaatattttctcttcctttggggcaaatgattatatttttgattctttggtgtcgattgcacattgtaatgaaatcgaaaaagtgagagaaaaagaaaatgaagagaaagaattcgaaaaagaaattgagattgtacaagagtgcgagcgagaaaaagaaatcaaaagaaaagaaaaagagattgaaaaagaaaaagaaatcaaaaaagagagtgaggtcgaaaataaaattgaaaacgagagagg

SEQ ID NO: 241418 - DNA, 379 bp, Gossypium hirsutum
cccacgcgtccggctagccttgtacggttttggtgcatgtggggttattcattttcgcgggtggattccaactgcgcttctactgcttattccggttgagattctccgatggatcattatactcattgctggttcagcctcatcatgctttgttgccttgaatttaaaatcttatatcgagggggcgaacgatctcaaaatgatggttgtcgcagcattcttgttgcaaatggcccttgcaatcttcatcaaggtttggttctttccatagtcaacttatgtagactatccgagcatctaaaaacccaaactttgattactttgtttctgtgaaatacgcaaaagaagatccgaattagatcgaggaaaagcttgtgtg

SEQ ID NO: 241419 - DNA, 429 bp, Gossypium hirsutum
cccacgcaaccgaattctcgcccttctccttctcagattaaagcagcttatataaggaaagggtgggaatcgcatcctgacttgtttccagttcacgaaaagcattcggcggagtctaagtttaagttgattgctgaagcttatacttgtctacggtctggttcaagaagaggaggttcgtactcagctacatattcacatgtcgtcagaacgggagtaccaaaggctcatgggggaagaagacaaccgggtttgattcagattcctttccttcttatacttctgggaactgttggacttgggggattaaatgcaaccagggcttatagaaagcaaaaagaagcatgcccttctcacaatccattccttccctgaccaagacattattctattttctcatttggcatcgatattggagattcaatttat

SEQ ID NO: 241420 - DNA, 318 bp, Gossypium hirsutum
aacgaaccagatgctgtggtcgaagaacgcaaaaaggagtccgaagagctttctagaagagcgaagagaatgacaatagaaatcggaccgagcagctttgcatcaaggaagaagaagagtcggaaaaacacaagcagcttaattgcccttatggcttgtgaaggcgagtgtttttggcatgtaattcagctacaaattttccagttttttgtttggcaaaatagaaaggcaaattaccaaatccctttggattaaatgcgtttaattgtagtaaatttgacttgctcttttgatgtaccttaatctactctttctagt

SEQ ID NO: 241421 - DNA, 370 bp, Gossypium hirsutum
cctacgcgtccgaaataaaaataaaaaaaaaaataaaaaaaaaaaaaaaaaaaatagggggaggtgttaatataataaaaaaaaataaatttataaataaaaattaaaaaaaaaattaatattataatatcctgttcaagattcaccaaaaattttgcaagacaccataactaacaattttattaccatccccacaatcatcgcctgtacactcattctatttattcacgactgtctttctaacggttgcgatagttccattctcatatcttacactttatttaacaaatcttaacgttattccgatataatactttatttttcctttgaagatccattttgaccttattttttctaatctaaaacattt

SEQ ID NO: 241422 - DNA, 261 bp, Gossypium hirsutum
cttttttgccagtactttcactttatttgacttttttttcccctttatttaaggctaagtagggttaattatgagatgaatacgggatgtaagagatgcatacgggggaacttgcttgcatggttaaaggtgggtgggtagtatcggaatggaagatttggggattgggatagtttttaaacataaatgctgccgggaatgcatcgtttacaccataaagtgcctggcggctgtgggtggaataaggaaaaagaccatatt

SEQ ID NO: 241423 - DNA, 318 bp, Gossypium hirsutum
cccacgcgtccgcccacgcgtccgactagttctagatcgcggcggcgccctttttttttttgtgataggtttttttttatttcttaaaaaccataccaaagatctttttaatatacccttatttccccaaagaatgcacagacttcaattataacctattttacttatactttctatctttccttcaaaaaaaggcgtttaatgcaataaataatttgcttacaatataaaaagtggcttaaaattgttcttttcaaaagaaaaaaaaaaatctttaactaaacgctttaaattttccaaaccttttatccctttcac

SEQ ID NO: 241424 - DNA, 355 bp, Gossypium hirsutum
gtcacgcgtacacaaattactcaagcttggtcgattttacatatcacacttaagaggggacggtccattatatatcctcatacgccatataccaatgcctttctccaccaaaacgaacctgatattttggttgcttgttttgcgaaaacaacccacattgtctgtctaattcactaaccaagatttagcgttcaacacataaagctaacaaataccgctctcttgctcttactttcctcacatgggccactccttggacctgaataattaaccgcgttagatgagtgaacgaattctccatcgacatccctgacccacctgctttagaccctccactaataggtaccacaacttt

SEQ ID NO: 241425 - DNA, 353 bp, Gossypium hirsutum
cccacgcgtccggaaggatccgaagaaggctcttcacctcgggcttccgtttcagacaatgggggctacaacagtgcaaatttggcatctaaaagggctctcatttccaagctaaatgaggagaaaaacgccaccattctggaaaataacaagctccagcaagaactggaactcttgggacgcgaagcgaagagagattacagtggtatgaagtttgtatacgtaattcttgttggtttagtcagcatcattctggggtacctcttgaaactaacatgaccacggcaccaaggtactactactactactattctattcttcgatgccgatacaagctcgaaaaaaatgtagag

SEQ ID NO: 241426 - DNA, 272 bp, Gossypium hirsutum
ccacgcgtgcgctgacattccagatcttagcttatttttcattatttctctcaccccattctcatctaagtggggcaggtcttccatttaactcgccctgcttcaccaacattctacaaatactatctctcatatacaataaagactaatttgaatcgtacattaaaaatttttgattgtataaatcttaaacatacatgctatctacaaagcataacttacacctatcatgtacatccttttgtgcgttccctaactaaaaacaacatctt

SEQ ID NO: 241427 - DNA, 428 bp, Gossypium hirsutum
gatacctacactctaaatattacatgatcatcttcatataacgatcaacattccatgcggggacccagaccttcataaatgctcaatgtaaaacatcatttcttaccgatacccacgccgagtacacattaccaagattgaaaacgcactaaaaatcgtactatgcaacatgaagttatatcataactccagaacatgcatacaactcatgttatatagcgaggaagaccagctttctgtcggacagatgcaaaaattctcatatatgctatagcattacttatgcatctcaagatattcttcttcttgatgaagccacatgatctctacatgctactagcaactacctcgaccctgatgccatgcatactctgatgaaagcaagaactgttttagtgatcgctcatctgatattaacggtccaaaca

SEQ ID NO: 241428 - DNA, 264 bp, Gossypium hirsutum
  unsure (1)..(264): unsure at all n locations
atccaacattaaaagaaaaaaaaaaatcgtatatgcatgctcacacaccaaccaaaagcagcgcacggggccacactttcatactaaaccagattcttttaaataaaggcgntttattttcctttatttcttaaaacgggcaccacaaacggcgacatgatcctccaaaaaagtnnaattctaataatcaacccttcaactgaaccaaaccgttatgaatctgagatctcttattaaaaaccttattacaaaacccctaacaaa

SEQ ID NO: 241429 - DNA, 311 bp, Gossypium hirsutum
agaaaacaaaacagatagcattccttctctctctctccctctttctcttctcctcttagccggccccatggccggccatgggttcatcggagggtgtctccacacccatgaacggcggccggtgttaggtgaaacgggcccctttcggtccttctccgaacgagtacggaatcggggccttcacgacttgcagtaccacaaagaacggagggacccctcggctctctttctctccgttacggacaatggccagaccccgaggggttaggcgacctacagatcggcaagagcgtaccggagcacaccccgaa

SEQ ID NO: 241430 - DNA, 271 bp, Gossypium hirsutum
accaccctttcttccactcatccgaaactatagccgctctctcgaagcatatacaccctcaagggatccgccccgctcttacaacaaccttgaagactacatctacaaaggtcgtccgaacaggatagtctcttctaacacaacagtattatgaaacaaaagacattatacttgaaggtgccattactttagactataggagtgggcacatgaatgctagagccgctatcgattcgaggctaatgattgataaaggttatgatgattatat

SEQ ID NO: 241431 - DNA, 350 bp, Gossypium hirsutum
ctcgctttcttacttcaatctgcttctactaccctatcaatttcagggtgggtttctgccgcgtcaaggagtcatccaaccagagggctgtccggcacgcttttgcttctgccccaaaagttgaggaaactctttgatgaacctaccgacatgatctaagaactaaaccctacttattacgggccacaactacgataaccgctttactttgtctaccatcgtatgccgcatcgtaattgattctgactaccctgcccactggctttatgcatattattacggtctatcgctcctgtctgcccagatggcccatactactacacacaatatttgatgctgaagagtcgagc

SEQ ID NO: 241432 - DNA, 373 bp, Gossypium hirsutum
ataaaattgtttcctgagaagatatataaaacagctttgtagacctttttgtgaagattaatggatgcgggaggatccaaaaccaaagcctgcagcatttatccaggtaattgtatctaaaatcagttgcatgattacctgaattgttgcctatttataggccaaataaaacaggtttgcagaccagttttctactaagataaatacatgcacaatgatccaagaattggagagtttgtgcgaccaggggactatttggctgcttttatgatgtggatttctgggattggttgaatcctggataaaagactacctgtgatttgatgctactgctatactactaaaattcacttgcctttttcgtatataacct

SEQ ID NO: 241433 - DNA, 386 bp, Gossypium hirsutum
cccacgcgtccgctttgcgttgtttcctttctcatgttctttttgtgcattaatacccaaaggcattcaataatatctaagggaatacttgcttttgcttcgagcggttagagatgaagaagaacagctgcggcggtcagtcgaactctaaacctgataggaaagccatctagaagaagcgcagaaatgacatgaaaatttcgcgttctaagcttgcctctcttattcctcaccacaacttcaaaccctccaaggaaattgcatcacaacaagaccagcttgatcttgcagctgtctatatataacatttgagagataggatagagaaattaaagaggctgacagatgaagcaatgagattcatgggaagcaagcgagtacatgat

SEQ ID NO: 241434 - DNA, 231 bp, Gossypium hirsutum
cttagaccagctccataagaaagaaagaaagaaatcaaatatggggtccatcgccaagagtgtgcctatccttgcccctctagctgctaccgttcttatcatttcataggaagtggcaactcgagaccttgctgaaaccaccacagaaaagaacactggtaaagccggctactgaaacaaacctaagctgatgcgtcacgtataagacgccaaatatggatatggataata

SEQ ID NO: 241435 - DNA, 272 bp, Gossypium hirsutum
gcgctcccaacaaaggtggcatcaaactgctcatttaggtttgacactcgctaccatggtctctggcacgcacgccgaatgtgcatgtctccaggaccagcggccactaatatgggcaacatcttggctccaactgcagtgatgggggtattccttgctttgattgttgcagacttgggtcctttaacagaataatatttaatattgcagcgttgttttgagtttcttcgctggtctcaaaaaaagaaatagaagatacaacaggggcgcgg

SEQ ID NO: 241436 - DNA, 307 bp, Gossypium hirsutum
cgacccacgcctccgctcactttaacacatccaacatgcctcgccgtaagtctggatgatctgcttatcgcccatccgctctttgggctactgcacgcggcccaccacctcaacctgctcaacatgctcctcctccggctcctgctcaaagtggaagtgggggatcccttcttggaggcataggctcaacaatatctcactgcatggcttttgaaactgtaagtgctgcatcccacaaggcctgtcgttgctgttattggtcctcgtactattcaacatgaaactgctgtttcctaggctgcatctt

SEQ ID NO: 241437 - DNA, 300 bp, Gossypium hirsutum
aatacacataatctcactcagtcggtacataataaaacttattataagaataagaactacaatggttttgggttttaattcaagttttaatttctcgtcctcaaaaaaatgttgatagattttatcaatgcgatagtgtctcctccggacaatctgttggctaactgatatctaactttattatctaatataacagtgtacgctatgattaaacagtttctttaatactaactactttgtcgtttccattcacattttataccatgttcaatttgcttatttttaccataaagagtttcc

SEQ ID NO: 241438 - DNA, 254 bp, Gossypium hirsutum
cttagtgcttacatcacatattgtatgtactctggcgtttgtgccggcgtgacccccgcacaggatgagggtgcctatcctaagcgctatgttgacccttctaaccccttggtcttcaatgaagctctggctaccgacctctcctagagtgaatacataaatggccaagctgtaaagaatgacacctatatggcacacacatctgtgaggttcactaataaccgactcacgtagggtttttgcccaaacgttga

SEQ ID NO: 241439 - DNA, 258 bp, Gossypium hirsutum
caaagtagagccaggtttcgatggtgggcattgccacggcttgttttgcagatgctattgcacttaaccgggttagatgagcaatctattaatatttcattatactttatagattgcctcattttcgcttgtcatgtgcgtactcgagagacgagagaataagatcaacatcatattggtgtacattgaattatattacgattaaatatatacattatttttatggattggaatgtaacagccatatgcttctataaa

SEQ ID NO: 241440 - DNA, 426 bp, Gossypium hirsutum
cttgatcattcgtcgagagtcccgtataaccgtcactaagggacaatccatttcacatcctaggcgcatcacctgataacctgccagggcctcatcagcaaatggtgactgaacattcctgtatagaacagtctacttagccacgagtcttcctctttcgccccaaaccacaataccaaatgcccacttaaagttcctgttatcaaaggctgcatcaaactggatcgtcattctagtgtaaccttctcgatgcttgtgactactacttgcgtttaagtacttgagctccaagcataccacaagccacatcatatgatcttgcactattcagaagtactcaatctaaatatccagattgctctccttacatgcttgaaaatcctcatgatcagttttcgccaggggtatccgcagaattttttgagc

SEQ ID NO: 241441 - DNA, 336 bp, Gossypium hirsutum
tccacgcgtccgattgaattcaacgttactgtaattcattactaagatgttatctacagattgggaaaaagtcatatcattctgtcacgcttgattagaataaatgtatgagatatatatcttcatctgattaaaagttaaaattctcatacttgatcattgtattttatcattatattacaaataaagattaaattcttagctgcaaaaaaataacaaaaatatcaaaattaaaaaaaaaaaaattaaaatgaaattgttatacatcagataagtcattcactgaaaatgtagtatacatgcatacactttctaagctaaaccatttgatctttt

SEQ ID NO: 241442 - DNA, 324 bp, Gossypium hirsutum
gcaaagcgttcttcccaacgatgcagctgccaaagctggtgctgcaaattcatcaggcactggaggctgcactgaatgcggtatgcaatgcaaactgaagaacactctggacaactgtgtggacgacagaccttatacgaaaccaagaatgtggaaaagacgctgcatggaaccatgcatgaagtcacactatattggcgatgactcctgcgccatatgctgctgccttactcagtgtcaagcaaaaggatatgaacccacagaacaaacgactggacatatacccagaaaggtacacattatggaagacatgcatgatatcat

SEQ ID NO: 241443 - DNA, 273 bp, Gossypium hirsutum
  unsure (1)..(273): unsure at all n locations
cggtccgtgtaattcccgggntcgtacccacgtccgtccgcttcatatatcttatatgtccctctgtatttcttttgaagnntagatgatgttatgccttatatacgattttgtgatggtatctctgtgttttctttgtccctccacaatactttgtcttcatgaanntcattttccttcactttggattaaaanaaaaaaaaaaaaaaaanaaaaaaataaaaataaaaaaaaaaataaaaaataaataattaataaaaaaatttaaatata

SEQ ID NO: 241444 - DNA, 262 bp, Gossypium hirsutum
cccacgcgtccggcaaaacgtggtactgatcccaaatttgtagctcgaaagccaggaacttggggatagagatctgtgcataacatgaatattatgtaaatagtggcagactctatttagttttgtgaggtcgaaccattatgtttgttgtctgatagcatcgcatttaaaacgtttaaaaaaaaaaaaaaaaaaataaaaaaaaaaaaaaaaatgaaaaatataaacaaaatataattaaaatttaaaaaaaatattattg

SEQ ID NO: 241445 - DNA, 295 bp, Gossypium hirsutum
gagagtggatgcacctattaaggatccggtatccatagatcatcctgcacaatacacggaagcgtactgtggtagagttcatgactcacttccaacaagaaaggccttgatggaaagtatgcactgctgcatttcaagatatgaaccaattccctcaaacaccaatataatgaagcattggtctttccatgtataactagaactcgaaacgtatgcgtgtatgaatgtatgtatgtattctttgtaaacaaaaatattgttgactattgaatatgccgattgctgcctgaataca

SEQ ID NO: 241446 - DNA, 280 bp, Gossypium hirsutum
cattcttctatgtgctgtctgcatcacagcacatctaatctctcgttctgaccacgttcttcgaacaccgttgcattgttggataatggccattgtgatggcccttttgagtggatttgcatgagtgtacactgaggctataattaataatcgcccatcaaggaatataaatttgcagaatttttggttgtatatctttgtaatggcctttaatgcttgttctattctgatacaagttttcgatgctgtcattatacatgggtttttttcattgtattct

SEQ ID NO: 241447 - DNA, 367 bp, Gossypium hirsutum
tcgcggacgcgtgggcggacgcgtgggttgtgtcttagtgttttccgaaacgattgagcttgatgggttcaaggatagctttttgaaagatggttacaaacttgctgtagcaatgccaaaccttgatgaattgttgaaagatacacctacccatgtatttgcatctttgtggcttaaatggagaaagacaaaattctatactatccattatagtgagctcgttcgacttgctgctctttacaaatatggtggcatttatcttgattctgacattatagttctgaaaaccgtttttgacactcaataatttctgtggggccttgaaaatcaaaggaagctctttttattggaagctttaatgggcatt

SEQ ID NO: 241448 - DNA, 361 bp, Gossypium hirsutum
taaaacacagtttattggtgagcttgggcccaaattgttaaaaaagttaaaattgaggcatatgtaaaatgggcttgcatagacgctaacactaagcgctaaatcatcttctccttcccgcttcttctagggttttgcttctgaaactcttaccagaaacaagggtttatcatttattggcgggagctgaatccttataaataaatacaaataagagattgtttctttctattgagttctttaaaggaaagattcatggcgtattctcaagcacgagacttcatgttctgtaacttgtgtggtacgatgctgtctttggtttcacctaagattgctgaatgctctttgtgtagatctaaaa

SEQ ID NO: 241449 - DNA, 290 bp, Gossypium hirsutum
  unsure (1)..(290): unsure at all n locations
gacccacgcgtncgaccacgcgtncgntttgagcaggttcataagaaagaaagagatccaatatggggtgcattctcgagagtgggcttctacctgctcttttagctgccgttgctcttctcatttcttcggaagaggcagctcgagatcccgctgaaaccaccactgaaaacaataatggcgaagcggctaccgctacaacccaagctgaactcgaagatggtcacggaagatatcacggaagaagacacggatggtaaggagggcacggaggtggtcacggagggtat

SEQ ID NO: 241450 - DNA, 351 bp, Gossypium hirsutum
cccacgcgtccgtaattagcccttttcttcaagtttcatcatgtagagtcttggttagtaggtatttctcgttctggcttttttttaagtgatcctgagggggtgctggtaattggaaatgaaattcaatttctgagtttcatcttgagcttgtaggtagtatacttagtgtgtttcttttactacactctgttgtgtcactgttgcagtgtcagttcttttgtaattgtcagttgtgcagacttcacggctgcaattaagttgccagtggcattctgtgtcctcagtcagcttctggtgatggatattaatcgtgatgtttctctaagtgacaatatgttcttaagctta

SEQ ID NO: 241451 - DNA, 244 bp, Gossypium hirsutum
gccacgcgttcgagcagtattgcgtctgcgagcgaagataaagtggtgaaccattcgttgtctgggtcagatttgagcaacaggaacaatgtcatccttagagaggcaaagcaaacacgtccaagctaagatagatgacgaatgcaagcacagcgacattcacattatctttttgacgagactatgagacttaaggaggcttggtcaaggcgatctacgtaagaagccctcacttacacttcat

SEQ ID NO: 241452 - DNA, 432 bp, Gossypium hirsutum
  unsure (1)..(432): unsure at all n locations
cccacgcgtncgatttcagagagggctaatggaacacacagctactgctcagcagcaatttgaaaattcacattcttcccttgccgttgctttaaaggatgctattaattctgcaagttcaatcacacaaagcttatgtggagaaatggccaatgcacaacgaaaacttctagctatagcagcagcaggtggcagctccaaggcaggaaatcccttggtgacacaattgagtaatgggccattggctcatctgcatgagatgcagcctgaggcacagttagatccaacaaaagagttgtcaagaatgatagctgagaagaaatatgatgaagcattcacctctgccttgcatagaagtgatgtctcaatagtttcctggttgtgttctcaagctgatctaacagggatattgtcaatgaaaccatgttcact

SEQ ID NO: 241453 - DNA, 436 bp, Gossypium hirsutum
aaaaaaaaattgtatattcaattcaaatcaacacattcaaaagaaaaaaagtgttttatttagcttcaagttttagtaagaaaaaaaaaaacatgtcgacaatagtaggggtgtggatggatgaatttgaaaggctcaaagagagagttcaatctaaaaggtcgttcatgttgaaggctaaaaaggatcagcagcttgttaaggaaagacatgttgaagaagaaaaagaagctggtaaagaaactataatgtcggaagctacactttgtatgcttatggacaggtttgcaccgtgttgattgaagagaacagaaaagaaaacgtatgagaagaagttccagtgtgtactatatttgatggagctttgagtgttgtatgtaaaaagataacaaggtttgtttataggttgcgtaattatgtggagatatggttcatt

SEQ ID NO: 241454 - DNA, 261 bp, Gossypium hirsutum
gatgcaatggatggcttatggcttttatctattaaggtgacctaccctattatggggatatgtattggccatggaaaggaccaggggagggttccttttgccatggtaagcgcgctcatcatttgaacctgtccccttggtcctatctcttgacaaggtttggttcttctccaacttaacactctaatcccttcggcaggccttcaataatttcaagatcatgatcatcttttgcaatggtttttttttccctccttcttc

SEQ ID NO: 241455 - DNA, 354 bp, Gossypium hirsutum
  unsure (1)..(354): unsure at all n locations
ccgacccacgcgtgctgccagcgtcacacacaatttttattttttgtttccaacccaaaattgnctttagggatgaagtttgtttagtttccgagacaagctcttttcgataattttattctaagctcacattccccatctcgtcgttcgcagctcttgcattttctttcttattggatgctccatagatatggttggtgaatgcattccttaaagtaaacatctcgtttaaacctgttttccccttgttgaatgatttgtggagtataaattagatgattcaccagtctttaaaataactggaaaaaaggtgtgactcgatatgcttatttcaattttcaaattggttacttt

SEQ ID NO: 241456 - DNA, 429 bp, Gossypium hirsutum
tatttacaaaggatccaaaggcactgactgatagaacctcatagtggaagtgcttatctatgccagatgtcagtttgcattacatactcatcacctcaatccttgctgggaggcttgatctggaatcactggggcacaggtctatttctggtgcgtatcatttgctaatcatatggaacagttgaaagcccggaattattatatgttcagttacatggatacttccgggtagtgccttaattatttatggcttgtacctgtaacactcgcaagcagtcatgccatgaagctggatgagtttcaaatcagtataaatgtagattgaacttataggttaaatttagcttatgatccgaatgattattaatctaagaattttagattgtgtacgaggcacatccaacataagttttgcaccatggtcacaaa

SEQ ID NO: 241457 - DNA, 417 bp, Gossypium hirsutum
gctaaacgcacgtcatagtctatagtggttacacccgtatatctaggacggtatgatgtggggaatggggatgacagtaatcaaagaaaaagattgcggagctaaactctattagattggcttctaagcttatgtataacttggtttgagtgtcatgttagtcgtatgctctttctaagttttatcttagtgctggcggttgcagtagcttggcgagatgccaaaaccatgtacatgtatagttgaacttgtaccatgcacattatcttgcatcacataaggttacagataacatcggagcctttatttctgtggcatacatcttggttctttactgcgaacacgcatccagaggaaccgctttaaacattcctttatcgagtcgcatctttgatcgttaaaaaggttatatgggga

SEQ ID NO: 241458 - DNA, 306 bp, Gossypium hirsutum
gccatgcataaagcacattttcatcacaaattatcaagtctgatcacgatttcaatggggcggtaagtgccttggatgaccagaatgtatgttatagttctcaacttacaactccaacagaagctgattctggtgaaaggttgtcaactcctacctttgatgtgccaatgtcaccaaaaaaggctcttcgtgctgcaatgctgaaacagtcttttgcagacactattctgtatagctataataaggcactactggatcattgtgataaaactgatccagtaaagctgcagcatgaaaaggaaagat

SEQ ID NO: 241459 - DNA, 350 bp, Gossypium hirsutum
  unsure (1)..(350): unsure at all n locations
cccacgcgtncggactatgtagaaacttctcattgagatttctgacctcagaagcgccgcgcgggaaaagatcaacactgatacaaccgtctcacaagcagctgtcagtctgcgcaccgacaaccggatcaaaaccatatagattgaatgaaggtacaagatatattgactatgatcagctatggaaagagcgcttgccttatgaaaccagcccctattattggttattcgcatgcttagactctcgtgtgtgatcatgccacattacgcatgggcaaccataagtagcttgtattgcttttaacatttccacgactgtggcgccagatgacaaggaataaattctgaaa

SEQ ID NO: 241460 - DNA, 438 bp, Gossypium hirsutum
tcgcccacgcgttcgcccacgcgtccgcttgctggtgttggcattggtcttcctgcaaattccttctttcaacttccatacaatgcttttcgaacagccagaacccgggcactggattttgtctctaccaaaattacacctgctcttgcctcctatagatttgcacctcctcaccttcccgaccttcaaagagaagccactacaagactctcaaccatgttgccttcacaaactatctctatttgggaaggtgtagaaagatttagcacccgctttttccatcctcgcaaaggtttaaaagattaggtgctttatatacataacgccatgtgaatgtgagagattgcaaattatatgatggagaaaatggcagtgcatttggtaggatcatggcaggcagaccatgtgcttctagatgataatgctaaacgcgaggaa

SEQ ID NO: 241461 - DNA, 143 bp, Gossypium hirsutum
cccactcgttcgcacccggatttctttggcattcacccgttaccatgttctgcggcaaactggtgccaaagtgactgatagagagatcaatgtaaatgcagagaagcccagataatctgcgcatttttttgtctatggttaac

SEQ ID NO: 241462 - DNA, 321 bp, Gossypium hirsutum
gcatactttgtacttttgctattatctattatcactaagcaaacctactaaacggatcaggcaaaattaataaccgactatgtatactttttaatagacatgttctttcctcaccttcttcaccatttttatccatgtgcttttcatttttattttaatcttattaatatttccttttttattattttaattacactttatctttatatgctttgtatttttatttattattattcttttacttttcatatgtctttttttttattttttataatgatcttttttattaatattatatttatattcattattttattattt

SEQ ID NO: 241463 - DNA, 175 bp, Gossypium hirsutum
aataaacattagatcttaaggatcccgctggtccatcgtctaatacatatttcccaaaaatggacgacgatgatcttcatttttgcgcttcaactgaaggctcgcatgtgccacccactaacgggcccacgctcgagccatcaatgcgtgtcgtgatatcgtccaatcaatgatg

SEQ ID NO: 241464 - DNA, 220 bp, Gossypium hirsutum
  unsure (1)..(220): unsure at all n locations
ctcacacttactcctacacgctctaacttaaatgcgacattactaacagagaaggggggttggctgctctatcccattgcctatatcaaccctaaaaacaccttcactcgaatccgataaactgccactacgaccactgtntgctagtactatggcagacactcgctcatctatcatatcccatctttgacacataactactcgcgcacattgtggatga

SEQ ID NO: 241465 - DNA, 361 bp, Gossypium hirsutum
gtcaggctttgatgaagaagcatatggcacggccggctgctgatactaatttgttgctaatgaaaaaggaggctcttgatgcgttgccggataaactcatagaggcggctgtgataccaaatttgtccccatctgcggcaaatcgattgatggcgtgttttactccacctattgaagggtatattgagaacgctatagaagcggctcagaaaagttccaccaatcagaagcttacgtgaaggcgatgtgtaagtatgcaaaggacaaacttcactcgtgaaactgatgatcaatttcagctgcaacgtagtgtgattctctctgatggcaatgagtctcataacaagtattatttaacatt

SEQ ID NO: 241466 - DNA, 302 bp, Gossypium hirsutum
cccacgcgtacgataaaaaataaataaaatattctggaccattatagactatcgccacactcggtcgctggcgttcgcacgctggatgctcctttatttccacctacaatagattctcagcgcgacgttttacatctgaagaactcaagtaacactctggtttctcaactatatcagcttgcatcacattgtcattttcgcacctggcttaataagtattaagcgatgcaacatctatcttatgaacacatgtgcatccttaatagctaatgaaacactccctgtaatttttcattaataaa

SEQ ID NO: 241467 - DNA, 349 bp, Gossypium hirsutum
atctggcaccatttgtagttagcgtgagcggagatcgtctcattgacatggtaaaggataatggaattatcagagacgttgtatggcaagatgaagcctctggacttttgcttgaagcccccacctcagttgccgaacctgacagtatgcctctttatcttactttagtcgagaacgaagaagagcaggaaagtcagttaaacattggcaaaagaaggctcggctgcatccatgtcttgatttttcttcccccgatgttccatctcttgttacaaatggaagtaagtgatgcttcgactatagttcgtattcgcaccgatcattggccatgcttagcttacatcgatga

SEQ ID NO: 241468 - DNA, 173 bp, Gossypium hirsutum
  unsure (1)..(173): unsure at all n locations
tcgtccacgcgttcgtccacgcgtncgcatcgaggcatgaattaaaggtggcaaagcagaacatgaagggtcccggaagcctctgagttttaccattttctcgtttaagtgaagaaggctttgctgcttggtatcctcaaaagctgttggtgctattgggtgactttagcttg

SEQ ID NO: 241469 - DNA, 146 bp, Gossypium hirsutum
cccacacgatcatgtcagcaaacgactataatgacgccgggactagcatcagagggggcggggcagctggttcccgcatgcttacgctacacttaccaggggcgcatcggatacctgatggtgaacacatacaaacactgttaaaa

SEQ ID NO: 241470 - DNA, 164 bp, Gossypium hirsutum
tcgcacgcttggtatgtatccaagcccaagaaaaaaggaacgaggggaagaatcgagagggaatccctaccatataccaaaagctagatgcaacaattaaaaagggtgcaactaaaataggtcagacgacaattacgaacactgctaacggtcaaatagacgct

SEQ ID NO: 241471 - DNA, 303 bp, Gossypium hirsutum
gatcatactacagatggcaaggcgagttacacttttatggcagatctcaggcggaagctgattggaacaggaccacttaaagatttaagatgcttctaattgcaaattcgagttctggaggaaacacatgccagtttttttgaaagatgataggcgtgagatagaggggggccgatgtgtcacgctgaattgaacttattgcagcatctcagaagtttggttaccgacattatgggatttgaatgcaaatgcaaaggagtgcaataaatatgcggcttaatccacacattgatggtctcgatg

SEQ ID NO: 241472 - DNA, 357 bp, Gossypium hirsutum
ataattttgatttctccaactgctttcagtggaagcgaaccggataggagaggcgccgatcccattgtgaaagccgtaatcggagcacatgagcgatgaaatggaaacggcaacgggaacggcaggaggcggagaagagaagtggaagaaacggacaagggtttgatctggaaacttccgcagctgaagttgaaggaagtgggtaaggttggtcctgctttcgggctcggcgctggttgcggtctcggctttggtatcggccttgttggaggtgctggctatggtcctggaattcctggcttgcaagtctgctttgttttggtgctggatgtggcgttgggttaagattttgctatg

SEQ ID NO: 241473 - DNA, 271 bp, Gossypium hirsutum
tgacgcgtgggcggacgcgtgggttgtggtgcaccacccgttgcatctcttgcacactttgagacagggaatggtggtgggaacaatgtcacttaatttcctaacactgttgatgttagtagttacagcggggagcagcataatcatgttatgggggaacatgaaatgtaagatgaggaatatgctgaagaattatgggagaattttttttcaggcacccattagatatttgcactttgaaaaggaggaaattcttgcaccccacactcat

SEQ ID NO: 241474 - DNA, 156 bp, Gossypium hirsutum
acgttctattcttctggtcttcatcttttatgcagtgtttgctgtgcggcgttatgggggtgcgttgtgtttgtttagcagttgtattcttaattgtaccctcatgttttgcttgatcatcttttctatcaataaaatttgtttagacttcccgtt

SEQ ID NO: 241475 - DNA, 411 bp, Gossypium hirsutum
  unsure (1)..(411): unsure at all n locations
tcgaccacgtcgttcgtccactcgtctcgaccacgcagtccggcgattnttccacactttgggtagtcgacgcgacggcgtgtttgacgctcaccaaacccgaaactctcgctcggattggaccgttcgttcttggtttgcatcgcagtatgtatatccaggcacggagcttccgattgaatccatcttctacttataagatcctaacatagcatatatatttaaggctagtgagcagaatgaatcaacactagccctatgagtttagttgtcatcatcccatgacttctgttggtctaaccggaccaccactcccgacgcattttcgggaatcaccatgatgattagtgtacgcttgcttccccactagagggaagggaaggaaagcgttgcaaagctgtatcttaataa

SEQ ID NO: 241476 - DNA, 246 bp, Gossypium hirsutum
caagatcaagactcggttgacacaaagccatgacgatgctaacctataattgctcccgggtgcgcacagattatcgtgtatctcaagggtcattcaaaacatgctcccatataccatacaacatcattcttacataccacatctgcgattgtctaaagaagaaacaggatggagcatatgttaccagatatgagtctgaccgaaggcatcattcaacgtaatcgtaccatgcctacaattcaaaac

SEQ ID NO: 241477 - DNA, 363 bp, Gossypium hirsutum
aggcgtgcgttttttttaaaaaaaaaatcacgcatccggtgattatacacacatttatatgaagacgcgagggcttgtttgactctcaccatacccgtaactatagatcgggttggaccgctcgtgcttggggaggattggattatataggctcaatcccggagcgtctgcttgaatgcatcttatacttacgacatcctgcaatagcatttatttttgaggcgagtgcgctaactgcatcaacactttccctatgagttatacggcatcagccgatgactcttggcggtctaaccggaccaccactgcttacttctttacaggtattaccattatgattacagtacgcttgcttaccactat

SEQ ID NO: 241478 - DNA, 338 bp, Gossypium hirsutum
tcgatcggcggcgatgggcggcggcggcgcacatggcggcaccacctacaagggctgcacgcatcccgcacaacaagcgctggcacaccgtcgccggcaagggcctctgcgccgagatgtggttctgggttttctacagggctaagcaggatggtgctacgctcttgggtttgcgtcatccttgggagggacatgatgaccactctcatggtcatggacacgggcatgaggcatcatcatcgtcatcttcacattaagttccttactggctgcggacgatgtttggcatgttccaacaactaaagtttgagttaataaattctatcaccctgcatggg

SEQ ID NO: 241479 - DNA, 264 bp, Gossypium hirsutum
gctgttatgtattcaaaacaccactgaacctattaagcaccataaactcaggaactagaggacgcattgatagaatcttcagagcttgaaaaggtttggacgtgttggagacaaagatttacatgcattttgttattcttttgctatgtactgcgtggccctgtcggaaagctgacaaatgaaggttgatatataccattgaagcttgatgaagacaggctatatatgagtacacagtgtactgcattgtgtgtgtatagatct

SEQ ID NO: 241480 - DNA, 187 bp, Gossypium hirsutum
attattacctttctattttctgtcaactttcacaactacttgaaaaacaaaatcactcggaaagatcttgaaaaacctcttcatattctcacaaccaaatatgaaactaagaaaaacccaaagccttaaatccaatcaattcaaacaatattctctgcttccaaatggcatccccttattcaaaccc

SEQ ID NO: 241481 - DNA, 345 bp, Gossypium hirsutum
cccacgcgttcgataacacgttctttcaggcgctcaacaactccaccaagattaagagagggactgtggaaattatcacgctcgcaccgcttatcaagaaggggacgacgaggctttcctggccgactacacttaggagccagcagagcctgcggccacactcaaagtgctgcatgatgtgaagtgcgaagacaagctgagcaccggcagcggcaggagcgcggtggtggacgcggacgcgctgctgtacggcaggttcgccgcggcagttgatagcagcgtggagtcgtactttcccggcggcgaggaccactaccacgactgcgggacgatgggccccgtgaa

SEQ ID NO: 241482 - DNA, 359 bp, Gossypium hirsutum
ctttctgagatggctaatcttttcatcagccttcacttggcggtcgctcctggggtggataacaacccgaacaatctggttgcatgcacgacattcttttatgaagcaacacgggccatgctttgtctgataagacttgaaacagatccacaagataggacccaactgccgctgacagttgcctcgggcgatcaacatttgacattcgagttgaaagagttcgccaaggaacatttgattgatataccaaggactcaagctgccccacctatggcaatggtacagacacagttgcttactgcagcacctggcacatacaatgaccctgttgccatgcttgctggattgctatgagaagt

SEQ ID NO: 241483 - DNA, 293 bp, Gossypium hirsutum
  unsure (1)..(293): unsure at all n locations
cggacgcgtgggcacgggggcaccaangtctgtagaattaatactcatattgactaccgcttttgtggattcctttcttttatatatataaaaaaacagaatacagggtgagttcttcaactcaaccaggtaactcatgttttaaaattttaagatttttgaacttcacatggaacttggaccttggagattttcaaagaagcggctgcgtttgtctaatcgttgccgatcttaacatacttgtgctcgctaggtttggtttgttctttttttacctcgtttttacacttaaa

SEQ ID NO: 241484 - DNA, 208 bp, Gossypium hirsutum
agagtccgcagcactaatcaaatagcacatagcatgtataatataactactaggatccaagggagacttctataatagcttataggcactcctgactaaaaaatccccgaacagtcccctcacaaattgaaaaacttaaggctgcccggccaaggaacggcaggtctttcccgggccaaaaaaaaaaaaaaaaaaaaaaaaaaaataa

SEQ ID NO: 241485 - DNA, 381 bp, Gossypium hirsutum
cacactcctcccttcaatctgatgaagaaatcatgaaaacagtcgcagaagcgaaaggggctcctccagaataacggactatagacggcttaagctgcagcaggcatacaagatgctgatgcaagggaagaagaaacacagcaagaagaagaggaagaccaagaagagaaccagaagacagaatagagcgcacatgctagaggacaagtatatgagttctaaaacgtgaatgctataccactgaaccatacgcttgtgagccatccagtgtgccaaaggatgctgcctggaaagacatggctgttaaattgagagctgaataagcctgatggttaggagggctagatagcaatagtaatgccttaaatggcaccaggagaa

SEQ ID NO: 241486 - DNA, 227 bp, Gossypium hirsutum
ccgtccgaatccggtcgcccacgcgtcgggacctggcggaccgtggcggaccttggcaggagggaatgctatgtgaggactcccagtactatggttgaggaccatatacatgtgatgggtgtcatcttgtgaagtcagttcgcctgccatactcctataactcaagacgctgatgacgctatcatgctcacgtataccattcaacatcatgactacatgataagcat

SEQ ID NO: 241487 - DNA, 189 bp, Gossypium hirsutum
gccaaaaatctaaagtcacagtacaatattaatgcataaaaaacctaaacaaccctggggtggatagccttagccattttcagcttatcccatgcgggcacagttgttatgaagaatcacgtgaccttactccgggggggctggcggatcttcagcgggcgggatgtgactcttgctggtacaaggatg

SEQ ID NO: 241488 - DNA, 395 bp, Gossypium hirsutum
gcgatcgagcgccgcctcaaccggaatcttaaagaggctgtgaagattcaggcgcttgaggacaacatgggggatgtcgacatgatctcaactgaagggtcttcctaagctgcaaagggcacgttccaagagaagttcagcgtgaagaaaaactcaagaatacggattaagagattaaagggcaaaggccggaagaaagccaaaaattcaaaaccacctgccaaggagagagttgatgccatggtagaatgacagttgatgccatggtaccatgacggacaagactacatacatccctttgtatgttttctcagagtttgcagcatggaccgacctcaccgaacactggcgcgtgtctcttgcatcttctgcctgaatgttaaattgaagctact

SEQ ID NO: 241489 - DNA, 237 bp, Gossypium hirsutum
gcggacgtcattgtactcctattgaaggttgacgcctacagacgacgttctgcaaacagtggcgcttctacacgcttcttgaggtgatccgctgaacacacatgggtgattggaaccatcctcccttgccccgttggggctgccgcatctccgggtggtggcaagagacttgaccaaggtcaagcatggcaaatcactgcagcctctggaaccacacaagcccgaatttgggctcgg

SEQ ID NO: 241490 - DNA, 210 bp, Gossypium hirsutum
cccacgcgtccgacaactctttcttccacgcgttcatccacacgaccaaggttactagcggggactacatctgtactactcacgtatgacttatcaaaaaagatattgcttagaaagcttgaaaatatgcacttctctaacactattgtatttatccacacttaccctgatcgaatatatggtgtctacatccaagagtcattccattta

SEQ ID NO: 241491 - DNA, 146 bp, Gossypium hirsutum
aagaaaacccgacccaccatcctaccatcatcctacaatcttctaaactttttttcttaccaataataaacccactccttatgctattttttacaaaatttcacctcttaccttataatactattatcattcctataaacttatta

SEQ ID NO: 241492 - DNA, 167 bp, Gossypium hirsutum
cccacgcatccttcttactatactctttaatataataaattttttttacacaaaaccccatccttcacccctgctcttatttcacttaaactccaatctatcttaccttcaaatcatcttctttcatccacctcataacaaaattttatacctctctttcacaacca

SEQ ID NO: 241493 - DNA, 437 bp, Gossypium hirsutum
gcggttggttacgtcgtggggccatccgtgattaaagttctgatatcaagaatggcggggaaggatggtgagttacagtttcacatccatccacttgtgatggattccatttagtcagatgtacatggaccaactgaacacccttcatgggtaaatacacgtttcctatcttgcagccctgccttcccttgccttcatatttactacgttctacgtgggcgttaaggtgattcctcgctaatcaattccgttcaacaatgtgtaccccttttgccgacatcttgtcaaattattgcagcttatgttccatatacgggatgctagcaagaaccaacgttgagggagctttaagatgatgtctccagttttgactcgcaagcaagcagattgctttcccgtggctgaagatgatagcttcgtctttttttgttgcatat

SEQ ID NO: 241494 - DNA, 297 bp, Gossypium hirsutum
cccacgcattcgttgtatgcccggacttatggcttccttaacccgattcctagcgtagacttaaacagtaccgcttaggaaacgtcattgtatgcgcgatgatcgaatcatgcctctggactacttcgcactgttattttctgtaaccccagattattatctgagacttatgcggacatttggtgagccctatatgggttctaactttggttcttagaaaaaatccctgcgttaatgaacaaatatttttttttgaatgggcggcccgtttttaaagatccaatctttccttcccct

SEQ ID NO: 241495 - DNA, 219 bp, Gossypium hirsutum
cacgcgtccgcttatgacaactttcttattaaatacttaatttactcaggaacactgtaatctttccattgcacatttttatcccaactttattaccatcattactaacacccgtaaagttcttcaaaaggaacatcacttgcatgaacacttccaccttataataaaacattcttcatcctaaacccatattaacacactagaaacttctctactttt

SEQ ID NO: 241496 - DNA, 222 bp, Gossypium hirsutum
gtttgttagatgaagtgaaaaaaggaagttctttggatgttaatggatcaatcatcgcagctttggtagttcatggactttgtttctcatcaagagaatcagaggctttttgggcattggatgagttgaggagcagaggttgcaagcctgattttatagcttatagcattgtagaagaagcgttcagaatgaccaacaatgtggttgtgagggagttgtttt

SEQ ID NO: 241497 - DNA, 316 bp, Gossypium hirsutum
ttgcattcgaatctcgcttctaaaatttcgtcttcaactgataatcggtaataaatgagtatgaagccaggtgcgacgtttctcctgggggctatgttcggagcccttttaactggaggattcaatcgctgccgccatcttaaagaaacaagcagtagcggtagcaggggagaaaacaggcgctgacctcgcaccaaaccaactcaaaacaaacctgctgatgccaacccaggcccccaagtggaacagcaatcggaggcaacgcttgttggctcgtgattgaagacatgggtgtgttttgctttgtagatcgtat

SEQ ID NO: 241498 - DNA, 355 bp, Gossypium hirsutum
ctagctctagcctctagccctagcccctactagtagctagccactcgatcggggggcataccttctgatcgtcacccatggccactgccgaggtccagaccccgaccgtcgtggcgaccgaggaagcgccggtggtggagaccccggctccgccgcgtcggcccgaggaggtgccccgcgcgagccaagtggaggagccagctgccgcgtgacccgaggcggccccgtggcggcggagaagagacgccaaagaggaaagacggcaaggaccggagccggcggcggctgaagagggaagagaaacgagccccgtgcgagacaaacagaaccgagcgtgacccgagctgtgtgcgag

SEQ ID NO: 241499 - DNA, 376 bp, Gossypium hirsutum
gcggtcgccgagcagcctcgctacatttgctctgaagttcaaggacacggccaccatgtaggaattcaaggatgcggtggagtctcacaagacaagcaaggcacaggaactgccgctgaagacgcccgagaactctccgaaggcagcagaagtctgaagccgcacccgagtcacgcttgctcgtgtcttttgtacgtgtccaggaaggaaggaactgagagagtttctgttgttgcggagtttttaagaatgtcgcgtcatgacatgatgtcctgagttgtattttgcgtacgggttccctagtgctgtttttgtgaacttaccattactacaggcgcataatcttgggatcctggacaagggacttcgttttttt

SEQ ID NO: 241500 - DNA, 419 bp, Gossypium hirsutum
cttggagaggatagagagaaagtaccagtagctggagcagtggctatttgctccccaggggaccttttgattggtgataggtttatatgccgcaggctacttcagaagttatatgatagagcccttacaattggccttcaaggttatgcaaaattaggaggcatacagagtgaggcctcaggaatagtgtacctagtaactggtttctgttccaattcttttaccctttggagctttacagtacctataatacctgtttctgttttctttgtggggagaatggggttcttggacatgtctcaattgatgaatgtgtaataatatttatatattagctttctagagttgttattgaccctcacatgtttattggagtcatgggccttgctatttttggatagtttatttgttagttattt

SEQ ID NO: 241501 - DNA, 280 bp, Gossypium hirsutum
  unsure (1)..(280): unsure at all n locations
aaaacctcccgaaccacgcgtgcgaaagcagttagtttgtacaaactactttttctgnctatctttgtagtttattgtaattcgcacactatatgcaatagctgtgataaaaccacaaattttgtctgcattatgttaaacatccttattccaaattgaaccacacattatcttatgtctatcgtcccaaaatatcttctattattttctacaaccaggtcttatacatgttcctagatgagaaattttcctcgtcatttatcgtttgcatcactattaa

SEQ ID NO: 241502 - DNA, 433 bp, Gossypium hirsutum
cccttacctctttttacattattgacccactctaaaattcctctacgcacgcctgaggaggtctcctttggacatgtccaaaccatctcaaccgatgttaaatcaatttctcctcaattggtgccaccccgaccctatcctggatatcttcgttttggactctatcccttgtgtgctcacaaaaccaaagtaacatgcgcatctcagttgttgacttgttggacatgttgcctttttgtcggccaacattcagcaccatatagcatcaccggtgcgctagagtgatgaatatatttcttaaatgacttgtattgttatatttcgataataaaccttatttagactaattccaattggatggactactgtgctgagtgcacgggaatggtgaacagtcattttttaggactacagagcttgcctagatttttta

SEQ ID NO: 241503 - DNA, 341 bp, Gossypium hirsutum
cccacgcgtccgcaaaagcaaagccctgatacagatgttggacaagaagctgggcaggtagaagcagatgctgaagtggagactgggatgatagacggtgagacagatccagaagccgaatctgatcatgtaggatgagattcaaccttcaaggtatgaagaaatagcttctgctttctagttgttcattaagggttcttaacactagatactggtgaaaaaaaaggagagttgagtgtttgactgaacttaatccaatgttgaactataagctctgtagttattattctcaacctgaattgaattacttgcttatcttatacttacagtcgttctacttg

SEQ ID NO: 241504 - DNA, 403 bp, Gossypium hirsutum
caaccgcaaaggagatgatgtctacaccactcacaatggcatcgtggggcgacagtagtcatgttcctagctacgagtctgttagccgcaagtttcactcgaagtgagaggatccagcatcggacttgcatgacctgttccaacaactgatgtgaagcctgcaacggccctcagctgggacagttactccccccacagaataaaaaagcatgtggtttctagcgccccccctaattactccctctgcatgtatacgccaaacatgtttttttttttgtggtaagaatcatcaagccccttggcgactcgtttctgagtttcgcagcggcgctagattttattttatgtggacaagcgagctttcggggtgcgctcgtgcagaaatattttgcaacgtattttg

SEQ ID NO: 241505 - DNA, 308 bp, Gossypium hirsutum
gcgcaattcggcatatctttaccagatctccaccacctcaccaggctgcagtcgagtctatcgccgcacgcgcacgggcttcgccaccagctcgaccacggcgcgcggccgaggatcgccggcggcctcatcgtcggccacccggcagctcgggacgacatctcgtgcttgctcaccattggcaccgccccgcacaagaaaccatcagacgtcaagtcggccgcggcggcgccggcgccgcagctgatgctgtttgggaaaccgattctaaccgagcagcaaatatttttaggctttcggccgttgcc

SEQ ID NO: 241506 - DNA, 438 bp, Gossypium hirsutum
caggtacagggtgcgtggcgctcgggtacggggctgtgctggcgtgtgtacgggagccgtgctgacgtacggggacttggcgtggttgctggaggtgttgtacagtgcctagaggttgtagggtctgttgtggtgcatgtagaaagctactaggttttattggtatagacaatgttcttattaggctaatattttgtctagtatagtttttgtaattatattagttttttttttttttattttatttattttatttctttttttatttaattttttttatactatttattattatcttatatttattttgattatcttattttttatttttttataaatttcaatttatatatgtatttttatgttatattatttttttttttattatatatttagtgtatttaattttatttttaagtaaatttattaattatttat

SEQ ID NO: 241507 - DNA, 297 bp, Gossypium hirsutum
agttaaaatgatcaaatacccgatgtttttttagaaagtacagaaaacataactgtgggtatgaatctatttgagatcgacagaaaaacgatgatcgatgtacatgtatcagactgtcaagccatcaactctttatagctgtttcaatcacaaaggctaatctcctggaaaaaacagtgattaacctaaaggcgaaccacgagggcatactccttagacatgatatgagtatcatcaacgaggaccatattcatatcataactttcattatcaacctccttatggaggctacccttt

SEQ ID NO: 241508 - DNA, 303 bp, Gossypium hirsutum
atccggtcgacccacctcggcagggaataaaaacagtggcagtcaaccagctgcaggggctggggcctgcactgcaatgcgggcagctgtttacaaacactgtgtcttgatcgttgttaatcacatatgtgatggcacaagcaaacttaaattggtgctccctgtacattaacctattactgtcccaaaactcgagtattatgatctgaagttgtctatactgaaccttaacaatatggctgttattcctgtcttatcaggctatggagttcatcaaaaaaaaaaaaagggcgcgtctaagat

SEQ ID NO: 241509 - DNA, 273 bp, Gossypium hirsutum
ggaggccattccaagttatgatgatccatatatcaaagtgccaagagtgctgaacagagaatgatctgtagcatgtatatcagaattgttagaatattaatactctacaatgcagcatggttaaacataatgataaaatttgcagaaagattgaacgagtcaccagcaagcttaattgattctgtgcatttcaatttgataatgctgtgattgaacagagcaatcagcaaccttgcattgggacaggataacaggaaagatttgggagatcta

SEQ ID NO: 241510 - DNA, 387 bp, Gossypium hirsutum
cccacgcgtccggctaaaatgatcaaataccccacttcattcaacagttgcttcacaaacggaaagagggtgatcatgaaaagaagtttaaaaaaaggaggagattgcttgagacccaagccacaacgaaccctatagaagaacctatggacccaattcaagatgaagagtttttggtttccatggatgatagggttgtaccagagatgtcaacaaatgaaagaggtagatgtgaatgattcaaagatttatgttgaattaaagcagttggtgaattggaagccatgtagctagggtgggtttccaagtgagccagtggagcaaactggctgttgaataatatatacatatttttgcgtgtatgtatatgtaatgtatatgaatgga

SEQ ID NO: 241511 - DNA, 191 bp, Gossypium hirsutum
cacccattcctgcaattacgtcaaaccattcaaagttttacatagctctgaactggttcctgacagcagccagttttagtctactctttatttcgctaaataaactccgtctgctttgtccctcgttaagaatgagctttgagttttctgtactgcaattgttggagcttcgcctgttttcatattggaat

SEQ ID NO: 241512 - DNA, 234 bp, Gossypium hirsutum
attcccgcatagacacaacacgtctcttcactcttatcttaccatgacattgctggttttgttcatactgttactgcgtgatgttatacccagagctattggagacacatctcaaacctcataccatctgcaacgactctagaagtactgccgaataacgccgaacaccatgtcatttacatcctgataaacacacttaatgccgcccaccaatttgccttgtataacaccatc

SEQ ID NO: 241513 - DNA, 386 bp, Gossypium hirsutum
cctgaattcaagagcaagcttacatatctgcctgtcaacttcttcaagatattaccatggaagtcagacactaattcgagaacctaatgttacttccatcattatcattcgattaatcaggatgggaataaagatgattcgacgaataactttcagcacatcttacctggagatgggggagagaagagcaatctactaccccattacaaagaatctcacttttcctggtccgaatatgcactttcacagctttcttcagattcatctatgaaaccccaccattcttttcggacgctattcaagatattgctttagatatcatgtgtactttcatgactgaaagcttattatgtccacatgggtgctttaaaggagtgaaaaaggtg

SEQ ID NO: 241514 - DNA, 316 bp, Gossypium hirsutum
cccacgcgtccgtctttctggcatcaaaaacgctgtaagtctgtttctaagagatggtgttgcaaaacgatggtggagaagaagagtaagcatgtttatttctttccatgccctttttggctccacttttatgacttctttttgattcactgagttgtgtacagaaattttcttgtagttatatatatttccctcagcttactaaaattcaagtcatagtatgcctttcctatgtaaattggttagtactttcaagttcaacgctcaacaaaaattcagtttgcaatttgatatagggataatgtaatttttgact

SEQ ID NO: 241515 - DNA, 275 bp, Gossypium hirsutum
ctttccttaaaaacaagctcaatcaatttccccattaaccctaaacgaaaatcaccttgaaaaaaaaccacttatttttcttcacctctaaacgacaacaacaatggctggcttcaagaaagccactgctttgattcttacagtggcttttcttgtgaatcttgctttaatggatgatgctgatggtgatgattatatcaacataccagtcaggaaacataatgctttgtagcagcgtatactttgatggttacgttcctactgttctaaaataa

SEQ ID NO: 241516 - DNA, 427 bp, Gossypium hirsutum
cccacgcgtccgaaaaaaacagagaatactcccccacccctttttctcttggagttaggggttcaacacccatcattgtcggcggttcaccgtgtcaaacggagaggggagctctgacgacgcggccacggtgtacatccggtaagactctcttcccctcctctttcctttgtctattttcgtataaaaataaaaataaaaaaacaaataatacaaaaaataaatgaaatcagaacatagaacaagactagaaataaaatcaaccttcctgtttttttgctattgtgattttgtttgctaaagttcgtgtcccccaaaaaaaaaactacaaatggatgtttccacttttgtaatccgagtgccgccaaagtagctcgtggatcatcgcctacgtcggagaagtcagtcacactatcatttgaagcac

SEQ ID NO: 241517 - DNA, 237 bp, Gossypium hirsutum
  unsure (1)..(237): unsure at all n locations
aaatgcattgtacaaataccttagtttgtattttacctttagttaccattcctccccattgtggaaaggacgaaataagaagaggggtggccaanagtgttgcaatgtaagattttggggttttttatagaagaagaaaagcaaagctacaataattaatttaattattatttggatttaatgtatctttttaatggattgaaatgaagttattccaatgtagttgctattctagtt

SEQ ID NO: 241518 - DNA, 177 bp, Gossypium hirsutum
atttcaatcgaatgtagcaggtcagagtcaaacagatctaacgaactcagtgccgagtgacagcttggtgcatcctcaaccaacaagccaacctcaattgaatgaaacacgtcagtaccagactctgattcatcactcgaactctcagcatactgggcaatttcaatcaaatgtacc

SEQ ID NO: 241519 - DNA, 296 bp, Gossypium hirsutum
  unsure (1)..(296): unsure at all n locations
nccacgcgttcgtttacacctattatctttattggtttgacgcttttacaaatagatcacggttctatataacttatgaatcttctaatcagtctatgttgatatactatgaattagattctcaaggaaaattcgttttacgaaaataatatgtcaagaaagtggactgtagtaaaaatcaccctactattcaaacagattgcgatgtttatgggaactgtagagcattcattatttgtgattcaatgaaacgaaccatctgcagttgcttaaaaaggtttgagcctacccatata

SEQ ID NO: 241520 - DNA, 447 bp, Gossypium hirsutum
tcgaaaaagacgactcttggcccccctttatcctctcggatccgacggccacgaacggggagaggcctccgacggcaaacccgaaaggcgtttcaagtgagccccgctcccttttgtttcttatttattatatgtaaaaaaaaagaaaaacaaacagaaagagcaaacaaagggaaaaaaatcgaatctaagaaaaaacctccgctttgtattctgttttttcaaatcttttttccttcgtattttcccttctattttcgtatctctttacaccgaattcccccccccccctttacatgatttaaatcggcctttaaatagccgaaatggaaaagataaatcaacaaaatcaaaaaagagatttattctgttttgttggcatgatttttgctatcttgttgctgcaagtactgttggaggagactacgcgcgacgtggaggcgcaac

SEQ ID NO: 241521 - DNA, 268 bp, Gossypium hirsutum
  unsure (1)..(268): unsure at all n locations
caaattcttaattaaaattttaatattttacccacggaaatcccctcaggaccctgttaaactattccttactctcacaaaaccatcttctttttcaaatctctgcttcatctactcacaaattaaataaaaactttctcaaacccttcattatcttcaactacatcttaatttgattattattttcaacaatcctcctctggctctcaaactttcatatttttctaagataaaaanacccacatctaaacacttgctttactttctt

SEQ ID NO: 241522 - DNA, 359 bp, Gossypium hirsutum
  unsure (1)..(359): unsure at all n locations
ccacgctctctcatcacccttccttgtacctgacttgtcagagagataacccggaccgttttttaacttcgacccaaacccccaacttgagatgctattccattaccttaacaactccttgaagcttcgggctggttcaagggaaagttcaccaataaatgattgggcccatggatgggctcattcgacttatgcgcgaggcctggtcctaaaaaaattnnnnnaaaaaaaaaaaaaaannnaaataattgaaaaattttgtttttttttttttaaaaattttnaaanaaaaattagggggggggggtagaggttttttttttttttttttggggggttttttatggtatgtaaatttt

SEQ ID NO: 241523 - DNA, 438 bp, Gossypium hirsutum
cccacgcgtccgctgaaagatttgggatgatggcaagggtaaatcctcctgatagtaacaggacgggagaggagtcagatgacgattggcattttcgtgaagttgcctacgaacatctaattgttgatggctttattcggggtataaaaaatggattttccatggagagtgtacacctaatagaatctcttcaacgattaatccagcttatccttatagtgcttaccatcagtctgttagagaagatgacatggagatgttaaccgaaggatagctgttatttacatttcatctttggcatactcaggattagcacttaatttgatgagaatgtccttttcagggatgtaatgaaaacaagtcctttgtacaactaaatgttagtcgtaaattctagtggttaactgttgcagcttgtcttgcatacgcgttttacac

SEQ ID NO: 241524 - DNA, 311 bp, Gossypium hirsutum
ctcaaatatcaaatccctctaaaaatcctcttcatcctatcaccacccgaaaccatggccgctccttgtccactctaataaaatgtctacattgccaaactctcctagcaagcctatctctactaggagattgtcaagttcatggagaacgtcttcttctccgtccccgctccctactaactctccgtctaggaacgtaacctcctctcttttgcctacaagaacgtcatcagctcccttcgtgctttctgtaggatcgtttttttcatttagcataataatgaatttcttttcatctcctaccacttttt

SEQ ID NO: 241525 - DNA, 156 bp, Gossypium hirsutum
  unsure (1)..(156): unsure at all n locations
gaagtgaggtggcaggtangtcatttgccaatgatcggggtttaggtgttcaatggaccagttattgattccagttagatgttcaataaaccatttattcaagtgaaaatattcccggaaaataagaatgttgctgccgtacggcattgaatcttg

SEQ ID NO: 241526 - DNA, 307 bp, Gossypium hirsutum
cggaatatatgctccctgttctccaggcctttcttgcatcttggacatactcccgcgttggtgtaatcttttgattcttagattcactagagtaggcaaataatttaaggtggctctcgaaactgtaataagtatttttgaagggaggtcactatcccatagcttgtaactattattagtaagcaagttaccatgtaataacaatttatacccacttcgcactgagtattcacctgttgactcccccctccaagccagaaagttgtcgtggggaattgtagtgagtgggatttggagaattttttgg

SEQ ID NO: 241527 - DNA, 410 bp, Gossypium hirsutum
aaggttataaagaacctgatcctgatgctatttcaaatgaaatactacaagcagagccggagccaggtgataagctattaccacaattgggaatatccaatatgaaaattgatgagccacatctggatgatcaagaattacagagaattcaagacactgtgactggtgtttgtagccgtctgcaaaaggccattgagatgttgcgggctgaagtcaatcccaccaaggcaactgttgttctgcaaactctttttaagattattagaaatgtgattgaacacccagatgaaatgaaatttagaagacttcggaaggccaatcctataatccaaagaaatattgcaaattacaaagctgccatggaaattcttcttttgattggtttcagtgaaaatgttatatttgatgaa

SEQ ID NO: 241528 - DNA, 409 bp, Gossypium hirsutum
atccttcaaagcttttcatcaccgaattgggcaaatctcgtacacaaagcatagccgaaggagctgggtttaacattcaagctttcctcacgtttccattagatcagtgttcggaggtagtctgaaagggctttttaaggataaggctgcgtttggattcgattttttttattccttccaaaaagaacgtcccggaaacactcatcaattacagatctagtcatctccaaaaaccattcaatccccgatcaaactatcaacagtcatggccactcctggggttcttcaaagagaaaccgaccttctcttatcatctcccttgattgagcttcgtaaaggttacaaaccgacgttctagaagatggttaaatgatagattgttgatggaacttgttcctcgcttgaatgc

SEQ ID NO: 241529 - DNA, 236 bp, Gossypium hirsutum
cccacgcgtccggaaaactcggtttcctcttatttgtaagcttgctttttttttgatgatgtccacttatgtcggcagttgttgcctatttgcctaataagagtctgctattatcttctaagttgtcaacatttcgaattgcttctcctctatatttaaaagaagaatcccatgactggtgagtgttggaaacttaaaaaaaaaaaaaaaaaaaaaaaaaaaaaaatattgggcaa

SEQ ID NO: 241530 - DNA, 299 bp, Gossypium hirsutum
caattctttcaaaaagtggggtcttcaagtctggcatttgataaatcatttatgcggggagaagcagctttcttatcaagttgattctgcgcccatatcagcatctttagcaagctgggaagctttgggtctgtcatccagcaagcatatttaagccaaaacttactatttcttgaagattggagaaataatctcaagttttaaatcaaactgcccaatgtacgtataaacttaaataagtaaaaaagctagaatttgacaaaaaaaaaaaaaaaaaaaaaaaaaaaaaaaacaaacat

SEQ ID NO: 241531 - DNA, 345 bp, Gossypium hirsutum
  unsure (1)..(345): unsure at all n locations
cccacgcgtccgggaaacagtagtaatttattttccaattctgatgctcgtaagccacgtagaaagaggagaccaaaaaagagaaagcaacaggcatgacaaaaacgcagctttggttttgtccatgagaaaacaagtggtgttatacccagacttgtattgaaattcaacaacgctttttgtagtatgttccaagaatagttttagttttggtttagctgaaatttaattattatactacctgttttttttttttgatggatttaattgtatgttgaacgctttgtattgtattcactacaattgataattggagagggataaatgatccttgatttgagccnc

SEQ ID NO: 241532 - DNA, 190 bp, Gossypium hirsutum
  unsure (1)..(190): unsure at all n locations
cttttaccctttttttctaagatactctgattttgcattgttttcacgtgcttatttctggttttgtgctcactgatgtaagattgaattactttaaaaatgttttctgctaatgggtattgtttagcactcttcagtctnaaaaaaaaaaaaaaaaaaaaaaaaaaaaaaaaaaaaaaaaaggacgacc

SEQ ID NO: 241533 - DNA, 300 bp, Gossypium hirsutum
  unsure (1)..(300): unsure at all n locations
gcgcccacgcgttcgctaagtgagttttatgatttcctgcagtatgattatccgcatgtgtccgtacatacaagcaatggtagagaaacaaggtttatcatcttccttgcaaaaataaatgtcaactttcacgtaacgcaattccgagaccttgcataacatgattattattgctagttattactctttcgaccnaaaaaaaaaaaaaaaaaaaaaaaaaaaaaaaaaaaaattatataatnaaaataaaaaaatattattaataataaaaaaatattcatttaattaaaaaaataaaaa

SEQ ID NO: 241534 - DNA, 447 bp, Gossypium hirsutum
tcgcccacgcgtccggtgggccttggtggttggtattggctggttttgaagaatggggtggaggtcaagttgcaaagaaacgcattgagcgtgttggaacatcctaccggtaacgaagtagacggtgatcatgatttcgataactcgagcagtggctctgacattggtgagaaagaccatgatttccctagtagcattgagttccagaggccagcgaaacccagagttcgacatacgaaaccttgggttccatctgcatccatgaaatcaacgaatcgtagcggttacagagacgtccgatccattattcacacgccacaatcagtaaatttggcaagactcgataccaactcgttacgaagatattgcaaacacttcaaactcggtggcatcaatgcttattcaccacgggaacaagtgcttaataccgtgcagcagcattttatg

SEQ ID NO: 241535 - DNA, 429 bp, Gossypium hirsutum
tttcaattgtagtcatgttctattttgcgatggtatgggatccttggcttattggagcccgaattgtttgccttcaatgcttatactacctcacccttggagtctttttgtcctttcttgttggcactcatgtttctcatatgagcttagtctatttctttgactttgctactatcacatcctcaaccgttgtcggccggtgtgtcattgcttcctttctgttcagctctgttgcaggagctggatacatgatttatttgattgaaagggcaaataagtgcttagatttttcagccaccctctatattatccatctttttatatgccttgtatatggaggttggccttcctctggaacctggtgggttgtgaatggtactggagttgcagtgatggctttgctaggtgaatatttatgcattaaacggg

SEQ ID NO: 241536 - DNA, 381 bp, Gossypium hirsutum
gggagtagcatcaggcgaagattagtgaccttaggttaggacaaaatttatatattctttgtgcaaattgcacgtgcagtggaattgatgtggggttctcaagccggggggtgtttttcctgtctttggtaggagaaccttagtgtagaaaatttggattagtgacttttgtttctgttggtatattatttgcttattctatacatatatattcattgaatgtatatgccaacgtaacttgttctgtgctttgtagtttaagttaagaaacgaagtcctttgattgggttgtaatttttagatttccactaagttagggagagaatgattgggttgtaatttggcccatattgatatcaaatttatttcaattctttcttt

SEQ ID NO: 241537 - DNA, 413 bp, Gossypium hirsutum
ggagattggatcaactggaaaggttcttattttagggaacaaaaccttctttgggacacgcgggtttcatatgacgcaaatgaaactttggatgccttgtaacttgctcaagagtcccttaaatctgaaggggttacagtttcaaatgccagctcttctaatcctgtacttcctccatcatccttgatggcatttctgagaaagaactctttaacttctgggattgtgttataggattttgataccgtttttgccaacaagttctataatagtcatcttgatgattcagcaaatataaactctgcagcaatagttgcagctgcttatcttgttgctcggactctctatgttcttgcaagtgataaaaaggattgcaccagaacagccctaagtttactaatgtgaatgcctct

SEQ ID NO: 241538 - DNA, 379 bp, Gossypium hirsutum
caccctttggccctctctccttcccctctggttcagtcaccggaccgtccccgtctgccacgccggcgaccgtcggccaccgtcggccaccgtatccggccccgaaagcggtggccggagtttaaaaaaggtggatgaggtcaatggtggcaggtggagcgacggtatggtggctgatagaggctagggcgtctgacctagggttttttttagtttcttttttttaattgttgtgggctagggttaaaagaattttgggctgcattgttttgggcttagtgggtttaggttcgtttagggttagtgggttggttgatgggtttagctaatgttggggtttgggtcttgttttgagttagtgggtttaatttaggtgggg

SEQ ID NO: 241539 - DNA, 240 bp, Gossypium hirsutum
caacttgaataccgacaaatttgtttcagctgtagaaatgcaatggggccggggtgtatctcatactgcatgccttatacacatcattctcctttataagcttgagaggattgagaaccattcattaaccctaaagcaagacgaatatctacgtcgaaaaatagaaccaaattcgctaatattgtgaaagatcgagagactaaacctacacacgacccagattaattctgaactctgccc

SEQ ID NO: 241540 - DNA, 156 bp, Gossypium hirsutum
acccacgcgtccgcccggcacatattgcttcttacaggaaacatcgctgttatattctctcataatccacctttgtatctgtgtaaatattaaaattccccatactcttcaaaaattttactatacctttcattataatcttttacgtctttctga

SEQ ID NO: 241541 - DNA, 383 bp, Gossypium hirsutum
cgggcgacccacgcgtccgcccacgcatacgccacccgtacagaaatattaaaattttgctcagaacttcaaccccatgcgctcagtgtggtcaaatctctccaccatacctgatgcttaccatagccctatagactttaactcaatagattccaactcttgttcttactcttagcattgattgggagttacaatattgtcaactgcacccacaccagagctttacatcttttataatcaacaatactccccacatactcataaaaacaaaccttacccacataatacatttacaatatagaagaagaacatgttttcagaatcaagtgtacatctagtgaccatagcccaagccatgcactggttcgaactttctgtgtttt

SEQ ID NO: 241542 - DNA, 337 bp, Gossypium hirsutum
cccacgcgtccgcaagatgaaagggttggtgacgatgaagatgttgtggaagaggtggtagttagttcggatgaagatgaagatgaagatgaagaagatactgccgaggaagatggcaatgaagagcagctaggtggtagcaaacagcagaacaagaagcaaaaacctaagaatttatcaaacaagaatgtaagatctcatcatcacgcaaaaaataataaatcaaagaagagaaaaagagcgaagctaaattaaccaaatcttgtaactcatcatcagctggagctgctcttttgtttatgtttttatagataatggcatttcaaacttatttgag

SEQ ID NO: 241543 - DNA, 456 bp, Gossypium hirsutum
  unsure (1)..(456): unsure at all n locations
cgacccacgcgtgccgttgaaggcaatcttttctttattctcccattttaacaanggacgttttgttgaggaaaatgccaactacaaatgccgatattgctcaacccatttcctgccatcaataatattgcattccacaaactaagaacactgaaaatataataaaactacatgaaaatgctgatttgaattcatcatcacctatcgatgaagacttggtttatagcaaggaggatgatgaactttaatctgcaaaaacttacatggattaagtgatggaagaaaatgaaacattaaagaacatgttggataacatccaggagaattacaagtctcttcaattaactttctttgaaatccttcaacaatgagctgtcaagaaatctaaatgttcatcaatttcttcggatcacaatgattaaccagttgttgtaaaacctgaacttgtttcacttt

SEQ ID NO: 241544 - DNA, 421 bp, Gossypium hirsutum
  unsure (1)..(421): unsure at all n locations
tttaaaaaattcttcattttcttgttttgtcttcaaattaaatattttttgcaccattaaacatatcttcgtatggttcttaatattgaattttgcaaattctcttttttgttgtttagatctattatctttaaaattaccatctttatgctcataggttgaataatttgagcccttttttgaacaccgcatctttctatttatgggctttgatggtaaactcactccttgacttttcattactgtttcacctctaatataatctcactttcattttatacacataaattttttacccctttcttttctttttccttttggattctcataacactactcttttaaataatttgttcatattaaaaaaaacaactttttttttccaaaaaaaaaataancccacttatattaaacctttttc

SEQ ID NO: 241545 - DNA, 219 bp, Gossypium hirsutum
  unsure (1)..(219): unsure at all n locations
aaccaaaaanaattctgattcaccattacaattcaagtagaaagaaccccaccgtggctgttgtcattttcaacaaagaaatgcctacctactcctttaaacattactttcttccagaataatatcaaatctcttttccattgcaatttgggttaacttccgttccctctcctttaaataacaactcatcttcacacttctttttcaaataataattct

SEQ ID NO: 241546 - DNA, 381 bp, Gossypium hirsutum
cccacgcgtccgtgaccacatatcataaggctctctgaagttctttcttcgaatacatcgaggccagtgtatttatatccaagtttttctgctagctcagatgagaaatcatcctgccgtctctgagcctggtcagtgctcgatgtttctgtaagttttgtattttggttaatcgttattcatatttttcttgtgttgtgtatcttatgttagttcatctcgacgaaaatgtctgtgatggccttcatgtcatttccttttacagtagatccctacaatttccttatctctttcaacccactgttaaattgtttgtttttcctatgaatggtagtattatcatgaacactcaagctttatgaaatatgatcttttcaaata

SEQ ID NO: 241547 - DNA, 347 bp, Gossypium hirsutum
gcaaaaatccttatgtaaacggtcgtctttctatggagttctagtactttcgtttgaaattgggcttgacttttgatttcgagtttcacattcttcatcatcaaccgatgaatgattttgaaatgattaactaaatctcaaaataattttgtgggaaaaaaaataaataaaaaaaaaaaaaaaaaaaaaaaaaaaaaaaaaaaaaaaaaaaaagaaagaaaaataaaaaaaaataaaaaataaaaaaaacataaatacaacttaaaaaaaaataaaaaaaatgggggggggcccttttaaaggacccaattttacttccccgttcatgtcaaaaaaaacttttttta

SEQ ID NO: 241548 - DNA, 365 bp, Gossypium hirsutum
cccacgcgtacatcctctcttacaccatcattctgtttatcattatccaccactctcacctaaaatggaacggtttttattaacatacctttcacattacttatcaattttctgaaaaactatctaaaattctcacactaaacctcaaaatactttttaaggagctcaaaatctttcacaatttttttacaaatattattacaattattataaacattcttctcaccaatcccactttttcttagaatccacctctttaaccacttcttgtactgtacatgcacaagaccgtccctcttactgttattaatagcgttatcaataaccttccaaccaatgctccattcaccacttatactaccaaa

SEQ ID NO: 241549 - DNA, 210 bp, Gossypium hirsutum
gacccacgctacccactcattcacttgtcttggaaatttctacttaatcgaacaccacttatttcctgagcatgcgtatctttcatcatagcctactcatcttgattctctcacactaactacagtcacctatcaagctattattaacgctattatacaaagaaaccctatctcatcgatgcacattaatcttatttttgacattgcttt

SEQ ID NO: 241550 - DNA, 399 bp, Gossypium hirsutum
gtctccctctctctcagcctcctttcccacaataagcttaagctttcggccatggttgccaccgtggcttcgccgtggaactgccgcgtctagcaaccagcatcgcacgaaaggggctattttgagcctcccctttgagccctgttccaaggccgaatccttcaggcccgaagtttgaaggaaaagagaaacccgtgccctccctcggtccaatctccgcggccataaagggcttccggcgagggtatcagtagggcaattctgggtacggagcctgtacgagctgtggatgtggcgcagcgcgtggaggcgtggtacggttgctgcggcgctgggaatttctggaaaccatatgagttttcctgttctgatatttcttggtgggctgcctcgtgattg

SEQ ID NO: 241551 - DNA, 150 bp, Gossypium hirsutum
ttgtattccttttaatgcccttcttacttttactttaacctaattgcccttaaaatggggctcgcgcctttattaaaagtggccacacctcctccctgcctctaccttaatgcaaggaattataatccccattaatatcatataccttct

SEQ ID NO: 241552 - DNA, 384 bp, Gossypium hirsutum
cccacgcgtccgctgagagatcagttttttgtggggtatataaaaagacggatatggatgggatttcaacttcggaacaattagatgttgatgatcttttggatttgtccaacgatgagttttttccctctgcttcggccgccaccagccatgatcagttccctccttctgagacccatttcagcgacgcttccgccgcttcctcctcctctgtcgccctcactccctctttctccttagactttaaccaccaatatttgccttcctagtgatgacgtggctgagctggagtggttgtcgcagttcgttgaagattccttcaccgactttccctcatactcgctccccgaatccttaaccctataaatgataactcgtccgttt

SEQ ID NO: 241553 - DNA, 258 bp, Gossypium hirsutum
gaaaacccgggccgacgcacgcgtccgctcacgcgttcgttcaataatatatttccgttggggttctacatcttgctcagggtacctgtcggttcttacattgatgaatgaattataatttattaagatcgtgaagggaatcattaaaacaatttcaaaatcattacacatttaataataacaatctctattaatatttgttttctgtgtaaatgtaaaaattgaaaaaaatccaattaatattttttaatctttaaa

SEQ ID NO: 241554 - DNA, 229 bp, Gossypium hirsutum
gcggccaatcttaaacccacacatacagatcgtttatgttttctatcccaagaaaaaattaacgagggtagattatttacaaagaatccataacaaaccaaaataaaatattatcatacaaaaaattgtcggtccttctatatgaaccaacctaacatactcattcattctacaaaatatcttttttatagtatcacacaaatttttttcactgttcgttcctatacaa

SEQ ID NO: 241555 - DNA, 368 bp, Gossypium hirsutum
acagtcgagaaaggcctgaaagctctgtttcagctccaccttctgaacctgtatcgatggggcagtcctgctccctcgtatacctgacctatgcgcttctattatcagcactcctccattcctatctgatcgcatgtctatgtacaaaacagctccatctaaacattatcatcgtcttgcaaatgatcttacaactgctacaccggcatatttctttcttttagttggttcacttgttttcataatatcagacccctttcattcttgattttcatatatccctcaacgcattttatacaactgctgatcagaatattgttgaatggaatatattcgcttataccttttctcctatactacttatggtt

SEQ ID NO: 241556 - DNA, 369 bp, Gossypium hirsutum
gggccgacgacgcgtccggcccattacagagctgttttcagcatttcctcacgggctggccacacgcccatgtgcgcaggcgtgtctatttcgcaacctgcttccttaacacgtggaaaaacccaatttttaggctttcttagcattctaaagtctataaataacaataaaaagaagacctaatggagcatgtagagaagattgaagaaattactcgaagtacactatcagagccaactcagaagcacatctccttcaaaattgaatatctcattttaactcttttcgaagtttatttgaatttctttatatcttgtaccttttctgactttgagatgtttttttttttaaattatgaactaaattccc

SEQ ID NO: 241557 - DNA, 163 bp, Gossypium hirsutum
  unsure (1)..(163): unsure at all n locations
cccacgcgtccgcccactcgttcttcctattctaacgnntcaaaccacactcccgttaccgcaaaatctctctccttttctttcttttgcagaaagaaaattaatcccgcttataacactgaccacccttaactttcaactatcaatatccaccaaccattat

SEQ ID NO: 241558 - DNA, 414 bp, Gossypium hirsutum
ataaaatttttaaaaaaaaacactaaaaatttttttttttcttcaaaaaataaaaaaattatgttcgagccgctaatgaacaaaataacacactattccaatctttaaacattttctgcattttaccggattcttactttaaaagatgttatattttagttctcaatgatttatgcatactttgttcttttttaattgttgtgaaaccttatttctgtttaaatataacatttttaagagtttgtaaacaaattcatatgcattatatttccttgttatgacttaatttgagagatttatattcattctgtatgatttatcttaaaattgtttattattgtctttaccaacttttattttccaaaacttctttttttttattaccttttatttttttccaatttttcatttttt

SEQ ID NO: 241559 - DNA, 404 bp, Gossypium hirsutum
  unsure (1)..(404): unsure at all n locations
gcgcgttactctagaatagtangaacaacaggattaattttatctttaaaggtagagaaaatgaggcaggtgtggtgtgggaaagggctaacaatctcagtcaagattttagaatccataacctacttgagctgccagcgattccaactacccctatttataaaacttggactaagcccctgaatgattacattaaaatcaattttgatgcctcagtctccaatggtaaggtgagctttagtgttatcgtaagagattcggacgatttcattgtcggcagtagcggtggctctaaagaaaaaataatgtatgcagaatggactgaaatggaatcgcttgatgaaagattgaagattgctaccacattaaaagtgtcgaatgtaattttcgaatctgattgtact

SEQ ID NO: 241560 - DNA, 373 bp, Gossypium hirsutum
cccactctccgcggacgcgtgtgtcgggttacatggtaaaagcacggtaaatagatagagatcaaaatggaaaaaattctgtgacaaaataaaaaaatgatgcgacaaagtaaagagaggagagcacttagactatttattagaaacctagtaatttctttgcttacacttgttagcataggatttctaggagcagaaaaaatcgcctatgaatggatctttcttatagtcattctattaataagtttcattattttatatcggaaaatcttaatattctttttttttatttttatttattttggggtgtgtttgttttttatatttcatttttttatttcactctttgtttttatatttttatttactttct

SEQ ID NO: 241561 - DNA, 417 bp, Gossypium hirsutum
  unsure (1)..(417): unsure at all n locations
atttcattcattgttataacttgtgcattctaatgggtggtggcaaaggtggaagtggcggtggcagcaaaggtggttgcggaggcagcggtggtggctctggaaatgttggaggaggaagcacatccaaaggcggaggtggggcttcgggaatgatggtagctccggggagtggaggtgcggccattatatcgaggggcgcattcgagagcaaccctcagggatactttgctggtctgcattcaagtgaaaagggcaataaataaataaggaatggtattgctggaaaagcctaagttcatgtattatttatagtaaagtaatgcatgactaatttaataaaatttatggcaatatctcttttttctccnannaaacattttnatgaaaaaaaatttgtctttttggagaccataa

SEQ ID NO: 241562 - DNA, 263 bp, Gossypium hirsutum
gagcaaggctactataggcgcacctggtacttctactctggacgcgaagataaacatatggggcgggctctattccggtagccttaatgttcccaaccaacccaaagttgccccagaagaactctatgctacacaattctctcacccacatgaaatgcgtttttacgacactggatagaacctttgagcacttcgtgctacttgtggaataccacacactagaaatgatagacttgtccttaacactgatcactaatgcctac

SEQ ID NO: 241563 - DNA, 191 bp, Gossypium hirsutum
gcggggaggcatcattgtctttggatcgtcatctctttttatcttcctgttcttcattatttaggagtgtgtattttgcctctggcaattgccctacaattattgtgaaataatgggtccgcatgacaatatatgatctgaacattggtacatcaaataaatgcttcttgccttatataaaaaattttaac

SEQ ID NO: 241564 - DNA, 117 bp, Gossypium hirsutum
tcttcttgcttaccttctcaaattaatttccactctattcctctatttcgttctccccgatttcctttaacccgacattccttgtctccaatacgctccttaaacccaccacgcttt

SEQ ID NO: 241565 - DNA, 434 bp, Gossypium hirsutum
  unsure (1)..(434): unsure at all n locations
caacaacatggttgctgcggccaagctgcttctcgctcaacttgccagtgccaagtgagaggatcatgatgagagattggagatccttactccattaatgatttattatacccaagaagagaaagaattaaaattgaaagaaatttctgtgttacaatttgaataactctgtgtctttgatgatatatttgttaggcatgatttgccctcgaggccaatttatttccttctttcttggttgtttctatttttttaccaactattttgtatttctggaatatattcaagtaatgaatttcaaannaaaaaaaaaaaaaataataaaaatannntttaatataataaaaattaaatttttaataataatttctttatttttaatataatatattttttttttttattttaataatttttttatcttccaatttaaa

SEQ ID NO: 241566 - DNA, 257 bp, Gossypium hirsutum
acgcccacgcttccgcttccacacacttattaatattgctactcatataaaagcctcggggcaggtggccgtttaatacaaatacatctttcttttttcaaacccaccgaaacttgatcaacaaaaagaagaaagcgtaacaccaacataatgaacatctaataaaaaaacattccttggggaaacatatacctaatgaacacaaatatcccgattatcaacaaacctataaggataacacttatccctatccacca

SEQ ID NO: 241567 - DNA, 211 bp, Gossypium hirsutum
gttggctactgaaacaaccgatgcttaggctcaagtagaagaggccaaatatggatggtgggtatacgtgatccgtggaggttattgaggatacggatggcgcggtggttacggaggatacagaaggcgtggtgggtatggtggtggttacagtggacgaggacgtggacttggacgtttatgttatggaggtggttgtgcctttggatgc

SEQ ID NO: 241568 - DNA, 170 bp, Gossypium hirsutum
  unsure (1)..(170): unsure at all n locations
cccacgcttcctcccacgcgttctcccactcgtccggaggaaaccaaggttggagctattgatggctatcaagatgtanagcaatcanatagtgcttctttatgttccgttgctcatcaaccttttattttgggaaattgatggtcccgccattgattttcaacttttac

SEQ ID NO: 241569 - DNA, 391 bp, Gossypium hirsutum
cccacgcgtccgaattattgttaccgatcccgtttctagctgaggagagtgcacttgtgtcggttgaaggtgatatgagtgtgaaagggcacaaggctgacgtgggtgttaatgatatggagggttcggtaggattttcggattcaaacgattttgggtttgtgggtaatgagagtcattcacagggagtgggagatgaggagattccagggtttaatttgaattctgctggactacttgggagaccacaggtaaacaaacagatcaataaattgggaatctttttgggggaaagtttggtacttgaatttatgaactttgtttgtgttaaatccttgaaaaattactgttttagcttgtaagattgatttagtaattgcggcgagtgctc

SEQ ID NO: 241570 - DNA, 214 bp, Gossypium hirsutum
tctttctacctataaacttattcaacccaaaaacaaacacaaaaaagaaaagaaggcttctaaatggacaacctccactcacaatactggctgctttttacaaatacgtagtccttcctgaatccatggttgatgctattatttactcccctcccaattatgattctcccaagaagggcaaatcccctaattaacttttctatcctggtatctt

SEQ ID NO: 241571 - DNA, 322 bp, Gossypium hirsutum
gcgtccgtttctaaaatttaactttttttataatgaaatcatcgcctttctctctatgtgagggtctgttagttcaatacaatccaatattttcttacctacaagaaaaaggacgatgattaataatgatttctgaggctatccttgacttaaatccctacaatactctttttctgcgcccgaaaaaaaaggaaacatttgaatattcccggtgttgaaagattattatcaagactttgttattaaaatgggggacatgcatcccacgaagctgattaggtacaaatagctcacctacaaaaaaaattttcttttttttatc

SEQ ID NO: 241572 - DNA, 296 bp, Gossypium hirsutum
gcgtacgcccacgcgtgcgctttttttttaaacgtaggagcatgactaataaataaatattacgacgggatagacatatcacatatgacatacaaatagaaaggacccctcctatttctttttgtttacccaaatatacatggaatgcgctgcaaaacaacacaccatcacagattatttaaccttacctagctactttatatagctgagctgaaaccttgtgccactccttcttacatatcatcatcatcaacctcactgcaccttgttgcaaccaatgtaggggctgatgttgt

SEQ ID NO: 241573 - DNA, 155 bp, Gossypium hirsutum
agcatctccttattgtcgttaaaggccagatctacgaccactcttcctacaacgtggttcatgggcgtggcggggctgattccatgtttacagggagggatgcgagcatggcatagacacagttggctctttaacctgacgacctgactgctaac

SEQ ID NO: 241574 - DNA, 356 bp, Gossypium hirsutum
  unsure (1)..(356): unsure at all n locations
cccacgcgtccgggaatggaagagatgggaattaagagtgggatgtacactgtctgatgggttctccatatgttaccgggaaaaaaagaagagaaaagaaagaggcaagggaaacctagtagtgcggtcattgatatgcatatttatactttgaacgagtaaattggtagagaaagcattagttgtgtcttggcttacatcttacatttcttcatcaaggaagagttttaagaaaagcaaacatagaattgcaaattatttgctaaaaagtattcttgtttgagttccctcaaaangcannggggaacccgatgataaaaaaaacgccttcgggacatccctttcttgattttttt

SEQ ID NO: 241575 - DNA, 235 bp, Gossypium hirsutum
ctggattcaactttaggacccgtgggcctcaggaaaaaccaagtttagacaacattttaaatcagggcaatgctccaagaagactacgcttgctaatgaaaatttctaacgtaccaatgaaagtgtctgcaggctgttttgatgatggcaaattgacaagtgctggtctcggtgaagaagaagaagttcaatctactctaactgaggtcacagaagcagaagctaccggacagac

SEQ ID NO: 241576 - DNA, 172 bp, Gossypium hirsutum
cttagctataacaggattatccgttggcgtaacgagaaaaaactatgatcaagcgtcgcgtggacggcttctgtggggcgtgactggcggtgcatctgttagcgcgtgaaagtccatcagcatgcgcactaacatagccttccgtagggtctcacgcctgcttccgggactg

SEQ ID NO: 241577 - DNA, 213 bp, Gossypium hirsutum
acgctttcgcagagtatgcttttgccttacgtttattgtagtttgttcctactaagggggcagggctctgaaaagacatgatcatacttaccttttagagtatgaattggctcaagacaaactcgatggcgaatgctgtttgatggatacagttatgcagcttgtgactggataaacagtcgagcttgtgatgagtggacacactttggctgt

SEQ ID NO: 241578 - DNA, 201 bp, Gossypium hirsutum
gaccgcacgcgtcacgcgtaccttaagtatatctattggtgatcctttcttatcaaccatcttctttctaaactgggaatgggaacgctccattttttgttccttttacttatcggacggtggattgatttctcaaatgatcctgtggtctgtcggacaattcttcccttttttcctttacttcttgcttcaataactttt

SEQ ID NO: 241579 - DNA, 289 bp, Gossypium hirsutum
tttactttaaaaacctgaatcttggcttgcttttgcttattagggatgacaaactagccctttcccctgcggatcctctggttttgggggattgcgctttcagttatttggtacttttattatatgagcactactgggcattttgttatgtcataatcttcggggtgattgcctttctatcaaatgacagaataccaaactaaaataaaaaggggagtgcggccgcattataagatgacaatgtacttacgcaagattgcaagactgtggataaactatatgggcactt

SEQ ID NO: 241580 - DNA, 303 bp, Gossypium hirsutum
gtcaatcttaaggcatcgacattacatttccaaaggggaccatgttcgacacacaagttcagtgtacatagttactgctatgacacgcaagtgaacggtgaaccctgttggaccatatgatcttgtaaacaagagcgtatgacctgaatcttatattcttgtgcgaagcgtggccgtggtacacagacttgtttaggcaggcactcacatgaaatgggagctaactgagtaccgtgctagagtgaaccttgaccctcgcttcatataacccgcgtcgcaacaaacgatatagtgcctggagcg

SEQ ID NO: 241581 - DNA, 170 bp, Gossypium hirsutum
gcgacgcgtgcggtcgacacatttcattaggcatgtgactaatgttggggacccaaattcagggtacaaagttactggcatgccacctagtggcacactgctgacggttgagccaacacagcttgtttttatgagggtaggccagaaatgaaatttacttgtgagagtgg

SEQ ID NO: 241582 - DNA, 412 bp, Gossypium hirsutum
gaaaaccctgcactgttcgacaatctgttcctcaggttcttcgatccccttttcaactccgatgacgacggagagaaagaagatgcggccaccaggtatatgactctttaactcctattttcttttatttttttacactgaatatggaataagtataaaaaaacgaagcagaagaaagaacgaaaagaaaaaggaaatctgcaatcacctttcaagtttttgatttttctaaatctctttctttctatttaatatttttttttgtctttgtattgatattctgtgtgtgtcaactttacagatgctgaaaaatggctttatatagccgaaaaaatgaaaattacaaaagaaaatgtggtttgctcttttttctatttttctttttttggggtcgatttttgctcttttggtc

SEQ ID NO: 241583 - DNA, 328 bp, Gossypium hirsutum
  unsure (1)..(328): unsure at all n locations
nccacacatacaaccactcgtcctttaatttcctgtgtaggaaaatgagaagtggggtcgctgatatcctcggcaccataaacccatcgacctgaaaagtcaaccagagaacataagttgccccgtcatataaaatttactttcaagaatcctattagatatcgcatcgtttgcataacactgccccttcatcggcctgcttcaagctctgtaaatttcgggaacgacttcattttattatctctggatgaaaatccctttacacaagatactcgacgtgcctcttttgtaggatcaactgaaagtagtccatgccttcatgccaaac

SEQ ID NO: 241584 - DNA, 336 bp, Gossypium hirsutum
gaagtcgagccacgagccacgcgacccgtacttgtagatccgtcgaactatgaaaatgacttaggcacccaatctatgggtggtgcgaggaagaggcattaggatatttgctgccaatgcttggtaaatccgacgatgaaggatatggccctatgaaacatcgtgatgactacagcgatgattaatattaagagaatcgtcatcaccaccgctgtatggcccaccaccataagcgccatgaagactatgactactagtcatactggacgttccctctacatattggatatctgcaataataagttattaataaatgatcgaagcatgccaactttg

SEQ ID NO: 241585 - DNA, 275 bp, Gossypium hirsutum
tacgtcaccatgcaaacgcaatctgtattctaccaatccttctacattgggtagcgcacgctctattgataatgtacttcccgaaatggactgctcaatatatcgtgtactattttcgaccctctcgtctaatcctatccatatattcgttactactcgcttcatgacactgtttctccatccgcactactacaacccccaacttcttcttctcgaccctttatttttggttgttttcttttactacgactttttcatttaccatacctgataag

SEQ ID NO: 241586 - DNA, 414 bp, Gossypium hirsutum
attagaggaaaacaacttctttttgaaaacagactgacttagttcaacaaaaggtgtttaccaacgcaacgaaaagagctttttccaccagtcttttaggccgggcatcctctttctatccatttcatttcaggaagaggaagaaaggcgaagttcttccatccagcaaggaagactagccaagtcgtacaccccattcttcaacccccccctttttttgccattgtcactactggtacctgaccccgtcggctcaacatttttgcaaacaccgacccttactcaatagggcaatgaaaagaggagaacgaggacagctgactaccactaaaagtcagactacgagtacacattgtatgattgaaaactgccgctgcgtactatccggtgcttgcaggtctgactggagccttc

SEQ ID NO: 241587 - DNA, 282 bp, Gossypium hirsutum
attataggaaaacaacttctttttgaaaacagactgacttatttcaacaaagggtcggtaccaacgcaacgaaaagagctttttccaccagtcttttatgccgggcatcctctttctatccattttatttcaggaagaggacgaaagggcgagttcttccattcaggaaggaagacttgcccagtcgtacaccccattctttaacccccccctttttttggcattggcactacttggacctgaccccgttggcttaacattttttggaacaccgacccttac

SEQ ID NO: 241588 - DNA, 169 bp, Gossypium hirsutum
agtatattagttttggtttgcgtgatttgaccccacactcctccatgcatgccctatttgaagcagtttaccgtagccatgttaagtcaagctggtatttttcaatttgtttagtgggttcacatgtaaacctgatttatcttagttgtcatcttacttttctttgatt

SEQ ID NO: 241589 - DNA, 232 bp, Gossypium hirsutum
  unsure (1)..(232): unsure at all n locations
gttatagatcgcgagctgccgcccttgctttttttcttttttttggctaggcntggggcacagaagaggccaaacaaattagaataaaataaatcattaaatgggtttttgaggtgataataaaccacaaccatatgccattgatgcctcaattgttcctttaatgaaacgtctcaaaagatatctttaccaacttcttgttatagaatctgatgaaaaattggtcctactg

SEQ ID NO: 241590 - DNA, 233 bp, Gossypium hirsutum
cttttaacaacatgggggagaaaatcagtactagacaaagtttgtagcagcagcatgatggaggaacaagtattaaggtaaataccaccttttacaccattggtgacattcgagtactcaaacctaatgctgcaaatcaaggaagcatctgataagcgagcccttattttgaaagctattgagaattatgtgttgagaaataccgatagttaatttgtcttactgaaaaactg

SEQ ID NO: 241591 - DNA, 319 bp, Gossypium hirsutum
  unsure (1)..(319): unsure at all n locations
cccacgcgtncgatggaatgttacttatttgaatgaaactataaacaacatttcttacacgtatgtcaactaactcctcaataaatgtactataaaccacatatcgacattttatttgatttttatactttagatgctattagtattaagcatcggcagaagcagaagattgctgactgagatgttgacgtggcattgggagtcaccaatctggttggtgaccccagttgtgtacgaggcttaccgggtgctacagctaatgatgggattgaaactgggagatgcactcagtgcaccatcatggatgatgcacactatc

SEQ ID NO: 241592 - DNA, 162 bp, Gossypium hirsutum
gcaaattcttctctcttcaatgcatctgctttagcagaaaaaatccagacattgggccatgttgttattgcctcacctgaaaaaaccattttttcatcactaacaacacctttctatgaaataatgattaaaatgcaattacacccaattacggtcctacca

SEQ ID NO: 241593 - DNA, 271 bp, Gossypium hirsutum
ccatttttcttctttggagacttcttttttactttccccatccaacccaacttgatggattttcttaaatttgaacttccctatccaggtttctttaaagatcaaaaggcgcccttcccttctgatttccatttgaaccccctttccgccagccatttctttaacagcaaaagcttatggaatacccaaatgaatctcttaattttaaaaaagaatattacccttcgaattttttgccccaaatcccacacccgactggatccttacttta

SEQ ID NO: 241594 - DNA, 342 bp, Gossypium hirsutum
gccagacgtaaactcattcgtactaacacacatacaacgactcgtaagcattactgataggacttaaccccattcccatcaacacatactaatcacatggctacacattaattcaccccatcaatccgcatacgttacaacaaaaccatcaaacacacgcacaaccaaatctatatcatataattccaaggctaagcgtacaaaaagtattacacgtcattccgccaaaaatgccacgaatgccgttacttacaacaaatttataagatttcactttacgctttatatgtaatcagtaacttatctttgtgaatacatggttgctaattcggtgcttgtgtt

SEQ ID NO: 241595 - DNA, 280 bp, Gossypium hirsutum
cggacgcgtgggtggaaatgttgtttacttggtggcagataagaaaagtaacgaattggctttttccttggctattgctggcgtttatagggagaaaatgtttaaagcttggtagttagatttttgttttgtcgctctactgatgttgttatggtggtatgcgactttgttatctgatgtaattttgtttttattttgctattttgtttgtcttttgacaacagcacagttcgaatgttgcaaaaagaaaaagtatgaagtataactatctggttatttc

SEQ ID NO: 241596 - DNA, 236 bp, Gossypium hirsutum
gacccacgcgtacggagtgactttactttacctaaccacaaccttttcttttattagatgtgatttattgtaaacgcgggggtttattttacgagttcattgtccccttcacacttgaagaaaaaataacggataaaattcgttgaaacgtttccattcttgtatctatacaatgtaaggaatagtaaaaggaagcatttaaagttcgtaaaaaaatcgaaaaaaatagggttggt

SEQ ID NO: 241597 - DNA, 424 bp, Gossypium hirsutum
ctcaactttgcctaatcgatcacaaggagcaagtaatggccattcagagtcatcaccggagagttcaacttgtggaagagatatatcatattcaaggtatacgccctcaatgccccaaaggcagctgttcggacaggtgcaaatcgaccgctcccttggatctgacaatatttgctccgaacatggggatggattcagctgttctaactttgttgacatagactggctttcatctgccggaaattcatgcgatggcgaaccattcgagaggtcactagtgctcacaagctctctagttgatggcccgtcatctgaaaatgttgtcaatggaatattaggcgaaacaaccccatccacctgtgaaaacggatcgagtatgaaagaaacacagcagaaaggaaccaagctatcctttgctgatatg

SEQ ID NO: 241598 - DNA, 315 bp, Gossypium hirsutum
  unsure (1)..(315): unsure at all n locations
ctctggagactatgagaaaatgctgcttgcgttgattggagctggagacgtctgagctgctttcctatattgagttgttggtatgaaaatttagtttgcaatttgaggtgtgagttatgtttgtttggttgggttgtgtgaacatggcttttgtatgccgctgcttccgtgttagaacgttcaaagatgatgtgtttgtggatatatttcccaataatacgagagataagtgttgctgcggttnaaaaaataaaaaaatctagtatttctttttaatttaattttatattattaatattattataaaaatttatg

SEQ ID NO: 241599 - DNA, 400 bp, Gossypium hirsutum
aaataaacataataaatatatataattataaataaaaaaaaaaaaaaaaaaaaaaaaccgtgggattaaattaaaaaggtcagctcctctatataaaaccattcttacatacccaaccaaactacaaaatttcctctattattttctcaccttaaaaaaaactctctgtctcttttttaacaactcctttacttttaaaacccttcctttactcatcctatttttttttatatccacatatcccttttcccctctgcttatattatccattaggcccttacaaatctccctttctatcattttcccttcctttttactttatatttacccccccttcttcttctctttttcctcttccttctttttttttccctttccactacttactgttatccttttt

SEQ ID NO: 241600 - DNA, 343 bp, Gossypium hirsutum
ctcacggcagctcccatggtcattcaggagtaaccaatagaggaggaatcggtaaccgcaatgctgttccaggattgggagtatccccaattctgggaaatgcaggtcctaggataacaagttctatgggaaacatggtaggtgggggcaacatcgggaggacattaagctctggtggagggttatctgtgcctggtcttgcatctcgtctgaatttaagtggcaatagtggatctgcaagtttaactgtgcaaggacagaatcggttgataagtggtgtgctttctcaaggatcttctcaggtactttcaatgttaggcaattcttatccaactgctggggg

SEQ ID NO: 241601 - DNA, 401 bp, Gossypium hirsutum
gccacgcgttcgctaaatattagtcgttcaatatctaatgaccgtaaatgagtcacgtgggggaatatatggaccactaatatacgtacatggggtatgcttggtcaatgttcatggttgccattttatactcataaatcaattcacaaactgaagcattctccttgaggtaccatgttggggctcacatagattgaccaatctattatctgtacattttgtattcacggaactcttcattgaaacaaatatttgttcaatgaaaacttgtcttaatgttattagcagaatttcttatacaatttttttcctttttcctgcccaaaatttccatattgactatgaaaagaagcattaatggtggttggtaaaataaaaatataaaattaaaaagtgggcgg

SEQ ID NO: 241602 - DNA, 139 bp, Gossypium hirsutum
cccacgcgtacgtacacacgtacgttttatatacctatatctcccacaaatgaacgggcggggcgtttcatcacatttaatcaaaatttatcttcttcataaaccagtatatttttatgaacttaaacacaccacatgc

SEQ ID NO: 241603 - DNA, 182 bp, Gossypium hirsutum
cttttgcagcatgttatccttcaaccaaatttattctgcactggcctttggttgttggggggcgggtgagctgtccactatatgactctttttattcttctcttgaaagagtgggcctccccaacaacttttatattattgctttgcatcttgatgcctttgatgtgactctctggtctttt

SEQ ID NO: 241604 - DNA, 358 bp, Gossypium hirsutum
gaaaagttggtgagcatgggtttcagtggtgatcatgttgccagtgtgattcagagggggggggagagcgggcagcctccggatttcaatgctgtgcttgatagattaaatgcacattcctctggtggttctcaaagaggaggatggtaaagggcaatcgcatacctgagttgggctttggatattattcgaataaagggtggtagagttctcgtttatatgttgggagggatatgaatatttgtatgttacctcctaattaaaacttctactgggaaatgttttcttttatttggggttaatttcagtttttattatctaatgcattaacccctcctgttgcttaaaaaaaatatat

SEQ ID NO: 241605 - DNA, 340 bp, Gossypium hirsutum
gccagcgtacgtccacgcgtacgggaaggggacatcatggacttgaagcagcatctcaagagcaaagctggtttatctcgattgataacaagagtaggtaatatagcatataactttaaagcagaggtaacgaggaaaggctttggtattgtatgaagccatcgagatttccagacctatgtttggagggtttagcaaagcaggatctgttgccatttggctttttaaacctgggtttgctttctcccaggggtagcatgttcagggatacctgttctagggttaaagctctttatgcattgtgctgctcatgatatcgcaatatataatcattcctatg

SEQ ID NO: 241606 - DNA, 339 bp, Gossypium hirsutum
tccacgcgttcgcgtttatggaaaatcctttttttctcgacggcaacttgccctagcgcggggaaatagttactatgacggcatgtttcgaaagttctgtcccagcaaaagccataagcaagcgctttcgaaccggatgccgagtttggtcccttgttgccaccccttctcttacagaatcctcttcgagttctactttatcatctttcttctcaagcccttgtccttgtatgctttgccccaacagtggttccgtcttcaatcttttaactgtctgaacctttcttttgttaaaaagccgccgttttataagcattaataagagactgtcaacctatt

SEQ ID NO: 241607 - DNA, 122 bp, Gossypium hirsutum
gtttaattcaataaatgttgatgggttgtgtttccatttcgcaatgtttgtgtcagtgtgattttcatttcattatatgtactgtgtcgttcaatgataaaatttgcttttggttttagttg

SEQ ID NO: 241608 - DNA, 375 bp, Gossypium hirsutum
ggaccattacagatcccattgagattaagaccaagagccatgttcgttcaatggggacaagagttcacggtcgaagaagtcggaaactaaaaaaggaactaacgaaactcttgtcccaaaaccgaaccccgacacaaaaaaagaagtagcaagtttaccattggatagatttcttaattgtccatcaagcttggaagtggatagaaggtttaacaatgcggtttgcagtgatgcaagggatagatcggaggaagacatcgttcgaaccattagcattatccttcgcagatgtaaagacatatgtggtgaagataataagaaaaaggccattgggaagaaatcaatttcttttcttttgaagaaaatgtttgtttg

SEQ ID NO: 241609 - DNA, 405 bp, Gossypium hirsutum
gaaagtgccaaggaagaatggagatttgtacattaacgcagtttcttgtctaacaccagcggggaaagattttatcattacattgtacacatacaatttttataattcatgcctacatattactatcacttctttggttgccatgtaacacattcttctctatttattgtaatgccataagaaggaattcaatctcttaaaaaaaataaatattcgccttaattattaatttattctcgtatataaaccaaaccttccttatgattgatgcatctcttactatctatttttagacatgcatatgctattatggggataatattatgttccatgtacattattaatatttatatatttttattttttttaattttcaatctttaatctatctttactattatttta

SEQ ID NO: 241610 - DNA, 175 bp, Gossypium hirsutum
aaatgtccttcccctttaccctttcttttatttcacttctcgccacctcatccaccagcggggttaatactggatcattaccgctcacaacaaaagcttcattccttacacggaacaaacttactatctgtgacaaagtacacataatcatcctttctcaccaacatttccagtg

SEQ ID NO: 241611 - DNA, 409 bp, Gossypium hirsutum
cagaagttgaagtccagcttgggaaacgtttgcaggcctctatagttaggcagctgaaagaggcagagatggctatgcaatggaccttgatttacaagcttacaagtcgtctgcgagttctactacaatctgcaccttccaaacgtcttcttttcgagtattctgctacctcgcaagactaatctgctatcagttgtttgttttagggcaaacctgctacctgccattttcagggctttgcacaggtaaaagtgccacagtgatgcttatccttcaagtaaaacgaacggtaagagaggtcttagggaaggggtagtagtttttgaaaatgcaaaggtaggtttaattacgtatttcattctttgctcaaaatgaagagcttgtttatatttgaataaccttcattttt

SEQ ID NO: 241612 - DNA, 140 bp, Gossypium hirsutum
atcacgcgttcggattatttgtttacatggtagaccaggttccatacacgtgtaacgagcgggcggtatgactagacaactaagtgcgtaatctgtcatacgtttttttgaaacatgcgtcccaataagctcaccaactc

SEQ ID NO: 241613 - DNA, 201 bp, Gossypium hirsutum
gccacattaaagaggttcccattgatattttagaccaagagccatgtacggtcaatgggtgggaggagtttacggacatgaacgtctgtaaactgaaataggatctaacggaacttttgtgccgaaaaccgaacctattctcataaaatgaagttgcaagtttgcccttgcagggatttagcgtaatcggccatcatgctc

SEQ ID NO: 241614 - DNA, 436 bp, Gossypium hirsutum
cccacgcgtccgcggacgcgtgggttagggactaagggcatacatgaatattcgtttagcacgatgtctactcatggttttacttgttgcacaagtaattaaactcttaaaaggttcgttggttcgttgcagaggtgtcggatcagaactttgttgacgaggaacagggtgaaaaggctagaaaaggatgtagcagcccaaagaagctgaaaaccccggtaaccgatgcttcatgcaatgatcaggtaaaatttaataccattaatcctctatttacattagccaatagtcacttatcttagtccctaagcatcaaggcatttctctcattttgttttcaagttgttccataaggtgaaacccacggagcatccaccggtaaggctccgtttcgaagaaagaaatttgtaatcaccatcctaataccgacagcaaa

SEQ ID NO: 241615 - DNA, 339 bp, Gossypium hirsutum
aaaaaacttatggttccctgtatctgtatgatcctgtttctggcatgaaggaaacttaattgtttcctgtatgtgtagttttatgttattgtattagatagttaatcaatcgattaattagaatctgtttcctgtattaggccatattaaaagccattgtaatgggggggggggagtatttgggaatggatttggtggcaaataaattggtgatttggtgtatgcatttgtatcatatggcattgcaatgaatatgattatgaacaaactcagatttttctcaaaaaaaaaaaaatatataaatataaatttaaaattattataatattattattattt

SEQ ID NO: 241616 - DNA, 221 bp, Gossypium hirsutum
gtacccaaccgtggatatggtaggataagtatggtgtcccttcattactccgaggggggcgttttattcccctgtaaagcttggaccaaaaactttcccgccaccttatggaactgcatctgcctatcccccttgcatgaacaatgggggtggtctaatgggtacagtgactggtggcttcaatgggattactgggaacccacgttatggaaaatcaaatt

SEQ ID NO: 241617 - DNA, 254 bp, Gossypium hirsutum
aaaaaacttatggttccctgtatctgtatgctcctcttggtggcatgtaagaaacttaagggggtagtgtatgtgtaagatttatgttattgtattacatagttagtcactcgattaattagaatctggttcctgtattaagccatattaaaagccattgtaatggcggggggggggggtttttgaaattgatttgggggcagttaaaatggtgatttgatgaatgcgtgtccattttatgggatccaaattta

SEQ ID NO: 241618 - DNA, 445 bp, Gossypium hirsutum
gtttgtgttgttggtgttgcacgtactccaatgggtggatttcttggctctctgtcatcgtgggatgtgtcaccaagcttggttcgatagccatataagctgctcttaaaagggcaaatgttgattcattacttgtgcaaaaagggttcatttgctgtgtacataaaaaaataattggggcaagcttaaagaggagagggctttcactatttattagaaacctaataatttctttgcttacactttttagcataggatttctatgagcagaaaaaatagcctatgaatggatctttcttataatcattctattaaataagtttattattttatattgggaaataaataaaaaaaaagaatttgattcttttggtgctaatttatttttttgttgtgattttggcttttattttacgcttttttctattccagatgatttttactt

SEQ ID NO: 241619 - DNA, 344 bp, Gossypium hirsutum
cccacgcgtccggtgatattattggatcttatcttttgtagaactgcatttgatcactgcgaactgggggaaagcgggcacctactgacatattttacgagaatgctctttaactaggtgctgttcgaataagtcctcagcctcctcaattgaccccaatgcaggaacgctttccatcatcatctctcctaaagagttgacgctttattgcttagctacgaatccttattatagtaaatactaagctctattctctacaagtgtaaaccttattactgtaacttttataacttacccttcaacttgcttatacatataaagcctataccttcatacgttcttgc

SEQ ID NO: 241620 - DNA, 464 bp, Gossypium hirsutum
gtgaactcaaataaaataaataaaatggataaattgtgtcgaatccattttctattggggaacgaggagacaaccaactaacactttgactttactttaacttattagattcagtagtgggtttattaattgcacataatatctcgaataagaagaaaaaaagtatcgcacgatcgctcgaagaaatcaaacctttatttgggtctaactcgattctaagactagtaattcctatgttcttttccttttaggttctacattttttctttcaatattttagagtaccatccttgtagctaggtcaagaaaaacctttggatctaatacagcaatgcttgcatcacgaatattaattgttgcaaatattttattgtttggtttgattcttttatcgaagactatatactataatacttgttattgtacgaccaaccaattccttagaatgaaaggattcgaacaaa

SEQ ID NO: 241621 - DNA, 439 bp, Gossypium hirsutum
  unsure (1)..(439): unsure at all n locations
cgttttctcttcttcccatcgaaaacttccacaatcattcactcttccgctcgatcgttcgtcaaaatagaagaagaaaatgtccgaaaggcccaatcgccatcaaaggagggcatcgcaaagcgtttttatgtccttcgacgacatcacggctcccatatccgataatgctacggctaataagcccgtaccatccaacgaagcgccacctcctcagccggttcgttctccggttccagctgtggcagcggcggagacttctgatattgtagccaaagacggcgagaaaccagaataaatgctataggttaattccgtcctattatttgactatttcgacgttgctntgtcttacttttatgttatgtttgatcggcttcacgacatcaaaaagagaatgctcgtttatcagntgtcataaatccatgttgaattctgc

SEQ ID NO: 241622 - DNA, 409 bp, Gossypium hirsutum
gtacaaggcgttcgaaaaaaaaatcaccttctagatctatgctgatgcctatatatcgcggcttgcggaactctctgaccctttgagtccccgattacgggggttgaaaaacaaactgtatagccgatgacaactgtccttaatgagccataacaccttttgatgtgatgaatgcactcactgctgatctggctcgaatgaccgcggtacatgaggtatacagccagctggggggatatgaaacactcctccttaggcgtacagaagcttagaaggcattcgtatgacgctaggacttgctctctgatgtaattgccttgcatacgtgaggagaaaaccctagggctaatttgtttaagcatttgggcttattgtgcctatgattggatcaagtatatgtatagtcatt

SEQ ID NO: 241623 - DNA, 239 bp, Gossypium hirsutum
caaaacgtagatttaataatacctttggttctattttttctttttacttctctcaggaaggtggtcgaaatctgttgtgaagttgaagtaaaaaccaagctatatgcatgcataagccttgcctgcactgctttcagaggttcttagtatgtaccctttttttatgtgttgtttttgtggactatggactaaattttaaatttgagtgactgtctaaaaactagaatacctagttattt

SEQ ID NO: 241624 - DNA, 266 bp, Gossypium hirsutum
aacaaggcctaccttctagcctaagtttcgcactctcggtaagtttgagttctttgtacaggacattaattctgatatcatattctatatatatatatatcttcttttttgtttcccttttgtgggaattttctttctccttcaaaacatggttaatttatatatgaacagtagagattttatgaaagaaactaaacctaatgcatatatagagagttctagggttaatttttaaaagtttcaaattgatcccatccaattgttac

SEQ ID NO: 241625 - DNA, 181 bp, Gossypium hirsutum
ccaactcgaactctcatgctttattttgtacaatatgaacacttccttggctattacggaatcctgggtttcaatggatggaaccaacgcctcctttccagaaaccaccaactacgttcttaaaggaccgtaaccgctttcactttttaagactcctaacttcattacaaattcaacatct

SEQ ID NO: 241626 - DNA, 374 bp, Gossypium hirsutum
ccagctctagtcctaatgctctaacttgaagttgaaagtagcctttttgcctattaccaaagcctctctttaagtggaataaaggaacttgttcactatctatcccaccaccaccggcattagtgctgtctagttgtgttcaatgtttgagcctcgtagctcggtgccttattaaggatgtggaaaagagttggaaataaagagactaatataatagagaataggggttcttgcaggtatccatcaatcccgaaacgacagcccctgcaagagaagagaataagcagctatttcatcttctttttgcgtgatttgattctcctgatcccggtagaatcgtattaggagtcgccctactgagattttcaatctga

SEQ ID NO: 241627 - DNA, 290 bp, Gossypium hirsutum
ggcgagcacgcgtccgtaaacccctgggactattttgacgtcggttttccttattctgatggaatacaccccagggccgattccgacatcttgcaatggcatgtcttggtgcgtaaccgtctacgcgtcaccctgttgtgctttgtcggatcgccgggcggcatcaacaagaacgatctacgaggctagctgtagaaaatatgatgaactctttcgttttatggaaacacgttatttgttaaggtacttgggggcttcaacagacacatgcttgatcctggaaacagaca

SEQ ID NO: 241628 - DNA, 328 bp, Gossypium hirsutum
cacacacttacacccactcgtccgcttggttttagttatggagtacaccctttcacaaatgtggtcttacattgacctctctaaaacctctacatttgattaacacctacacacaattttaatcatatcaaaaaaaaattaaaaaaatttcttataataacaaacgtttttaaacaatttattttttttttttaacaaaataatgattttttttttttttaaagaaatttacatttttctcttttattttttaaaaatttgcgcccttcttttattaaatattttcctttctttataaacttgtagtttaaaagctttttttttcttt

SEQ ID NO: 241629 - DNA, 204 bp, Gossypium hirsutum
gccacgcgtactgccacgcgttctaaccggctctgatatgagacgtatgacctatgaagactctgggcgggtaacgaacgtatcttacgacactcggcatgctgacttgcatgatctttttggaccatttggtgctttgtcacgtttgtatgccgctattgatcagaacacaggcacaagtggaggcgttcgtgcttgtcaact

SEQ ID NO: 241630 - DNA, 452 bp, Gossypium hirsutum
gcagcaggagcggttaagctttgatttgtacaatattatcagtggcttggctttcactgaattttggctctcaagggatggatcctacttttctcttccaggtgacaagcctgcgttcttggaggagtgatgacgtcttcattatttatgactgctgcattcatgacaagctcactgacttgatgtgtctcacggcttgtatgatctacatggtctgatggaggaagagatgctgttgtacgtttgacatgacgggactatgagtaattgttactacaatctgcacctctcctcatggtgcttgttgtagcggtgggattctgtgatagagctgattggcttgacttcttgaacaccgaagatgatcagaatgagaccaaggcactctatccatcggaatacatttaatattgaacgtctataaacatcgattgagtgcagttcttaaagga

SEQ ID NO: 241631 - DNA, 213 bp, Gossypium hirsutum
  unsure (1)..(213): unsure at all n locations
gcaatggatttatagctgcagtctttttaacccaaatatgaatcacttacgcttatatgattcttggggagaaagggatgggctcttcctttctggtacagttcaccgcatttgtagaatagaaccaaactgtccttgtcacaaaacantattgatgatttattcattatagtcgcagatgttcacttcattaaaaacttacagcataattgt

SEQ ID NO: 241632 - DNA, 230 bp, Gossypium hirsutum
gtaaagcaaactgtcaagcgttgtttttagctgttttttaactcgcatatgtttggaggaatctggggttgaaaaggaaggaggcttccatcctagaactggttatttaacttcctgtcaagaagcaaattatcctttataccttttatggacggacttttacattagaagagaaatacttgttactcttcttacaatcctaatatcaaaaatgactttttggaaggaat

SEQ ID NO: 241633 - DNA, 330 bp, Gossypium hirsutum
cttgcaggaaaggttcagcgaggtactgtcgcatgtcaaaaggcccttgacatggactgaattctggctttcaagggatggagccttgtcagctttacttggtgtgataataggtgttcttgcaggcaagaaatttttttggtaatttataggtactgcaatcaccagcaaggcaccaacttgtggtttctaactggttataaatctagtctgttcttgatgaggaggtgatgttgttgtagttttaaataacagcaaataagatgaattatgcttactcctgccaattttatatttaagaattcactactgcacctttcacttaaaggt

SEQ ID NO: 241634 - DNA, 241 bp, Gossypium hirsutum
  unsure (1)..(241): unsure at all n locations
aaaaancgggccgacgcacgcgtccggtggttccaatgcccttcttctccaccacactactataaaactattgaccccaaatcccctgtcattatcaaaaaaaggaacactcttgctttctttatcgcttataatcaataaagttgcttttaaaatgggtacaaaaaccatgtattagaatttcatcatcactatcaccaaatgtagaacatttgctttcttgacggggtcttttcaatct

SEQ ID NO: 241635 - DNA, 354 bp, Gossypium hirsutum
  unsure (1)..(354): unsure at all n locations
cccacgcgtncgcccacgcgtncgcttttctccctttttttttcaccaaactcctccggcgatgccatatttcacgtttctgttttcattttgtacgaaaatcccatcctaaattacctaagaagatacaatttttgctccactcttttctgtcccctgttccttctgtttaaaccctgttttcctcctctctttttttttttttggcttgttcatcagcattttctctgttgctttaactttttgtttgatatccagattttgttttccaattttcgatagttttcagaactacccatatcggaatttggctccttttttttttggttgtgtctatgcctctgatagaggtga

SEQ ID NO: 241636 - DNA, 205 bp, Gossypium hirsutum
attttatcatcattcatgccatgccccatcttttgtgattgatctgaccacagtttacatgtgaatgttatgctgccatgttcgtacatttctgcattttgttggtttcatgggaaaaaaaaatcttattcttttatcttccatgctttcaatgagttttctaaatgtgttgacattgtttacgaatgtgtttgttttttacatg

SEQ ID NO: 241637 - DNA, 450 bp, Gossypium hirsutum
gcagctctcttcgaaagagagtatgctcttattgatgcagacgatggagtaaggagagattctttcaagccgagagtttggacagttgaaaaagaaagggcaccctctttagaagagtttgatcaccaaagaggttttttcaactattcattgaaagggggagctttacccgctaaagacttagaactcgaggggagacgaatgctaagatgaaggccagtctcgggaatcagactcgggaagaataggatttttttccttgggactttgccacccataacataaatagaagaggaagcttctgccctttttccttcttttgagtctacgcacttttgcttagtatggtggttatatgcttgttaatttagtttaatggatcttctcataggtagctgcctgtaattagcgaccttcctcttttttacaagcatgagtaggacttctagt

SEQ ID NO: 241638 - DNA, 318 bp, Gossypium hirsutum
gacgagatatcttttatatagagctacctacaattaattgaccggccgtcgacaaacaacggactgactgaaaaaaccctgtagccacctaaattaatttgcatgaaatacatctttctttagctagctggagtaataaaaaagaggcacggatcgatcgtccttacaaacaggtgggctgaatggatagtgagagggacgctctctctagccattcattaagcgcggtgtgggtggtacttacacccagagcgactcacttactagcgagctagctagcgctcgcttcgtttgctttccttcctttctttctacgca

SEQ ID NO: 241639 - DNA, 454 bp, Gossypium hirsutum
  unsure (1)..(454): unsure at all n locations
gcttatattggaattccgttctcaatttatacagatataacctgctacattctncatgggtagaagccgttagtctatatgatggccataaattatccaccgtaacttccatttgggattctggctatagtgcaatgaattcttggacaatcacacattgctgttccatccattgacaatggaccttcttgctttgtgaaaaagagggcttaacctttctctctgatcaacaataaacgtcttatttaagaaaccatgcttatacaataataagggagggattctaatccgtttgatccgcagctaaacattgataaaaaaaaaatgaacttcgcttattacaaatatattatcaatttaatagtatctttaatactagcttaagctgcatttttatcctgtttagttaacaaggtgtatcttaccttttagtatcctactttttctttattaa

SEQ ID NO: 241640 - DNA, 235 bp, Gossypium hirsutum
gacccacaccttcgcggacgcctgggccaacacaaaacatttaatccaaccccagcttcacctgctggcagtgcgttctaatatttggttcaacccatttcattgttaaaatgtagctgtcaatgaagggttatttaataagagagctgggcaattaaggtggtgtaaaaacaatggctatgtccgtgtgagaaaagggcccctcaacttcacgatattatatatagttatattc

SEQ ID NO: 241641 - DNA, 416 bp, Gossypium hirsutum
gacgcacgcgtcctattgacttattattttttgaagcattttatttattgcgaaacaccaggtcaaaccgggggctggaccttaattcaacaagataagaacaagaagaagcatcttgagaagcctgcccaattcgatatatggagctcaatcatatcacaaatggctgaggagtcttctaagtcagttccagatccgtatgttcaccctcttgtcaaaagatcagccagctctttaagcgagaaaagccttgaaatctgcactgagagccttggttccgaaactggctacaatggcttctcttcataccctccatcagaaacgagtgacatgcaagaagaggacggtcaataagacgatcaacaacttcaacaccaagagcaagaaaagggtgggggagctcaaaaatgttaaaa

SEQ ID NO: 241642 - DNA, 420 bp, Gossypium hirsutum
ccggaccggagaagagggacgagccaggcgacgcgctacgcccacgcgttcgaacacacaaagtgacaagaaagatcagaaagaagggcgcagcgagggaaaccataaggcaacaaggccagaaacccgagacacgagcttcaaggggcaaagcgcagaagaccccacagtgaggcaaacggatgcgacccaagcacaaaaaaggggggcggaagaagctaatccaggacctggaagtaacagggagatcaacacacgcacgaaggacccgacaatgcaatatacgaagcaccagaacggaggacaggacgacaagaattcgacacacagttagagaatgaccgaaggaggacaccagggggacaagcctgagaaaatcagctaagacaacaagaatgaggcagcagcaggtggaggaag

SEQ ID NO: 241643 - DNA, 390 bp, Gossypium hirsutum
taaaatcgtgggcgacaatctaaactgagggtccgagcggcagcttatatcgcctgggggggatgacatggttccctacccctctactgtagctctagccatacacctttggtagctcatcacactgtcgtcaacactcgtagactgttcgacagcgacatcgataccgcattcatgcaaactgtatgtattagaagccaattgcttaaaaccatcatgtgcttaggctttttgccactactcccttcaacgggcagacataattaataacatgtaatcctctatgggccatggcattattatttatttcctttgagagaaagaacatgaatttattcattgataaaatggaggatcctacgctttccttgtttcatagcttcaaacctt

SEQ ID NO: 241644 - DNA, 281 bp, Gossypium hirsutum
ggcagcccctttaggaataattgatgtttatacgggcgttaaaacggttgggttcttaatggacttaagatgcttgcaaactttgtcatttgttcacgcagtttaagaataattgctaaaattttccgctttcaaaaacaaggttgactagaaagaacttccccctcgggtaaatttgggagaaaaactgcgctccatacaggaggaatgtgagctcaaccggcactccaaagaatgatgtgaaaatgcttaaaacccatataaaaggatcaaaagggggg

SEQ ID NO: 241645 - DNA, 247 bp, Gossypium hirsutum
ggagaacaggtgcgcacccaaggggggaaagaggagcccgagacgacaaggcaaaaaacaaaaaggggcaaggggacgctaaaggcaccgaaaagaccatctctgggcaacctgactgaagaacaaaacgcctgaacagaggggacaaaaaaagccatgcgaacacaagaaaattgaggcactagggcacgcccaccctgatcgcatgatgggcgaagagcacagcgcaggattagaagaaagcaag

SEQ ID NO: 241646 - DNA, 138 bp, Gossypium hirsutum
atgaagactgggtcccgatctctcatacgggtccaaactgggccccttcaactgatgatactatatatatgcgtctaccatgaatatgttcttcaagtgccacattgcaatgattcattatcaggaacaggtgcaact

SEQ ID NO: 241647 - DNA, 284 bp, Gossypium hirsutum
cacacgcgtacggatggctacatgtacatattggcgggggctgtggtagctcatgattaacttactcatgctgataaggacaaggagtacctggcggctccaagtcagatggctggagccgctgcccctggggcagctgctcgtggcggggctacatctgatggtgccgctgccgagcaggaaaagaagaccctacactgacaaaattctgatgacgatatgggattgaggctctatgactatacatattagtgtttacgcacaaacatatatgaacgtagaca

SEQ ID NO: 241648 - DNA, 414 bp, Gossypium hirsutum
tgcgcacgttcggcttggtgatttctgatcagggctgtggatgacggagagaagaaattcaaccaagctcggttgaacctgcgaagtgacatagtgactcatatgatggtggtctaatgcctgagcctctaattatagacgcacgtgcatggattcacgagatttcaactgttagtgtatactattcacagaaaccaccttcaacggagcggcctggtcaaaatccggggggtaagaagaccctgatgagctcgactatactgcgactgtatcaaatgacattgagaggtgtacagataagagggagctgtttggcgagattgatataacagtccttgtaacgttattatactaattactagaataggtcgcggagctcggaccatctgtatcgacccaaggccgagttttggc

SEQ ID NO: 241649 - DNA, 177 bp, Gossypium hirsutum
tcgcccacgcgtacgccttactttagatacactgcctttcttttgggggttctttctttatggtgtgttggtacaaggcttttgggtcccacccacaaaacccacccaaaccaagttttccaccaccaccccaaagccattggccgggaaatgtaatggggaagtcgcgggttatgt

SEQ ID NO: 241650 - DNA, 317 bp, Gossypium hirsutum
acgcgtgcgaacaaggtctactttaaaaactcagtgctttttctatataatgaagagatgggttatacaggggcagttccaatgagagagagcccatggagaatgccataaggggatcatcggctacctaaggctcatcgttgcaactgatctatctgaaagatgttatccaaggaggaaccaacagagccatacacctatttacagctggatcccccaaatagggaggtggagcttgaatgaaatgcccttttttgcactttcttctataccttgattgtagcttgtactagaggacacttttcatattcatcatt

SEQ ID NO: 241651 - DNA, 357 bp, Gossypium hirsutum
ctttcaaatccaacaacttctcgtggcctgattagtcctttacatgatgagagattagctttcaagtttgctcaatataaacccgagtctggacgaggtgcagatggtagggaaaaagcattcggcagaccggaaagaattagatccacttcattagtgatggatgcagtactgccggaccaggtgaattcggtttgtggcttatgtcaaaagcatttgagacggaaaccttatattctcgggaacaccctgccttctggtgaattctctgttgtggcagttctagtttgtggccacgtataccatgaggattgtttggaaaagagaacgagtttcgaggagaggcgtgacccgcgg

SEQ ID NO: 241652 - DNA, 312 bp, Gossypium hirsutum
cccacgcgtccgcctcactttagatacactgcctttcttttggtgtttctttctttatggtttttgttacaagtcttttggttcccacccacaaaacccacccaaaccaagttctccaccaccaccccaaagccatcggccgggaaatgtaatggggatgtcgcggtttatgtgtataatttgccggcggagtttaacctcggtcttctcgatgattgtagccatttgaatgtttataccaatatgtgtccgcatgtggctaaccatggtctatgtcagccgttggacaacatggaccttcagtcgagtgac

SEQ ID NO: 241653 - DNA, 207 bp, Gossypium hirsutum
cgggacgacccacgcggtcgcccacgcgaacgcctcactttagatacactgtctttctttaggtggtacttactttaaagggtgagaggcaagtctgttgggtcccaaaaacaaaaccgacctaagaccaagatcgtcaccaccaccacaaaggcatcggacgggaaatggtgtggggatgacggggtttatgcgtataaatagccg

SEQ ID NO: 241654 - DNA, 289 bp, Gossypium hirsutum
gaccaggacggattaacagctagagggtcgagtgcttcgaccataaaaaactttaggcattggctcaagatgccccgacttaggatgcatgcttcgaaacaccccccgctctgctggaatggacatatgacttccaatcatccgagatgatgactatattcactgccggctggggcaacctgacgaactaggcctgactgaacatttatgagaaaagacctataaactgtcttaccagatcaataccaaaggcgctcgctttgagtagataacctcagcaaaccgcgaa

SEQ ID NO: 241655 - DNA, 274 bp, Gossypium hirsutum
  unsure (1)..(274): unsure at all n locations
naaaaacaatacaaccgtgtgtgggagcttgcaagctgccgaataaggctgacaaaaataaaggcaacttggctgggaccctgccagccaaactgtaggcgtccacatcccttacaagatcagcgcttccactaactgcaaaaatgtggactgagatggatgaacagagggctttgcaacagcttgcaggaaatcaactttatgatttagaagaacaacaacattactgcatatggctttttggatggaattttcagaatccaacactcttctc

SEQ ID NO: 241656 - DNA, 396 bp, Gossypium hirsutum
ctgtcttttatgctgtcaaaattaaaggcaacttggctgagaccctcccagccaaatgtattgtcaacatcccttacaagatcagcactttcactaactgcaaaaatgtgtaggagccggaaaaacagagggttttgcaccagcttgcttgagataactatatgattaaaaagacttagaagacccccgcaccccgattttggggtggaatttttttttcccaaaaaaaggcttcactttagtgccccgcggctttgtttttttggaggaagggctgggctcttgggggtggcctctaaataaaaaaaccctccgcctcggccctttaatgttttaatgaattaagggtccttcttttgtggataaaacaaaaaaaataaaacaaaaagggggggg

SEQ ID NO: 241657 - DNA, 281 bp, Gossypium hirsutum
cacacgcagccggatgggaagaggcgaccctatgaagcacgtctgcaaggttagatgaacaactcctatgcctagtctgggtgcctactggcgatgcacccaggcctgccatggttggagcgcttagggatttttcatagaagggatattgtgagatctatacgccaaaacttccgatgcgatgaacacaaaaagcgatgcatatcctgctctagcatgagactggggatgggacgctttcagcataataaacagtatcgtcaaatcgttttcaaggaacc

SEQ ID NO: 241658 - DNA, 359 bp, Gossypium hirsutum
  unsure (1)..(359): unsure at all n locations
ccacgcgtacgncgaagagcgggcaaacaagaagagaatgctttctccggaggaccagactatgacgagccggagaatatgcccatgggcgaagatataccctacaagaaagagaagcatgagaacggggaagctgaacttggaaagaaggaaacgatggacaatggacaaccaaggtctcaagcaagcctggaagaacttagccgctctaaccaggatgctctgcctgccagcctagctgaaaaagaaaagcaaactgaacaggctgctacagattcgtcacggaaacagaaaatggagcacaacttggaagagcaggaaacacatccttcaagtggtattcaagagtatggtgaaag

SEQ ID NO: 241659 - DNA, 366 bp, Gossypium hirsutum
  unsure (1)..(366): unsure at all n locations
aaggccggaaactgatatcgatagttattaatacttgaaggtgtgctctccctatgaataaaattgtctggttcttgtaccaaatctaatatgagctcatgatatctaactattcttgtttttgagctcatgatttatagattcatgttgtactatgcattctgggatttttcttgaatcttcgcacttgcntgaaaaaaaaaaaaaaaaatataaaattttttatttataataataatttaatttttaatatttattttttttttttctataataaatatcatttttcttttatataaatggggggcgccctttaaagataaaacatttctaccgccgcctggtgaagaaataattttttttttt

SEQ ID NO: 241660 - DNA, 235 bp, Gossypium hirsutum
caaaaatggctttagctgggtttttcttgttgggtttactttcaatggtctcagctgttcatggatatggtgggggaggaacaaagcttacacctcactttatatggggggagtgaggcttaacgcacaagggggggcgcttggggttatggaaccctatagccagggatattggacaaacacaccaacttttaacacacctttgttcaacaatgggcttaactgtgggtcttgc

SEQ ID NO: 241661 - DNA, 248 bp, Gossypium hirsutum
gttcctgaattcaagtctcaacagtcgggcaagaactccgtctctgcttctactccaattttaaattcaacttcgcttgctaaatcgtcgtcaatcaatacaacatatgctgcagtaacaaataacacgagcggtggagataacttgctagcaagtgtaaagggtggttcaccgagtagcatatcggaatacttgatagagacgctcccagggtggcacgccgaagattttcttgagtcctcttcacc

SEQ ID NO: 241662 - DNA, 278 bp, Gossypium hirsutum
ctgtgtgcttagatttgtagacccatttcctgcttacaaatcttgttgtgcatttctgggggttaatttttaagaaaaagaagatgtcaaaagattggcgaattggcgtctcaatgggtttctccaaaggaagcaaagcagctctttaatggtcaatcgacaatattgttgtcaaaggggataccctttttcttattcacgtcaaacccaatctgagcgacgcggtttcggaccctttttggttcaccagaggctcaccttttgtttcattttctggg

SEQ ID NO: 241663 - DNA, 252 bp, Gossypium hirsutum
cttttattaattatgtatatatattgacaatgtgtttagttccagtgagccaatgatgatataatccactgtggatgaggtgcagtggagccaagaacgaacctacttggcagaagctgcaattcaatgcgtttaatggattcaactgatgctgcgtctcttaattaaatgcttttaacttggtgtttcttgagcatgggtttgggtttgattgagtttaactataccctataccttttgctattaatttcg

SEQ ID NO: 241664 - DNA, 391 bp, Gossypium hirsutum
gaaacaatgtgtgccggctgtgaaaagtattataagaaaactatttactgggatttgattgtgttctgaagtggaaatctgatgatattttatcttggaatggaaacccttttatgtgcctccaggtagagggaagaccatgaaaaaaaaaaaaaaaatataaaatgaaacaaacaaaagatcatacataatctaaaaataaataaaaaaaaaaaaaatataaaaaataaaaaaaaaaatataaataaaaaaactggggggcccgttttaaagaaccaaattttccttcccgtgttttggaaattattatttttttttttgggcaacaaaaataaatttaatgggccggggtttaaaacggtcgaaaatggaaaaaccttgggtttcccaa

SEQ ID NO: 241665 - DNA, 164 bp, Gossypium hirsutum
aaacaaaaccagaaaattgccagtttggcttaaagctttataattgcatgcatgcacccacccacacacacatacatatatacatacatatatagatttcaaattgtggcatatcacattacttgatgcttggccacaatcaactataactaccgttttacacc

SEQ ID NO: 241666 - DNA, 395 bp, Gossypium hirsutum
gttatggtttaatacccatgttagacttaactggttccatacctcaactattgtaaggcgctgttgaaaaatatgaatgctgtcttctcctctttggcgacatctagggaattgagcttccaccacaaccttcttgagccttatattgtcaagggacggaatgaaattccatgcaaatcaccataccgtaatccgcatttttgaggggatgtataatttccatagtttcctatgaaaggttttaatttcagcatgttaaggaaaattattaggatccaagctagtttcatgtaatagtttatagggactcgtaacggagaattcccctgtcaactcccctctccatacttgaaaatcctcgagtgttgtctctgctagtgaaatctttaagattt

SEQ ID NO: 241667 - DNA, 377 bp, Gossypium hirsutum
ttttttttttttcgacagaaataaggggtatattacattgattatccatgataggagaaattacagagaaaatctggataggaaattacgtgattcataatggaagaagaaaatgaaaaagaagcaaaccgctaccccttcttcggcagagccctaataaattcttcttggctatacaaaagttgtagttcctttttttttcctttttgccatgaacaatatcgaagaaaagaggcagtagcaccacaaaataaagactggtctgatctctcttttcctttcggctatttacaatgccaaatatccaaaccagaatatcagatacattatcaatatttacaaaaagtcaagaagaatcaaggccaccgatttttgtt

SEQ ID NO: 241668 - DNA, 124 bp, Gossypium hirsutum
  unsure (1)..(124): unsure at all n locations
ngcgagcgtacggttgatacctaatgtaattgtgcagaaattctgtgcggtaaggttcagggcataccaggggattgtgcagcttgaacgcaagacactaactttctgtgggagagctgcgaat

SEQ ID NO: 241669 - DNA, 176 bp, Gossypium hirsutum
ctcgattatggcggtcgggacggtacatcttattaaacacatgtacgccgtattaatcccgcttatgctggggcataaagagatagttcccagggcgctgggctttgatctctgaccaccaatgggagggcaatactcgaactgtctctagtggctactacggacatacctgatct

SEQ ID NO: 241670 - DNA, 458 bp, Gossypium hirsutum
gaacgcgtgtttgcgaaacgattctcgcaacacgtccaagcttccattgacagaatcaggggcggtaatgatgcccatatgccctgactgatcccacatgaccacatggcatgatcagcattctccggatctttcttgcacacgggagagacaatttcaacactcaactttctacatgtcacattgcaacaatcacacacatacttatcaaacagcctccatatgtgtattctgatttctgctagaatgcgcatagtccataatgatttgtcaaattcatcgttgtcatcactattatggaaagtgactgtagtcttctatatgtgctccgcagaaagaactcgatacacacttttcattgtatattttcccgacccttcatatttccaaaccatcaatgtttccgaaccacccctagatctatgaatgcagaaaatacgcacttgtgtagctgcatt

SEQ ID NO: 241671 - DNA, 156 bp, Gossypium hirsutum
atcgtgtataacgaaaatgactgtccatcttttcaaacacttgtacgccgtatttatcccggttatcttggggcatatataaagatttcccagttctctgtgctttgatctatgtccaccaattttccagcaatacactaactcctatctaacaac

SEQ ID NO: 241672 - DNA, 264 bp, Gossypium hirsutum
cccacgcgttcgcccacgcatacgcttggttgagtgggtgttctggaaaaaaaaaaggcagaaaaaaagaaagcaatgaacaatggaaatggtttttattgtggttcaaagttttaagctattgtataatacaacccaaaatacataaactaacttaaggaaccgtttgtgtcgaagattaagaggataatctcttggtttttttatgaccatttttaataccttctgaacatacacggaaagcattgaatcggtgaaaacata

SEQ ID NO: 241673 - DNA, 450 bp, Gossypium hirsutum
cccacgcgtccgatagatgttgttgttaggatctaattttagctgttctttgtccccctttgtttcattactaaaaattctcgaatctccagaggaaatatctttctttttttttattaagaacaataaagagagagaaaaaagccaaaaccatcagtgtcttctttaatgctcaacatagttttaagttaaaaaaactactttcaagaggttctttacagttcttgccctcaatgtgatcaatgatggtggtttagaagtcaatggttgctcaacctaaagcaaatggaaaccaatggtactaatcaccattcccgtgaaaatcgcccttcaacgggttcaaataatgctaacagaggtcaatccactaaggaggaggtttttgttaaccaggctcaaatgactttgcatgaggttagaagacagtgggccggggatcagtctcaaaaa

SEQ ID NO: 241674 - DNA, 392 bp, Gossypium hirsutum
cttgagtgatgaagtataagctggactatttttgagtcgctgatacattgattaaacaaaggtagaagcatgcagcagagcgatgctatcataaacgatcatgctcactatatgacttgctataccatagcgtgggtgcatgtgtatttttgggaatataatgcatatgcagatagatgaaggcagtgcttggtatagctagctagctatatatatatactactcttacattaccatacgaacagcctattcatagactaattggattaagagcatgcctttcttgataatatacttgtgccaatagtgagattgaaattagcatctcgataatattcgttgctcgtgaatagaatacacttatataatgtcggcctatgacttgatgcact

SEQ ID NO: 241675 - DNA, 367 bp, Gossypium hirsutum
ctcacgcttacgtttagcaaagaccttgactgcactcgggtatcgagggttctctaagtgggggagggatgggttatgccccgcaaatcagactggcattacagcctatgaatgccttttgtggaaacactcctaatagttcggccatgtgtgcaatgcatgcaagctattttgcctcaaaagagactaaagcagatgataattcaatgggtttacattccagaaatgcaaaggcgtcgtacccagatttagcattagcaaatatgatcatgtgtggcgagaaatgtaaagattgaactgaatataacacataccttgattggaaagttcgagttgagtagttctgcaaaaaaaaaaactcaatgcc

SEQ ID NO: 241676 - DNA, 338 bp, Gossypium hirsutum
acggctaatcatcatgcacatcttcttgctggcttttatcgggctaaaaaatgggggttcataggctcttaggctggcgatagcctacaccctctgttcaaacagtacaaccctcctcctgatttacaaggccatcgtataaactccttataacgcagatagatctgaacattatcagaagattagaaagatacatacacatccaacgctcattaacctcgtcatagctcacacctagatcctatgaaatgtacttcacatatatatatccttagaccctgatataactttacagaagttccacttacaaatatggaaatccttcagtgccacaatta

SEQ ID NO: 241677 - DNA, 286 bp, Gossypium hirsutum
  unsure (1)..(286): unsure at all n locations
ggactcgggattgtcgaagtcgaagcctacactatcaaagcccttttggtacacttttggttgaactctgaaaatggcatgtataggactaccctttttgttgttggtcatgtactctttggttttgtataaatttggatagccatgcgaaaatggcttatatacactttgagcatagcattataatcgttttgtatgttgttcaaaaaaaaaaaaaaaaaagaaaanatataaagcatttaaaattaataaataataaaacataaactaaaatggggggggggct

SEQ ID NO: 241678 - DNA, 140 bp, Gossypium hirsutum
gagagagagagaaaatgacagcttggctgtatacgtccttgctgttgcagtggcttctgagagactagagagggctcctgcctttatactccatacttactacctgtgaatctagtcactgctactggatgggcacacca

SEQ ID NO: 241679 - DNA, 285 bp, Gossypium hirsutum
tcggccacgcgtgcggtcgatgccatcccgtggaaccaccgtttctttaaaggtgaggaccagagttgcattccgccaatctgtcgtcgccccttacgaaaacttggacgataaagacacgcagatcccaggatcggaagaagatcgacaagcacctcacggtgaggcacaattctcggaaaaagtgtctgttaaagtttaccacttgcctgggggctatacaggggctctcctcaccgtggacagagacatgtgatctaaaagtcgatgagtggacaggctaaa

SEQ ID NO: 241680 - DNA, 357 bp, Gossypium hirsutum
ccaagatatgtttggcatgtgcctgatgtaaatggaccggcattgcagcgggagctcagggctttctacgggcaagcccctgctgtggtggaaatttgtgtgcacgctggtgctgatgtgcccgatcaatataaaccaaccatgaggttagatattgggatccctactagccttagagaagctgaaatggtagtctgatccttgaatgagttttgcgcattatttcgtatcttcatttattgtaaattagttcatcagacggttgtagagcttgcttgcttataccatgcatcaaagcactattatgaattcttttacttttattttactgaataaccatacgtgattatatgattg

SEQ ID NO: 241681 - DNA, 415 bp, Gossypium hirsutum
cccacgcgtccgcccactcgtccggtttttttgccttttcattccgttcttaccatatcatgggcagttgggttggaatccgcgtgatggttcgagagtggtttcaaatattcttcgcatctatcttcggccttgtcttagaagtcccgcgagactaagttagtggtcgagtcgtttttggtaattgacacccgtcgcattagtttcaattcatatgttaccattcatagtgaagtagccctctttttgatgtctgagtgccttattctatctatcaaagtccttcctttatctatagctcgggtcagtcccccatggtctgctttgattttctcgaacagtgccggtccgcatcaggggctctcgtgcgagccatgcaacgttctcaggcaggaactgctcctttccttgagct

SEQ ID NO: 241682 - DNA, 340 bp, Gossypium hirsutum
cccacgcgtccgcccactcttccggcttttttgcctcttcattcccttcgtgcgatatcgtgggcagtcgggttggaacccgcttgatggttcaagagtggtttcaaatattcttatcatctatctcgagccttgcctcacatgtcccgagagactaagttcctgctcaagtcgtttttggcaattgacaccctgcgaattatgttcaattcatatgttaccattcatattgaaatatccctctttttgatgtctgagtgccttattctatctatcaaattactcccttcatctataccttagatcagacccccatggtctgctttgatttgataaaaca

SEQ ID NO: 241683 - DNA, 438 bp, Gossypium hirsutum
gcttggggtttgattcacgggatgactaattattgggcagtttccacgctgggatggattgcagttgttttcattttcagtttgaagcattctggtgcttatgatttcagttttctcgagattgagcctgttacagatccttcattgccttctgtcccgtttttcggaaatggtagaacttgcaaatgaattccagttccggtgaagaccagaaagtgaatttgatgatgctatcacaggcaaatgtggtgaccaccggaaggtgaaatgtgggggtgaaagagactaaattggaaaaagataccgcgatgcgttgtcgcgggtgttactcgtgtgctctttctataaacactttatattacagattcattgctttcctctgctttgataatacaaagttaccaggtttgcttgttaacttgcaaagatttacacaaa

SEQ ID NO: 241684 - DNA, 325 bp, Gossypium hirsutum
  unsure (1)..(325): unsure at all n locations
ctcaaagcaaggcttctcgaaaacagctttttaaaacaaagcctcatgtcatcttccttgatgtangcatgactgctgaactttcaaagggtgatcgtgttaatttattggaattttttaaggctgttgcccgtagagatggccgtactgctgcagagtgcacgcttagactatcacaaagacaaaactgcccaaacccaaaggcttttatcgaggaagtagaagaagccttcactttctggggtactccggagggtgatctagtccatccggctgaatgcatgcaagaattgcttgagaaagtaaggcgtcataaagtcaatat

SEQ ID NO: 241685 - DNA, 335 bp, Gossypium hirsutum
  unsure (1)..(335): unsure at all n locations
agaggttcaacttgaagaagctgacgtacgaggaaaggaaagctaagttgattgatcgattacacacccttaatgccgctgctggtgcggattccgaagatgaggattgaacgtagtatgctgatttcgaaaaatactgaacttgtttacctgcttttgtttttactgttctataaagaactatttgaagttaatttcttttttgtttaggttagcttatttacttctcaatttcaattttgttattaggagttctgtactttttttttaaacagtttctgaaggcgactgaatgatcagattcttgtgaaatgcgaattcggttttgagtccnt

SEQ ID NO: 241686 - DNA, 420 bp, Gossypium hirsutum
gcgctcaatcgctcatccgccaaaagttgttcctcctttcatttcaaaaagaaaaaaagagagtcgaaattcgatataaaagattaatgttataaattccatttctttttcaaaatttcattttattttattttttgttttttttttcaccaatccattttcaataacaatggagaagagcattcaattcaaatcccaaatccttcactacagaaccaatagtttgttaaacccatttctcgaatccaccatttctcttcaagctttcaattgttcatggaaatctcccattttcaccgtttctcctttgctttcacccaaaacccagatccaaaaaccaattatttgcgcaagaagaagcaaaagaagaaagggtctgacagatcgacaaagctcgcactcgagttgatgtaatttttg

SEQ ID NO: 241687 - DNA, 381 bp, Gossypium hirsutum
tccacgcgtccggttaaggttggcacgtcatatcagccccttttgatttgtggccgagaggggtcttttcttaagctgaatttcctccatattcatattccttgcagcatccatagggtactttcattcctatttacatattgtaggaacatcaccctgccatgaaatatatagtgcattttcctttaaaacataggcagcgtctgctgtcatttcttaatatccccacagtgatttttattattaggagtatcttatcacttgtggcttggaatcattgatcgattattggggatgtaagaatcactgtgttttgcgttattaaaaatcaattatcattttccttgaatgtctcgaaataatcaggcatattgcaaaaac

SEQ ID NO: 241688 - DNA, 414 bp, Gossypium hirsutum
cccacgcgtccggccacgcgtccgaccacgcgtgcgctttgaagaatattgaacttctttggatttgattgctattgtgtatattctctatttttgcatcttttcgtgagtatttgcgcgtcaatgtctcccttcacaagattaaaatctggctttttatatccgaaaagaaagaggaagaattcgaaataaaatacaatgtttttctcttgtttgcactcgctgttggtttccttgtctgtttgcaggtgtgctggtactgtgccagctggcatttgtcgtggaggtgtacggaggcgctagagattgttgaggttgctgcagcgcaaggcatagaaccctagggttcttcctgttctaaaatctttaggccatttgggccggtgtcattttggtgttgatccaaggcattgg

SEQ ID NO: 241689 - DNA, 199 bp, Gossypium hirsutum
gctagactaacgtggcgcttggagaagcagtggggcctctgataacacaggaagcggcagggggagacctagcagaaactacgacgaaacacactagagaggaggaggcgaacaaaacaccaaggctgagactcaagaaggacgcggacggtataatggacgacgacacagacgataggaggcatccacgtggacaccg

SEQ ID NO: 241690 - DNA, 342 bp, Gossypium hirsutum
gcttaaagtgcacaaactggaaaaataccttttagataattttcctttattagcagcaagagtgcaatgccggggaggatcgttttctcctgcatattagggttttaagtttcgaattcaaacgccgttcacaaggtgaccactgctgttgacagcaactacatctcttgccgttattttacatacaagtaacacccggtgtatgatacggtggtccatacactacgtgcgcgtccaagaacacaaccaccacctattggctatgatatagttcatcacagagctacttcaccaaccacgtctacatgtgcgccaacgtcatcaacatcatgtagattaccc

SEQ ID NO: 241691 - DNA, 262 bp, Gossypium hirsutum
cccacgcgtccgggggcgtttctgaaaagcctcccgcgtcttactcgttgctctatactgggaatcattagctctacattgtattacccaatacatcaacatttatatatccacatccaaacaatgtcctagtcctctgaatataaaccgcattagctgctttgcttgtgaactatttattcaaataggctttctaaatttagaatctgttcttatgccaagacgaaaataacttagacagtaacactcttgatcttgctaa

SEQ ID NO: 241692 - DNA, 281 bp, Gossypium hirsutum
cacaatcgatgaagcacagctctttgagttttggccagcgaccattattcaatgggtactttgggcatgaaagcataagaggcgtatacatcgagtacatggaccaagatctggcttatgatacgacagatctgtgagtgcattacaaccggagttaataaaaagatcatagtgctcagtcatggaggggaggcagatggcgcaccttggggatgcttggagtatctaaaataagtgtggcacacataatcctgctgtccgaaaagatgctcacaagagat

SEQ ID NO: 241693 - DNA, 344 bp, Gossypium hirsutum
ctacagtcctggaattacatttaccgctccctctttactgacaaaaccttggatctcacatgggactcctttgatttgactaagcacggggaacgagtaaagtacaaatcctttaatgagattattatcaaggaacccaggctgtggaaacggtctgtatcacgtagtcaatttgttatgatgccggaggtgccattccaggagtatcgagatggatcttagaagtatgtgtcgactcggaaacacgcgctactgtgagtataagatcggactctgtgcaggacatggaaggaaccgtgttatcgagccagctagtgctacccggaataacattatgttccgac

SEQ ID NO: 241694 - DNA, 371 bp, Gossypium hirsutum
accgatgacagattctacaatgccggctgtgaatcaaattacattcttgcgcactatcaaggcccaaggatggtgttatgcctttgggaaaagttgcagaaagagcaccaggcctactgttgtgagtaataatttaaccatacttgaagcttcatacagcttttacatgtaacatcatgtaacattgaaaccaaagctaacctttttagggaatagtgtatgcgcagttcatgtaattacgagattttaagcaccgggaatcttacattacaacaattatttggggtcatatatcatttgttcattcgttaattctttagcattatcgtctatgttgggtgtgacaatacattgaaagattgtccatggaa

SEQ ID NO: 241695 - DNA, 149 bp, Gossypium hirsutum
cccacgcgtccggaaggaccttccactctcttgcttcaccttctctttctttccccggatctcgttcggtctctttgaaactcacccccgcttcaactcggcccttctttggtctttagatgccaccaacgccacagattagggcaccc

SEQ ID NO: 241696 - DNA, 446 bp, Gossypium hirsutum
caaaccttaactacttccatgaacaacaagtattaatcctttctttttggcgatggcaacgtatggagttggtttagcagaagcttacgttatgcgatctttacataaggagaaaatgaagaagatggacaagcaacaggcgtcaaagagtgaggaggaggaggaggagaataataacaaaatggtttttgatgatgaaatgaaaatgcctgcttcttgtttctcctgggtttctaagaaaacccattttgctagggtttctgatgcttccggaaaaccaaacgtatgatgacaaacagtgtcttgagggccttgcttgtatttttattatataagctttggccaaaggaaatgccttttagcctgttaaactaaggaattttatacaaagcttgggattgctttgctgggattcttgcttgtatcaataaaagaaagatacttgc

SEQ ID NO: 241697 - DNA, 340 bp, Gossypium hirsutum
ggaattataataaaggaacaaagggtggacttacgtcacgtgtgttgcaatcaaggatcctgggcgcttgacgatatatagagagaacgagggctgtctacttgtttttacggccagtgtgaacatcttggcaagcgaacgatctgtcgcgcatatctcacagcaactgtaactgagtgacgaagccctcgacccaagaatccggtatgtagaagtctcgaaccctggcatcaaagaaagtcactttcagtatggaatgcctcactcaatgagggggggtatttattacatatgcaagctctctatgcagcgattgaacccatgcttgttatcaaaaatt

SEQ ID NO: 241698 - DNA, 160 bp, Gossypium hirsutum
  unsure (1)..(160): unsure at all n locations
cccacgcgtncgggtaaggagatttgggggttattctttagattcttaaaagcaccataattttctttgtgtactgttttgaacccattgtgcccccatctttcccctacatccctgtccttcatgttcccttatatccctaacaatgatctttattgtg

SEQ ID NO: 241699 - DNA, 327 bp, Gossypium hirsutum
cccacgcgttcgcccacgcgtccgcggacgtttggggataaggctaccctcctctcttagattgagatgcttaccaaccaagtactactattactgtacatacagagggggagaagcactaatcaaagtatatttcgcctagttgagcttttttgagtgtggcgaggtcttgagaggaagaagctggcgagtagacttcttgggctatgttcggtagaagacttccataaatgttggaaggcacctttcgcgggatgctgtcccactcgcaagagccgacggggtgacccacataacgatcagaacgaactagcccctcgtttattt

SEQ ID NO: 241700 - DNA, 243 bp, Gossypium hirsutum
gtaagttctcaacttttaaaggcaagtgatttgaggctggtgacgtttgtgccaagagatggtgagagaaaaggtgctgaatcaacttttaatgaaaactgtaaagatgcagctgaccaagatgataaatatcacctataacaacgattacacgtgtacagtaaaatcatgaattctgcttgtcattcttaacgttttaatttgtatgaataataataatggatagtaaaatgtttgagaggg

SEQ ID NO: 241701 - DNA, 401 bp, Gossypium hirsutum
aaccgtttaagcacaggcaagagctggtactagcctttttagtacaaagaatatgtagacgagcccggggatgttcgaaacattttggtagtagtagcaacccttatagctttcgttaccttgcaagctgggggcaaccctcctggcggagtatggcaagaaagagatcatgcaggcagagccatttatgcatccaactcagcaacctactatgtggttttgatttacaacaccctcggtctcggcactttcatacttgtgataataccgctcacctacaaatttccttggcacctggaaattgttattgccaccattttcatgggcgtcacttacgggtacgcagttttcgcggttacttcccatgaaataccgatccggtacgccatatgccccttttg

SEQ ID NO: 241702 - DNA, 331 bp, Gossypium hirsutum
  unsure (1)..(331): unsure at all n locations
cccacgcgtccggccatctttgctgcattactcatcatggttgtttccgctcacgaggggcacgaccacacacctggaatggccatgtctccgggaccggcggccactaatatggccaacatcttggctccaactgcagtgatgggggtattccttgctttggttgttgcagttttgggtcctttaacagaataatatttaatattgcagtgttgtttcggatttcttcgctggccttaataaatgttttccatgtattgcttctcattccgcttcccttttcatttatgaaaatttcatgcgttacagtttaaaaaaaaaacaaaaatnn

SEQ ID NO: 241703 - DNA, 385 bp, Gossypium hirsutum
tgactccacaacatgaggagtcagggtccatgtatcagtctccaaggatgcaagtcttacccaacagagtagccatcagcaaggtttgcccaatcagcctggtcatccctcaaaaggttgtggtgggagtgttggttgggccaatcccgtgaagaaattgagaacagacgcacgttaaaggagaccaagccttctatgacattctagagtatctcacgtaatgaaaaaatattttgttgccattgactccaagcactgagttgtattttatggctcatcacggcctgtacaattgcaattagatcataccattaaagtagtgtaggttcattgagccctcgttgtatatccgtctttttcttaggttcaatcaatgcaatagttt

SEQ ID NO: 241704 - DNA, 236 bp, Gossypium hirsutum
gtgattatgagacaagtcaaatcctgcggacaggttgatgatgttcgatcagattctgaaggcgaggatgaacatgaggattgaatatgaaagcgtgcaaaccactatatttacttgttccccaaggtatttaggaaatcataattttcaatacaaatgtaattttctttcaattctacatatttcctattattgatgaaattaatgcagtgttgtacctttcctttttctctttc

SEQ ID NO: 241705 - DNA, 281 bp, Gossypium hirsutum
gaccgcaaaatcgactgttgggtgtatgttacttagaaaagacccaggggcctgtgtgaaaaaaaagtgggatggggtcaaacccaaaaacacaccgaggacacactggagtactcgttagccgtctaagttacatattagcgcgagtaggtaggaagtttcacgagatctttcaaactgtgattttgattttagaggggatattgagaagccattattttctattaaaagtcttggagagaatttgccaaacataaaatttaagaacataatccatattt

SEQ ID NO: 241706 - DNA, 310 bp, Gossypium hirsutum
aggactcttacctgtataggcatttggagaatctgcaggcacaggatcgttttattgtttataggatggtggtggttctctttaggaggggattgacatttgaacagacaatgtgcctattggaggtaatgtgggctgatcaagcaaccattaaagctgggctttctaaaaacacctggaggaggataagacagaaggcacccccgacagatgatctattggtggatgcaattgcagcttccatcttacagaagaagaaattgatcattgagaagtaccgccgcattgattaaatttttagggagtggca

SEQ ID NO: 241707 - DNA, 260 bp, Gossypium hirsutum
ctggcatatataccttggctacatgcattgttaatgctcttagaaaattcccaacatgtgggccaaatggaaaacttgaattgctaaaggatctatatgccctaagtttgaagaaaagagatattcttgtgctgcatggaccctctgttttgtccaaggaacttgagaaggagcgcatatagcgtggtgtgaggaagttcaaagtgaccacggaggtccaaaaagcttacttggaatacttgagcttccccaagggagac

SEQ ID NO: 241708 - DNA, 420 bp, Gossypium hirsutum
cccacgcgtccgcccacgcgtcctggtgcatctgccgtcgaccacctgctccagccactggtgcatctgccgtccaccacctgctccagccactgctcaagagcttagggagtctaattcggataagagaaaaagctacctaaccgaatagtcgatctgtaatcgttcgacaacttccgagatctcatttggaagctacaggctcggggatcgtcagcaactagtcacactatcactatccactgcttgttactgttatgttttgaattattttatggcatgtatagaataggccagtggccgaagaatattttggttaatgtatataagccatgcgaaaatggcatcttttgaatgtgtacttatagaagtttaaattggatccctgactgtctttagtacttatctaaaggaatgttc

SEQ ID NO: 241709 - DNA, 359 bp, Gossypium hirsutum
aacagattgtccagggcctcctcttttatcttcaccaaaaccatggtcaaacttgacaggtgacagaggtggaggagacaagagtccaagaaccctacttgttcgagaaacacacaaagaagacatcactgtcggttgtaagagaaagagaaccgatgatcacacacccaccatgaccttattaccattctttctcgagccgatttcaattcaaaagcaccatcatcatcacccaccagctgatgaagacaacaacatagatcttgagctaaggcttggccatccacccaaggtaaaatagtttcatcataagaccatattataactgggccttactttctataatcatatgtttgtct

SEQ ID NO: 241710 - DNA, 349 bp, Gossypium hirsutum
cccacgcgtccgctgatttattacattgcagagttggcacgaatagtcagatgatcatggctctctctcgtctctccttgcctttctcattacttgtgttgtcgttgccagtcattgcttccgctggttatgatgattcatctaaatatggttttgatggaataccagctgacagcccccaagcaaaccctatttatggcactaaagaagatatctacacgccaaaacctgaggaaaaagtagaagaaaaagaaaagccttactatggcacacaaaaagaagaaaaggaaaatcgtctcaccataggtgttcaaggccttgttttatgtaaatcagattccgggtattc

SEQ ID NO: 241711 - DNA, 285 bp, Gossypium hirsutum
accgcgcttactgcggttgacatgtgcttggcctgctcactatccataagctttgctgctgccttacgcaaaacaaccagtctatggtggtgaacgaatacttgcacctcattgtgcgtgtgctgaacaccgacgttgatggaatgcaacacatcatgtacgctttgacctacattaatgctattgcaaggcgatgagattgcactgactgactgaaggcgtgatgttaacatgaacacaatggcttgtgaatatactgatcatgagcttgtcaatgacatgacc

SEQ ID NO: 241712 - DNA, 299 bp, Gossypium hirsutum
  unsure (1)..(299): unsure at all n locations
ctctcaagcaaagccagcaaggagaatacttggaaaattcccaagaggtttaatgaaggtttctttttttttcttacatttattctggtatttttcatcaaattttcatccataatatatttagtttgtaatatatttgagtgatggttaccgattaaatccatccgaaatttgcatgtactgtaccataaatatccattattggtgatttaattcatgttactattacacagttnacaaaaaaaaaaagaaatcttttattaacaaataaaaaaaaaaaacaataaaaaaatataatt

SEQ ID NO: 241713 - DNA, 353 bp, Gossypium hirsutum
aaaaaaaaaaaaaaaaaaaaaaaggcaggggatgacccctaagcataaataagtgctggtcgagaattgcctttataaacaaagccctacttccttgcaatgactgccgccagagggataattgccacgctaggagtaacggtataacacttctctaaaggcaaagataggccttattacgtttagattcatttcctttattgccccaggcttgcttatcagaacggagaggataattccttgggcttgttttcgacgaaggctagaatacgttagatatagtacaagtgtcaaagagacgattttttcatgtgaacagaccattctcaactgttctctgttccttaagcgga

SEQ ID NO: 241714 - DNA, 265 bp, Gossypium hirsutum
gccacgcgttggtctatgcgttcggagagcacctaacgcgcgagtttatacactagctgagaaagaatcgcttgagccgaatcgcgctatgcatattatcgctaacggagggagaggccatgaccgagactaccggtttatataccgccacttaatgaaaggctttagctctggcctgggctgtatgatctaccaaagcaggtatagcctgagccataccctgaccatattcgtcatccgactacagatttaccggagcccatgg

SEQ ID NO: 241715 - DNA, 269 bp, Gossypium hirsutum
acgcgacccgtgggggaaagtagaccaccggtgtacattccgccggttaccacagcatgggtgggaggcctggtatcacggcactgagtcacgtcgctgggagacgaacggacacgagtcgaaagggtgtgactcttgtactgactgcggcgcaagttcttgtttagctttgtatggcttgtgagtctcctgactaaccctagctaagatttcccgcaactgacaataaagtgtgccaaatggggctactaacttttgggatactgacc

SEQ ID NO: 241716 - DNA, 133 bp, Gossypium hirsutum
tcgctataccattgtgttgataatttgctacctattggcgaatgggattgttattctgctgatatttggtataccaattggtcttctacgtggctgcgggatttacatgttttcataaaaacaacgtggcttc

SEQ ID NO: 241717 - DNA, 235 bp, Gossypium hirsutum
cgcttgcgaggcgcgtacaacattaattgcgtaaaagatgccagagaggataggctctacgttgtgaaactcgcgcctggaggacacctgggccgaaacattatttgtgccaactgaccttacgagacgcgttgcttatacatagggagccattcgagatggcatcatagaagaagaaaggtctacggcatgcctgcatctaaaaatgggcacgccgatatggctaagaacatta

SEQ ID NO: 241718 - DNA, 197 bp, Gossypium hirsutum
gtgaagaagaatcatcgaacactaacggggctgaagctaggacctctcaagacgcacgcaaacgactaatctggctataatacctatagtgttgtgacaaacctatacccgatgggcgaactgaagaaccggatggggccatgttgtctggagcctatggaggcgataaccattgctggaccgatcgctatgcctta

SEQ ID NO: 241719 - DNA, 100 bp, Gossypium hirsutum
cccacgcgtgcggattcgtccaacgttcttgataaatatgcgtggtgggacgtcggcctcgcttgagctaccatgaaggagaacattttccttgcaagat

SEQ ID NO: 241720 - DNA, 175 bp, Gossypium hirsutum
cccacgcgtccgctaaaatgaaacatgtcaaggttctaatcttactatgatacccccaatgttttagccttatttatgtcttttaggggcatgttgattttgtaagcatatgattttcttggatgctttggttcactttcatcaatcgtatgtttttctgcagtcatttcctttc

SEQ ID NO: 241721 - DNA, 356 bp, Gossypium hirsutum
aaaatcatgatacttaccatttaactagtatcataaaaagaaaaagattgataacttaaggcataacaataccttttaaaaagaaatgaagttgactattaatctttcaaaaagaattattattttttaacaaaatattaactaaaaggttactttttttcaacatggaagcttgaatttttatttttaaatatttttataattattaaattatttattaacatggtatgcaagacgtaagtagactgcccaagcaaacattgttaaaaaaaattaatattttagcattaaaaacgatttaatttaataatcaaatttaactaaaagtaagaataaggattacactaacaaaaaga

SEQ ID NO: 241722 - DNA, 257 bp, Gossypium hirsutum
gtcatttctccatcggactactgaggtatatatttctgtactgcctcactctgaaggttaccctgttttgatttttgtatggttcactccaaaacaattgttcacttgtgaggaacatgttttgcttatgtatttttcaactgccaagctctttgttggttggtaatagaatgataaacccttcgtattgcaaataaaaaaaaaaaacattaataaaaatataaacaaataagtattccatacttggtgttcgttct

SEQ ID NO: 241723 - DNA, 259 bp, Gossypium hirsutum
accacgcgtacgaccacgcgtgcgattttcatgtgtctttgctcaattcttcccaattttaagatgaatttagagaagcaatggaggtacccatttttctctttgaaatttcatgcacctagaaaaaaaaaagggaaaatctggaaagcttataattcgaaaattatgctagtgtttgtgttggtttgaattaaataagcatatttgtcaacttttcatggaatgcaaaacgtaaggagactgaaaaaagcaaacaatg

SEQ ID NO: 241724 - DNA, 271 bp, Gossypium hirsutum
gttaaatggagatctagctgttttgagttcgctgggtttttctgaacctaattggatataatatgtaagatatcatagtgctaattgcatatctcgtgacattcttgtgcataatttagcagtattggtatgattttgagtatgacccttctctctaaatagttccgactttgttggctattttgtttcatagtagttctcatttctctgatagtgcagggatgctgggaaaatcgttagcttcgtctttgatgacattggattctgcgac

SEQ ID NO: 241725 - DNA, 263 bp, Gossypium hirsutum
gagattaggaaaactattcatttagttctctagtgagtgggcaattctgtgggcaaacttgtctataaatctttttaacctttctgtaagggactaaatgtaggggagggctgtgagaaagtttccggaaaagcttttttttgaggaagaagaactccttcctttttttgtttaggggagggcttgtcttgtaataagggcttcaaggtttcttcctgcccacgggagtctttttgcttcccctcatttaccttcttggaaaa

SEQ ID NO: 241726 - DNA, 203 bp, Gossypium hirsutum
gccgttctggagattcccagctcaacttgattctttatgaaccgactcgttgttctatggctttttggaccggagacctcttcatagggctgagcgtgcagagaccggtcaagcttgttgcgtcggtcgggaagttatggccttacttgactatagcctatattctggagcgccacaataacgccgctttccattacattgat

SEQ ID NO: 241727 - DNA, 387 bp, Gossypium hirsutum
gtttgtaataaatagctattaggatctgaattagtatcttgtaatagtttataggagctccgtactgtcagaaggttcacctttccaaacaagcatgtcttcacagtctgttactgcaagtggaatctgcaaaattcattgagcaatgtccgtttgaaaggttctacccgtggaatccaccaatccatccaaattgagatgtggcatttcctctcccaactctccaacttagcccttgaagaagaagtcattttgcagcccaaatactcttctagggacacaacacagataaccaaaagaaaagacagaagaaacaaggaaacctaaattcttgccagaggcagcagacacaagcgtgctaggatagtagacttattaacaaatgat

SEQ ID NO: 241728 - DNA, 261 bp, Gossypium hirsutum
cccactcgtgcgaataaaagatactttctactcatgttctattctaccgtatgacagggagggaaggtttctttatacctgcgagaatgccgatggcagtacctatgggaaagcttattttatgtctacatgtgataaaagtataataaaacaatgggcgttcgctctaaaggaaaaaaacatatggacgctttctttttacatgataaatcttttagaggggcgattaaaactaagggatatgtacgtgtatattataac

SEQ ID NO: 241729 - DNA, 143 bp, Gossypium hirsutum
agacagaaggagattttcgatttacatgctttggggcatttgttttaaaaagaaggaatgtaatctttaaacctgagaaaaatgccgaatcgctgaacctatagaaatgccaaactataagacatgttgttaataaaaatata

SEQ ID NO: 241730 - DNA, 268 bp, Gossypium hirsutum
taaaaaaattaaaaaaaaaaagttcaaaataatataacaaaaaaaaatggggcgggcatacgaggtgctcaaatctgtcgaccgccaccatgacgcctttcattttttctacatggggtacaaaaggaacactagtggccgttgatctacaacgcctcgtgtggtgaaatcgttgatgcctcccaaattagtggctttgcataacatgcatcgataaaccgcgtgacataaccaagaagaggggctcaaacattctttcttaacaatt

SEQ ID NO: 241731 - DNA, 420 bp, Gossypium hirsutum
atttttgttgctggatagaaatgtgtttgactctggatattttcatcatttcaggcaagaatgattgatttttattacggtctgattatggttttagtccctctgttatcatttgattttaatttagtataatttggtttctttaagtttataatattgacgtgaatttaaaaaaaaatggaactatactatatgcggtcacaaaacttatggaggatagttatacttttagctttcattaatgaatagctttcttgtctttatctgcgcttatcaaataagattttattagttaaaggatgtttcctggatcaaccttcaattgatactgtaagcaattttcttatgtaattctaatatagaatgtatcttgttttaatagatctaatgcatggcaataaggagtcattagcattttta

SEQ ID NO: 241732 - DNA, 373 bp, Gossypium hirsutum
tgacgttcaggatccaccgtggacatactcaaacagtcatggaggaggcattgccagcagttcaaatcctacagaaaaacaagacaattctcgtgctcttatggctagaattctcaaaagaatcggcgaaaagaggaagagcacagttacatactcagacttcccaggtttaggcattgacgagcgcgtagcagttggaaaatatagtttcccaaaatctctgaaaagcactgtcgagaatatcacccacatgcatggcgatgtttcggagaacagcacaatgccccaatgcgtggacgagacgatatatattctcttttgtgcgacaattaaggaaatggatgatctacaacttcccgaagttactgagaat

SEQ ID NO: 241733 - DNA, 213 bp, Gossypium hirsutum
cccacgcgtccgggggtttaaaatttcggaaatttacctttgataatataataattttattttgtattttcctttgtaaaaccatgggttgtatttgggctgtaatcagtcaaaagaacgaaatttgaaggtatgatatatatatgctttctaccaaacaaaaaaaaaaaaagaataaacaaaaagcaaaaaaaaaagaaaaatataaaatac

SEQ ID NO: 241734 - DNA, 355 bp, Gossypium hirsutum
cccacgcgtgcggcttcttcttccctgctccctctccatttttgctaggaattcaacctagtttgtgccaccatggaggatcatcggtgccatgcacctccaccccaccgctggttcacggatcaaaaccaggtatagctgcgaaaatctcagaatcgataggcgtggcggagtgggacgttggtgagaggcgtgcggcgcgaggactgctgatgattggggcttgctagtacctgtgtcaactgatttgggtgttgggttatttatgtactgagcctagagtttggtttaaggaggtaatgggtgtgcttttatatattggattctaaatatttgggtctggaccaggaatgaa

SEQ ID NO: 241735 - DNA, 242 bp, Gossypium hirsutum
ggacgccactattgatgcctttctcaatgtttatgcaacacaggatggtggaaacccgatggatctttggaactttgatgatttccctgccatggcggagggtgttttctgaacgaactttccataataactagtgttggtaaataaagcaacatgttagtgagtttttcacaacccctctggcagttgctttattagttggtgttataaaaatgattttgtctttattgaacaaaatgttg

SEQ ID NO: 241736 - DNA, 149 bp, Gossypium hirsutum
cccacgcgtccgctgtagccttttactttttctttccttgatgtttgtggggaacgtgatcttatggtgacagaagtacgaattgcgagagcctgctaacatcttatgtaataagctggatcccgtgttcacaatgcgctttcatagag

SEQ ID NO: 241737 - DNA, 233 bp, Gossypium hirsutum
  unsure (1)..(233): unsure at all n locations
gggagacattctaagaggagaaaacaccgtttcttccatggcctgagcaagctttcatgatgacatgcaatcattcgggcatccctgttttctgatccaactcattccacaaattcacaatgttccatagcaaagtaaatgtggtacaagtacattgatttctagttgacattttaaataaattttaaagctcttgtaatactaaatttttaataaattagctttatcatncc

SEQ ID NO: 241738 - DNA, 131 bp, Gossypium hirsutum
ccggccggaattccggccgcccacgcgccgtgccactttatgacgcgcttttccttttttgccgtgctctgagcgaacggtactggggacttgctataggggcggcagccacctggttcgcttgaagccat

SEQ ID NO: 241739 - DNA, 429 bp, Gossypium hirsutum
cgagaatgggcctcgtctcggcgaagcctctagaaacactggccaaaccctcctgcggtggactcgtcgaggcagccccctccgtgctctcctcgtcatttctcttgggtctgttgcttttcttgcattgacagggttgcttacctttatgcttatatttctggtagcgaccgtcaatgccattattgtctctcttctcatctctttggcagctgcgggaggcttcttgttcttttcccttgcatgtgtaacagctatttatattggggccatgtcaattgctgcactcgttttttctattgcgacgatttcagcaatttttgctgctatgatagctgcacgttgcgttggattcttttgggtcatatggttgggtactaggaaaagtgtgggatttgccaagcaatcattgagcaagactggatcagt

SEQ ID NO: 241740 - DNA, 305 bp, Gossypium hirsutum
cgcacacgcgcgggttatgtgcttcataaagtagtaacaggggtgaaactccaggatgtaccggaagatggtcctaggactcggatgtgaactgtggtccttcagaactgggttcagaccctggagcttaaacatgttattattagagtgtagatgaagggtatactacctgtggtggcctcacgcactctttctcgtaaatgctaagccctcaggcgtgagaaggataatctctatggggcctccttttactacacaacacggtggacctattttatttggtcctacgaatgggtatatatact

SEQ ID NO: 241741 - DNA, 276 bp, Gossypium hirsutum
gttacacatcgcgagcgagcgctctagcggatgctatataacatacacgcttatgcgcccgggcatgccacgtataaagtcacctatagtgaaatcaatggacgatgcactgcaacgcgatgtctagcaacaccacggcgaaaacccacttaattcccaaccaaaacatcttgctttacacacttgttttaatagctggcaggacagcaacgagggccttacccatcacttttgccaccagaatggcaaactggacgcgcaatgggacgggccctt

SEQ ID NO: 241742 - DNA, 330 bp, Gossypium hirsutum
ggaatgtcttagctttttgttaaggaatatggatatggcttctgtttctgctttaatctcagaagatgttagggggcaagcaaagttaattgctgaggaatggaaaccaaagttggatgctcttgccttggatgctagtattggtaattcattggaagctcttgcattcctcaacttcttggcacttttggtattgcttcttaccttcaaggaggaaaaactgtaatggctgttacaaagggtctttggccttcgtaaacaagttaacttttgccggcccttggttttgtctgaaaaaatgccacgggtaattgtaagttctggtgaata

SEQ ID NO: 241743 - DNA, 432 bp, Gossypium hirsutum
cccacgcgtccgcccacgcgtccggtttcatgttaccgatgctacccttatccgcggctgtcggaagagtattggctctgcaacactaaaaaacgtcttaagtgccttgctacagcagggcctaccattttatcattacaaaatgggtatttggcttgaacaactcaatattaagataagagaaacggctcgctctttcttcaacgctcaactgagatataacctagtcgacgatggaatcgtctaacgttctatccagacgaggacatgcggcggcatcacaaggaattgtgtcgagtggaatacgaagacgagcgctacagagcgctgctacggtggccaagaaaacacgggaagacatgtctcgctgagctaaagagaatgcttcgtggcttcccgaccctgttaccggatgctacagacccgagaact

SEQ ID NO: 241744 - DNA, 259 bp, Gossypium hirsutum
ccccaccgaatatccgctaccactagcccacctctcaatatccacgagaaccacactcggtgccaaaattctaatcttttgcatggtgatttatatattttaaaacaccttaagaccctcttcttattttgtagctaaccttcactatcttcacaaaacatcatagagtcgtctgcaccatttaacgaaagcttgactgtgctaatcgctttgattggcgtactgctttctattcatttttattgattgggtgtatttg

SEQ ID NO: 241745 - DNA, 380 bp, Gossypium hirsutum
  unsure (1)..(380): unsure at all n locations
cacgcgtccggagatttaaagaaagtcaagcccatttgggtgttctttttgctgggaattatatgtttattcaggtcaatcctacaaccatgaaatactgctttgaaaaatcttatggaggccttgctttaaatggcttgccttcttctaggtgttctctctctaggattgcttgatgtttgaaggtttgaaattgtgtgtgtgttgccttttcttgtattacatcttgactcatacagggtagctgcaacttttcttttaatacaaaatagcctaagggttcaaaagctganaaaaaaaaaaaaaaattaaatcttttaaaaaaaaaatgatactattgggagcttacctaatccttattagcaagcaatatctattat

SEQ ID NO: 241746 - DNA, 168 bp, Gossypium hirsutum
aaaaaaggactgctacttcggcttgtagtgtttatatatatatttatatatataatgggataaggaattattagatataatggctaggaacaacttctataacagtttaacctctatgtacttttggatttttgttcttcaatatccataaccttttggctttcctgc

SEQ ID NO: 241747 - DNA, 310 bp, Gossypium hirsutum
gcaaagatggacgctaatgaaaagatggcaccggaactctgaaaaggaaagcacaaggggtgggggggggtaatcgacggtgcggagaactatgcctcttcaagctggtgcttggaggagcttgcggagaatgttaaacaaaaaaatgacaaggcggataaagaatatcaaatgtgctacgaaggggatccatccgatttaataaaacaaaaaggaaagttgaagaagccatcgacaaacacgaagaatgatacacggaagataaagacaagattgaaaaggggcgaaaagctatgactgaaatggaaaa

SEQ ID NO: 241748 - DNA, 329 bp, Gossypium hirsutum
gatttgttgaataatcagaaggtgcagtacacagtgcctccaaatgtttggtttggtgcatttccaacaaaagatttcaacatttcgactgatggagcaggagcaggagcaagagtgtatccgggtcttgatctgaagctcctctgttgtcttttcactggtgagatgctattgcggggtgtatcaggagctgaagatgcctatgaagcttttatgtttggataaaaattagcatggagtagtgcgtaacttattagagttgtatcaactatgctggatttgatcttcattgctatattcagaacatcggacgttgggtgtgttatttt

SEQ ID NO: 241749 - DNA, 394 bp, Gossypium hirsutum
ccacgcgtccgcctttgcgctcgctttgtgtttggtattgatagcgttgttattgacaacaatgtcattggggcaatttggaaatgatccaagacatctgcttttctcagttgtgtggggaagcattagtgttggtattgcatcttttgttagggccaagggcaggattttctgtaatcggcctcgtttgcaattgcatgataaacctgggtattgatacacacattttttattcagctatttttatgtactaatcaacgtacataaagaactttgttttttgggttcagaatgtattatttatttcattctcctttgtttattaatgtgatttcacatagttgtgtttaacaaaaaggcgggtatgccaaaaaaaaaaaaaaaaatatacttt

SEQ ID NO: 241750 - DNA, 436 bp, Gossypium hirsutum
gcagaagcggttcccaagccctgatgtgttgcagcaacggataacatattaatcaatcgataatgtatttttggtgttgatcattttatttcttgtcatccatccggtgaggggtcatttgtaggtttttttttaagtttgcgggagaaattacttgagttagagaaaacaattatggggtggtggtggaatgtttaatagcaccaaccaaccaagcccttcaccttaagtttgtgccaatagaacgctcataaatgtctagcagtcactgtattgaagttgtaggggatgaagctacattacattacatctcatatatgtccctgcctttttctatggaaatcagctgatgattgttggcgttgagtttattaaattgcctcagcaattcttttactggtaaacaaatgggagaagcaaaactctgtataataaa

SEQ ID NO: 241751 - DNA, 439 bp, Gossypium hirsutum
cgagattacgtgtaagaccatatctgggatatggcatcatatgaggcttcgtgtaagaccatgtctgggacattgacatcgatatgtgatttcgtgtaagaccatggctgggctattgccattgatacgagattacatgtaagaccatatctcggatatggcattattacggtactatgtgtgcaagatccccgagtatcctttagtattccaatagttcaacgggaaaagtggatgaaacatggttataagtgatggtacaacgaaagcaaagtattcgtgacagaaatcaacaagtaagtgaaagtggagaatgaaagtacgatcaagttaagcaagacaggtacgtacaggacttatgtgagaattgaatgaaagtgaattggtgagttcataccgtatcatgtatatgaaataagaaagatatgtgtgtaaatac

SEQ ID NO: 241752 - DNA, 442 bp, Gossypium hirsutum
ccctcccttttgctcaattaagatgctgcttcagtttaccctccctgttttaccctcctcatgggcttgccctttacgtcttctttttcttccttctaacctcaaccttttctgccgatttgctccctctgactatcaaccttttctttctttttctttacaacacaatttacgcttggccttctcaaccttttcttttctttttctctctgtcactctcttgcttgctctcagttggggggtggtcaagttactgcaactgaaaggttcaatgcatgaggatattgggagactatcatcattcatctcgtattgcttttgttgagtttacaatgaatacgggtaacttaaagagattgtggaggaaggcaaaggaatgagaattaattataagtgagttaacataggctgcagcattaatatttttgaggatgtgccatgt

SEQ ID NO: 241753 - DNA, 208 bp, Gossypium hirsutum
tgggctgttggtgctacgagtgcggtcctggaattggcctcttctgaaagaaaatatttgtcatttcaaaccagcataaaccttgttttcaaaattaacgtgatcttggaatggatttttataatttgccttgcctctacgagcactaaataagcataaccatcttttgaaaaaaaaaaaaaaaaaaaatgttaggatatataaaatt

SEQ ID NO: 241754 - DNA, 288 bp, Gossypium hirsutum
ggagatagttgttctgattatgacttttgttgttaataagaaaagaacacggtaggggtgttggacaggtttaaacctcggctaatgcaaacagtatacaagaaaggcaagggcagaaaatgggtgttgaggaagaaggaccagatgagaatgtaagggaatggggtgccccctggcacgaagtacacgtgtttgaaaactgaaagggtatttataaacatcttcgaaattttagtatcttgaaagttgtggggaggaactattgttacataatttcatggtttatta

SEQ ID NO: 241755 - DNA, 368 bp, Gossypium hirsutum
  unsure (1)..(368): unsure at all n locations
aacgtccctgaaagtaatccaagcttatcgattattcgtgggaagacaaatgcaacacatcggcgagaaacacattacgtacaatgctgaagagctacaggattacttgttagacttgtttgagggatcccaaaaatcattgcataatcccaataggagatgattctatgatataataaagtaggtacatacaggttttgtattttctttttcagtttgatcgaataaacaggtggattaaagcaattctgtatgtcctggctaggtttccgatcgaaaagaaaccgattgtaatcccattcttgtgactagatttagatcaatgtcaatttggcttgggtttgcgnnncaaaaaaaaaaacgtggat

SEQ ID NO: 241756 - DNA, 347 bp, Gossypium hirsutum
gcggccacgcgttcgaccacgcgttcgatttttttacaatgataaaagtaatggccatgcccatattgaaacttctttatttcggtgctgaaaatgaaaatttctgaaagttgggtgaccaaccgtgtagtttactcttttaaatcattggtggtactcaaaatgtgatctccttctacagtttaataacaagtcacgccagattggacttgctggagctttcctcttaagctaaataatcaaaacctacaatttagtatatatttatcggatcggtgaatatccttacagcttgctttcctcttcttgggtggcctttaactgcaagcaagcattgttgtgctatt

SEQ ID NO: 241757 - DNA, 388 bp, Gossypium hirsutum
cccacgcgtacgcatctctttgcttttctgtttgtatttcactagtagggagctgggaaaaaaatgagttttcgaaaaaaaattggtcgattggctttctgcttgttttttttttagattttgatcgcattatataggacatggagagtcccgattccgtgagagttgccgttaatattcggccgttgattagtgcaaagcttctccatggatgcattgattgcatcaccgtccttcccggcgaacctcaggaagtaccaatatgaacagccaatcaagtcggtcacatgccatctttacaataagcatggagcagaagaagattgctagctgcctaagtggggtaaatgatgataccggtgaagacatcttatgtgcaaagcttcat

SEQ ID NO: 241758 - DNA, 378 bp, Gossypium hirsutum
cttcgatatgatgatgacgagaggccgactgcaaaagaagcagtggctgattcttatttgaacccacctagaaatgcggaaagcagaagaactcgttcctagcatgccaaatttgtgaggcggacaagacatggcattgtatcttctttgtgctgggctgggtaaggatcctgcctgtgtaatctagactgaaaattatgtgtatgtggtgctttagctgttgaagttgagaattctttcaaaaatgatctatttgattatctggtgtcccccaacggaaactttagttattatttcagactttcatatttcccgaaataatgctgaataatcgtttgagtacttcagatgggaacagctcctaaatctgatttgagt

SEQ ID NO: 241759 - DNA, 411 bp, Gossypium hirsutum
  unsure (1)..(411): unsure at all n locations
tccggccgcttccccgtcgaccccgcgtccgggcactctcgttttggtagggaccccgtcttcgttggatcgtgaccgccataaaccccccttcgctcgcgacgcttaatggacttgaaaggaatttgnnnnnngngcggtccctttcccttcctctcctaccccccctcttcttctttcctcctctctccttttctctttttcctcgccttcccctctccttctcttattccttctcttcttccctctctcctcttctcctctcctccctcccctccctctccctcctctcccccctcccctctattactctttttctcccccctccccctcctttctcccccccttttctttctccccctccccccttctctcctcttacttcctctttctccccttcttctccccccc

SEQ ID NO: 241760 - DNA, 410 bp, Gossypium hirsutum
ctcaaccttcccctcattctctccgacgcccgaaaggatgctctcatcgaaagatggacgggggtcaagaacattaaggatccgtacatgacagatatcacagaatttggcgttgtcgaggataacacgcatttaaaggggagggtgaagttgcaagacttagtgaaaggcaagactcaggtgatctgcgggatctattacaagctgtgtctgtatgcaaaagatgagaacatgttgtaactcatgcaatgctgtattttgagaaacagcgtggttgaaattaaggaaacataccttctttaccctacggaagggttggaatattgtattatatgatcatacatatattcatgtatgttatcaattttctggtagttaactgaggggagagtaaaatgttggtgatacac

SEQ ID NO: 241761 - DNA, 431 bp, Gossypium hirsutum
cccacgcgtccgcttttctttcctaaagaatcaaccccacctccacttggtcctggaactgctgttgctgtggtacttattgtggctccctcgcctgttgctgcattatcgaggtttctctccaagtccatgttcatgacttgagataacaccaagctacccagtggcagataaggtgagttagtgtcagagttgcctaatgacatggacatcgggctcaacttttcttccatgtgtttcttgaaagtggcaaacccaaaagaagctcttcttaaaagaacaaaaaattaagagttgggaaactggagagaagaaaccccccacccgccaaaaaaagtttgaaacaaagacgggtttgcttgaaattgcgccagacatagaatgtagagagagacgtagagattttataaacttccttgcttaatgatgga

SEQ ID NO: 241762 - DNA, 426 bp, Gossypium hirsutum
  unsure (1)..(426): unsure at all n locations
ctcgaatttctttattcaagcttcttgttttttagatcaaaacccccatttttcttttcacttttcatccgttaagtttccagatattctacctgaaaaaattgcagaatgaggagcaaaagacatagccataacaagttcatgcggttcattacggttccttttaaagcgttagtcaaggccagggatctatatgttagaagcttgacaagttgtgcttcaaaagtgagctacgggcatggttcgggcgggtgctcagcgcaatactcanggttgccgaggagctttattagtgcaatgtcggcaacgtgtaatgacaatgaagatcttagagagctcattanggctgcatccgcgacgagcttgggtcataggaaggaaatggagatgctcttgaaacagcagttgagggtgcagatgggatcg

SEQ ID NO: 241763 - DNA, 299 bp, Gossypium hirsutum
  unsure (1)..(299): unsure at all n locations
aacacgcgcacgaacagaggcacaggcacgacttcaggaagcaaacacgancccgggggcgggggaagcgcgaaagcacagaagacaggaccttgagagaatgggggtgaaagcaccgggggcactgactgagccggaagagggggcaagcagaggcggcacacgagggcaaaagagccgaaacggggcgagcggggattgcggggaaacaccagaggcgaggcaaaaggaggggacaaaaagccgggcgaacgacgcttacaggactacacgaacggaaaaaagaaccggaaggggaa

SEQ ID NO: 241764 - DNA, 378 bp, Gossypium hirsutum
cccacgcgtccgcgttccttacaggaccatgaagcacctccccgccctgcaaagaggaaagctgaccagcatcatgaccttgaacgtgattatgactatgatgatcgtgacaatggtcgtgatcgcgaacgtgatcgccatcatcatcatcatgatcgctccgagtcttccaagcattccctcgaacctgcaactaaagccacttcctcgactgctactgcaggaactgataagaagccaaaggcaagtgtgttttctcgcattagctttcctgaagaagaaattagcaagaagaaaaggaagatatcttctgatgcacctgcatcttctggccatcacaagccatcctccaatggatatgattacaaaacatctttc

SEQ ID NO: 241765 - DNA, 335 bp, Gossypium hirsutum
  unsure (1)..(335): unsure at all n locations
gtgtttttgaaatattatgaaaaaaatcaagagagtattaaaataatggttttttgggagactgaaagtaatgattctagattttgattcatattcaaataatagatgattttatctgattacctaatattttattattagttgtttctcatttttattttcattattttaaatggtgtgcgataataagtacttttgtaataagaactatgagagttaaaatactttcagcccatgtatcagagtgagtctttttaaaccatagatttatacatgttatatatatataagttgattgagttagtttaattggcannnaaaaaatcataaattta

SEQ ID NO: 241766 - DNA, 202 bp, Gossypium hirsutum
  unsure (1)..(202): unsure at all n locations
accacgcccttgagaaagaaagaaagaaatcaaacatgggatccatttncgagagtaagggggagaaggggcgagtagctggaactggaggggtcactggaactgaagaggcagctcgagaccttgcttgaaccaccgctgaaaagaacaatggcgaggtggctacagaaacaaccgaggctgaagccaaagcagaagaggc

SEQ ID NO: 241767 - DNA, 351 bp, Gossypium hirsutum
ctttttcatcgcctgccctacgtcttctttttttcctgaagctctgtgtgctgcgatcctaagtcaccatgtgcgacgggccagaatgtacctgattcgtcagatgaatggaatcccttttttgtattgcttccgatgcaatgaagcgctcaacgcttattatgcttctctgtgtggcacaaggaaaagacaagtctgaaaataaagacatagatttttggagtgatgaataaacacagcagtgggacatctatcctctctatcttctaacttgcgaatcaccgaccgagaatcactctcaatctccaccgcccataagcctagatttatagaacttattatgttcttttg

SEQ ID NO: 241768 - DNA, 235 bp, Gossypium hirsutum
cttaaacgaaacggaatatttatgaagggatttctctcgaaaatcgagccgggacccgcaggggaaataggtgcgcttggctctaaagtgatctctgaagaacctatgcataaagtccaagaatctgttttccaagtagctgaaatggtggaacgttcaagaaggaaagctggatcaatggttgatgcacccttaaacgctatgtcatatctgataaaaggggggaaaaactttg

SEQ ID NO: 241769 - DNA, 377 bp, Gossypium hirsutum
  unsure (1)..(377): unsure at all n locations
cccacgcgtccgcaataacttagagtggaggcagcagagaaggaggcagcggcagcagcgagggagtcagaggcagcagcaatagcagcagatgtttcaacagtacgaagagctccagctacagcttcagtaaatgatgcagatgtttcaacagtcgcaaaagccgccatcttaaacattagttttctccttgtaaaaatgtttttaacattgtcactgttaggattttaacccgattaagcaacgaacaagaaaatagcgaaataaattgagatattgaacacgcccnacatataaaataaaaaaaaagggatgtttaaaaaaaaaaaataaataatccacttgggtttgggataggaaaatgaaaaaagcctttt

SEQ ID NO: 241770 - DNA, 154 bp, Gossypium hirsutum
  unsure (1)..(154): unsure at all n locations
acccacccattcaaaaagaaaatgaaaagaaaaatttgacaaactttctgagttacctccaagctgtattgggactaatttgaacctagnccatattggacgtgaaaaaaggggggatcctttacaaaataccaaagcggcttttatatatccg

SEQ ID NO: 241771 - DNA, 120 bp, Gossypium hirsutum
acaaaacacattgtgagaatattattaagataaacgttgtttatagagcggcaggtcggcttagtactttatatttggacggccaccagtcgcttatagtgatttgataattgccgcctc

SEQ ID NO: 241772 - DNA, 164 bp, Gossypium hirsutum
ctctaacgctatgtaattgtataaaggaattttgaaatggctaaccattcggtggatacggggtacaagttccttctaacaaactcttttcaatccaaatcaaatccaatccctgttcttatattgaaacacatttttccaaagctaactcaactcgcatgtta

SEQ ID NO: 241773 - DNA, 262 bp, Gossypium hirsutum
acacgcgttcgtccactcgtccgaccaaatttttgttatactttatgcatagaaagaatgcggctattctagggtggatgaggctctttaacatatgacactgagggaatgtgtatgccaaatgaactttgaaagtatttgtagcaaattcgctcgaactgtgcctgacaagttaatactggggggactttggctcatgaattgaggcttattgaaacttatattatttctatgggtggataatatccaatgtgagaatggg

SEQ ID NO: 241774 - DNA, 165 bp, Gossypium hirsutum
tgatggtcgaaagactatgcttctttctttcaaaggcttcttatctattaactaaacatataatcgcaccatatatgtttggtgttatgtcatgatctcagttgaaaagtcttatgcttgctgtgtataaatatagaaataaatgactaacaactcaacattccc

SEQ ID NO: 241775 - DNA, 253 bp, Gossypium hirsutum
tggctcttcctctcatgtaacacagtggggcctgtattaatacactctctgtgctggataacaaacgacggaataagtccaagaatttcatctatatttaatttgaggatgcaaattcataatcttgaaattttaattcgatgctaaataacactagatccggagaatctataagttatggactctgactaaaatcccaaagaaccttaccatcttaaaatttatgcgctgctctgcatgaatggctgatttt

SEQ ID NO: 241776 - DNA, 163 bp, Gossypium hirsutum
cgcaccatgtgcaccatactttctatgacaagatacaaggatgccacttacatgaaggggggtgggggaaagtctgtgccattgtttcactggagatataagcatgaagggaaggctaaaaaggcaaaagaagtaatggaagcagtataccccgataagaatt

SEQ ID NO: 241777 - DNA, 443 bp, Gossypium hirsutum
  unsure (1)..(443): unsure at all n locations
ctccctcaccaacctttctccggttctccgctttctcgccttccctctcgctcctcctgcttccccatgtcggcctcccttgtttttccagggggttttgtctcgggttaaataaatgttggaggttttctcgagttggctaggactcgctcactcggatccggtgtatttcgctcgaggcttaactgattcgtttgttttcttcgtctgatcttaacgttttaaacaagttagatgatctgggatggcgtctttgttgggagcggataccangcactagtcaacgtgtctgtttgctagtggctaacatcttcctgaagagcaagaggtgtggttttgatgggtattggtggcggagctgttcttaccggcacaaatttctaggatttggcgaatttctgggtataagttatgtgttggtaagggttactactgtgttctct

SEQ ID NO: 241778 - DNA, 376 bp, Gossypium hirsutum
  unsure (1)..(376): unsure at all n locations
cttacaatcaagttgcaaacctggaagcattatattccacactgcctctgctgtggataaagaggtttcatacaacttgaagagtggttggttggaaaaatgggtcattcttcgtggcagcgtctaagctgttggccgactatcaaggtgttgttattaaaatcgagactatgttttgagtctcgacttctatactgatgaagaagctgctgcaagaagatgcctatagttggtgaagtgattgagtattttgattctatgaatctaacgctatgacctaaaatggaaactctttgtaattattttattaaaccacttggacactatcttaacttgcaagtattaggctttctgatgggctacacnacaaaggaaa

SEQ ID NO: 241779 - DNA, 214 bp, Gossypium hirsutum
ccggggtggaaatacacggtcggcggaagcggtctgtgttgcattcgcaaaaatatgcgaaaacttttttagaaacttaacatgggtgccttttggggagactacgcggataaagggatggcttatgctgatttaaggccaacctggccttgattggatgaatgacacaagccaatccgcatgaacatgtttaatatgccaacccataatgtgt

SEQ ID NO: 241780 - DNA, 187 bp, Gossypium hirsutum
tcgctcactcaccaacctttttacgggttttctctttatcgccttttctttcgcttctactgcgggcacatgtggggctcccttgtatttacagggggttttttctcagactaaataaatgtacgacgtttacttgagatggctacgacatcctcactatcatcctgggaattttgatctagggtta

SEQ ID NO: 241781 - DNA, 296 bp, Gossypium hirsutum
gcggcggcgccctttcttttttttttttttttttttttttttttttttttttttttttttgttttctggaagatattggcatgttttgctgataaaaaaaagctttaatccatagataatgaaagcctccaattatgaaaattttttgttgccctaacaacacctgaaaaaaaaaacccaacccctttaacccattacacaaatcaaatttaaaattctaaattccctttccccttatttaagcatttgcatattgcccacaccttgatgataataagatggtggctgacaagctt

SEQ ID NO: 241782 - DNA, 304 bp, Gossypium hirsutum
cggacgcgtgggcaaatgtttggggggaggtcgcttagactgctgcaagactatcgatctttgggaaaaatgccgatatagattctttcactaaagctttacatcgaattgaaaagattttgtacagacattataatttggatttatatgaattggaactgttttgaaattaaaaagggtttttacctttcaaaaaaaaaaaaataaaaacgccttggtataaaaaagaaaaagggactagagctgggaaatgggagaattaaaaacttaaagacttaacacggaaaatgaacccaacgggggg

SEQ ID NO: 241783 - DNA, 227 bp, Gossypium hirsutum
tcggatagaacaggtgatcttacattccctggtttccaatcaaaaggataacatgcgcttagttggcgggtcctttacccctacttgcatcttgaatcataatcctagattcatcgacaactctgctgtgcttaattccacaggcattgatgaaattattagcatttgcttggatgacacataaatgattaatgcgtgggtcaaaacttacccagagaacaaatatg

SEQ ID NO: 241784 - DNA, 420 bp, Gossypium hirsutum
acggaccctgatttgaaatttaaaaatgtggtacttacacctcatgttggcgcgggttcacttggttcatatggatcaatggctagggatgttgatgatgttgccttacaactatatgatggataaccactgaaagggatagagctgatgaatgaattgactcagaatcaaacctatcaatgtgagaatcaaaatataaatgacattgcatttaatgttcactacattgaccatgctggggcatacttaatctagacgtttaagcccctgaataagctaaatggaaaacgagagtgcgatatatatatacacatattgctgatatcatcctgttcagcacattgatttagattcagtattttatttgaaacttaatattcccatgattttaaatgaatatttggtttataatggggattt

SEQ ID NO: 241785 - DNA, 353 bp, Gossypium hirsutum
cgcacattcaaatccaccttaagacagttgggtaaacatttggcatttagtatgttttgaaggtgttgaaaattttgcagctttatgttaaacttataaaacaatcaaaataagtatttcattttgaaaaaaaaaaaaaaaaaaaaaaaaaaaaaaaaaaaaaaaaaaaaaaaaaaaaaaaaaaaaaaaaaaaaataaaaaaaaaaaaataaaaaataaaaggaaaaagaaccatacaagggcaaaactaaaaataaaaaaaaaaagcccctgggtgggctctttttaaacagagataaactttttatctccacccacaaaggtgacaagattttgttgaggaccattaaaaa

SEQ ID NO: 241786 - DNA, 152 bp, Gossypium hirsutum
gtcacatttaaatacaacttaaacagtggttttacaacacattatggtgtgcagggcgttagatagacatcctgattttgaactaataaaactacccaataaatatttgttttgacactgggacttgactgggaaacaaactattatacttt

SEQ ID NO: 241787 - DNA, 432 bp, Gossypium hirsutum
  unsure (1)..(432): unsure at all n locations
cccacgcgtccgctttcattctctttgggttcattaagtagccacccaaaccaccatcaatttgatggctgacggtgcacgaatggagatcggatcttgctgaagaaagcctcacccacgaagatccgtgtgcgtggcgcgtggaggtgcacggcgtacagaggtgctggaggcttgaacggcgctggaggttagggctgcgacactccttactactagggtttggctatttggctaaacttangtttaggttttgggccattgggccccattgtaaatgggtatctgggtttgattttttgttattgggcccaggcatattaggcccattacagagctgttttcagcatttccacacgggctggccacacgcccatgtgccagcccgtgtcgatttcgcaactgcttccttaacacgtgaaaaacccaatt

SEQ ID NO: 241788 - DNA, 371 bp, Gossypium hirsutum
gctcgaagcagttaattcaaggataaacgtgaatcctagcttcgaagggtttcactcaaaggatcttggatggcagccaattgatggtgctggaatgatattcggctcacaaacagcaagggaatatgctcaagggttgcaccccgaatggctgcagatgcatgtgggtggaaatttcaaaagggcgacgtaattcgtagaaaatgcttgttggcttacaatgcaacaaagaacagactatgggatgactgatttagaacaaaatacatgtgttgcaagaaatgagtttgataaatgtggactagtgtatctaaatttgtaatatcatatacatcttgtaaaaaatgcacatctaatctcttggtatatgt

SEQ ID NO: 241789 - DNA, 423 bp, Gossypium hirsutum
gtttaacactctcaatgagtaaaataaccatcatataaaacttaactttacttaaatcggctgggttccatgctttttttctctctttgattcatccatgctcgacttccaatcaagcttgcctgagaatattcaagaagatttagatcaatttgatcatttgcttaattttactcgttagaaaaaaagaaaagaaaagaaaaaggaataatctacacaaatttgtaaaaatctagaactggaaaaaatttgctttgaatataaataattcaatttatgttgagatttaattaaagatatgggtttttatatcgattagttagattcacttttaggttaaaaattaggttttagttaaatggagatttgattaacaatgatttcgattcgattttaagtgaaattcaatgtaggaatcatggg

SEQ ID NO: 241790 - DNA, 307 bp, Gossypium hirsutum
tcacacttaaataaacccctagacaggtatgtataaatatgaacattaatgtgacatgcgggcgggaaaaattaacagctttctgtttctcaatataaaacaagcaacactcgcctgttagttcttttgattctagaaagaacttatgcataagacctgtgaacaatatttgcccttgaatacagatttattacatgatttatattcaaattactgcataatatctactataactttttacttgtgacctttttaaagatgatgaaaacattatcttttcatatgatattatatgttcgactgattt

SEQ ID NO: 241791 - DNA, 246 bp, Gossypium hirsutum
cgctctattccatgtacacgtttctgcatcgattaattgattaaccgtagaccatgaagggctaatttcctgtgcttgaatatggttgttctcactaccaagaatactttgatacatcatatattcgtaaacatagagaattgggaaagatatcattatcctgctcggtagaaaaaaagaaaagaaaagaaaaacgatttatctacacaaatttgtgaaaatcttgaactggaaaaaatttgtttt

SEQ ID NO: 241792 - DNA, 189 bp, Gossypium hirsutum
gcgcgctttcacccaagtacacctatgtgcatttataaatacctcacccaaaaagcgtcatagcggcattatcgggcgtagaataaagccggtctatctcccagcaatattagcacacatactttgaaacttgcactttcccccttcaattttctatgaacattttgttaaatccctctgtcaagatca

SEQ ID NO: 241793 - DNA, 265 bp, Gossypium hirsutum
gccatgtgacgatttatacttgtctaacccctttcattatcatccaaatgagtgaaggggtttttattactgagaaaggggtagctgtgacagaaactgtggttgtgggattggctgaaagtattgcagtggctcgagtggatgcaggatgtacacatgattgaacgttgcctacataaccacaactgagattatggatcttggtgtatctccgccacttgcagactttgtgggagctgaaagggaattatggggtgagaacggt

SEQ ID NO: 241794 - DNA, 318 bp, Gossypium hirsutum
  unsure (1)..(318): unsure at all n locations
ggaggtgtgacttgcagaatgaagactttttggctggttttaataatggaccatcatagttttacaaggatgtctgttttttgagtccaattcactggaaaaaaaataatttttgggtacattttgttcttaagataaaattggaaaaaaagttggaaactttagtaattgttttgtactatgtaaagagtactacactattgtctttgtaaactctattcatttacattagccaaaaaactttgcagttgttgatcgnaaaaaaaaaaaaaaaaaaaaaaaaaaaaaaaaaaaaaaaaaaaaaaaaaaaaaaanaaa

SEQ ID NO: 241795 - DNA, 162 bp, Gossypium hirsutum
accacgcgtgcgttcatgcattctaggtgatccatgaaaggaagaccatataacttaatgaagggctaacagaggtgaaacaccgacttgcgactcatctcttattacgatgatcgccgacgagcacacgtggtgtggttttctaaacacgtggagagataa

SEQ ID NO: 241796 - DNA, 311 bp, Gossypium hirsutum
gcgcttttaacctttttttttttcttccttaaatttaatcctttaaggctattgggcatttttgagtcgactctgaagcttttagcactggctttaacttctctcttcagatccaccgccgctgcctccgcctctctaatcgaggccggctccgatcggtctgacctatatctctcaccctatgatcgcctcaaagtttccagcctttgttataaacgaaatttcaactcctattgtgttgcctatctttcaactaaagctcattcattacaaaaatgcatctcatggagcatgcaacccatcaaagctac

SEQ ID NO: 241797 - DNA, 216 bp, Gossypium hirsutum
atgaacactttctggctggctttattaatggaccatcatacggggacaaagatgggcggtttttgagtccaatttactggaaaaaaaaaaagttttggggacaacttgaacttaacataaacttggaactaaaggtggaaactttacgaaatgatttgtactatttaaagagtgctacacttttggcttttggaactctattcatttgccttaacc

SEQ ID NO: 241798 - DNA, 174 bp, Gossypium hirsutum
ggacgcgtacggtggatcttaacatttactcttgacttttttacgggtagtactctcgggaatataacccccccccccccaaccctttttttttgctttaattcaaaggcacgaagccaactcaaaacccacaaaagccaaagcctaggggcacagaaactacgaaaagaaatg

SEQ ID NO: 241799 - DNA, 408 bp, Gossypium hirsutum
caacattgatggaatttccaaccatgattcacgccttctacatattcccagaattgcaagaatctggccagttaatattgcagatcaaagatttcatgaacaactgttgcagtaaaccccaactcccacaacaaaattgaccatttcagaaggtattagtatccacatatatatatttaaaaaaatgtgtgagttgagaggtgaaagtaatagttcttattaggctgtctggttatctcaatttgcaggcactaagatattcttagcaaccttcatttcccaaatccacttggtaatttgctttgccttttatttttatttggttgaatggaagatttttatagaatttggtgaaatttttaataacataaattaatttcacttgaaaaaaaaaaaaaaagatgatat

SEQ ID NO: 241800 - DNA, 391 bp, Gossypium hirsutum
  unsure (1)..(391): unsure at all n locations
ctgtggtattggtgaagtatttgaaatgcagaacaatggctggagggttgtgccatgccttcatgatctggttttgttgnagctttgagcttgggatatggtagcaacttgtgatgctgcatgttgttgtttgatagttttagtaccgatggtggtcgtcaaggatattctcaagtgttctgtctagaatatcttaaatctttatgtatttagcttcactgtttattttgttgaggcacaatgttccaaatttatcaatgggattgctgctgctttttgaataatggagacacaggtacttcaaatgaactaattgaataattcgactgattatttggtttaaatttgtttaaattaaaacttaaatgtgaaggttgtggatttaattttg

SEQ ID NO: 241801 - DNA, 419 bp, Gossypium hirsutum
  unsure (1)..(419): unsure at all n locations
ggccattgatcctcttcaacttgctcagcttggaaaaaggttagatgagtatgaagaagattacgatgaggaagggtagggctaagtagttagggggcaaggctcttaagaaagttagtgttccacatcagattagaactcaagtagaaaggtcaagaaaaggcaaatgtcgaaatgacctcattggaatatggaagtatatcctatgtacgtctctctctctctctgtctggttatccttgctaacaaaactttaaaatggtagctttccacaccaatgaaacacctgtcttggaacttgcttcttactcaacgaaagaacatggctttttaatgtaataaaattgccctcagaaaaactatgttgaactattgatcccncnnaaaaaannnnnnnaaaaataaattaaataaaataa

SEQ ID NO: 241802 - DNA, 410 bp, Gossypium hirsutum
gcaaataatggaaaatcttgcaaatcaacttcgagagatacgacagttatcagaacccgggaaggctttgcaacaggcctctttgccacctccatcctctaaggtcaagtcaaagaaaagatttctacaaggtgctcctttatgagcaatgagaagcatttaagagagatgatggtacttttgaatttcgataaacaagatgagctacataatttgattcattggcttcgcttggtgtcagctgatatcttttaaaggcttcaattgcaactttcgacttcacaagttcctcaaagaaatgagcttctggtgatcacactctctgtaactaccacttgggcttacagattacgggttttgagtgcatttgaatggccattcgctgacgttattatatgtagttatatctt

SEQ ID NO: 241803 - DNA, 396 bp, Gossypium hirsutum
cccggaagacccaggccgacccaggcgtccgatcacgcgtccgggaaaatgatggatactgttttctatgaataaaaccctggtgtattgtaggaggacgcagacgcatcaagggacaagagggaaatcaacgattataaaaatccagggccacaagtaaaccgccaaactgaatacatatttaggcttatttcacactggtctttcatagcattctacccttgttcactttcctgtgaagacaaaacataaagcgcattataaggagtgagcatcatcagaaggttgtactgctgtgctacggtaatacctgactgcattagggctccaactgtcaaggaacgaaagtgctgatcttaaggtgaggcggttaacgcctatgcacttgtaaattgc

SEQ ID NO: 241804 - DNA, 404 bp, Gossypium hirsutum
cgcaccatgttcactatacttgcttttacttgattcctggttgcgatttacatgtatgggaatgggggatagtccgtaccatagtccattgtgggtgattgcatgatgtgcatgctaataaggctaaggcagtagtgcaagcagctgaccctgattagaatttggtcactctcatagtgatcgaaggagatctaatggaacatgttgagagctttggattcactatttacttttgtggcaaaagcaatggattgaggcgctcgtttgcatctggactttgaaatacaatgaagctccacggtgcggattgagcatcctgagactctgctgcaattcgttcaagatgtttataaagacatttactgccacctgacctaagcaagttaagcattatcacatgatgc

SEQ ID NO: 241805 - DNA, 362 bp, Gossypium hirsutum
  unsure (1)..(362): unsure at all n locations
ggcgaaagttcaagtcatcttctctgaaggcgaatcgtcatcgaaacccagaacacaaaccaaaaggagtgtccgacagagctcgaacccagactcgtccgattcggattaactgtgggttgtctcggtttgtaagctttctttacctgtttcagtggaaatcaataggatttatcatcattccgtgtttaaatactttaaaagcaaatgaagagaatattgtttgttgtatgaatgagatcatttaatcatctcgatctttnaaaaaaaaacaattatttagtaatcaaacaagagtcttgaataaataactcttttatgcttatttggttcattatccatttaaaaaaaaaaaaataaaa

SEQ ID NO: 241806 - DNA, 108 bp, Gossypium hirsutum
ggctatggttctataaacattgtttcaaatttctttaacattcccatccagggtactagggtagtatagtatgtgactggcttttgtcctagaaacttacgatcatga

SEQ ID NO: 241807 - DNA, 429 bp, Gossypium hirsutum
ttgtgaggttgagggtccacctcatgcaagtcgctttaggtgcaaggtcactattgatgagaaaacctatgagggtttggagttttttccaacaataaaggaagctgaacatgcagctgcaagagttgcattatcatgtttggcaccagatgctattgaagaagtccaggttactgattaatggagtgtttttccctttgttgctttatgcatttatgatattttttaaaatgttcagttgtgaatctctagagcttgagttttttccctttgtatattttttttcttcctcaggaagactctagcttattcaagaaccttttgcaagaattaatgcagaaggaaggttgtcctctaccagtttacaccacaactagatctggagaagcccatgcatcaatgtttggtttcagtgttgaggtgaaaaga

SEQ ID NO: 241808 - DNA, 217 bp, Gossypium hirsutum
gatggtggaggtggtggtggagacttgtacttgaaggctggtttgttggtgacagtgggggttttggggttgctttgagtttgatatccattagattattttatatgtagttgagttgctatagaaatagcaaattcatttttatttattggctagattattctatattcttctgcaaaaaaaaccatacattactggaaactcatgaacatttttt

SEQ ID NO: 241809 - DNA, 368 bp, Gossypium hirsutum
  unsure (1)..(368): unsure at all n locations
cccannctttctaatccatcaagttcaatagnaagactattgaagatgatggtaataatagagaatcttagaaaagaggacaaatgcaccacaagcagactttagagtgtaagaatggatgataaaaaacgcaaaaaataaagtaaaatatcataataataaaagatacaaaagacttaagaaaaaccaaaaaaaaaatatgactagattgaggcagttcttctttgctatgtgactaacattgagtgatataaaaatgttaatattaaagaaaataattcattattgatctaattaataccatttacgtgaaaaaaactgccttaattataaagtttaaaattataaataatataatttcttcattt

SEQ ID NO: 241810 - DNA, 454 bp, Gossypium hirsutum
cccacgcgtccgcccacgcgtccgaacagcttctctgctggagtcacgagcagagcaagcttccctgcagtggtttgaatgctacgacagagaccagaatgaagatctcctggaatcgatgcgctatttcattgaagctgctgaagttcactcttcaattgatgccggcaacaaaacacgcagggcttgtgcccaggcttctcttgtctcgcttcaaatacgcattccggattctaaatggctcaacctatctgaaaccaatgctaggcgagctctagttgagcaatctcgattccaagaggctcttattgttgcagaagcctatggtcttaatcagccgacagaatgggccctagtcctttggaatcagatgctcaatccagaactcacagaagagtttgtggctgaatttgtggctgtgctttcacttcagccatctatgcttagcgaactg

SEQ ID NO: 241811 - DNA, 439 bp, Gossypium hirsutum
cccacgcgtccggttcaattaatgtgaatgcctctctagtataagaactaattagttgcttgttggattgtgatcctggtctgtcatgtgagttggttagcagctatattacaagtgttgatacatgcccaagccattatgttggtgttgttcttggagaaccttcctcaacaccttctcccaatcaggtggatgacatttccaggttcgtgtggaactttctggcagatagaacatcaactccaaagggcaatactactgtttgctcaaaggattgtagcaacaatggtggagtgtgcattatagcacaaaccgatgggaaaggcatttgtgttaactccacaaccaggtacgtaccggcatattcaactcgcttgaagttggactcttgaacatggaaagtgctgtcttcgaactcctgagatcctatggtgatgct

SEQ ID NO: 241812 - DNA, 268 bp, Gossypium hirsutum
gctgctattcctctcgcacgatcgctgtatacacgtatgcatgctacaccggtattccctatacaaggtttgacctcaccaatcatttcaaggcttaggcactaaaacctaagattgcctccctcttcggataaaaaaacttcttgtacatattggacactgtaccatcagccaagaaactcattgtcattctagagagactcatatgttccattgctgcaaaacactcagctgaagccccatgccatgtctgtctttgtcatgacat

SEQ ID NO: 241813 - DNA, 205 bp, Gossypium hirsutum
gcctctgcttctttaagcatggcaacaactttctttagcattcccatcaagggtaatagtatagtatagtttgagactggttattgccagagaaacttaggatcatgagactgcaagagaatctgtagatatgatttccatgtaatttaatagttgattgtttgctctccttcaaaatgcaactttctttgccaccattgccgat

SEQ ID NO: 241814 - DNA, 237 bp, Gossypium hirsutum
acggatgggctaaaacatttgtaggcttatttgtgctcgttccaactaaacattttgcgttgctcatgtcgggcgagggtagcataatcccggcaggtttggaccttcaacccccttccctacgcacaaggcaaagttacaaacatagtcattcaattaccttgtaaaaaggtttacatgtattaacacataacactctttggtatttaaccaatgagggatctatcttaaatatat

SEQ ID NO: 241815 - DNA, 207 bp, Gossypium hirsutum
  unsure (1)..(207): unsure at all n locations
aagaagactaaacattcttagagatttggcgtgagatccatctatggaatactatagtaggagcgaatttggccttacatgccatacacgccatagggtgggtgttgataccacgtggctagggctgataataccctatcctcttagagatgaaggngggggttttagaggaatcaagcttactaacggaggcatgaggcctgatat

SEQ ID NO: 241816 - DNA, 320 bp, Gossypium hirsutum
cgcaaaagtaggaatatagttccaggcaactttccaaactgtaattttgatctttgaaggaatatgtagattccataatttcctgtaaaattttttattctcggcctgtaaattataactactaggatccagtgtagtctgttataatagtttgtaggcgctcctaatagagaaaattccagatggttccccccataattggaaatcgtcgtgctctgtccttgccaaagggatctgcttgattttttttaacaatatctgcattgagtaagctggaatagattgaaggactggccttaataaaaacctcctttttttcc

SEQ ID NO: 241817 - DNA, 291 bp, Gossypium hirsutum
gcagttgaagtagcaacccaaaatttcagctaatcgaaagaagggaagctcgacgatttgaggaattttcttctccaagattcagcttgtaatttatgctgcttacaattgattcttgttttgtttcaattgctatgagtggttaaaatattcaagcttagttagacacttatgaaacctagcacaaggtatttgaagatttattttgtttaaatttggatttggcattcttgagttgcttgttttatcgttcaaggaatttttctaaatcaattagattgatcacctact

SEQ ID NO: 241818 - DNA, 392 bp, Gossypium hirsutum
tcggaaatgaaaaaaaaattgaatcgtccattagcaggtccttcctctccccattttctccatatgcttagcattaataaagctcagggtaaacaacaaaccacatttatcaacaactatacagctcgaaaccctaaaacggacataagagttcatcagacaagatcctactatccagactcagtctcatcgagcagtcattcccctaccccgatctttatcaacaagccactccaccgccttcggtaccttctcaatccatacatcagacaactatactttcttccctccattgccaagccatgcgtcgtcgcattcgcccctcgagcttctagcttcttgatgacagtaaaggcgagcttttcaacacacacatctttaaaacccaacta

SEQ ID NO: 241819 - DNA, 216 bp, Gossypium hirsutum
caggtgactaaccggttccttcgctgcttgacaaaccgagtagattgtattagctaccaaattacaaccccttagtttgtataaagtagggatgtaatccttagctattcgccacatatgtatttttattttacttggtatttggagtccccgcagttttgtaaaaagtgtagttagataatcaatctgaaaattaggcctcttttgttggcattt

SEQ ID NO: 241820 - DNA, 318 bp, Gossypium hirsutum
atttatgcttggatggggagaagcttgcctctggttcctcacatgggtctatatacttgaataactcccgatcgtcggtgcttgtcaagaagatcaaggcatacgaggaagcttgtgtagacatcgctttccaccctatcttgtctaatgtaattgcttcatgcagttggaatggagatgtttcagtgtttgagtgagactatgtacaataaaacatcatcttatttgtcattaaggtgtaagatgctttatgagatcaaaactgtctaatgctccggacttggaaggcatttggtctacacctattaaagagaaggc

SEQ ID NO: 241821 - DNA, 413 bp, Gossypium hirsutum
cgtccgcccacgcgttcgcccacgcgtccgaaactgcgtgaagagattcaatcgcagtctgctgctaagcttcctgaggcaccagtgatgcaccctcctactgaatccccaacgtagaggtgccccaacctactctgtccaagcaccctaccaagggtaagaagtcaaaggccaatgacactagctaaccacaactgagagagctaccctagatgaattagttgcggcaagagcggtaatagtaccggcataagaagttggaaaggtccctttgtagcatactttacagaagaatcttactcatcctcaaaagttcggttagtagtttcagaggcatcgagttcaaaatcaaaaggctgattacccggggaaagggactttcaaaggcttatctattatctattcccccattt

SEQ ID NO: 241822 - DNA, 407 bp, Gossypium hirsutum
taacggcagggagcccgggaaaacaaaaaattaaaaaaaaaaaaaaaaaaaaaaaaagagaagggaaaaaaaaaaaaaaaaagaaaacaaaaaaaaaaaaaaaaaaaaaaaaaaaaaaagggggggcggccgaaaaaaagaaaccaaactaacgcgcgcgggcaaggaatgaaatattttttcgatggagcaaacaaaaaaaaactggcgggccgtttataaacaaggacgggggaaaaaaaacccgggacgaaccaaaaataaacgggaggaaaaacaccccccttaagcaagtggaaaaaaaaaaaaaaagggccgaaacgatctttctaacaaaaagggagcccataatggaaggtaaaagggaccccccctggggcgcaataaaaaaagggcggagggggggg

SEQ ID NO: 241823 - DNA, 311 bp, Gossypium hirsutum
aagtcaagttcctcactcaaatccttacgccggaaagaaaaagcacttttggatgtaaagacccgctgactcttcactttactactcgcttggtgactaacctaccaaacctacccaatcgtacgcagctccttcgtccctttcctctctttcaacccatctcacatctgcgatatggcttggacccttctttgagtgggagagtgtgttgcaattatcctcgaaagtctccctgccctcgtaaggccaagcgaaaaacgtcaaggctccacaccctgagaaatttttcacgttcctcattcgagctttct

SEQ ID NO: 241824 - DNA, 284 bp, Gossypium hirsutum
cgcaaacagaagcttcaggtggcgctttctttgtgaggtatatatcacgctcagtgttgggtttcggcttctaaccattgattcccacaggcatcttcttcacctagaaataaagagtagagggaggaagagagaggatatgaagcagggaaagcaagcagcatatgattaaaatggtggagggagagcagtaggctttgtttatgaaatgttaacgttagacgacgttgtattgtagatttgttgtacgtactgattggaaatatagagattgctcttggtgg

SEQ ID NO: 241825 - DNA, 388 bp, Gossypium hirsutum
gtgcttttgattccttttttgttcttactattttggtgttaatctatgcctttgttgagtttgttgagtaaaaatctcttttttattgatgaaaaatggtcgaacccttacaaaatgtttaaatttggcttttatagccataccacttgattttgtattattttctgtcttttctttctaatcccttgcaggtgcaagtcgttggagaggcggtggagacgtgaccggtggagcggcggagcaggcttttggcagaggggtaggtggccgaaagtcaaggggtggttgctgcgccaaaaagctagggggctagggtttgtgatggctttgtcttttctgaattgggtttagggtttcaattgggtttgggctaaatgtggggtttagt

SEQ ID NO: 241826 - DNA, 343 bp, Gossypium hirsutum
cccacgcgtccgatagatctcttttccacctatgttaaaggggtatgccgctatatatgctacaccgaagtatgctcctagctaagctactggctttggatctgcctctcgagcacgagggtcgtattcaattcataaggctatcgatcatgaaggtttgcctatggctctgtatctacctctgtctgctggtgcttattttgataagctgcaggatcaacgactggatcagctggaactacaaaaggctatggctatggaacttttttggatacttagcaaggtgctgcatcaaccggcgatactttctatgccgagagcaccaatagatagcttagagaac

SEQ ID NO: 241827 - DNA, 191 bp, Gossypium hirsutum
cgcgtccgcggacgcgtggggaacaatttaaggttcaaatacaatgtacaaagtttatttaaaaaaggagggaaaataaaaaaaaaagggcggacgaaaataagagaaccaagattaaatacgtgggcatgcgacgaaatagatctatatatagtggccacctaaatttcaaaatcacttgggctttcgaa

SEQ ID NO: 241828 - DNA, 195 bp, Gossypium hirsutum
cccacgcgtccggggaactgaaaatgtctattgttccaatgctttttctttaaactaatgtggaacattattcttcgtgatatgagtaatcttccccttttattctcaaagaaaaaaaacaatctcacactctttataaactactactcaaacttgatctcaactatgataactaaaatgtgtttcacatttaat

SEQ ID NO: 241829 - DNA, 144 bp, Gossypium hirsutum
agctggcagaggtgcaggactaatgctggcgaggcttgtgaaattggaactcgcgcctaacgtgaccttttgcagttacaggtggcatgaatcaacatacataattgggcgtgcggactccatgagaatgcttacttaatatag

SEQ ID NO: 241830 - DNA, 293 bp, Gossypium hirsutum
gtgaattgcctgacgcatgaacacgacaaataggaagtgtttcgtctcagtattctgtgatgcgtggtggaaagttggcgaccatagcaagcactacattatggactggacatagcgatataaggtcgactggaaggaaatcacgggaagtcatgaatgacgcaccgacctttagcacggagaatatgcgaaataacacgaaagttatatattacagccgaacgtgtatgtctatcattggaggagttattgctggaactttagggatcacaggctttatcggggatatcttt

SEQ ID NO: 241831 - DNA, 359 bp, Gossypium hirsutum
cgcgtccggtgccctgatggggagagggctcagcggggacgcctacgagatttagctgttttcgaaagggtacatggagatcctcggaaaacatctccatctttagctgtcaaaaagaaccatatcagtaaagcatgtccaagcatcggatgtgcgccctcttgcagtattagaagatacattaaactaccttttaaacctactggactcgagtgaacatcctttcgaagtggttcatgacttcattttcgataggactcgatcaataaggcaggatcttagcatgcagcatatagtcaatgatagagcaatttgcatgtacgagaaaatgggacgatatttcttgcccaggaacatat

SEQ ID NO: 241832 - DNA, 378 bp, Gossypium hirsutum
cccacgcgtccgcacgacccacacagcagggtgagataccagttcctagggctggtcatgcgggtgtgactggtgcggagaactgctttatcgttggagggggagacaacaaaagcggggcatgagaaactgtggtccttaacatgtcaaccctcgcttgctcaggtgtgacatcacttgaagggcgcgttcctcttgctagtgagggtttaagcatggatctgggcttgcttaatggggaagacatacttctatcttgtggaggatttaatggacacttccacagtgacgttcatgttcttagacctagtcacaagtcatcctatgcaatccaagcaaatggatgggtcttttcctgacagagactctgctgggcat

SEQ ID NO: 241833 - DNA, 132 bp, Gossypium hirsutum
atgctaatgtgagctggccactaggctggggaagcttacgagtaaaaataattgcttttatcaacgcttttagttgttctttaggtttcaaggttctatggcattgaataaatatgtttttgcattttgcaa

SEQ ID NO: 241834 - DNA, 172 bp, Gossypium hirsutum
aaatctaggaagccgctggcgttatattccaaccgtaacgaaaatacacccaggtctggcggtatcctaacgttgttgagggccatcaaaaggaggggatagaagctggtcatttggcaacaggtggaaccgcatgcaagcttcatctttaataaggaggccttcatgctga

SEQ ID NO: 241835 - DNA, 443 bp, Gossypium hirsutum
  unsure (1)..(443): unsure at all n locations
cccacgcgtccgcccacgcgtccgccgttcgtttggtttcctgaattcgctccgcccgatttctcagggtccatttcaaagagaagcgaccaagtaaactacagattgagtgaataaattatataaacccttgcccaaatcttcctcccccaccaccaaaacgtggagaagaaagttttatacagtcggtcatttacagaggcattgaacaatggatgaagatcacaacaacggcggctttttgatatgggaaaaactgatagatcgttttggttgatgaagtgccccgtcgtggtcgccaagtcatggaagagccaactagcttcttcttcttcttcttcttcttcttcttcttctgattctcagcctctcgccaaggttgtctntttccttgaaccctttcaaacccgacgaccctttcttacaccagtttactatggagg

SEQ ID NO: 241836 - DNA, 444 bp, Gossypium hirsutum
ggaagaagaaaaaaaataaaaaataaatttattaagcctctgctaagctttttcagcccgagctctcaacgccgccgttctccgacaagtcaattctcggggctccgtcaagctccgatttgagcgaggcgaacgcagttttgacggcgaatcctcgaaggtgatcgtgggagcacgtgcgaggaaggcgcgcaagggccggcgacgagggtggctgctgctagcttttctgcttaggcttttcttgatttaatttcgtgttgggctagggttagctctttaggttattgggcttggtaatttgggcctcgcttatttattttgcgctttgggttaaaattcgccctttgggttttataattcggtaaataggggctggggcaaaaaatggggtaattacaaagtattatttgggttaatggaaattaaaaaagaaaaacctta

SEQ ID NO: 241837 - DNA, 210 bp, Gossypium hirsutum
ttcagaacctgccttagacatcgtgtgttttttatggattcagcgacgtttctaggaacatcctggtgtcaacacagcagtgatgaagctgagtgtccatataacccacccccacagctcgagtgatagggctgaccttcatgagaagcttaacaacaccttgcagtcacggaagcatttaaacatggtaacctcgctgatgcataacat

SEQ ID NO: 241838 - DNA, 364 bp, Gossypium hirsutum
ggtcgcccacgcgttcgcccacgcgtccgcccacgcgtccgaaaaaacttcaaatcctctcccccttttctctctgccaacccagaatccggcgaggagtagaccggtcgcagtcgtgccgtccgccgtgccggccaccgtgaatcggaaaatggtagtggagcaagtaggtggctgacgtgacagtggcggtggagcagaggcgatggccaaattctgacatggggcggcagcagttgattaggctagggtttttagttccccctttttttgttttgtgtattgggcttgggttcttttaggcttaaggcatttagttgggtattaatttgggccagcaaattggacttgtataattataact

SEQ ID NO: 241839 - DNA, 236 bp, Gossypium hirsutum
ccggttctaacgggccgctttgggcttcgttgtacatgggtcatttaattttattattttggttttcgtttcgggcctgggctattaagtttgatatgagagggaagataaacgttgataaaaatttctggtaaatgagaaatttttgttaagcttgtaagaaatctagcaaaagtagaatttttctttagtttaaacatttagaatctatcaaaacacctctctttttgtatact

SEQ ID NO: 241840 - DNA, 313 bp, Gossypium hirsutum
ggacgcgtgggcagctcattgtctctagcttcttcatttgcggtctcattgctccccacaaggcttgttccccatactgctgctattgaagaacctcatattgctcactgttgctgtgccttattttatctcagaaagcctcttcttcatggacttgagcttttatgactatggctagttcgaacagtcctatacctgtgggcgatgggtttaatgagtatgaaagtgcttttaaacgtcaaaaggcttatcacttcaaaagtgggggatgaaatgaccaaagcttggattgcgagaaccaaaaatgaatttg

SEQ ID NO: 241841 - DNA, 386 bp, Gossypium hirsutum
gcgtccgcctgccgattttctcccagtcacgcatcttttctgccgatttgctccctccatttcttttcttttctttttctctctgccactctttcgattgccttctcaaccaatcgacctttttcttttcttggtctctctgtcactctttcaattgctctcagttggtgggtctccacgttactgcaactgaaagggtgttcttcatatatctctgcccccatcaagtcagtacaggttagtttccccgattgcatgtttctattgctgcttattttctattgctgcttatttccctttgagtcatcatatatcattgaagtaaaagagaagtttatcttcatctgttgtgcatgtatatgattgaaaaatagatttgttatctc

SEQ ID NO: 241842 - DNA, 384 bp, Gossypium hirsutum
ttgttcctaggagtttacgaccagcaaatgaagagcctcacttcatcatctcatctgatttaaaactgaatcactcaaactaccaacagaagagacacacgcatatacgtacatacatatgcatatttaaaaaatacgtacacactacattttaaatttgagtaagaaatatattgaagcatgtggaggaggttgtggtggcgcgaggctttgaagcagggtgtgtctgcggccgttgggaggagactttcgcctcctccgccgaacccgctgctgttgggtggagtgacattgggaaccaatttagtattccgcggtacaaaaattaaggtttcttcttcatcttgtgaaggccaatgcaaccctctgatttcaaaaaaggca

SEQ ID NO: 241843 - DNA, 316 bp, Gossypium hirsutum
gcgtccgagaccacagcctatgctgggcaaaggtgttacgaatacctgccatgtctgccaccgcggcctccttgattccttcaccttctgctctcttgggtgcaaggtggttgggacatccaagaacttgattaagaaaggaaaattatccacagaaatggagtactcataaggtgagtcgctaaacataagtgttagcattggagggtataccagaacatacagcaaagcttgacgccattgacgccgacacctacgggcaggaagaggaagggagtacctcatcgagctcctatgggaggctcattataggata

SEQ ID NO: 241844 - DNA, 414 bp, Gossypium hirsutum
gcgtccggcctcacttgaagatgaacaaagcaaagtcaggtcctttttctgctcatccttctttttgaggatggtcctcatttcaaaacaaagttgaagatagtaaacatgataagagcacagcttctgttttttgctttgtggttcatccaaattatgccctatctttgtagttttctatcatgttatttattccttactaagaaagtttgggacctcacctagattgagaacaatgccgttgaaggaggaaatagtgatataaaagatcgacgtgtgccgcatatcaaggcattgatttactatttatatcaagtcatgatataaaaacatcatctttctgggatacttacatttattgaacttattatcaagaccggggatttaccatttggtcaattgttattttggaaa

SEQ ID NO: 241845 - DNA, 342 bp, Gossypium hirsutum
ggcctgtcagaagtgagactgacgtatgggatcatgaagagcatgcataatagaatgccaggctacacgatgatgttcctattcctggataatacgataagatgaggaggatatgactcatgagcgtttaaggctgaggacatgttttataagaggagcgctgctctatacatggtgttgtgattgaggagtcctacttaaggttcaaagcaatggaaacccagacatcaatgtcagctgcatcgtggacccgcctcttccacaatgtctgaatggcagcattcatagttggatttattaatcttcttgaatctgtttgagtacagcctatacttgtgactc

SEQ ID NO: 241846 - DNA, 415 bp, Gossypium hirsutum
gtcggaagtagtaagcatgctagaaggaaggagtggcatcccggaaatggtccctgatcctggtagttacaatcaagatttgaggtttaaagccatcagagaccatcataagtctatgaacaataataatagtaagtggagcagcagctcagcatctggtaatgagattgaggagtcctacttaaggttcaaagcaatggaaacccagacatcaatgtcagctgcatcgtggaccgcctcttccacaatgtctgaatggcagcattcatagttggatttattaatcttcttgaatctgtttgagtacagcctattacttgtgactcatgattgtgaggttccattgaaacatggtgtgaggtaagggggggatgctttatttattaatttggacaaggtgaaaaccttacaagat

SEQ ID NO: 241847 - DNA, 296 bp, Gossypium hirsutum
agacggtggaaaaaggactccgtcttcttcaagaaagcgaagaaactgtttgatgttgagattttacatacagatcctcccaaagaagggtctcgaattggagttgttcgtttatgttcttattgggaaaatttaatgtctgattgtcgttgatttggggaatttaccaaaaatttgtcgaccaagtcgatgaaattggtgtgctaaattcgatggtttgctgcttcgttttctatgttaatcggagctgataattgtctaatctaaatttgtttaatatgtcgttgatgatttac

SEQ ID NO: 241848 - DNA, 303 bp, Gossypium hirsutum
ggaaatttgcattttgaggcctagcttttgcttaaaatttatgcttcaccctaaacggcgggggactggcttaaaaaaggataatcatcctgatcgataggcaaaaagtgtggaatgccggcaagaaatgaatagattcgatggaacataactcctaaagggaggcaagtgccaaatgaggggggggcgctttagggggtcaaagcttaccgccccgggcttgcgacgtcataacctttctataggggaccttaacattaattctctggccggggtttcacaacgtcgagattgggaaaacct

SEQ ID NO: 241849 - DNA, 308 bp, Gossypium hirsutum
ccggataccaatctttaccgcacgttaaacaaagggagagtgcatgcatctcttaacatggacgtgggagcaccgaatccattgagattgaattcgaaaggctacagtggagtgatataggatgatgcgaattttatcggtggatcgtatgcatgatcgccgggggtgctttacagtgtgaagggctgcaaacttgatcattcttgagggcgagagtttttatattgtgcaattgatatagctgtgaatgagattggtcatctgcatcccgattgcttcacgtctattcagaacctttcattttctta

SEQ ID NO: 241850 - DNA, 230 bp, Gossypium hirsutum
ttcaagcaagccgagctgatatcaaaatttctggtacttatatagcacttttcggtggtatgctaaaccctgaaacgaattcgttaccttcgtgggggacaaactagtattcgtattattttctgggagaaagtaatgccggtgtaagctgggtaaaactatgattttatggtgttctcgtttcagaagaatagcagaattgggaaaaaagatgatgctttgagctacta

SEQ ID NO: 241851 - DNA, 180 bp, Gossypium hirsutum
gtcaaggacaaggaaaagataacagaagacggggaacgtgacaacaacttcgagaagacgggctaaacccgggaacgaactcgacgccataataggggacaaaccattgaagacatgaaaaaggaactgaaaagctagaaagaagcaagcatagcaaagcaaagaaaataaggtgggaca

SEQ ID NO: 241852 - DNA, 325 bp, Gossypium hirsutum
aaaaaagttgaagcctgcaaaaaaaagacccatgttttcttgctcttttctcactctaaatttctctggctttattaaatgataatttagacaacaatggcgcatcatgggttacggtacacttgtttggaaaaatttaagggctttttttccttcgcaacttgcagaggtctctctctcaagtcctcagcatgatctctcatttttatccgttttggctttctcttttcaaccctttcttcccatcctctttatcctctctctctgcaaccttacctctcctcccatttccctcaccatgccaggcaaccaaaaagttatgtgg

SEQ ID NO: 241853 - DNA, 356 bp, Gossypium hirsutum
attcattcaatttctttgcgaattttattgcaatttctgtttctttttcctccttcaacgaacgatgggcacgttctcggctttcttcgattctcaatcgagaagccagtggaattacaacactctcaagaatttccgtcagatctctccgattgttcaaacgcatctcaaaaaggtttatatgaccctatgttgtatgcttgttgcctctgcgtttggggcttatcttcatataatctggaacattgggggttccctcacgacatttgcatgctttggagccataatttggctccattctacccctccttgtcaagagcaaaagagggtttctcttctaatggcatcagcagttt

SEQ ID NO: 241854 - DNA, 257 bp, Gossypium hirsutum
atgaaatcaagttcttggtaaaaactatcactttaaagtctggatgtcttcatcgaccggggggtgggctgttatcaacggtcctcccccagcgctccatgcaactgttcagtttctacgctttctgggaatctattcggcattcttccatcgttaagagactgccttaccaggtatctatagcgcgcggtcttgactttggatcccattcagttcacgctatggtacacaatctttgtatacactggggatatcct

SEQ ID NO: 241855 - DNA, 277 bp, Gossypium hirsutum
gtgccacgagacagaccaaaccaaaaacgatgagaagcagagagagaaagaaacagaagaaacagacctggcaaatgcagacatgaagaagaagaaaaacggcatgacggctgagaacagaaacgaaggcagagatgaaaacacaaaagacaacaaaacagacggggcccaaaaaaacaagggatacacaagaaaagacgagggagagaaaaaaaagaaacagggggatcgaaggaaggagaaggagcaaactgggcgttcagacgaagggcggaaa

SEQ ID NO: 241856 - DNA, 121 bp, Gossypium hirsutum
gacacacatgcataccgggtccgcacactcttccgtggacaacatatggctgaaggaaaaacgcatccactgctctgttaaacctgatccaccgaaagcttattgcgtcctgcataaatcc

SEQ ID NO: 241857 - DNA, 180 bp, Gossypium hirsutum
cacaatcgtatggatttatttaaggcgtggatggatcattagacatacagcagttgcctgggctcaggatgttgggaacgatgtagctcctgttctcgaagcgacagctatgaatcgcaagtgttattgacaccgattcgctataaacaaagtttacagagggtgcttggcctgaaaatt

SEQ ID NO: 241858 - DNA, 251 bp, Gossypium hirsutum
gcgaccacgcgtatcgagaaaagaacaagtcatgggaaactactatttccaacaaactggtgggaggtgccaaaatcactgaggagggagaaccccgaccatagacagcaacgtgatgggataataatgaaactacgaattgaaataaggaactagagggggctaaagagcaaacacaggctggatatgaagacggacgcgcagctaaaaatagctgtggacaacaaaagaaacgagcgaacgaacaaaga

SEQ ID NO: 241859 - DNA, 168 bp, Gossypium hirsutum
aaagctttgggtagattctttcttttaatatatcagaggtttcagaaagaaaaagagcattggtaagtgaaaatgggatctggcgctggaagttatcttaaggttttttttaaaaaccttgatattcttgctgggccagttattagtcttcagaatcctctttatgcc

SEQ ID NO: 241860 - DNA, 332 bp, Gossypium hirsutum
atacaagctcgctggaatgtgaaatccagggttgtgtctacgcatcatataacggcgggaacggcgtgctacatggtggctgaggcactcgaacaaatggtatagagacatatatgcggcatagatgtggcaaaattgaaaatctatcaatgcttacccagcgaacagaaccaagagctaacggcattacttgaccactgcggcataacttacttcgtgttgactatggacaccgacatactgatactaaatttggaacatacctgccatcctatgacgtttagactatgagtgatatatgcggtcatcacagagctgatcaaggacttaaa

SEQ ID NO: 241861 - DNA, 220 bp, Gossypium hirsutum
aaccatcgtaggtggtaaattaacggctggttgatgtactaacgcttcatcaggcggggataggattgctactggtcgcgttactgcccctgttaactaacctaaaacaccgtatccaactgatgggcctaccacttcctcaccaacttatttaccaccggctgatggtactgagaactctggggaggattcagccccatctaaatctgctacagcttgt

SEQ ID NO: 241862 - DNA, 282 bp, Gossypium hirsutum
gagagatagtcatggttttcgggaacagagggggccacgatctagcacatgtatgcagcgttcatatgcgaagctaatggggtgcagcattcgcgaaactgcttgacgagattggaggatctctatatgattacgatttcatggaaaacaacaccattgtcaatggcgcccgcatacaaaccaatcctctcggtgggcacacctacgtgaacgccctgcatccatatgataattggctgcaagacatcgatgaataggactagactagcccataaccataga

SEQ ID NO: 241863 - DNA, 270 bp, Gossypium hirsutum
accaacaatatgccactagcactaatttggatgggaggtggatggcgtctcgctcaatcaagagaagagagttgtagattcgtagaaaaggggaagagcctttactttctatgttattagaaaaggcgcggtagcctatctatagttaggagtcttttcttgctcgctagcgctttatttttaataaggacgcttaggctctactaataaaatatatatgggcttttaattaaggtgcgcaggttttgaaccctatacaaagggccgttt

SEQ ID NO: 241864 - DNA, 179 bp, Gossypium hirsutum
aaaaaatagtaagggttaaaaagacacagattgtaaaacgaactaacaacaaaaaaacaaagggaataaacaaacgtgggggcggggcacccttctcgtgggttgcctgacgtttttgttggttctcttccggatcccgttttccatgcaaaaaagaccattccgctttgggcccgggt

SEQ ID NO: 241865 - DNA, 338 bp, Gossypium hirsutum
gcgcgacctaacatgaggcaagctgtgagatatctcgacggagaggctgaattaccagaacttttgaaaccatcgaggatatatgagggagttggcgaagggtttgacgcttttctgcattcgtccatgtcctcaacatttgataatacgagttcgtattcattcacggatcaacatggcaatggtggtactagtattgtttctctttgagaaagtagactacttctatatatatatataacaaaaatgacagatatttcacatgttatagcatcattcttcaacgacaaaattttcagttctcacatacgaaggcattaatgagggatgtagctgaa

SEQ ID NO: 241866 - DNA, 416 bp, Gossypium hirsutum
cgcgcaacaaaataatctacacaaggaaatattattctgggcaaacacccagggcattcccagaagagatggtccattgtttccactgctgattcacatcgagggcagattgcatattagtaattagctttctgtattgcatgttagctcgtgtaggcaaataattccaggagattttccaaactgtaatcttaattttggagggtagatagccatagttttttatagaaattgttgtagtcggtctgtaaagcataagcactaggatcttccaaccttgtttataggcactacggatagagtattctcccgagagttcaccactccaagccaggaaatcattatgaggagcattcaccagaggaatatgcagaatcttttcaactactttgtgaggaaaggattgacaatcttct

SEQ ID NO: 241867 - DNA, 317 bp, Gossypium hirsutum
atccgactgtgcaacggatgggagctatccgtttccgcggtgctagagcattcactcgatcgatgggactctgatggtaagggcaaaagattctagacaggccaataacgagagctggtaacgtagccatagcctcgcacgccttgaccagcgttgtacaccactcgaaagctaaagcatgtcattctaccaaacatataccaccatacatcgtgctgtacgaattttatcatgaatactaaccatgggctggtgccgacattacataccatataccgactcacctccttgtggatacaactgccgcttgttacaga

SEQ ID NO: 241868 - DNA, 278 bp, Gossypium hirsutum
ggatgaagcaaagcaagatgaggggtcagtataaaacttggccagaaactaccacttgcggttgattatgattgtattatctggcttgcttttgagacaaactaaatatattgtcaagagagggacattactgagagtcccccctttcctattttatttttactaagtatgtttcatctgtgaaactgtgagaaaaaagagttatctgccttgaaacaccaatagatgcactggttgtttggcgaattatggagggaattaatgaaaatatgatattg

SEQ ID NO: 241869 - DNA, 383 bp, Gossypium hirsutum
caatctttagatgtgtctcccgattctgatcaagagagtgcttcaacaagagcaatgggtaatattgaactctttgatggtgtagactgtctgacaaaatctcagctattagagactgttgaaagacatgagctggccaatggagatgataaagggtgtctagaacttgaaagcggcaagaaatctagtattgtgaaaaatacaagtgtggagattgtagttcatgaagatgcttttgactcgatctatggcaaaaatggctgcaaccttgctcgtctcaaagagatctcaggtgcaaaggttgaagtacatgaaccttgtggtggtgaaagtgaggggagggtgttgatatctgtgactccacatcaaacccttatagcaca

SEQ ID NO: 241870 - DNA, 440 bp, Gossypium hirsutum
  unsure (1)..(440): unsure at all n locations
gctacgcaaacgagcacacattcgctataattatgaggcaggtgccatcgctgataggcgcgcggaatgactttggctgtccttgcgcngacctaacgtgacatgctaaaattatcagactccacggataaactcgtgaacaccactactttccactagaatcaataacctctcttaccaaacccaaaatgattgaaaatgcagccttgcccaccacggtaaccaattaactaatcacgctcttagattgatccatcgttactattgcggaacgcttgaagatcagatataccacatatcatgttatacgttacatgctcatgcgggctctgccgctacctgtgcttcggaaaaaagtacttggcaaggttgtcgtttgcatcgatcgaagctttgaacatcaaaaggcttaagttattgattgaagcccattgaaatta

SEQ ID NO: 241871 - DNA, 145 bp, Gossypium hirsutum
gcgtaggcggatacttgattgagacacatgcgggggagctgcggcgcactatggactaccatggtctcttagttcacgcatgatattctttcgttcgtggcatctgatctgatctacctgaactgagtgacagagcttaacatgc

SEQ ID NO: 241872 - DNA, 256 bp, Gossypium hirsutum
actttaaataattgaaataccgcatggaatgctcttaagcataattatgtggagaaaagttgagcatgagagcgggtgcacccacaggcacaagcagcataacatgtcaggaagaaagaaggaaacatgtcgggtggttattactcccggacaaaggacggaacccgcacactgttgctgcaaggtagccggttcctgatcatgatggcttgttgccatgaaagaaaccgagatcgagcaacgaccttatcaaact

SEQ ID NO: 241873 - DNA, 356 bp, Gossypium hirsutum
cccacgcgtccggctcgtactggtgaacaaatgacaccgaatggctgcctgtgatatactccaaaagtgcaagcatattcctcagttgttactagcctttctagtgaagagacagctgaaggaaccaatataagcattattgagaaggaatgttggattcagaagcaactttcagcttttgtagcggccagtggagatcaacagtcatggagaaaagggaaaccattgagcactgaagttgcagttttgaaagatcatgtccctagtttcgatgtcactcgtgaacctgaggttatagatttattaaccccttctgccagctatagagtcaggccatgcaccaagaaaagaagaat

SEQ ID NO: 241874 - DNA, 356 bp, Gossypium hirsutum
gtctctatatgtcagcatgagttacatgtgacatgccacatgttactatttggttactatgtcagtcatgtcaatttttaactgtagaaattgatgaaatttttacagaaatgatcagtttgctctttgatttaatgtacagagaataatttgcccattttttagtagagggggcaaaatgcaatatgacaccaaggattagggccttcatgatatttttacgctagaaagattagaagtaaatccactataccagtggatctagttttcgatgtttctaagatgcccttcatgtgtgcctccatacaaagctaagtgtatgttggtttttccatctaagtacttgattaatgttt

SEQ ID NO: 241875 - DNA, 344 bp, Gossypium hirsutum
cgggggaagcacttgtacacgctgatgcatgtgagttgccatgttcttgcagctttgatgggggggaaaaaccaatggtgaacatccttctgtttggctggttgcagaaatgagttaatgatgtcgactttctcagcggtaatagacatttataactgcaaatggagttaatagttgcccaaaaccatgaagaactgagatggccagttatggactctgtgagaatcagatactgcttaccagaaagcttatttgtctggctgacaattatggggagtttagtttagccggtgaagtggatcttgtttagctgacatgaaacattcatgttctggtcccacaat

SEQ ID NO: 241876 - DNA, 415 bp, Gossypium hirsutum
cccacgcgtccgggagaactaaatgagagccatttcttgaattcattcccacacatacagagacagagaaagccatttcttaatatcttacatctgtactcgaaattatacttcatttttacttgtaacaataataaatactactgaaaatagtaccaaaaatggaagactgggcaaccctttttttttttcaaaaaaaaaaaaagaaaaaagaggtttcaacgctttgcaaaatcatttattaaagtacccttctttggagctagttcacatctgacactggctgactgaccctttaagcattaaaaattgggggggggcggtttaaaggatccaaatttaacttccgcgtgggagaaacgaaaaaattttttataggggcacctataaataaattcctggcccgtgttttaaa

SEQ ID NO: 241877 - DNA, 352 bp, Gossypium hirsutum
cccccacgcgtccgttcagtactttattcgatgtatgcttttttccgtaaaaagaaaaaaaaaaaaaaagagaaggggaatatttaaaaaaaataaaaactccatccaaaaaaaaaaaaaaaaaaaaaaaataaaatactaaatttaaaaacaatactaaaataaaaaattatttcttaataaattaaaaataaaaaattctcctccccttttctcacaccttatatttttttttcccgccctccaaaaaaaaatccctcctttttgataccctttatccctatcaaaacctaatttcttttccaacccaatttctctttaaaacccttgccatttctcccattttttccct

SEQ ID NO: 241878 - DNA, 224 bp, Gossypium hirsutum
gctcgagccttaaaaccaacattgtttcttggtttgctagtatttagtatattgcagaagctttctggtgtgtgaatttctgctgatggcattgttccttatagcttcactctcttctttttatgttttctatatatttatttttgatattgttaatcatgggtgttgactattatatttaattcaaattattagtatgaaaaaaaaaaaaaaaacccttccca

SEQ ID NO: 241879 - DNA, 369 bp, Gossypium hirsutum
  unsure (1)..(369): unsure at all n locations
acgcaaatntngctttgatttgctagtctttatgccattgtatttatgaagaatactatttctcttatcttgtggttaaattgcatagttttcaattcatatatgtccataccttagtgttttatatcggcggcgaaacggattagcgattatgatcagtactcccaagatcattgctttggatacgtcgtatacatcgagatgttctcggtttattgtaattatcccgtgatgcgaagtttggtctagcttcgggaataggtatttgttttacatatttgtattggacattcatgcaaaaggccgttcatgttggactgccgaagtgttcatatttgaatgattggggcaactctctttaagttggtc

SEQ ID NO: 241880 - DNA, 315 bp, Gossypium hirsutum
  unsure (1)..(315): unsure at all n locations
acgcgtcccgtcaccatctgccaaacgtgatcacaactcggagttggacgatggtttccgcgtatgttcggtttatagagtgagagtgccgtataatatcagaacaaacggaagagtttgtacacggcttaactcgactcgactctataacctatggtaactaagtcattaatgaagaaatatgttaccagttgagcaaagtttaggatatttatgtaattttttttagttgcgttgcttgatttgatttaattacttttttttgggaaggattggaattcaaagaaggtgtggtatggatttgaagattcntta

SEQ ID NO: 241881 - DNA, 396 bp, Gossypium hirsutum
gccgtacggagacgcgggcgcgcgcgaacggaggctcgcatgagtgcagaggcttggcacatgcgggtgagaggagctgctgcgatgctgaggctacgtgggaaggctagaggcgcgcttgtagggaaacagcgctaggggcttctagggttccttgcctctgatttttgttttgggctgcatggtaattgggcttgattaggttgggtattaagaaattcgggtttgggctattgggtttagaatcaggtttatgttacatctgggctttgtaatactaaacatttaaaaaaggactgctatatatataattttatttttggtttacaaaaaagaaaatgaaaaataaaactgtctaaaaaggttggggaagttgttatttggttatttttaaaa

SEQ ID NO: 241882 - DNA, 436 bp, Gossypium hirsutum
tcgcccacgcgtccgcccacgcgtccggtttggatctccagtagaagatcttgaacagtgaagttgggcaaaaagcctagagatttcggaagtgatcatggtgactagctttacgatcgttgaacaatcgattgccatcctcgttatccttggtcatgtccctaatgccaaactccagccattttcttttgttggaataataattcttgatccatgagttggaccgtgttttggcttcatatggtggttgctcttggtgacttaagttttccaatcagttgttactttgtttcttgaatttgctagaaattattttgctaggattttattacaaacgtggtttcacgatcagatctgttttatctgctacagcaacaacgatttgaatagaaactcatcccatcaaagttctatttatcttgttggttcaagcaat

SEQ ID NO: 241883 - DNA, 412 bp, Gossypium hirsutum
  unsure (1)..(412): unsure at all n locations
gtccgcccacgcgtccgattagtgccaaggctcaaaggaaggttgcgagagagatcaagactgctcgagcgttcggtttaatgccatttacaacgatggggacaaagtcattcgttttcggaagatcaatggaagttgataataaagattatgaatacgaggctttcgatgacatgactcccgctatggacgaaaaagatgcttgagccgagatttgagccttgaatagttccatttttatggtatcctcctaccatttctgatgttttggatgaaacagttcactgcatttactatcatattcggtgttttgactatatcagcaaatgatgttttcttctggacttgttaaaagaaaaaaaaccttgtacgttcttagattgatctangcttttatatagaatttatgttt

SEQ ID NO: 241884 - DNA, 404 bp, Gossypium hirsutum
cccacgcgtccgcccacgcgtccgatggatttcatgttcgttgtattgataagtggcttaaatcgcacacatcatgccccaaatgcaggcattgtttgcttgaaacatgccaaaagatcatggggtttgatcaaagtagctcaccggaatcatgtgttccagctcaggacatcattgtgcatattcaatcattggaacctgaaggtgtggcgcgtgatattaggggggttagctgatataattctttttcttttggccgaaactggaaatccctttgccactccatctgaaggcgttatattccatgagcgaagctctttttggagtttgaaaggcacccaatttacaacattaatgttgttcgcaagttccatttatcaagcaaaccaaacttcataacatta

SEQ ID NO: 241885 - DNA, 186 bp, Gossypium hirsutum
  unsure (1)..(186): unsure at all n locations
ttgcaattaccagactctgggatggcatgatatgaggtacatactacagtacagctcaagcgcgaaaataaactgnatgtatcgcccgcatagatgcccatatgccagagctgaatgctctgtcaactggcgatattgcatttcgtggcatgcatctaaagaaagatcacagggttgacatgcatg

SEQ ID NO: 241886 - DNA, 318 bp, Gossypium hirsutum
cgtccggaactggtagagcacaaggtcgatctttggatgattttccaaaccacaagattgttgcggtgggagctggaagtgcagggcttggtgttcttagcatggctgttcaagctgttgtaaggatgacaggaaatgcagatacagctgcacagaacttcctacttgataaagatgtacaattttgtacctcctttctagcttttttcatcctatttgtgcaaagccttttatgttcttttagatatgtaatgtcctttctcttgtgtaatgaagatgtggattttatgaactaatcatgtaaaaatgttttgctag

SEQ ID NO: 241887 - DNA, 265 bp, Gossypium hirsutum
  unsure (1)..(265): unsure at all n locations
agtaccattagatcatcggcgttcctagaatgtgagctatgtgtatcgtgcatattatgcccttactatacctttcttacaggaagaataagatgatcaactctcacgctgaaaataagcctcctgagaatgttctacttgtttgtaaattgaatccagttactggagtgagtgcttattttgtattcanngntggccataagtgtgtgtacgcgtattcattgatttgtttcacttaatttcgacttttgattgggagaagttt

SEQ ID NO: 241888 - DNA, 428 bp, Gossypium hirsutum
  unsure (1)..(428): unsure at all n locations
cccacgcgtncgaaaaaaaagaaaactgagctttttattttctctgcaggtccatatgccggcgaggctccggccatcgctccgccgtgtctccgtcgctccggccaccgtgtaatcgcctcaggtataaaaaaatttctctctttttttgtgtgttttaaaatgtattcacttttcttttgtatatattgcctattcacacatatatgggtataaaatacatcgattggccatgaaatatcaacgaaaaagaaagaaaaaaataaaactaaccaccttaggactacggcttctgttcttgagggcttttggtctgtttggatgctttttttatttcttgaaggctaataatgcttttttttttgcttgaatctatgttctttttttgtatttgaaaaatgtccgaatgtacaaaaggtaatggattc

SEQ ID NO: 241889 - DNA, 447 bp, Gossypium hirsutum
gttctttcattttgataccatttttgcttcccctataaggctctacgagttttttttttcaaaaaatggttaagggtttcatggaaaagcttgaatgggcaagtagttatggtaagaaacaatgcagaaaccttttttggaaaatgaaagcagctttgaagagaagaaggaaaaggcagttcaagttccattatgatccttcaagttatgctctaaactttgatgatggttattgccattgtggtgtcggaacaagtacagtccaacttgctagattgcagggattttcagagtgtgagaatgttatttgggtttatgtttttgggatcaaattgtaaaaaaaaaaccaatctctttggttttgctttccatgttctgtttttgttcatcttgtttctgtagaaataaaagagggtaaagcttgcagctatggttttttggaggtac

SEQ ID NO: 241890 - DNA, 224 bp, Gossypium hirsutum
ggctccccaaaaacctctgttggaactctttgttaagcttattattactttaactatccttttgttgtgttggatcattcctcaattgaacagatgttgttgagggtcaaaatactctgtttattgatttggtgttcaaacaatggcactgagtttgctatgggcttgaaattatcatttcccttttgtttcttttaaaaaaaaaaaaaaaaattaattttata

SEQ ID NO: 241891 - DNA, 262 bp, Gossypium hirsutum
  unsure (1)..(262): unsure at all n locations
tcccgttcttcgttcacggtctaagtctcgctcccgctcttattccggttcagactccaagtccagttctcgctctcgctcagtgtcccgctccacatctgctttcccgtctagctctcgttctcgctccacatctttatactcttctccttcntcgagcggagctctcgagtcgcagcctcctagcgtcaagtggactgagcattaggcaggcgtccctctcgaattaaaatattctgtcgagagacttcatcgagtttgt

SEQ ID NO: 241892 - DNA, 218 bp, Gossypium hirsutum
  unsure (1)..(218): unsure at all n locations
cacgcgtacgcccacgcgtccggttccnccatactccccatattgaatgtgtttgcctattggagcgttgttgaatgatagccttcacctatgggatatatgggattctctattttatttcatgataaaaattataagtactgtaacttataataattcaattttgttttatatttttggtccatagatttttaattggtgcattacttggttggaat

SEQ ID NO: 241893 - DNA, 312 bp, Gossypium hirsutum
ctaccatcaacggtatgatgcttttattaaattttccgatcatacaactcaaatgggccgcttctttagtttacctggtggtgcccgaatggaatgggtcaatactatttgctttctgcaccatttaatatgaatgttcaaactttttgatgttgcaaaactatatggcactatggattatgctgtacatatttattttcctgtaagaaagataaaatcattatagagcataatccatgcacaaattaagcaaaaagcgcataaagctggcataaagagcgtgaaagccccacaattgccccttgagataca

SEQ ID NO: 241894 - DNA, 434 bp, Gossypium hirsutum
ctaacttttggactcaacgaaactctaagtctctggttagacaacgtaacctggaaccgaaggcttggtgttaagtcctctaactatcaactcatagcttcaggaatagtttcaggtttataaaccttagcttaggaaatgccttagagaaaaatccaacaacctataattccttaagacaggagtcccagacagattagtgattagtattggatggattatcgagttattaattcacccgatggaatcatacgagccaggaaggttcacattgccggaaacgaggcttttctttaccctgcttttcccatgtctcccgaacacgaacccaatcgagatgaaagtttataacccgggaagatcagagggcttcggataggaactcatcagtatgattctttcttttttttaatgactagtctcttcctttcttc

SEQ ID NO: 241895 - DNA, 342 bp, Gossypium hirsutum
cccacgcgtccgggctgatgtattttttagtaggtagcgttccgagttcctagggaggagttgggcttccaagttatctattatcgctctaagtagatttaatcgccacttacatttgcggtgctgctttttctttcacatgttagttcgatgatacaataaagtgtacacaaataggcgttctataaaatgccgtgttctgacattgagctaataacaccgttcacttgtgatcgaacttgttctggtgatgctgttgtagctggtattatgaggaaactgaccacttaccctgacatctttgaaaatcaaggtgtcttagatagacagctccgcttttca

SEQ ID NO: 241896 - DNA, 168 bp, Gossypium hirsutum
gtctagtcgtgtgtctgcatcatctgttgtaacctgttattcttagattgattgtgtgtgttctatagataccaccatgtggatccgagtcctctgcaaaatgacagactgtactatagaggcttaaaatttgatatgagcctgaaataattcatatttccttgcttc

SEQ ID NO: 241897 - DNA, 435 bp, Gossypium hirsutum
gccattcgctcaagtcgggtactaagaaaggtctctaaaaagacggtgaaagtgctcatggcgtgactcgggagaaagtacggtatggcgactaaagcggcgctgaatgcgcctcaacagtcgacgcggcgctagtcgtgtccctgaacatttgttttacctctggcatggatacgaccaccgcctatgtgcatgtccgtcaatatgacagtactatttacccatgtgttagtgtgtcactgaaaaacgcagctagaaactacgcgagaaataatgaagaaatcatgaaagagaacaccttatcaaccacctgaaaaaaaattcgtttcttattatacgactaggaatccgcaagagaaataccctggtgcttcctataggccttcttatagccggaaaatacattgccttagccatttccctggcgatctggct

SEQ ID NO: 241898 - DNA, 385 bp, Gossypium hirsutum
cgcgtccgcaattcatgaatatgctcgagaaatatggaacataaagcctgttgaattaccataattttggttagactttttcaaccatggggactgcccttttgcctgttaataactgctctctttgttgtaatgcaaggaaaacatgcatattgtaacaagtcaagcctctataaatgcaataaaattttgaattagaaaaaaaaaaaaaaaaaaaaaaaaaaaaaaaaaaaaaaaaaatataaataataataataaaaataaattttctgactttcccatcaaatgtaatttaaattttatttctatttctttcattttttttaatatttacttttccttgtctttttaaattctaattttaattggacataaactttaaaaa

SEQ ID NO: 241899 - DNA, 337 bp, Gossypium hirsutum
ttcagggtttccttatgggttcaatacatttcacggtggtgttgctcatgggtttccccagctgacgacacgagggcagcagcctgataatgttttgaagaatcttctgttgttgattggggtgtttgtcgtcctcgctttgctttattggtgaaatagttcagcatttaagctgttatccagtgttggatattcagtgtctgtagatataccagcagcactggcgaatgattatgtttgggcttgagaaaaagttgtctatatgaatgatactgtcatttttgtttctttttagcatcagcaacaactcaaaccagtgttaatgttcaccttttca

SEQ ID NO: 241900 - DNA, 213 bp, Gossypium hirsutum
  unsure (1)..(213): unsure at all n locations
caactatgaaggcaaaactgataaaacaataatttagattgtgttgtgatggggctgtcatttgtcaacactagcgtggaatttatattgtgttgttaatttgcactagtattaaaataaagtgacatccattaataaagattgctactactatcgtctaatgtgtcatcagtttgacagtttgtagtttgaataaatgatatcgcttgtgng

SEQ ID NO: 241901 - DNA, 298 bp, Gossypium hirsutum
cggacgcgtggggtcacagcctggaaagccctgttttgccttcacggttcgaacagacacaccgggtgattaattaagatcgggacaaagaaaagccatggtgaattcaaaccctgtactaaatttacgttgccatcactaggctggccctctttgcaaaaagaaggaaacaagggaaaggactggtgctccacttggaagggataggtcttttatgaaaggctctgctgctgggggcactacaagcgcattctatgggttcaaccatgtgatgccgatagtgaggaggtatgtaaag

SEQ ID NO: 241902 - DNA, 302 bp, Gossypium hirsutum
gtccagaaaggaaaggagaaagtggacaaggcgtgactcgagagaaattacggtttggtcacagtcggattgttgaatgagcatccaaagccgattctgagctaatcgtggtggtgaacatttcttttacttatggcatgtataggaacttagtcattgtgcatatttgtaaatatgactctactatttaatgatgtgttagtatttgatgatgaatggttgcttaaatggtccaggatgaagttaattattgttgaaaaaaaacaccttataaaccacctgaaaaaaaattccgtacttat

SEQ ID NO: 241903 - DNA, 449 bp, Gossypium hirsutum
cccacgcgtccgaaaaaattaaaaagagggaaaaattaaattcacgatttgggtgttataaagtcgatgtcgaggccttggctactagtttttatagtgcttatagtaatgctcacttctcaattcgaatggaagcagcaggttggtgaagaaattgagctaacttccactgtttctctcaaagatcaatccctttccaaacgccaagaatacgtcaaagaaaacatcatactttctcaagaaaggaatattcagaaactgaacgagcaagtgaggaatcttcgtgaacaattgctatggtgtaaggctgaaaccgagattagtaacggctctgcatttgctttgagtgaacatttaagtgagattgagcagcagccaatgttagatgactaacattatggggtcactgccaatagagtcacaatactgcttgctatgtgcaatacata

SEQ ID NO: 241904 - DNA, 258 bp, Gossypium hirsutum
cgcgtccgtgaaaaagcttgttcccattgccactaaatctttccaaaaaaaaaaaaaaaaaagggggaggggggaaaaggaaaccaaaaaaaggaagcaagggggaagggacatgggctggcctagcttggcttgctttttatcgagacactacatcatgcggacaaggagaaaactgaaagtttatattcttgatctggtagggtggcgttaccacctatgtccttgcataagggctgggaatggtggaatcacatc

SEQ ID NO: 241905 - DNA, 224 bp, Gossypium hirsutum
aattccaaattccaaaatcctttcttttctttcctggtttggcttcctttcccatgaaaaattctcaagagaatccaatcttcatgcaagcagaagttgaagatgaaggagtttggggtaaagggtgtgggtgttttaatctcttctgcctcaaacggcgccgatcatacaaccacatcaatgaatccaacaccttactgcaccagagaggggaacaacacacg

SEQ ID NO: 241906 - DNA, 443 bp, Gossypium hirsutum
  unsure (1)..(443): unsure at all n locations
tggcaacataagacattgagactgacttaataaaatggggagatgatcactctccaggaggtttcaacacacaagaatgctactttgtgaccatgctaggtcctttggcctaaaatttaaagttgaagaaatgggaatccatgatttggtgaatgagttcatggcaatgaagaaacaaggtggtggtactaaagaatggttggcattcaattgcatggtgggactcccacacataggcaaaaacaagagcaggaagcttgtaaatgagttcctaggcatagctaaacaattattgacaagttgtggtgacaatgcaagaacaacaaaaaggggaattataacgcttcgtgaangagatgcttgtgagaaccttaaagatggtacaggctcaagttttgggcatattttatgcgcattgatgcactaccaagctattaggaatc

SEQ ID NO: 241907 - DNA, 329 bp, Gossypium hirsutum
aaaaccttgcagtggcttgttcccattgccactaatacaaccaaagcgcatcatgggtttggatgggttggagaatgggcaaacaccgggtctgagatgaatcgtaaacctgctggccagactaacttgctcaggatcgagacactacatcatgcggacaaggagaaaactgaagtttatattcttgatctggtagtgtggcttcaccaccttgttactcaagtaagggctgggaatggtggaatcacatctcctgttaagtctccaattaggtctccaaaccagaagacagctcaactatcaactcagaagcagtccccatcatcgat

SEQ ID NO: 241908 - DNA, 306 bp, Gossypium hirsutum
cgcgacgtgccataactctttatctttctatcttctactatctgaaaaagcatcggcctttttttatacctatccctattcctatcccaagccaaagtccaaatattcaaatttgatgatacaaattctggatttgtgattcaaagtgtgatgatttgggttgaaagttgttttgggggggtttgagagaagggaaagagattttgccatttttgtggaaatggtgataaataggcataatggtaaatgagatggaactaactatatttcttaccttctgaaagatattcaatgcttttgatgaat

SEQ ID NO: 241909 - DNA, 411 bp, Gossypium hirsutum
gttcatgcaatttgattctcctttaggagaaggaaaaggaaggagggttgaggagctgctaaaacgatgcccaaatcttaaaaaaattattatttttagggttatttcaaaagccaagccacacaaggaatgccagatggtggatttcacttggctttgcaatagtagaagctgttatagttgcttgttattctcttcagtattcaatttatgcagccagttacaagtactttgggccaagcatgtgatggtgacttctttcttttggtttgtggtgcaatgactatgacatggatctgtgatacaatattagaatctggattttgtatctttcttatcacatttactccttatttgttattcattccatttgttacagacaagtttttttaattttatgataagaactga

SEQ ID NO: 241910 - DNA, 332 bp, Gossypium hirsutum
cgaggtattagaattcctaggtcaaaacatagcaatctgtctttgataaaagaccaactttccaaccttccatgttggctaagctcgcaaacaagatgctgaatttggacttgatgatcgaaaaggactcgctatattctatttctacaaatgccgcaactacacctgatgctgctggcgggggtggtggtgccgatgctccacctcctgctgaggaaaagaagaatgaagaaccccaggcagagagtgatgaccatatgggattcagtttggttgattagaactttctttcagagctagatttccgtgattacagatggaatgcattaaag

SEQ ID NO: 241911 - DNA, 374 bp, Gossypium hirsutum
  unsure (1)..(374): unsure at all n locations
ccgggctgttcgatgtcggaaccggtgacaatcgttatcttccaaatggagttgggcttggagaggttatattctcagtttagtaagggtgtgatttagaggggatagctagtagctttaagcatttgtattctgagagcaagtagattttcatgtatctagagagtcgttggattatcgtatcctttaatcggagacgtgtgggaactttgcttatctttgtgtaatcatgcaactctccctgtgtaatcctatgttaaatgttagtagctttgtattagggatcgagtgtcggatatttgatatgttggatatgaatatgtttcattcatcgagttccttttnnaaaaaaagaattttaaaattaaattaat

SEQ ID NO: 241912 - DNA, 247 bp, Gossypium hirsutum
gcgatttctacgaccccaaaccaccattcagagacagatctaaaagttctcttgtcgaagtcaacgtcaaagtgtatctcaaccattggtaagatttccgtacttctgtgccttcgagccacatctggtgatttctgctttgttcttgccccattgtgttcaaccttgtaacttagaatgttctgtgcaagttgtcttcctgtgatggatatccgttcgtgtactagcttggttcttaagtaccata

SEQ ID NO: 241913 - DNA, 401 bp, Gossypium hirsutum
gctttatgtccaaacccattcaccctttgtcattccccatggaaactcctaccacaggagggtcggactctgcagttgcagggctttctgatgatacggccacgccacaaagagatgcccatcgctggagcagtgctagcagcagcaatgatgttgcatatttctgagccatttgaatctgtgatttttggggttctttcatgtggacacactttccatgctgaatgtttggagcagacaacacagaaagctcgcataagtgaccctccttgtcctgtatgtaccaagctcgaagagcaaaattctccagagaaccgagtcttctctaggcttaagaatagtatttcacggcttacatcattttcggaggatggaccatcaaggacttggagctgtgcaca

SEQ ID NO: 241914 - DNA, 327 bp, Gossypium hirsutum
  unsure (1)..(327): unsure at all n locations
tcattgcccggcacggatgtcgcaaggatggcatgcgtttcagttgagatgcgaggtgtggcttcgaataatgatctatggaggaagaaagttgaagaggagtttggacattggttaggagtaacgaggaactggaaaaagatatatcattcatgttgngagagtaagaaaaaagcgtaaacgggcgattacacggtggccaagctttcctcgtgtcaataagccttcttacttccccggtaggaaagatcctattccacttggaagtgttcatgttgtccatgatgatgattatgaccttcctgctcgtcttcgtgtaccgcccct

SEQ ID NO: 241915 - DNA, 305 bp, Gossypium hirsutum
  unsure (1)..(305): unsure at all n locations
ctcaacttgatactgctgcgagnttttcctattctaaaaaaaaaaaaaaaaaaaagaaaaagtgaaaaaaaaaaaaaaaaagaaaaaaaaaaaaaaaaaaaaaaaaaaaaaaaaaaaaaaaaaaaaaaataataaaattattaaatactaataatataaaatcaattatgtggcctcttatttacaacataatttttctaaaaaccattgcataacacaactttttcacctttgatcacataaaaaaatctctagactcctaattaaaaaaacagtccaaaaaaaaaaccttttcttactatttt

SEQ ID NO: 241916 - DNA, 399 bp, Gossypium hirsutum
ctggcagcagatcacaaacaatctttagtattcttggactcctaatctctgatgcgggcgggtgataacatggttgcatgctgttggcttaaagaatgttgtgatgataattaatgttcatagtataatttaattccacgtagtatactttttgctgccctaagatcattacttgttcttctgggatgtatcatctgtttcttttctgaattacagcttgtttccttttgatagtggtacttggttcactaaatacttgctccctcttgctagtctcagctgatggatctgtttttggtttcagtttttttagagaattcgtaatgtatttaatatgatatctgggagatttgcaatctgaacttttctgttctctggcagagtggggagttaagggaa

SEQ ID NO: 241917 - DNA, 354 bp, Gossypium hirsutum
ataccagtactatttgttcccttgcttactcttcgcttagccgctcaaaaagacgaagaggtcagtctaaactaaaggggttgcgggatatctgatcccaacatcaaatcaaagatgagaaattccttaatgagtatcaacctctttcgccagaaaataaaatgtttgtggaatatcggcgggataacctgtgcttccagacctcgttgaaagcggccattctctatactatctaaatgctaaatgatgaatagctctctagttttgagctgaaaatagcacacgaatctactaaaggttgcagtgaagaaagaagagagctcccgcctatctaaatcctttacgaccagaacg

SEQ ID NO: 241918 - DNA, 463 bp, Gossypium hirsutum
cccacgcgtccgctcctacccgtcttataaatagaaaggagaaaaaaaatggcgaggaaagcgttcaaagtcgaaaaatgatcgttcgtcttcaacctccgttacttccgctaagaacccatcaacagtctccaatcagtatttctctcttacccctttgttttatagtattttttgcagaataaattatggctttcttagtttgttttgcttgtaaggaatttttggggttaacaatagacacttttgcttggaaaaaaaattgttagtcaaatggcgttaagggtaaaatcaagtgagaaaatgaagaagacagctgaagagagtgttgttagcgagagagaaaagagacccaagtcgaagtcaagacccaaatcgaagctgaagaagaaaacaaaaatcgatgctaaaatgcctaagaaaccccccactgctttcttttacttcttggaggcatttcgta

SEQ ID NO: 241919 - DNA, 140 bp, Gossypium hirsutum
  unsure (1)..(140): unsure at all n locations
ctccanaatgatggagatgcanggatgatcatcattatatttattcgattttaagttcatgatttgatttgtgtgttttctgaattgggatttggaaataatttactcaaatcaatgcatttattgtaggagtttttctt

SEQ ID NO: 241920 - DNA, 198 bp, Gossypium hirsutum
  unsure (1)..(198): unsure at all n locations
cngacgcgtgggcggacgcgtggttttattttaggcacaatgcctaaagctcatcgattgggggctctgtgcaaagctcgacccattgtggataaagctttgaaacttttataaataactcttatgttgggattttgtgcccttagtattgtaatgtttagaacttatcggtttaataaaatctcagagttaattatc

SEQ ID NO: 241921 - DNA, 443 bp, Gossypium hirsutum
  unsure (1)..(443): unsure at all n locations
cccacgcgtccgcccacgcgtccgtccacgcttccgcatcgatccctggtgccccgatgctgctgccttcaaattcccgtggaataccancagaggttaagtcctctggtctcaaatggatttttgccaccagcttcaaaacctggcaggggtaagattacgactgcatctacactcctggatataattaagtatgtggagattgctatatcttgccggaagggtcgaacaggtactgccgctggtgatgtggcttttccaaagggaaaagagaacttggcatccgtacttaaacgctacaagcgccgattgtccaccaaacaagtcagcaccgatgacggaacaggatcacgcaaggttccaacaactccaatgttggcttcttacaactcatagcttncgttccactctctcccaattatgcttgttgagctgttcgattt

SEQ ID NO: 241922 - DNA, 250 bp, Gossypium hirsutum
gcgattattccctgatctttacaacacatatctttcgaacccacggcatagcatagtggatctgatattgatctacggtgttgagccctgtccctgcttatagccaagcaacaaccgctgaagcccctatccctgcccccatgtgaacatctaaatcgctatcctttattttttcttactttaataaaatgatttcatcacaattcacaattacttgatttccatatgtgaattgcatataaagaacact

SEQ ID NO: 241923 - DNA, 133 bp, Gossypium hirsutum
aaacatttggatttatgaattaggtatttgtaatttgctatgcactgagtgtaatctgctgaaattttatgtgaattattcaaagcttgaatcatcattacctaaatgcatgcaactaagtatgttaattctt

SEQ ID NO: 241924 - DNA, 352 bp, Gossypium hirsutum
  unsure (1)..(352): unsure at all n locations
cccacgcgtncgatttgatatggtttaagttcgatcagcagttttttggatgcggatagccgggtcaggagtatagaagaagcatagcaggaatttcgagatccattacttattatcatttaagagtcataacagaaattacgagatgcattgtcaagtttgtggtttggttttgtgcgtacttgatcccaacccacctcatgaaaaagttccagatttgaagcttagagatttctattttgtactttatataattgctttttgatttgttgtcttgcatgaagtgatctactacacctacaccttcaatggagagaatatttgcttaaagtataggacacaaataattaaa

SEQ ID NO: 241925 - DNA, 231 bp, Gossypium hirsutum
acgcgcgaattccagctcgacccacgcgtacgctgtcgcgtggacctacacgtatgcaaccctatgaatccattggttggcttggtacaagtgggaagggaatgtataattttcaaagcctgtaagggattcctgtctagagcaaaaaaaggactcttaacttgttcataaagttttgttaattgtgattttagtatacaaattgatgtgtctctcatatattatatttgg

SEQ ID NO: 241926 - DNA, 362 bp, Gossypium hirsutum
  unsure (1)..(362): unsure at all n locations
gaccgacgcgtgcggccacgcgtccgggatcatcaacttcaacgtcagtgttttcattacgttctccatttactcgggctaagtctgtcaccactgacccttcaaaggctgtanttgctcttgttgtgttatatgaaaggtggtggcgtagcatcacagggacttatacatgctgcacaatttgcaaccacacaagtcatctgtaaagccacataaacttgatccacgtttccaatacttacatccttttcactgtactatccaggtgaaaccagaatacaaaaaccaccctcttgttaatttaaatattccccttgtaccttgtatttgtttccaccaacaaggattaaaaaacaattatt

SEQ ID NO: 241927 - DNA, 268 bp, Gossypium hirsutum
aaaaaaaattaactaaacacataaacaaacctataaatccataaaaaaaacttgatacaagagcaaaagaaatatataaatattcagagtttctaaaatattcctacctagatcaaagggccgccccttatttaggtcataaacttatttcacctttcattcaacgtaaacacattttttttgtctctcatataatatatttgctgggccattttttaacaccaaattctcttgtaaaaaccctggctttacccaatttatattcctt

SEQ ID NO: 241928 - DNA, 304 bp, Gossypium hirsutum
cccactcattctcttactctttttctaacttttatttcaataagcaaactactcactaaaagaaagaatacatttattctccggaccttctcagatattataaaacatctcaaaaggctgcctcttcattaatatccatttttcacttatctttaatataagcacacagtccattatatatctaccaaacattaaaaatctcgcattcatcctattttacagatattctatataataactgttccccaaccattactgtaaatactatcttcatcatcattctctacatgttatcaagcttaac

SEQ ID NO: 241929 - DNA, 369 bp, Gossypium hirsutum
atcctgttgagttcagatgtctcttttgaatagcagctactcattaaggtgctagatatctgtatggatagtatagaaactttgatgatgcgacttacggacagaactaacatgtggagcctggatgatggatccatggctgacaagctttagggatgcaaatggtaattcttttagctatatgtacagtatagggcaatagtattctctacagtagcttcccgccatcaaggttttcctttttctcttcattttgtatatttgggccttttcatgcactttgttgaatgcaagtttccatcgttgagctctagtactagtgtttttttttctttctaattaattaaatgcggtgaaggctttgatagt

SEQ ID NO: 241930 - DNA, 242 bp, Gossypium hirsutum
cccacgcgtacgatcggatacaagtgtggagcttacacacttccttgaatggacctcacataggaggcaaatcactatgtaatttaagctttacttgtgtaccaatacaagcttgcagcttgcaatattgaataaaaagaaaaaaggacttggagacagcaaatgaaaattcttttagctatatatacagaataaggcaaatagtattctatacaaaaactatacaccataaaaagatttgg

SEQ ID NO: 241931 - DNA, 351 bp, Gossypium hirsutum
  unsure (1)..(351): unsure at all n locations
agcaaatatcgttgaattggacgcctcttgaagaaggattttacctgcatcttacgtgaaggacaatacctggcttgatgagcacccttattacggcacccattgacatggttaaaacccgtcttatgttgcagcgagaaagtgccgtatgaagctataaaaatggatttcgctgagcatatcacgtctgaagttggatgcgttggcattcctgagggcttctaccaaatacagaagaatattgctaacaatcagcatgatgttatcttttgcccttacattcctggaggtgctgggngtcatatattatagatttaacctcgttataaatgccatgtgatattgactcct

SEQ ID NO: 241932 - DNA, 254 bp, Gossypium hirsutum
aaaaaaaaaaaaataatataaacaataacaatacattttcttaaaccaaaccaaagtaaaacgagagagtctaatccattattgcgacagattaagagagctgttatttgtttcctacactcctcgtttcatttgaatggcacatgaaatcaatttttatatcctctgccggtcttttcaataaaaaacaaagggtccatccctttcactgtttaaatttatcatttgtgtgcaactaaaaacaatgatatccc

SEQ ID NO: 241933 - DNA, 366 bp, Gossypium hirsutum
aattcggtcgacccacgctcgtctctacattcacatctccaatatatctaactaagaccatggtgaggtgcatacaagggtctttaaacctttttgtgcaggactatcattgtcaattgtctattttcttatcacccttcaattatctttgcaaaactttacttgtcagagttgttaattctagccttcccaactttatttggttggccttgccacctaaatactcaaaaaaccattttaaggcttcctaccctaaaacaaaattccaacccccccattgtttttttttcctaaaaccttttttaaaacctgtttccttaattaaaaccggtaaaatcccttcacccctttaaaaaacttgccctt

SEQ ID NO: 241934 - DNA, 425 bp, Gossypium hirsutum
gcggcacgcgtacgagctcatggaatgttgcacatccggccacttgaaacagtgttaaatacggggtagggacttatactgcatcttcaaagaagtttactcagccttgaatatcataaaggtgaccgctgatcgagtagtctttcacataacattcactttaatggtaaagacactaatgaccacgagtatcgcatctgatggaacgataaatcaaaattaggggcttaatgtaagtagtttgaataaactcacctccttttgtttatcaattattatgaaacaaccattaggtattaattagcccgcttttttggttcctattatcccctagaccttaacccaccattaactacctttgtttttcctaaacctgatccgttttgttttggcaccagcctttacagcttctttggaacaccccc

SEQ ID NO: 241935 - DNA, 270 bp, Gossypium hirsutum
  unsure (1)..(270): unsure at all n locations
atcaagcctaccanaatacactcaaatggttcttattctccacagaacattacctcagctggccagatttcactctacacaacatcatccccttacaacacgaaccatccccccaataatctgcatcattgtattattgattaaccaacctaacagacacaataccatacattatatgttcctaaacatatctagcaaacactatcttatcatcctacagaactcaacaaacttcctcctataacatgattaccctaattaaataaatta

SEQ ID NO: 241936 - DNA, 333 bp, Gossypium hirsutum
gcgccccgatgcttatagttacccataggatgacccaacaagcttgtttacatgccccacaggtgctaattgcaaagttattttatgaccatgaagagtacttggatgggtttaaagtcctttctattcccaacataataggttataatcaataaaggaataaacctcaattgcttttgaacacctttcttggagggcataaggtccgaattggaaatattatggttggcatgaatgaaaaattggaatcccttaattaaaaaaaataataaaaacccatattttaataataaaataacatagaaaacattacttgaaataaaccttattaat

SEQ ID NO: 241937 - DNA, 424 bp, Gossypium hirsutum
accactcatacgattttttcaataaattaacttcaacctctcatttaaacaattaccatcggatacatgaccacctatcatatcaaccctctcaaacctatacattactcccatcctcatctatacatcataacccacgatactatcttaaccaatattccataccatttttttttttcccttcattttcttattccctatacttaccctacttcttcaatatccttctatcttcaactatcgccttcaacggtccatgacccaattgaattcctcactttcaaattatcctttcacaactacctttaaacccaatctgcctcaatcccaattgtaaccccatctcttattccttaaaacacccttcttcttctttctaaaaaaacaacctttccttaaaactcaatttcaatctttatcccat

SEQ ID NO: 241938 - DNA, 335 bp, Gossypium hirsutum
aaaaaaaaaaaaaaaaataaaaaaattgaaatactatacaaataaaaaaaaaaaaaaaaaaagaaaatacaaacaaaaaaaaaaaaaaaaaataacttataataaaaaactggcctccccctttaaaatatccaaacttacttccccttccatccaacgtcataactcttctatatggacacctaaactaaattaagtgcccgtctttttacaacgcagagacttgtaaaaccttggcttccccaaactaaatcgccttgaacttcttccccttttaccaaattagctttatagcaaaaaggcctgaaccaatgtctcttccaaaaatttgccca

SEQ ID NO: 241939 - DNA, 265 bp, Gossypium hirsutum
taaaaaaccacttttacttatggatttttatttctaaccccaatttttactaataagcctagtgatcttatcgatgcatttatcctaaataaatttctcgtttttctttcttttctttcttttaaaaaaaaactaaattccaggcgtatgcaaaatacaaaaatatatattgaataccgaagataaaaacaaaaaagcaccttatgattttatctattcttagtatggctttatcacagcgtgcgttaaataatgacaattacat

SEQ ID NO: 241940 - DNA, 239 bp, Gossypium hirsutum
aaaaaaaaaaataaaacttatataaatcaaataaaaaaaaaaaatactataaaactaggccagagtatctcatcaatccataccgtcataaccaccttcttatatgcctctcttttcctactattaaaaaaaacctaactccccctcatatgcattataccactaacccttcttaaaacacaccatcactaaaaataaatcaccttacacttttaacaattctgactatggtctctacc

SEQ ID NO: 241941 - DNA, 447 bp, Gossypium hirsutum
gcggtgtacctaatgcaccagtttatacacctcctaacaaagagaatcctgaccccaaaccaccggcgtagagaccaccatacaaggagatcccaccgtcttatatacctacttaatagccaccatcgtttgaccctaagccaccaaactaacccttttacacgccaccaaataaagagaatcccgaacctaaacaaccaatccttgagtttcccaaaaaaccacctattggtcattttcaagaacaccctcctttgggaaaccctcattaaaaaaacccaaccggttacaattccaaaaaaccaacctttattacttacttaattaattaaataattttccttccattagaacctcttaatacccaaggtccggtttcctggatagtaaggattaaaggcttcctttacctaccagaatgcctattgccgttcctatttgaattcc

SEQ ID NO: 241942 - DNA, 202 bp, Gossypium hirsutum
cattcaacatggattcatccttctttaaagaggtcaatggacgaaagcccggcactgcattcactgcgacagagattcagttccagggaaaaacccggaagtcatatctcctggcaattaaaactaaccttggccttctctttaatgcaaggcaaaaaaaagtccatctttactttgatggccccacccaattgggaaaatt

SEQ ID NO: 241943 - DNA, 372 bp, Gossypium hirsutum
gcgcaaaaccccattttatgacatatccgaagctatgaaatcttgattccataatgtttctgctggatgagcgtttatgattgttgatatatgctgcttgatactatatattgcttttgactttttcaagagtcaaaaaataatgactcttaaaaacggcaatctatttttcgtttaaccatccaaattgctactctgtcctaataatcaatgttgaaattttctttttctgtcccttaaacataatcttcctatcgattaaattccttttccttctaattattttctttccccaggtaattatttaaattttttattgatcctttttaattaaaatcgcttccattctaaagcctaatcaaccaaccattt

SEQ ID NO: 241944 - DNA, 403 bp, Gossypium hirsutum
gggtcgacgacccatgcggcgagcgctcccgtcaagatcgtctatccttattaccgcttgttgaacacaatcagtcacaggacttccggctaacttactccgacctctatacctatgccacccataaaagtactggctgtacaaatactttctgatttcaacctaataccgcatcgatgagctgaatggctaccaaaaacacccggatgcgcctttttgattgccaacaagtttttcttatttcttggcaccaaaaacctacctttcctgccatttttattaacgttttccctttcttttccttgggaaccttttcaacccttcttgtcctttccaagtttccaaacccttcttattgttcattttttcttttctaaaccttactaaaaaactttccaagccc

SEQ ID NO: 241945 - DNA, 431 bp, Gossypium hirsutum
  unsure (1)..(431): unsure at all n locations
ctcgtcctttgcagattaagcccaatgctgatggctacgcttcaccatcacaagcaatggagttgaatttgaagtcatcatcatcatcatcatcatcagcagcagcagcagcagcaacatcttcgacttcatttagttccttctatcaaagtaaagatcccattcctctactatcacctcttgttttgcctactttgcttcaatcatcttatctccatcaagaagggaatacagcaacataaatctctgtgaaaggtgttaaggcttccttgttataaatacgtgatttatcttgtcttccctgtgtttcacattagattgtcattactatatattctctgatactctttctgtttactaaaactcatgtatttaacagcattttgagaagcattccatctcattgattttaatantttatatcactctac

SEQ ID NO: 241946 - DNA, 330 bp, Gossypium hirsutum
gtttaataatgggtagagcttcagaaaatgatagtaatgagggtgtgttggttttcggaaggtaatgggtgaacggctatggtgatagtgagggatgagggttgaagatgatttgaacagtaagaccgtgaaaggtttttagaatttggtttagcactgttgtgttcgctgattgaagattggagactcgttttctccttagcttattcgtgaaattttggcttatattatgtaatacaaatcgcaacgagcatcttgattcgttttcaaaaaataaaattacaaataaattaaaaaataaaaaaacagtatttcgctttttatgtttca

SEQ ID NO: 241947 - DNA, 373 bp, Gossypium hirsutum
tcaaagaccacttttacttatggatccgcatttctaaccccaatttctaccaagaaagcaagtgatctcatctatgcatttagcataggtaaatttctcggttttctttcttttctttcttttaaaaaaaaactaaaaaccaggcatatgcaaaagaagaaaaaatatattgaacacggaacagaaaaatttaaaatcaccttctgattttttttattcttagtattgcattttcacagcgtgcgtaaaaaattacggattacatttctgacttttatagccagattttcaaaataaataaaaacttaaaaatcctgttttcctactgtcgcttgctgtgaaatccgttactggctactcctggtgtattcct

SEQ ID NO: 241948 - DNA, 363 bp, Gossypium hirsutum
ggcgaaaaatatcgaaagccctaactttgccgttcgagcctaatggcggaagccgccgttttcgccttctgtactctcacaactcaccatctttcttttgaatcccaaaaagaaacattgtctcgtgtgtacttgggtaaccttgaccaacaattttcgtaccggaaccttgaaaacaagttccgtgcctttgaagtaatccgaagggtttggtttgttcaaaggcaacctgtttttcctttcattaattttaagaacccaaaaacccccaaaaatccaatccctaattaaattgccaaaattgcttgaaaacttaaccttcttattattcttaaagaaaaagttgaccttgaagttgtcaag

SEQ ID NO: 241949 - DNA, 298 bp, Gossypium hirsutum
tgttaacttactaaaccggtcaggtttaagcatgtttaaaattgaagattgtaatgaggagggaggaaagcaatacgaggaaggtcccatggctcgacatcataaatgtttagaacaggaataacactgtgcatctcttgtctccggccgtctaactggtagcgtaagtagaaagaaactaactcttcttctgtaagaaaaaaccgaaaaccagcttggatctgcattaacagtacgacggtcttaggtgcgctttgctataaagtccaatgctgcgctgtgctatgcttaatctttt

SEQ ID NO: 241950 - DNA, 419 bp, Gossypium hirsutum
tgactatcagagatgaatcagtagacctgtcaagtgcttactctcaagggatacggaattgggtgacccaggtgctacagtcttcaggagtggatatatcacaggcgagcatctctgtgaaaattgatgttggtaaacgagtagctgctggaatgacttctatgccatccagttctaaggagaaagatatccaatatacaagcaatcaagagatggcacaaactggagttcgcagctacacagaggagtctgatcaggcttataagaggcacggaactggaaaaagctagtgtatgattcttggtctatttttctttcaaattttcttcattctgttcctttttcgttcgattagggtgctcatttttgcaatgccatggtccttatatttttaagtcttaagagcaaatgtaaatgtt

SEQ ID NO: 241951 - DNA, 219 bp, Gossypium hirsutum
  unsure (1)..(219): unsure at all n locations
cccacgcgtncgattgcttttatgctttgtatgagcacattcaattgtgtccaggtcaaggatggaggcatacatgatgatttaccagattttatttatatcgggctttagttacaacacaatgtatgaaatgtatgaagtgactaaagatattagctataatcatctttttatatgtgaaagctgatatacaatatacaaacaatcaaaagatggctc

SEQ ID NO: 241952 - DNA, 208 bp, Gossypium hirsutum
cccacgcgtccgaggaaactgagtttccttttatcttctgttttgttttgttgttggtggggtgtttatcgttttctagttttacttggtatagatgaaaagacagatgtatgaacaatgtaaaacaaatgcttcagtgttgtacgttaaaataaaaaggatatacatttttgagttggttaatgatgattccctttgcatttgtaag

SEQ ID NO: 241953 - DNA, 371 bp, Gossypium hirsutum
ctggttgatagtgacagcttggggaagaaagttgctccaccggaaggtagatcgaggatcgacatacgtttgcgaacgaagaatcagaaacctgttgaggaggtcgtggacgtaggagatcagaacttgaatgtggaagacgttgaggagtttgttcccaagacgtggaatctgaggcctaggaagccgatatcaaagcctcggaatcaaaatggaggtgcgccgaagatggtggcttcggctcacgataacaaaactcagaggccagagtcgagtcggtctatgaatgtcaccgagtccaaaccagctgagtagattgcgaagaaacagaacgtctcaatttcgcttactagggaagaaattgatgagga

SEQ ID NO: 241954 - DNA, 290 bp, Gossypium hirsutum
cttagctgaagcaaacgatggggaagagaaagaaggcaaggttgagaaaaaggtaaatgagaaacagatgaaagacactaagaatactacatcaagattatataaagatcagtgcactgcatttgtatcaaatcttaacattacggcaaaagacgaagatctccatcaattcttcagtgatgttgggggggtcactgcaattcgaattctgcatgacaagttcactggaaaatcaaggggactggcatatgtggattttaaggatgatgtacaccttgctgcagctgtag

SEQ ID NO: 241955 - DNA, 358 bp, Gossypium hirsutum
aggaatagccagattcacatcctccattcgatatggacgagtgtggtgatagaattctcgacctgctatcacttgcagctgacatagatgtcatgccattcggtgatcttgttaaggggcaagaaaagcatgatgttgctcggtccttttctgcacttctacaattggtgaacaatggagatgttctgttagaactaaccggacttcgtggtgagtctgtttgtcatacgcctgaaaaccctttacatgtccacatccttacatcaagacaagaggagtgtggtaactcaacttggaattcccaaaacgagaggtagatcaccatgacgtacaaaacctacaaaagctgacagaaata

SEQ ID NO: 241956 - DNA, 211 bp, Gossypium hirsutum
cggaagaccacgcgacccacgcctcctttctatactcgtgggtagtgtgccatattattgtccatgataggaatgcctggggtccttgggagttccatcgatctcgtgaaaacataacgtaagtgggaaggcctggtcctttttacacactgtgaatttcgcgaaactgctgacttggcaagtccaattttgacgttagactcaaaagctt

SEQ ID NO: 241957 - DNA, 391 bp, Gossypium hirsutum
gaacgaccgacgcgacccacgcataccatactctaagcctcactgcaagctgtgactacctgcgccagacggctagatgcgtggtgtgaggctctgcaaaccattgtgttctttatgggttattccgcatggcactagactgacggacagtggtatcatggaagagcatgagatagcgaaactaacccgttcaacaacgaatcatatcttaaaccatatccaccaatgatggtcgtgttcgaacccgtgctgctgggagatgaaaactcacattacctacctaaatatcacccggctgaccgatttataaaggacggacacccatctatctaccggaaacaccctaagcaaacattaccggcagacgaaagagtagcaccactaaaatacc

SEQ ID NO: 241958 - DNA, 190 bp, Gossypium hirsutum
atttttgatattttaaaagactttctacttaatactactaaatacttacacctctatttagggtagatactgtatgcatatggggctaagttcgcaaagattcagtactctattgatgtttggtgcttcgtatataggctaactattagaattttactcatgctgtggaacatcatttgctccctgttat

SEQ ID NO: 241959 - DNA, 349 bp, Gossypium hirsutum
ctacgctagacagtagtatcgaacaacagctttccaagaccaagaagaagcaggcaagtagtattagtagtgcagcagcaaaagcctcgactgataaagtgaacaagggagaggagaaaggcaaccgggaaaggagtgcagtcgcagcagcaggtgaagcaaattcaaagaccgcgaagctgggagttggtttaagagggacagccaacatagctttgatggctaagaaatggaggaggttgtcaatgaaagggagagaaccacaaaatctggaaggccttgagagactggtgaaactggacctccagtgttttccctcgctcggaaaccacctacttggctggtaccc

SEQ ID NO: 241960 - DNA, 323 bp, Gossypium hirsutum
aggctataccatcaaacttactcacatccgatctgattcttttagcgtctttcactctgttagggatatgtggagctactaaactctgcatgaactttcaataatttttcctgaaactagacttatataactttcttccataaaatattcaaattttttgctttagtcgaagggtgcacgttatttctcaaagtaacccctgattcactgtctgacaaattcaacccttctatactaaagttcaattatctcatcgtacaatactcaaatcatgatctcgaatatttatcttgaaactaaactaatgtgtgtacttatttttt

SEQ ID NO: 241961 - DNA, 338 bp, Gossypium hirsutum
gtgaaaaacgtcattgattcacatgtacttaatctagataaagtacatgtgaaaaacgtcggtgattcaacaaaattattgttttgcttaaaacttactaagcttacgaaagcttactctgttcgttcatgtttttggtctgtaggttgtggattctgactactagctcggggatcgtcagcacttcatcacactatctaccattacggtagccatgagattggattatcttatggcatgtatagaatagactagtagcgaaagaataatttggttattgtatataagccatgcgaaaatgacatcttttgaatgtttacttatagaagtttacattt

SEQ ID NO: 241962 - DNA, 280 bp, Gossypium hirsutum
gaacgaccacgcgacccacgcaaaaaaccactcattcacattctcctaatatagattatagacatttgaaaaactggagtgctttagcaaccatatggtttcgctcaaaacctactacactatcccaaaccaactctgttccttcatctattaaacccgtcggttgaatataccgactactactcccatatatcataactgctacatcaacctttttcatctttacctttctttaaaacccagatcactcattaaagatatataatagacttcttcccaa

SEQ ID NO: 241963 - DNA, 195 bp, Gossypium hirsutum
gaacgaccacgcgtccacccaaaccgacggttgtcaacccaccaacatatactcctctgccaccttactatacaatagggtcggggatatctccatcaacacaacctccaaaaccacccctctacccacattccagcaatatttaacccaccaacaccgacgattctgccaactcctattgagaatacacaaaca

SEQ ID NO: 241964 - DNA, 224 bp, Gossypium hirsutum
tcaatcacgcgtgcgtttcatcactgatacgagagttcaaatcctacctactcaggggtggtcggcctctacaagctcacctaatcagctatcaaaactgtctctcctatataattggtctttgcctacacaaatactctccgatatcttcttaagcgaacaatgtgagcttggactccctacaacccgatcactttaagagttcctatcgccataatgagctc

SEQ ID NO: 241965 - DNA, 245 bp, Gossypium hirsutum
tccaagccttcacgctaaatcaatttatggtttatacagctttgacaatggaaggaacattgaccggttaacacggtgtttgtacttgaaaaaataaatttcttaaaaaggaactttgaatatatgccttgctaaccattaatcgaattaaaacacttctttatccttaaaaaatcattaattcatgatagcttattcccttccaatgattttttttaaaaacaaagaacactttttatgctttt

SEQ ID NO: 241966 - DNA, 308 bp, Gossypium hirsutum
aaatttttaatcagttataatataaatagaacaaacaaatgtcaaagtcacataatttaaaggggaagcggctcagaaaaatgaaagcattttatcttacctacgacactccaaaagcacctgttaatgtcgacactccttccaccagctctagtctgtccaaagtggcaaaaggggggctccttctgaaaacccatttttctatctactttactggcgatgagagcgtgcaaaataaatccaatctctataaatcctatatctgccctttctacatggtcactttgaacaacacattgtcgttccta

SEQ ID NO: 241967 - DNA, 293 bp, Gossypium hirsutum
cggcctgaatcccggtcgacccaccgtccggaaaagaaagaaaacaggaatttatcatagtgagattacatggaaatttgacagggagggattagtgaattttgtgaaccatcctacaggtttctttaccagtttttcaatgatatttacttcaaaaaaaatattattttacttactattttatatctcttttttccttactctttcatcttttattatttttctcaactattttttaccgatttttcttttttattcttttatttctcttatctttctactacttatatact

SEQ ID NO: 241968 - DNA, 162 bp, Gossypium hirsutum
atcattctaacatatggcccaaatttatagttttcactcccactcccctctcttggtatcagaagtattttttaaacaactctaaagcatcttaattttaaactttccttgtattcttttacattgaaaacattgcaaatatatattatccaattagctcaa

SEQ ID NO: 241969 - DNA, 419 bp, Gossypium hirsutum
ggtgtctcttccatccttttaatcaagttttttgtccttgatttgtattctagtacagaaggtacttgataaggtcattagagtgtaattatacataggcaacttgcctaaatatgataaaagatagagaggaagaaaaaaaaagagaaatagtaaaggaggattaaccttctataatgttgtcgggtgtgcaggcggtatagaataagttatttttgtggttttctatcctgattttctaatgtaatgaaactcatatgatttgagtgaatgtgttttgactttggtgtggaaaaaaaaaaaatataaaaaaaaaaaaaaaaaaaaaattaaggaaaaacaaaattttttattttttttttgtacaaaaaaaataaatgataatttcttacttatggatatgaaaaaaaaaatttttc

SEQ ID NO: 241970 - DNA, 399 bp, Gossypium hirsutum
aaaaaaccttcatctcacgagattagtcaatctcggcatccttccactttacaaggtaagtgggaagaaaagatggccagagctatgtgtaatggaaataaaaaatctcaattggccgattcggcacaggaagacactggtatagggaacaccactgaaataacagtgtcacacaagtttgaaaatgatgaagccacccaatatggcagcgagggaagaaaaaataagcttgatgagatacatggattgagctcaaattatttactggataacttaataagaaatcacatggcactgttggaaggtgggaatataaatcctgaaaacgaccgtggcgaggctttctgtagtttcccggcacggaggaaccaactgatcccaatgcggcaatggatgaca

SEQ ID NO: 241971 - DNA, 259 bp, Gossypium hirsutum
aaacataaaaacacacattctgatgaataatttacgtcctttcaacgcgtccactggcttgggtatgaggcctttaacgctctctcgctgctaataatgccggaaacattcacgctaacgaaaataaaaatggtgactcaaccatagttgaaggacgacctctctcaacagttacaccacatcatgcttaaaaccgtctaccacttgtttactgtaaccacatttatcattttaaacaaaaaaactaccttagaattaa

SEQ ID NO: 241972 - DNA, 210 bp, Gossypium hirsutum
gttttcaggctagcatatctttcgatctagcaccagaaatcgaaatgaagaaaatacaaggggcttgatcattatcaacaatactgcaaacaaaaaaaaaaaaaaaaaaaaaaaaaaaaaaaaaaaaaaaaacaagaaagagaactaaaaaaaaaaacaaaaagggtctttgcatgtacaagaaaaaaaagtgactattgctgtgtcctt

SEQ ID NO: 241973 - DNA, 358 bp, Gossypium hirsutum
aggacttgaatcatataataaatataaaggctcagcaaacagtgaaataaaaagaaagggtcgatacctttttagctcagccataagctctttgagctctctagtccaaatttgatcttgcagagggttagcgggagggatagtatcctcaattctggcctcatcactcttgctctatgattcagcagtactctccaacaaataaaataaagtccctttgatttactaaatctcctgaacctagcatctccacctggagccgatttcccctcaatgcctttcttttttaagttcctttagcaaataagatctgatcagtggattcatagctttttgctttagaatttttttaaaattt

SEQ ID NO: 241974 - DNA, 267 bp, Gossypium hirsutum
aatcgaccccacccacccacgcgtacattctattagatggcggaaaaataaactagtgtttctagtactagttttatattggtgtcaggggttcacataaaggccacgtggggcttacgttctacaaaattcatctttcttccctcggccttcgacgatctagcgtttatattttttacctaacttaatttaatgccctcttttacaactactttactggaaaaccttgtcgttcccaacttatatgcccttgatcacattcccttt

SEQ ID NO: 241975 - DNA, 329 bp, Gossypium hirsutum
gcggggtagaaatgattatgattttggtttaccttcagatttaatatcagttgctgcgaagaggaacaggtatcaaagacagaagtcattgatgctgcttgaaatggagagtcagcacgccaaggggttgccatcagttcccctcaacccccattagtagtcaaacagccagctttggaaaggagacattactggttttcgtagttttccactcacacatgaagagggcatatatatatatagattagagggggcgcatgcaaattaaatgcagtgcagttatatagggaataccataaaataaaacacgtgaatgaatttctatactg

SEQ ID NO: 241976 - DNA, 282 bp, Gossypium hirsutum
gttagactcctgtaatagtttataggcgcttttgattgataactcaccggacagtacaccggtccatagttgaaaatctttgtatactgtctccgctagtggaatctgcatgattttccttgcaacatccatacgaaagttattcataataacagctgctttccaagtcaaaaaaaaaaaaaaaaaaaaaaaaaaaaaaaaaaaataaaaaaaaaaaaaaaaaaaaaaaaaaaaataaaaaaaaaaaaaaaataaaaaaaaatcaaaaaaaatatcataact

SEQ ID NO: 241977 - DNA, 394 bp, Gossypium hirsutum
cttaattattaatttactacgatgtcatatttaaggcctctcgagtattttgtattgactgggtttttgggttccgaggattcagtgccgccagcatttataactattgcttgaaaatatcccaacaatgtttcagagtagtacaaccactaagtcatgttttggtgctgcaatcaaggtaagtcattacaaggttataccttcataatctgtttgaggtgttaagtgtatgtaacttggttacttgaagaaaactgaggttaagatactgatacatctatccttaacttaaacaatttgtctgttgtttacatatgtaagttatttgagtgttggagtttttaaactgctttctcaaaatttttattgactagaagttttttatgaaaatttt

SEQ ID NO: 241978 - DNA, 163 bp, Gossypium hirsutum
gaagaccggggcgaccgcacgcgttcgcactgttgtttatcatcggtgattaacacactccggctcgttcgattaaagacgcgtcgagagcgttgttactgatctcgctttaccagcttaatctggcgagcttgctggctctgggagcgcctccagctttggt

SEQ ID NO: 241979 - DNA, 305 bp, Gossypium hirsutum
atagccatgtttgtagacaatatctggggaaaatgttttgacatggccacatgtggttaaggatgtggactgctacactatccaactcaatgagttagaatctatatcaacaagatataagttccagtcaatgatgcgagctccactacatggatttgcgttttggtttgatgttgaattcagtgggccagcaaattcttctataatcactccaagtctatccccactcattggcatatcagatgatgatcctgttgatgatatcccaactaaaaaacgcacccatctcaacgaaccacttgtac

SEQ ID NO: 241980 - DNA, 283 bp, Gossypium hirsutum
gcaccgtcccacctccccacctcggcttgttgtttgcatggtaaagatccaatttaccatgtattggcccataaacttttgctaatcacaagcttttaaattggctgatgaaagtgattgcaggcaaatgataactcatgactcagagatgaggggtaatattgatgaagaccgcaaaaaggtacctgttcatggacaatgctttcttgtggaatggtacagtacgtctgaagatgaactctttgataattatcataaaaaatactctgaagagtgtgaacag

SEQ ID NO: 241981 - DNA, 179 bp, Gossypium hirsutum
ttctgattatatctatggtactgacaagggttatcgatatcataagaaggtcctaaggaaggtgaaagaggggtctaaagttgatggcgctcaaaacagatgctcatactattattctgctcatcacatgctatgctcagcaaaacacattctccctccaacaggccaaaagcatgaac

SEQ ID NO: 241982 - DNA, 268 bp, Gossypium hirsutum
ttggaaccggatacttggtccttcatcagaaaggattgtttatgcattggtacaacacatgggtcatggcataagagaatacttcttggcctctgctgaactaaagttcaactgctttcttctaatgccagttgtggacaaattacctgcacttctccgggaagacctagaatctgcattttccgatgacatggataatgtatttaacatcagcaatctgcgacactctttgggcccacgaaagagaaatacagagattgatctcaaa

SEQ ID NO: 241983 - DNA, 140 bp, Gossypium hirsutum
  unsure (1)..(140): unsure at all n locations
gaagancacgcgaccccgccatcctacaaaaaacataatctggagtttacattataggttccacatccatataaatgtgaaagagtgtatatattaagatgggtactgctccttttggggtgaccatttttatgtttcca

SEQ ID NO: 241984 - DNA, 244 bp, Gossypium hirsutum
ggcgacccacgcgtacgaaacatactcaagaatcctaaattggagtttacagttttaataccacatttatatatgggcaaaggagactatatattaggatccatacgtactccttttataaatatcacatatatctctgactcctaacagactagtaaagaacatttgtcaacaagaattaaataccctgtttatatccctctatatctcaatgtcaccccataacccgctcttatgtttttca

SEQ ID NO: 241985 - DNA, 308 bp, Gossypium hirsutum
  unsure (1)..(308): unsure at all n locations
gttaatatgggttcatttggaaatgaattgggtccttccgttcttccaccattaatggatgcttcttcggctttcaatgccaagaaaaaccctgtttctgaatcggtttacgtgccctgcttctccaatcccgtcgacgttcaacgcattcaactcgacacaatcgatcattttcccgagaatcctctcctcctccctgtttcatcgaatccaacagatattttcccgagattccaagctccaaaccctttcttctcggctcaacccgtcactttcccacccaatcttcacctnccttgctctgtttt

SEQ ID NO: 241986 - DNA, 226 bp, Gossypium hirsutum
gaaggccggggcgacccacccgttcttaaagattgttttcattttactaacatgttcaccaacaacactttcttttggagaaagggtaccctcttgggaaacctctcaactttcttccttccttccatactcaccaattgaaatatacatttctttcaacaacacagtaagttcctattgctcagaaaaaccctaactgaaaacccttttttctttctacattcac

SEQ ID NO: 241987 - DNA, 140 bp, Gossypium hirsutum
cataaccttccatatcacatcccttccctccaaccaataaacctttgatacaccagattgctctgacctgtaaccattattcaattgtcacatgctatcatacacagacactctttacgttcactcccttcgttaatttt

SEQ ID NO: 241988 - DNA, 417 bp, Gossypium hirsutum
cccacgcgtccggttcttttttgcactatcttgcaaccaaaacatttgagactgtttatgggtgttatttgtttgatatgaacatgctatggattcaaaatgtgatatcggagtggttgatgtctacaaccccgaaattcaaagagtttccaaaagggttcagaattttgtgcatatgtttgagaaaaaaaaaaaaaaaaaaaaaaaaaaaaaaaaaaaaaaaaaaaaaaaaataaaaaaaaaaaaaaaaaaaaaataaaaaaaaaaatatcccctttcaaaatatttcatacaatttcttataattctttactatatcttattttcccacctcctttttcaaataccattttctttttttatcccccccttttttaaaaataaatttttttttctcccccttatttttattttttt

SEQ ID NO: 241989 - DNA, 257 bp, Gossypium hirsutum
cgggcgacccacgcgtccggccacgcttaccaacgcctcagttttttttttattcaatttccttaaaaaaaggacatacagaacttctgtgttcttataaactccttctaaaaaacataataataaatcaaaatgacaatctaaaaatacaattcgccatatgctatatgctgaactttgattgtttgcgctcacgtacaatcgtaccggagctgtcctacttgctcagaagtggcctgcgcttaggcacacacctc

SEQ ID NO: 241990 - DNA, 294 bp, Gossypium hirsutum
  unsure (1)..(294): unsure at all n locations
ttacatttccccttttctttcttcagtttttaaaccaaaaactttanttaagaacaatgacttattctacaatcaatcctaccaaacctatttttcataaatcccaatatcaaattcacaacatcagcatcactctcttctccaaaaatgtgaaaaaccttgataaatttttttctgatttcattcaattttccaacgataatatacttatttttaagttgccatttaaaattcccaccaacattcttcacatcacaacaattaaatcttctttatttttaaataacaaacaca

SEQ ID NO: 241991 - DNA, 340 bp, Gossypium hirsutum
ttaacgttcccatttacttccttcgttttttaaccaaaagttttaattaagaacattggtcttattctacaatgaatcctaccaaaccttttttttattacttctaatatcatattcacactatcatttccactctttcctccaagaatttcaaaaacctttataatttttatgctcatttaattcttattaccaaatataatatacttatgtttaatatgccaattataattcccaccattttttttttcattacatctacaaactcttccttttttcaattaacaaacacattttatttattcgatctcccttttcacaacctagttatttatctttt

SEQ ID NO: 241992 - DNA, 153 bp, Gossypium hirsutum
gacgtcatacctcttctataacgacacttaaatttagtatcactgaccgtggtgatataacttggggactgtaaaaactctaacattttttaactttattgccttccaataaatgctcctttatgtaaactaaacttttctttaaaaggggga

SEQ ID NO: 241993 - DNA, 368 bp, Gossypium hirsutum
cacacgcttccggacaatacctaaagatgtgtgtgatgccatcctccactcttacacatcggggacagaccgcgtcattactcacaccaacatgtttttaattaactagagaaggggtttattttcaatatgtgctacatattaaaatcgctatctatccaggaaaatctgaatatcatatcctgccggataaatacgctacaaccacttctgttaaataaaaattaccatccactcaaacatcttgacatagcctgtctgcgcacttcactgaaaaatacccagagagctctaccattcatactataaaatgctatctaggtgaacaagccatcgatgatgctataactttcctagcaacacttaat

SEQ ID NO: 241994 - DNA, 299 bp, Gossypium hirsutum
gcgcccacgcgtccgcgaacccttgggccacgcatgaaaccacaaaggtatcgaggaagttttgggcgaattggggggcgaaatgggatctgaaactggatccaacattcaggtcaatatccactacaacatcaacttcttcataatgattttttccttgttgacttactttcatagacattggaatgttcataagaattatgatatgtattatagtatgatggataagtttaatgtgaagtatgataataagtattttgacgaatatattaacaaacttttaaacatcctttttggca

SEQ ID NO: 241995 - DNA, 201 bp, Gossypium hirsutum
cacagatacattacacctttgtttttgcaactttacatatgctccggaatactcgactacggaggttattcaaaagtactaaacaaatcatttgtggaacaaatcctagccgcttttcatgcaccttctattatcctttgtatactattcgatccaatcaacactcatatggggctggcattgcatactggagaacatgaa

SEQ ID NO: 241996 - DNA, 287 bp, Gossypium hirsutum
atcctaccaaagcagttgctaagttggcagctgtggcggcattatgcgtgcagtatgaatgtgagttccgaccaaacatgagcatcggtgtcaaggctctccaaccgctgatgaaagcttcagtgtcagcatcagcgacatcaccggtgacttaaaacaggcagacagatgaatatcatgatattcgccattgattgaaatttcgatgacttatgatagttagggttcggaatcaaaatacagaatttcatcagatcactaaatattaattatatacgtgtttatat

SEQ ID NO: 241997 - DNA, 395 bp, Gossypium hirsutum
  unsure (1)..(395): unsure at all n locations
cgagagatgttttaaacggttgtattgcaattaatcaggttactaaaggcaaaaccgatgctttcaagggtttacggaaacatcttctcgaagagcttgaacaggcatttcctgatgaagttgaatcctacagggagatacgcgcgagtgctgctgctgaatataagcggctcgcacaatcacaaagtattttacaaaatggagatgtaaaagtcaaaactgagctttagatagttgtatttggtgttcttttttccgccctttttcatctatataggtttctgtatgtacgagatttgctcaatacattctgatgtaacgacatttctggcttgtattaaaaatttgacaatttagtgcgcaaanaaaaaaaaaaaattttaaaatatataaaa

SEQ ID NO: 241998 - DNA, 194 bp, Gossypium hirsutum
acacgcgcgccgaagcacacagattcattgaaccaatagacagaataacatgtgttatgataactacgggtctatatgactatcagcgcttttatgagtaaacatacgggccttattcacaactgaagaactatcttacgcgcttgttttgcacgaatcaccagccactaatctcagtagaacgaagagcatat

SEQ ID NO: 241999 - DNA, 247 bp, Gossypium hirsutum
catataaacctccaactagtgaaccaggaaccaacgcttctactacaccatatatgatcggagctacagcaccaccgaccaatagctgccctgcataatgtaataccccagaataacaaccaataatcgatgatgctaatccagcatataaaacagctgataagaaaatcaacgacgctggcaaggctgctactctcacaatatttacttacaacatctgcaactgaagcatcaggattagaatgac

SEQ ID NO: 242000 - DNA, 278 bp, Gossypium hirsutum
gaaagaataataaaatgggtggttttctttcaaaaaaattaaaaaaaaaaaaaaaaaaaaggggaaaagagaaaataaaaaaaaaaaaaaaaaaaaaaaaaaaaaaaaaaaaaaaaaaaaaaaaacaaaaaaaaaaaaaaaaaacaatactttaatccggggcggccgttttaaagaaccaaactttacgaacccgggaatgaaacgtttaattttttttttaaggtcacttaaattaaattaattgcccggtttttaaaaaactctatattgaaaaa

SEQ ID NO: 242001 - DNA, 264 bp, Gossypium hirsutum
  unsure (1)..(264): unsure at all n locations
caatcanccactacttctctttttttaactcaaatacccaactaatagtataagtttaatttttatcacttattaccataaaaatacctccccanttctcccttccaatctcttcaatacctttactttttaatctcctaaattttttcccacttttttctccaatatcaatcaatatcattaatctttaatcttatcctatctcttaaattataattaaaatcaacttttttttaaatccctaccattccaatatattaatca

SEQ ID NO: 242002 - DNA, 273 bp, Gossypium hirsutum
gattggtccttacaaatgtcgtcatgaactgtgttgaagctgcacatcctgaacttgtgaaggttgaaccggctgatattggattcttggctgatacctgaatatggaaccgggatgtcaaaccgcgcataccagattgactagttgcatactgcgggtacggctgaaaatggctgtgacgactaaatcagcaagaaagttacatgaatgataagcagattcccttacactctaaccattttattttagctatgagaaagatatagcgttcac

SEQ ID NO: 242003 - DNA, 367 bp, Gossypium hirsutum
gaattatatatgagagtaggtcggtgtttttatgtgtggaggccttccattccgatttatctttaattgaattaggcgtgctatatcattgccacctggcaactcatgctatcttccttgtaggataggataatgtaaataatttgtaaagaaaagaaatgggtatcaaagataataaataatacagtctcaactttaatcatttatatcagactgcgacaattcccgttatctgaggcaaagggaattgaaattaataagatgataagttggcaagatttgacccactaaaaaaaaaaaaacttgtttgttgggggaccgatagtaacttttttctcaatggacggatcaaaggactaagaccaaa

SEQ ID NO: 242004 - DNA, 421 bp, Gossypium hirsutum
tgccttcattgagcttcttgactgtggcacttctaactaccctggatcttcaagagactgcggtcttctggctgcgtgtgaagcacatgagactcttcctcaaagtgctgaatttccttcctgtgtttacttcttgtcttactacacctatcaaaatgacattgagatggtgcatactttggctttctgttccggtgttttggattctctggccgttggattgaaagcatcaaaagaattctctaagttatatgcacgcattgcagtactttggcttcacataagcttgaaccagccctctgttgtatattggttcttcttctttttttttttttatctttttcctttgattaatgagaggtgatgaagaattggcattattttctcacgaagataaatttgggtttagaaaattgaatac

SEQ ID NO: 242005 - DNA, 387 bp, Gossypium hirsutum
  unsure (1)..(387): unsure at all n locations
aacaccttttaaatttcagtctttctttttgtttaatctctgcgtcgtgtagaacattacagggacggatatggcttttatagccatttcaatacaatatttctatgtttttttgctactgctctctgtgttgtctactgctatttctgcattttttactcttttttgccttcttttgtaggttttgacgagagcgatgggacgaggccagaggttgctgtgctgaggccacttttgttggtttnaaaaaaaaaaaaataaaaaataattttaataaaaataataatatattaatattatttctttatttcggtcgtttttttttttatatacttttatttctctttttattttttttattttattattttatatttttttgggggg

SEQ ID NO: 242006 - DNA, 138 bp, Gossypium hirsutum
accacgcgtacgcccacacttccggatgctgtaaattatcgggcttcttcttttgggaatggctacgacagtatttttgaagctaaaggaattgcttgtaatatagtgcatgccgttgcctacaacaaatgctatcat

SEQ ID NO: 242007 - DNA, 409 bp, Gossypium hirsutum
cagcaactaagggttgaagctcaagataaagttttttttatcaacgcgtttagcgaaagacgcgggggaggtctgcttgtattcttattggaagcctttgaagagctgggtcttgatgtcttccaagctagggttttctgttctgaaggttttctttttgaagctgttggagttaattatgaccaacgttcattagagtgcttaaatgaaccctactactcctcagcactttacatttgatgtcttacctctttcacattcatcatgattcgaatcaacacatatgggactgtcggagactgaccaggactcttgttggagattataaaggatcacatagatcccgtggtgaaagaagcattggggatatggttggatcaatgtgcttgtggaaacagaaatgtggatg

SEQ ID NO: 242008 - DNA, 176 bp, Gossypium hirsutum
atcatcttcctcctaccatcgtccctcttctctctttctctcgtctctgcaaatcagcttgggtttgccttctcttctcatctcaggtctcacccaccgccgtgtccgctggtttttgccgcatctgacctgtatcccgcgtcggatcgtatcgacacgggtactgcaccccaaat

SEQ ID NO: 242009 - DNA, 399 bp, Gossypium hirsutum
ggaacggtctaaagcatatggtttcacatcggatggtgatttgattcatgttttgctgttgggtgatagtatgaacttcaagtgcagggttaggtccaagaaaaagttggaaatgaatgagcctcttgcttttctggctattaagggatatttgcttatcgttgatctggaaaagatttttgtgtataatgtttctacgctgcattatgttagggctggtgcgccaaggtttcttttctctgccggcttggatgagatcaggtcttcgtttttaactcaccaagtggtggatacaaataaagagagaagacacgtgacacccttaatagcgagtgaccgtgaaaagctcactgttcttggccttggaggtgattacattggaatgtatcgctctaacct

SEQ ID NO: 242010 - DNA, 446 bp, Gossypium hirsutum
cccacgcgtccggtttataaattcaatgttttatataaaattatcacttactctattggcatggtcatgcaccccacacctatcaggaacttggttgggacttgggagtgggaccacgttaggcacaatcatcatttttataagtgttcacgtataatattaccaaattttgtaatatctgaatctgctaaaattctttatatatatatattctcaaaatacaagcattacgcaagtaataggtttagatatctaagtcggagtcctattcaaataaataatataaatttagataataaatatttgaatatttatttgcatctgttgtaaatttgtaatgaattaaaattcataatatttgaaacaataatattcgaatccataaaatatatatatgaattgaatattcgaatctataatccaaattattatcctttaacttcaca

SEQ ID NO: 242011 - DNA, 131 bp, Gossypium hirsutum
aaacttgtcacttgtgccaatgataacaatctttgaatttttgcgtacctgcattatgctgggacatgctatattatgatttgacggatggatatacaatcattttaatgaaggaatttttgaaactgttg

SEQ ID NO: 242012 - DNA, 353 bp, Gossypium hirsutum
cgacccacacactcgccacttgtgccaatgataacaatttacgattttatccatacctgcatgattctgtgacagactatattataatttgacggagcgatatataattattttaacgatgtacttcttgaaactcttgacactgaacttacaacagtccaacgtctatcacactgtttatattctgcatatagttattcagcagaggctaattacccacatcctttaaactacttaatgcctttacaatgacatcccataacagaagtctgtatatataatgatgggtctcctaccagatctagcattcttgaacatactaatattcctaaaagcgtatatcacaattatac

SEQ ID NO: 242013 - DNA, 336 bp, Gossypium hirsutum
cttttacatattatcgatcatctattcaattatgccaactacatcgaggcaatgggcttggccagaccatctggccttacagagagatctcctcctgtttctctactcacatcctatcatcataattccaaaaataatgccaccatcaatattgaacaatggaaattattccgcaactgcaatggatcagtcaaaaaatgtggatcttaattcaattaaagctatcatcaaattcgtttaaaaccatatactcgaatcatagtattctactgacttgttaataaagctatccactcagctataaaaagtcaagtctcataggaataatagattcat

SEQ ID NO: 242014 - DNA, 376 bp, Gossypium hirsutum
cccacgcgtccgcgagtatttgctgctgttattgcagttttaagattgttgtatgtttgttaatttgatagatagagattgatctctaatgccctcttctaacttggacttagcattgtgattttaaaattaaataaaaagggaaaaaaaactaatgacaaatattaaaaggaaaaaaaaaaaaaaaaaaaaaaaaaaaaaaaaaaaaaaaaaataaaaaaaaaaaaaaaaaaaaaaaaaaaaaccataaaaaaactaaaaagtaaaagatttataaaaaaaaaaaaaaggggcggcccttttaaaggttccaagctttcgtacccgttcttgccaacgtataacttttttttaggggcccctaaattcaatccaa

SEQ ID NO: 242015 - DNA, 236 bp, Gossypium hirsutum
cgaacgcgtgtgccgacgcgtgggcaaacgcttgggttaaaaatagcctgcttattaatgggcgatgagaatgacgttacttctgtgaaagactccaactgttgctgaaaactgtgaagcattatacggacctttcatatagaatcaaactccgaaagtccaaccaattttagattcctacaaagtagagctggttaaattgatttcatgcgaaacctaagtacctttaaataatg

SEQ ID NO: 242016 - DNA, 358 bp, Gossypium hirsutum
gtcgaacgccattggaagaaacatgtcaaatctcagggcatgctgccgaaagattgatggtgtagtgatgattgtcacactgctttacatggtgtcatattcgaatccagatgaaggcaaggaacggacctatgtagtactagtctagtatgctgactctagctctataatgcatcgctatatgtacgaaattatagcgactagaacatgctgaaagtgattgtaatgctgtactgcatgctgcgataaatgtatgatcatagactaacttttgttacgtgcattgatacatatgatttagtaagtgaaagatgcatggaaaccttaaccgagcatttgaatccaatattgacttgac

SEQ ID NO: 242017 - DNA, 192 bp, Gossypium hirsutum
gagaactctcaacaagctggaactaatcaatatcaataggaagagaagctactggaattagataacaaaaggtgtcaatctggtttatgcgatgtcttattcgaatacagatgaattcaaagaaagtactcttatagtactagtctactatgatgactctagctctatgatggatcgctatatgtacgaaat

SEQ ID NO: 242018 - DNA, 204 bp, Gossypium hirsutum
ctaaagcttacgcgtcagcaattccatcgtactaaccctcgtatacttcaccatttcgagggacgccacactaggacgctaaactacacgtcaactcgctaaaggccagccataaagccggatacattgtctgcaagttagcctacagacagatacagactgacgaacacggctccggaagactctcagcacctactaccatac

SEQ ID NO: 242019 - DNA, 336 bp, Gossypium hirsutum
ctaaaccttacgcgtccgcaatattttcattataactcacgtatacttcagcatgggcacgcgctccgtactaggacgctaaactacacctccactagctaacggccatccattcatacggatgcattgtctgcaagatatactacaaacagattcatactgaccaacacagcttcgggagactctcagcacctactaccatacaactctaagcttacttcctaatcaacaacgctatacgtctcaacatatatgactatatgactgctgacaatcactatctgatcaggatcttcctgattgtaccggcttaatacaccatagggatgataagca

SEQ ID NO: 242020 - DNA, 384 bp, Gossypium hirsutum
ctaaagcttacgcgacagcaatactttcattataactctcgtatacttcagcatgggcacgcgctccgtactaggacgctaaactacaccttcacttgctaacggccatccattcatacggatgcattgtctgcaagatagactacaaacagattcatgctgacgaacacagcttcgggagactatcagcacctactaccatacaactctaagcctacgtgctgatgaacgtccgaatgctgtctacatatgagactataggaatgttgaaaattactagctgatcaggatcgtcctgattgtacgggcttaatacaccatagggatgataagcaagtagattgaatcgagattaaagtgataaggctacgagagattttcaca

SEQ ID NO: 242021 - DNA, 327 bp, Gossypium hirsutum
atttaattctgtttaattttgctacaaactcttctagttttcttctaataaaaaattattgtgggaaaaaaaaaaaaaaaaaaaaaaaaaaaaaaaaaaaaaaaaaaaaaaaaaaaaaaaaaaaaaaaaaaaaaaaaaaaaaaaaaaaaaaaaaaaaaaaaaaaaaaaaaaaaaaaaaaaaaaaaaaaaaaaaaaaaaaaaaaaaaaaaaaaaagggccccccctttaaaagacccaaatttacctcccccggccttccaactaaaaacctttttaaaggggcccccaaattcaaatcaatggcccccctttaaaaaccgctagccc

SEQ ID NO: 242022 - DNA, 349 bp, Gossypium hirsutum
caaaatctgagtttttattatttctacgtttataaaacattgtataattttctttgttagttgtctgagatgccgaaagtttgcttctctaaagacattatgatcatgtttgtggctcttgtgctctccgtcgccaccattgtatcagctcaggacagtgcaatggcgcccgcaccgtcaatggacactggatctgccttctcaacgcccattactggtgttgcccgtaacgtgtctcttaataattcccttcttgctcttttgaagccatgaggtacataatttgaattgctgggtgacccatggattggcatattttggaattattaataataataatattaataat

SEQ ID NO: 242023 - DNA, 413 bp, Gossypium hirsutum
aaaaataaaaaaataggcataataatagaaagcaaaaacataaaagagaataggaataaagaaaagctgagatataaatgaggcaatggttacatgggaattatctcaatatacttaaaaatttagagactgcatgcttgggaggtcattcagtcaataaggtggtttttgaggctacatgactaaattttgagcttgaggtggggaaaagaagacataatgttgacaatcttagttggtggttctgttagttacattcggtattgatgatctagagcttcctatattctcttctgtgttaatcatttctttttcttatttcagtgatatgtataggtaagttgtacttgatgtgcattgcatgactgcatggaagactttggacctatgatatgaagggtaactttcagatt

SEQ ID NO: 242024 - DNA, 363 bp, Gossypium hirsutum
caaaatacgcgtatttattaagcctacgctttaaaactttgaataataatcttcgttacttgtactgtatacctaaagtatgcttctctaaagacattatgatcatgtttgtggctcttgtgctctccgtcgccaccattgtatcatctcatgacagagcaatggcacccgcaccgtcaatggacactgtatctgccttctcaacgcccattactggtgttgccgatacatagtctctcattatttacacttcaagctctttcgaatcagctagttacaataattgagtacttggaagtcttatgtatagcatactttgaatttattattaatattattattattattattggatcaataatt

SEQ ID NO: 242025 - DNA, 214 bp, Gossypium hirsutum
caaaatctgagtaaaattatttctacgtttaaaaattttgtataactatctttgatagtggactagtatacctaaagatcgcttctctaaagacattatgatcatgatagtgtctcttgtactatacgtatactccattgtatcagctcacgacagagcaaagattccctcaccttcaatggacactgttatctgccatctcaacttctattac

SEQ ID NO: 242026 - DNA, 326 bp, Gossypium hirsutum
ctgaaccacttacatccacagcgttttatattatcagcggcaatgaaacagcacgggtcggtatatatatgtgctcacattgtgcactagactactgctgtatggaatctacatatactaccactaacagtgcaacgtgtatgtgcttgaataagagggactagactatgcataaccacagtaatctatagtaccaagttggtatatattgaatccatggactttacagctttaaggtatatgactttatgacaatacagatcaatgaaaacgtcaaatcatattaaccatagtaatttttctatcagtacatggtaggaaatgga

SEQ ID NO: 242027 - DNA, 149 bp, Gossypium hirsutum
accacacgtgcgcattcttcattcctagattttggttatacccgatgggcttagcgtcaagatagggtccaaggttatcgaatttgacgatcccaggggtaagcttatcccctacttcaagcacttaaacctggacttccatctattta

SEQ ID NO: 242028 - DNA, 295 bp, Gossypium hirsutum
ctcattcactgccttactccctgtttagattttagcatgtagatacattttcatggttcaggtatgcttgaataagactatcttgcatgacattgggctcttatcatactatcgccaagccatttttcattgataacaacgtcaatattatcactatgtctttagataaacacctcgccagtatagtatcagttaatcttatcagtctacttaattaactgatgaaatctcattgatttatcaagaacttatttgaatgacatctttctctaaacgatcacatattcgtaacact

SEQ ID NO: 242029 - DNA, 198 bp, Gossypium hirsutum
ccagaacatgctgcaattgatgctgcggagtaccacgtttgtatgcatgactacccggcgtggcaagggaaagtagcatcatgcagatccaggtgctgcgtaaaaatgatatcagagttagtagctgtgcgctgatagctgaacgaaggatcagtcaattactaggtgtctagtgacgaacactatggaacgccctag

SEQ ID NO: 242030 - DNA, 313 bp, Gossypium hirsutum
  unsure (1)..(313): unsure at all n locations
tcgtcccacgtcgtctcgtaaattttgtcaatgggattattccatctgtgtggatctgnnaaaaggaagtctaataggggagtattgctttggagtatcctaaacagttgatcgatgatggacatggaggaacattgaagggtcggtgccttagaaatccatccattgggtacatatgttagcttgggaaatctcaattccattaaatcggcgctcgttggatatattgataccaaagcttgttggttaatcaagtttgtactggtacttgcattggtatgtatgagtaggtttaggttatagcttaaggact

SEQ ID NO: 242031 - DNA, 140 bp, Gossypium hirsutum
cctagaaccaactgctacatgctttccttttttaggagtacatattatataaagagctaagggaaagttatgaaaggccttataaagagcgtcataaaggacaaagaataacatctcatgaattgaaatttaaataataa

SEQ ID NO: 242032 - DNA, 204 bp, Gossypium hirsutum
ccttgaaccaactgctacatgctatttctttttatgagtacatattataaaaagaagtaagggttggattagaaaggccttataaagagcttctaaaatgacaaagataaacagctcatgaattgaaatttatataataatttaattcttctattgttttcaattcagtattttcatctaattcgattattatgaatttctaaa

SEQ ID NO: 242033 - DNA, 201 bp, Gossypium hirsutum
cctagaaccaactgctacatgctttccattttaggagtacatcttataaaaagagctaatgaacggaaaagaaaggccttataaagagcgtcaaaaaggacaaagaaaaacagctcatgaattgaaatttatataataattaaattatactattgctttcaattcagtactttcttctaattcgattagttgaatacctaa

SEQ ID NO: 242034 - DNA, 191 bp, Gossypium hirsutum
gttaggaccgcatcctacgacagctttagtttttaaggtccttgaccactatcagggctagggtgctataaatcagcatctacctacactaaatatgcatcagctcacataaattgcataaaacttataccgatctcctcgtctctaaattctgaaacgactatactttctaaatatgatacactcatata

SEQ ID NO: 242035 - DNA, 261 bp, Gossypium hirsutum
gtaagaccttcatcctactacagattgagtttccaaggcccttcaccaatatcatgggctagggtgctaacaaagcaacatcagcactagactataatatgcattagctcacttataatacaaacaatttataccttcctccatgtctattaatcctgaaactactataatatataaagattatacactcatataaaatagaactataaaactgaccttctattactaataacatctctaactgccatagcatattctata

SEQ ID NO: 242036 - DNA, 320 bp, Gossypium hirsutum
tggaatcgtggtagcactggtactgatcaaaattcgcaaagaaataacagctgcaagttgaactactcagcttcttcatcggttttcagcatgataaggaattggaaaacgtttcacttagagctgaaggtacggttgattcatggaattgtcatgcagaccagtagaataattacttacatgaaatttgtaatgcagagaactagaattttaatgtgaataggcttttcaagcagtaatcatgttctcttctctcttttctttttcttctcattttagaaataaataagaaatttaaactgcaatttgttcggtgagaa

SEQ ID NO: 242037 - DNA, 272 bp, Gossypium hirsutum
ctgatttgttcttcatttctttcagctaaatttattattaaccttccattaaggctttaccgaaaggtgatactaaatgtgtgtttcttgacactcagtgcacactaagcgttccattgatagccaataaagagcttgaacgacgaaaatatagtgttagcttgataggtaatctggtcacacagaaatgtcatgcaacatgacagcaacaaagattagcattcgctgtgaaactttaaactcgattactgtgacgctagactccggattct

SEQ ID NO: 242038 - DNA, 152 bp, Gossypium hirsutum
ctcatgcgtacaacatttctaacagctacatttacttttaaccttccattaatactttccagaaaggtcatacttaacatttgtatctacacacgcaatatatactaaataatccttaaatagccaataaagaactacaacaaataaaatat

SEQ ID NO: 242039 - DNA, 222 bp, Gossypium hirsutum
ggacgcataccacggatcgttgtttcgagttcggcgacagttatgtaccttctaaagaatgagtgaatggtcaaggtagcatcactgaaccgctgtgaggttctattgaaacctgggctggataactgccgttgcttctaggaggaaggctttgaccatgtatatgtcggttacagtatccgtcatgcatctgatcccggctccagagctacacagattcta

SEQ ID NO: 242040 - DNA, 351 bp, Gossypium hirsutum
caccgagagaggaacgcgaacaaccaacgatcgcctcatcgccatggctcgctctgtccccatcggcgtcgccgtcgcgcctctgctcctgctcctcctcgtctccactgcgtccgctgcacggaccgtgggcgacaccgtgcaggacgcgtgcagcaagacacaattccccaagatctgcgtggacagcctcgccgcaaagccagagagccagaaggcgaccccgcgccggctggcggagctgttcgtgaacatcgcggccgagaagggatccgggatggccacgttcgtgcacgggaagtacaacaacgccaaagacaagaccgtggtcaagtgctaccacagctgctc

SEQ ID NO: 242041 - DNA, 270 bp, Gossypium hirsutum
ttaatccgctggtccacccactcttccgcttactcttttcctaacgcgtaggcttcaccctttcatcaccctacctctccactcaagacttgagtacatcctccactcggctcccgtccattccctaacattctatctttgcatcccacaaccaactctctccaaaggactgacaatccctagaagcttcatcaaccacttcctctccagcaaagcctcctctccgaatattccccttcacacctctgctcccaacacgaaccttcaaaa

SEQ ID NO: 242042 - DNA, 392 bp, Gossypium hirsutum
tcgatcaccggacgtcgagcgagcagtctcccaattgtacccaataactaataacatctacgggaacgggactttccttggaccactatatccaggagcgacgaagtgatacaccctgcagccattgagatgaagaaggcactttgcgccgtactcgtcgccgccgcctcctccaccgccgtgctggcctcattcgcatcctaagctcattctgaggcgcccgccgtagcggccgttggtgcggctgatcctagcgcaagccgtgccgacgccgtacgcgtgccctgcggatgtgcgctcgtcgccttcttactagcatactacctctactgatcgacgacacgctgagcggcaacgttgagatgcatcgtgcttgcttgatccgattaata

SEQ ID NO: 242043 - DNA, 280 bp, Gossypium hirsutum
  unsure (1)..(280): unsure at all n locations
ttcattgaatcaccaagtcgaaaaactcacagttaggtacctgttacatgttctggggtgtctagtctncagcgaacattcaatactgagagggagattctgagcctacattaacctatgatacaacttaacgctaatcagctaatatcattgatcggtccagagctgctccaaaatcgcttgaaggattatgtgaagggcgtagtgagtgaagatttgcttatacatgctaaaatcttgcgtttcgttaagatgtttgaagatcaactaccattgaaat

SEQ ID NO: 242044 - DNA, 328 bp, Gossypium hirsutum
attcccgtttcgacccactcttcctatccttcgaaatcgtatcttttgaagcatggacttcatagcttctatcctgtttctagctcttgtgatcttctgtgacatatctttagacccttgcagctctcatccatattactcttacctttatttcatccctatctattacaaatgttcactattcattccacttaaacctttcttaagttctatcttaatcattatcattttatcctttttccttttatttttctagattttccattattctattttttttattacttctttttcctatcctttctttcatctcatttttttttctcac

SEQ ID NO: 242045 - DNA, 496 bp, Gossypium hirsutum
tccacccatgctttcgagctgaactttccgaacataatcttctgtatcttatctttgacgccagacttccagacggtatcagcgtacttgatgccccctgctagagccctatatctactaacactaacacaagacaacacctgctgacacttttactataaactcctattccgctaaactaaaatctgacgatcactatttcaagtgctcttagtagatgatctactactttgagaccaggaatgactggtcaataagccaatgatgcaaccggaccagcaaggcagatctcacatcgtcggactactctgcttgcagagctcataactcaaagccatgcataaaacatgtgctatcacttcaagaatgttacactactttcttcatcattatcgacagtgattcgatttgtttcgagctgtcattcattgtatgttgattgccgcataaggctgttaattcgcatatataattcctgtttccagatattcataca

SEQ ID NO: 242046 - DNA, 247 bp, Gossypium hirsutum
  unsure (1)..(247): unsure at all n locations
aaaaaatagagatgtcntctgnaatatattctgcaatcttaattctgtcngtgttccggccttttttctaaagttcgggtgtttntttactccangaacagcccaatgatgaccccaaaaacatgcactctattcctcccatttatgcactcaaccctacccaatttaatggacccagtgttgacattcacgaatatcattttatcccaaaaagtgcttaaattggtactcttcttttttgttttta

SEQ ID NO: 242047 - DNA, 373 bp, Gossypium hirsutum
  unsure (1)..(373): unsure at all n locations
cgcgggcatntgagaaggatatgacgccttttttatagcnaaagagcgcatggggagatactcgccgcctgatcttatgagagcgggcgaggcggggaaactcntattccaatcctccgtaggcttagtctagcgcttctttaggaccttttaataacttaagcgaacttgaaacattctgaattagctaatatgaaagggagcataaagcgacaagaccaactgtcatccatgagacagataatgccaaaggcaactcaagtagagtggaggaggtgatcttattgtgatttgaggagttgttggcactattaggttcaagatacatatgctttgtggtgtaaattaatagaacttgctttgaaactgaaac

SEQ ID NO: 242048 - DNA, 330 bp, Gossypium hirsutum
caccccttcattttggtttttggtagagtattgggcatagtacagaggtgggcccgaacatgatggagtagttatgtgtatcgcagaagacttgactccgaaaacaaacatttactatatagtgctctttgtttaacgagacataggaactctaattaagagtgaagttgcgtctggaatgtccgtaaaagaattcacagatgccactgtctactgctgatatcttcctgagaagaagaagaagaagatggtacctgaagacttgaaagaaatggggctcgctgattctaagaggaaaacaattgtcattcgatctcgcctggtaaatac

SEQ ID NO: 242049 - DNA, 376 bp, Gossypium hirsutum
gggaaacaatgccttaatttgacatgaattcactgatggaaccgaggaggaggagtctgattctgactatgaggaggatggtgacgatgagtatgcataaatctattagaaaatgcttggcttttttcaaatcagacgatccaaatttagaaaggtaaacttttctgttaagttgaaacgcattgatgaaccatctttgcaattcttaaagaacatcacagaccgtcttaatcaagttgcctcatattttacgtagccatacataacatgtgtcatggtttcggtaggtcccagtatttgtattaggagaatgtgacaatttccattccatttatttaatcacataaacatttgtgtacattctgctagtctaaga

SEQ ID NO: 242050 - DNA, 247 bp, Gossypium hirsutum
ttttcttactacgtggtcataaagatagcacccggctgtcaagagtgtgtgttatgtgaccggaattctgttgcttgatatgttctggtggagaaagttgaaaagcacaaagtggtgaaaattaaacggttgtgggccatccggaggatgacttgcgatatcacttcctgtggttgtcggaagtcgtcggcttaatttcaatcgaagggactggtgaaaagatgccaatagagaaaaggagctacat

SEQ ID NO: 242051 - DNA, 328 bp, Gossypium hirsutum
ctttaaaaatttattatttttaaataaattttttaataaaccaagtccttaattcgaccgaatattttaatgagctggagtcattcttatactaattaaaattaaataattttttaaattattaaataataatttaagtcaagctgatttaatccgaatttataaaaacattattcaaaactttacccaaccagacaaatatcttaacccttgaaagcttgaacatgtctttaaaaagtttggaagtcatgtgaccaaaacattggttttggattgtaagcatattttgaaatacaaatttaaataattttttattgaaagaatgatg

SEQ ID NO: 242052 - DNA, 375 bp, Gossypium hirsutum
cgataagatatacgcacctcttataccctttcttcccacacagaggcaaagccccctgcggcctttttaaaccggagaatcaaccaaaaccattttaaaactttccatctaaaatttctaagtcagcgcagaatggttccccctgaaaaccccaattactggtctcacttctattactcaacctagatcgacgatatccctgttcccgaccgaccttacaccggtttttcttggtccacgcaatcaaccaacgctcctaccgctgtcaatttggaaatttacaactcatttaacgatctggatagccattcagaatctttttcaaagaacacaggtacatctgaatcatgcaacccttctatctcaaaaacattt

SEQ ID NO: 242053 - DNA, 230 bp, Gossypium hirsutum
  unsure (1)..(230): unsure at all n locations
gtcctaagtctcaataccataaacgatnngccgaccagggattcaggcggatnggttgctttcagagaccctccgccggcacccttatgaagannaatcaaagtnnctttgggttccgggggagagtatgagtcgcaaaggctgaaaccttaaaagggaattgaaagaataagggcnnccatcaatttcaatgaatattatatanntagttgtatacccgtttgaatttg

SEQ ID NO: 242054 - DNA, 349 bp, Gossypium hirsutum
  unsure (1)..(349): unsure at all n locations
taaacccagctgtancgctcgaattcacggcaccgcttcagcagcgaagaccgcacagtataaaaggggatggggcacctcgatccctccggagcaacccaactagtcacacagagacgcttgacaggacactcgcggaacacatgttccctagttttcactccatcttggcaccgacagcaagttgcagagcccctcatttgccgatattgaagattactgaaagtaggaagatagttgcgagaaattcgccaaactgtaatctttattntagatggaagatcaagagtccacaatttttttgtaaattgtttggatcttacttgtaaattattaagaccatcatgtt

SEQ ID NO: 242055 - DNA, 288 bp, Gossypium hirsutum
cataccacccttatttacaagacatctttttagggggactgaggcatataattctttatcgtcatccatcaactcgaggacctgatctttagaaatttggttgttcgaacccttttaactgattctttactatgggttctgctgcataacgttgaaacttatcttttaaatattttgctcctgtttcttaattaatacgattatgttttgtgcatttttagactagaaatttttcttgatcattaagataaattaggtaccttttttatacaccttaaataaaatttt

SEQ ID NO: 242056 - DNA, 355 bp, Gossypium hirsutum
gccacccttccgccaatccgtccggctgttttgatccataagcataggcagactactgagggtatgcaatggatggttaggtgattccacaaacaataatggcaactacatttcataacgagcactttcctagtgctaactttaacttgaccagaaatagatgagggaaccaatcagtcattgccggtttgattgatatgggtcaagaaaattaggagtaagagaaggatgtcttggtgggtttttgtttcttttattcttttaaagttttttttgatattacgtagatgggggtggtgaattaaattggtgtataattagcaatatttttgtacgggatacataataatcaaca

SEQ ID NO: 242057 - DNA, 239 bp, Gossypium hirsutum
  unsure (1)..(239): unsure at all n locations
ccttacactgggtttgcactggcaaggtacgattgcgattttttataggggggggcggggacattttatanttnnntaactgaacttccaattacatctattgctaanttgattgagaccatctgctgtaagatgatggagttgatgattactcagaagtcagattcatgtctggggttgacaaaattaactccagctgtggggttcaaattagaacaacatattctttaagctaacat

SEQ ID NO: 242058 - DNA, 297 bp, Gossypium hirsutum
  unsure (1)..(297): unsure at all n locations
ggaaaaacccgggcgcgacgccagcgcagtccgttctttagctgttgatagtanntaatatgctatagncatacccagagatggagaggccaaagaacgcaagcattgtttaggtgtgttgagtgtcggnttttaggtttgctgcccttttttcttcccaccaatagaggtcaattagcagtgaccctccaactggcnccttggtgagcccagaaaaacctactatctctagctccttgaccctcatagctggaaccctcccccttcaaggttcacaatggcacaaaccaccatctt

SEQ ID NO: 242059 - DNA, 387 bp, Gossypium hirsutum
gcgattaaaatgttaaacatgtaaaccaatcttggcttttcttaagccttttaaaaattttggggggcccccatgtgatgtttggattaggaatgtatatttatccgctgatatttgtcccaggaagggattcttgaaccaataattgattgtttttgcatttaatttgcatgccctatttgtatttcaaacaataggaccgatgcgtagatatctaactcttggttacctatttgtctagtcttctacttattggtgcttaccttgttaatgtggttgcacataaagtgtttgtcattcacaagcctcatggtaaactaatcagtaattaaatcatccttgaagtaaaagtttgaactatcagggtatactttttgcaaaagattt

SEQ ID NO: 242060 - DNA, 145 bp, Gossypium hirsutum
  unsure (1)..(145): unsure at all n locations
attggcaagttctcagactcacatggaagagaagtcagcaccagcaatgcgatattcgtgacaacttcgacattaactaaagaaactcaagttgtttgtcataaacagcacacatctgangataaaatattgggaaccaagggat

SEQ ID NO: 242061 - DNA, 273 bp, Gossypium hirsutum
ggataaaattgcgccgttttctaaaggggaatggtagttaattcaaagtgagttaaaacctggaagtttcatttgcccaaaaaaaaaaaaaaaaaaaaaaaaaaaaaaaaaaaaaatttaaaaaaaaaaaaaaaaaaaaaaaaaaaaaaaaaaaaaaaaaaaaaaaaaaaaaaaaaaaaaaaaaaaaaggggggggccgttttaaaaaatccaaatttacttacccgggattgcaaataaataatttttttttagggcccccaaaataaaatt

SEQ ID NO: 242062 - DNA, 403 bp, Gossypium hirsutum
  unsure (1)..(403): unsure at all n locations
ggaaaaccggcgcgcgcacgcgtccggtgcccttgaacttcaaactcttctgtattttttaaccttcatatatatatagataccgccgcttttacgagggagctagtgtancctccaactcttcatcgtcttaggcttcttcttattataattctcttgccattacactatcgaaaaaaaaaaaaatattttataaaaaaaaaaataaaaaaaaaaaaaaaaaaaaaaaacaaaaaaaaaaaatatataataaaaaataataaaaaaaaaaaataatactattcataataaaaaaaaaaaaaaggccgccccttttaaagaaccaaatttttcgacccgctcattcacaaatataattttttttattgtccacccaaatttaattttcttggccgctttttta

SEQ ID NO: 242063 - DNA, 197 bp, Gossypium hirsutum
tgtatagaggtgaaacaacaacaacgacgacaacaacagaggcaggtttttttttgagaggacaagatcaacaagacaacagttcaccaccaactgatcaaactgaaaactggttttggtatagaaatgaagatattccttacaagggttttgaactatggcaacaacaacaacaacaacaacaacatatttacatg

SEQ ID NO: 242064 - DNA, 242 bp, Gossypium hirsutum
  unsure (1)..(242): unsure at all n locations
ttcctgaaaaaaaactaaaattcttaggatgtaaagaggagattgacgatggtaaattttaagcagcagaacccagttcaagcaagccagtggaacaaaaagctaaaccaccagagccacctaaacaagactacatccatgtgcgagccagaangggtcaagctactgatccccacagcatcgctgaaagattacgcagagagagaattgcagagagaatgaaactcttcaagactgtttcc

SEQ ID NO: 242065 - DNA, 392 bp, Gossypium hirsutum
  unsure (1)..(392): unsure at all n locations
cggaaaacccggggggacgccacgcgtccgcccacccctccncaaaagcttaacattttcttagagaggggccaaatcgactctatacgccgcattaactatacagaccgagggattgaaggagatgataagaggacatctagaacaataattatccagaattcaagaaccccagggacacttgtgcatggtaaccaacatgacaatagcagtctgagcattggccgtgtaacagctggtatagagtttagtcgaccactgaggccaaaatggagtgggacagcaggtcttatttttcagcatgctggtgctcgtgatgaaaaaggaaatccaattatcaaggacttctatggcagcccacttactgcaagtggtaagccttacgacgatat

SEQ ID NO: 242066 - DNA, 308 bp, Gossypium hirsutum
  unsure (1)..(308): unsure at all n locations
tgcacagccaantgatcttaattggtatgtgtgagactgtgatgaatgagttagggccatattgtttgatagggtaatgggagctaatcagttgacagtgaacaaatttttttgtctataaaaaaaaaaaaacaaaaaaaaaaaaaaaaaaaaacaaaaagaatttattaaacaaaaaaatcaaaaaaacgaaaaaaacatcaactctttaagctctgtcatcaaacccaaaaatctcctcggcgtcaattttaacggaaaaaccaccgagaaatacaagtaacaggttcttcactgtcgtctttttc

SEQ ID NO: 242067 - DNA, 375 bp, Gossypium hirsutum
  unsure (1)..(375): unsure at all n locations
ggaaaaaccggccgagcgcgcgtgcgnccacgccttccgaaatgttggtgggcctttttgaattcctaccggggggattccatatcgaggtgttcttggtaaaaacggtggtaaaaatggcggtggtttacctcangagctacacaagaatggtggtaacaacggtggtgggaacggtggcaaaaagggtgctcccaacggtgtttccgatgggtttcctaccatgggtggcggcgctaatggtgggaacatgagtcaacaacaaagggctgctgccatgaacatggcaatgggccaaatggggagcttaccccaaatgggtaacatcccagcagtgcaagggttaccggcagcagccattaacggcggcggcgg

SEQ ID NO: 242068 - DNA, 124 bp, Gossypium hirsutum
gatttcccgtgcgattgcgaaccgcgaaaacgtggctggttaaaccattgggcctacggaggcatagagctactgtgcggctgctgtttcggcacctcacaaagaaggtgactttggggacgcc

SEQ ID NO: 242069 - DNA, 422 bp, Gossypium hirsutum
gatgagaaaaaatcttgatttcttcaatcctgaggtttcggccaaagattctccagcgcgtgacggaccatttctggtaccccctttccaggtaaaagctttctcttctcttaagagcctccgtagcaatagtatgggtgtagatgttttttttttttgaataaaagtaaacttaactcttggaaactatatttcctttcttgaatatatctgataattgctccgataaccgatctgtcaataatggagctttgacacttcttgataacagttttcgagtttcctataatgtcgattttgttgattcccaaactaatacctagttttattgcctgtaaacctgcatatgcctctgctgtgaatggattttcaatgttggagtgttgaactgcctgtgttgcaaggatttccccttccccgtt

SEQ ID NO: 242070 - DNA, 186 bp, Gossypium hirsutum
  unsure (1)..(186): unsure at all n locations
agaaatggcaaaagcttctgggatctcccttctttccttatttatttgcattttctcctcactgagctttgcctatgcttcaactacagctccacctgcatcgttcaatcaacaaatgaagattcgagggcgtaggtcatgtttattgcgacacttgtcgngttgaatttgagacatctatcaacg

SEQ ID NO: 242071 - DNA, 124 bp, Gossypium hirsutum
tcgtccacgcgtgcgctcaaattggacaaactagtttcatgatgaaatacattggcgacgagaacgatgatgaacacgacgacagtgcagagaaagggttgaatttgatggataaaaccttttt

SEQ ID NO: 242072 - DNA, 133 bp, Gossypium hirsutum
atgcgtccacgcatacgtacggccacacctgcggctatcatatactcttcaactgccactgtctctgggtctctctgaaccaaaatatttcaagcttttcacttaacgagataccatgttggttaaccaggat

SEQ ID NO: 242073 - DNA, 414 bp, Gossypium hirsutum
aagaaggcacgggataaacttccgagctctaggaagaagaaaagcaaattggctagtgctgaaaaatatccggtttctggagatgatggaattgatgttcgtccaaagaaaagcaaaagctctcataaaaaaaaggtttccaccaatgacaaggttgttggtaaggacaagccagctgacattcagggagaaccagagaattcaagcacccctgaaattgatgaaactggtgatgacaaaaccaatctggggaggtcctcccagcttcaaaacactggtaaagggagtgctgatgaacttattacaactactgaagttaaaaagctccctagcagaagtgcacgacgtaaaaaggctaaaaggcgatggttgagggagcaagccaaacttgtaaaggaaaagccgcagtcaaaa

SEQ ID NO: 242074 - DNA, 425 bp, Gossypium hirsutum
gtgggatggctatgaaggaggatctaatagatctcgcattaatttcgaaagaggacattgatatacattgttctgtagcttgtttattttctcttgtagacttttaaataatcatatttctcttttattttatatttggtcgatttcttgtcccatgatcatctgtttgcatttcatgaaatagtataatctatagaggatagttgcttcttctcatttccctttctgttcgttgatagttaggccccgttctcctttgctttttagatggaattttgccaaaaaaaagtccgtttctcttaaaagtaatgaagaacagcatccactccagaaaaattttcatcatctgaaaagtcctttttggcatatggagaagttaaataatttaacttttcttcagccaaaagtgcttttggctaataatt

SEQ ID NO: 242075 - DNA, 412 bp, Gossypium hirsutum
cccacgcgtccgtgaatctgcaaagagcaaagaattgggctctcaatcttcttgcaccactcccgtacatgcggtcacttccagtacagtacaaagaggaagtcctgtgccacattgggagcctctgaagggtgataattactttcctggccagcctcgagtgagtagtttacttccctcatctacattatctgcaaaactttgtgaaacgcagtcttttcaagttatcagaagtcatggggttgaaaattgggaccgtggttccattaacattaacgaaaatttgaacgagacctctgaaggtcaaattattgctggaaatgtgaaacaagaaaatagtgagggaaaatctggcaaatcttgtgggcaaagctggaaatcacctttaaatgatgcttcaaatggatgggat

SEQ ID NO: 242076 - DNA, 160 bp, Gossypium hirsutum
gccaccatctgcacctgcgatctgttggtatggtcggtcgattcaatgatctttgttagcccacccggttgcgattcaacgtccaaaatacatgaccgggggaccacgcttagtttagttagaggataaagatcaattggctgaatgcatgctaccacag

SEQ ID NO: 242077 - DNA, 372 bp, Gossypium hirsutum
aactatatggccgctgacggggactatatggtcaatcaaaagtgggaaagacatattataaaggggccaatgaactatcaagggcatctagtgctaatatgggggagaccatctgatgaaagaacatggagaaaaagaaaactaaaaagtcaaaggcatgtttgcctttgacagaatgaacaaacacgaggagatggaaaatgtgacactatatccatacagctaacatgcttaactagccagtgctactgggtagcaccttccacggatgggacagttgagaagcaataaatgtactgaacatcgaaatttatgactgtttgttgagggaatgtctactgaaatgttatcaatgatgccatactgtaactg

SEQ ID NO: 242078 - DNA, 385 bp, Gossypium hirsutum
cttttatttttgatgaaaagaacaaaacaccctctacccctttgtttctcaactctctgcattggctatgaaccctaacctttgcgccgccagcccgtccatcgaaaggaaaaaaggctctactctcctccttttgggtctgacttcaccaaccgagagagtctgcggcgacacaatcacagggattgcatggaagccctctccttctcttattatttccgtttagaagagatttaaaaatcaaagatgaaaaatgtatcaaaaatatcgatgagataagaaaacacatatgcggaatggaaccaaaatcaactttgtgttgcttctatatttgcttttcgaaagactaatgcttcattcaaaaaaaatacaaaagggatccttt

SEQ ID NO: 242079 - DNA, 318 bp, Gossypium hirsutum
aatacaaaactgtttacttttgtctatcgacattccccaaagggtgggtgcgttactatgtagaacagatgcgtaaacaacgctagagggatatataatgcattatctctatttgctctctcaaaacacgtaccaatagtaagttcttatgaatcgttggtttcaaatataaaaaacaacatgtctgggcttcttccaaaataggaactcttgaatttggttttaaaagaactatcttagggctgtcgctctataggatccaacccttacttacacttgcttgcaacatcatacttcttttttttcgacacctaaatt

SEQ ID NO: 242080 - DNA, 421 bp, Gossypium hirsutum
atcggaaccatttatcattgctgcaactggaactgggacgattcccgcttcagctctggcggctgctggagcctctgtttgtgcgcaggggaactctgtctctgctggtttgcataccaaaatgggactgggggcatgtactgggtccaaagataggaataattgggcaatgttgggtggtaatttaggaagatcccaaatcccaagtggggcatggtcttctagtaatggaattggatcagggcttgttcaagcttcagagcaatccacatcagcttcaaattttgggaatgaaaactcaaatcatatccaccaaaactatgggttccaggggcttgaatttccaaatattaatatgggttttgtgagtttttcgtcgctgctcaacggtagtaacccccaggttccaggtttggagctt

SEQ ID NO: 242081 - DNA, 428 bp, Gossypium hirsutum
acgaaaaaaagtaatttttttagaaaattatacaatttgattataaaatataaaaatacaggggatgggccgtttattacaaaacataaaaatacaaaattagttaaaattacaaaaagaaactaaaaaaatgttcacaaaatattttgaaaaattcaaaaaagtaatgttaaaattttaaaaaataaaaaaatttacaaaaatataaattaaaaaaattgaccgatcaattactgtaaattgtttcaatctttttctatttaaatttattacaaaaaataaactatattatattttattaattgttataaatttcatatatgtattatattctcaaaaaaattatctacatactttgaatttatatattttttaatttaaaagtcttgaataatgaaagacgaatgcacatttcacttctctatttt

SEQ ID NO: 242082 - DNA, 423 bp, Gossypium hirsutum
cccacgcgtccgaaaaaggcggccggcgggagtcagtggttcgtcggaggaagtttccggacaggccatggcggaggataaaaagggtaattagattcttcaaaagaatcaactgttaatggaagactaagctaaacaaagccgtaattcggcgaaggaaaatacaatgaaactgcagcaacgtcctttgtactgtatataacatatgtctccaggctcttgtatcctgtatcatgtatcctgtatcctgtatcctgtaaggattacttcctcctttaattaatgcctatattttaaattagttcttgagcttaaaatatataatataagtccgtccaattttattatcacaaaaaaaaaaaaaaaaaacaaaaatataaataaaaaaaaaaaaaaaaaaaatgattgaattattttaattat

SEQ ID NO: 242083 - DNA, 213 bp, Gossypium hirsutum
ctttttgattgatgtaatttgatgttgatggagctgttaaccagctttgtgttaatgtacaaggtaagtttttgttatttggaaagcttagtggaagtaggtgtatgtttaggtagaaatttgacttgtaagttttttttttatttttgatatatgtaatggcaatctgtctatgatgtaggtatgaaaaaaaatacaattcattttttcatc

SEQ ID NO: 242084 - DNA, 362 bp, Gossypium hirsutum
gtttaagcttggcaaaatcctggaggaagggagcgaaccaaatgggaatttgaagcgttagctactaaggccggattcagtggcataacatatgagtgtttcgcttgaaactactcggatcatggagttcttcaaataattggatttcatatcattgctgagctaccaatgcaaccgaaaagaataaaagggatgcttggatttactttaccttgaataattatgatgagatgtgatgaccattctaataattacattttcatctagctgttctatgccggctgaatataaaactgggaccagtggaatgttctacgtgatcatgcagaggcaatcgataaagcacttgctgagaactcgta

SEQ ID NO: 242085 - DNA, 417 bp, Gossypium hirsutum
caaatgaaagacgtcgaagatgcctgatcgaagaaaataccatagaaaaaaaaaaaaaaaaaaaaaaaaagaaaaaataaaaaaaaaaaaaaaaaaaaaaaaaaaaaaaaaaaaaaaaaaaaaaaaaaaaaaaaaaaaaaaaaaaaaaaaaaataaaaataaataaaaataaaaaaaaaaaactaaaaaaataaaaaaaaaaaacggggggggcctttttaaagaaacaaattttatttcccggggtttgcaaatataatattttttttttgggcccccaaatataataaatttgcccgcgtttttaaaccggggggatgggaaaaaccttggtgttcccaaatttattaccttggaaaaaaaacccttttttccaagttgggatatttacaaaaaggcccaaccatatactttttt

SEQ ID NO: 242086 - DNA, 400 bp, Gossypium hirsutum
  unsure (1)..(400): unsure at all n locations
cccacgcgtccggatttttattttttgtgaaggttgagtttgatattctataaataaatgttgactttcatatgcttagtgaatgcactcctttgggttagcaaaaaaaaaaaaaaaaaaaaaaaaaaaaaaaaaaaaaaaaaaaaaaaaaaaaaaaaaaaaaaaaaaaaaaaaaaaaaaaaaaaaaaaaaaaaaaaaaaaaaaaaaaaaaaaaaaaaaaaaaaaaaaaaaaaaaaaaaaaaaaaaaanggggggggccttttaaaaaaaccaaattttactcccgcgggtttgaaaaaaaaaattttttttttggggcccccaaaataaaattaattggccggtttttaaaaaggggggaatgggaaaaacctgggggtacccaaattaatagcttttg

SEQ ID NO: 242087 - DNA, 336 bp, Gossypium hirsutum
aaaattctttttcaaaaaaaaaaaaaaaaaaaaaaaaaaaaaaaaaaaaaaaaaaaaaaaaaaaggggaaaataaaaaaaaaagaaaaaaaaaaaaaaaaaaaaaaaaaaaaaaaaaaaaaaaataaaaaaaaaaaaaaaggggggtcctttttaaagaatcaaattttatttccccttgttttcaacgtattattttttttttagtgtaacttaaattaaattaattggctggggttttaaaacgttttaattggaaaaacctttggttaaccaaatttaatggttttgaaaaaattaaattttttacaaattggagtaataaaaaaaagtccct

SEQ ID NO: 242088 - DNA, 378 bp, Gossypium hirsutum
acgaataagtttttttatatgaatttaattacatacatatcatttcctaacttttaaccattcgcttgtttgctttctaatctatgattttctacatctatgcattttaatctttataaattaacttttttaaaactatatttttttaaaaacattataccaattattatactccaccacctattgaaactcctaccaattactttttactcttaccacacataacatccttcttttaataaaacgatattttcatatattatcaaaaattctatttttatttacccatcacatgatctttaaattgtaccttaaactacaatcatattcaacttcattattaaaataccaaaatttttcaacgcaaaatattaactt

SEQ ID NO: 242089 - DNA, 404 bp, Gossypium hirsutum
  unsure (1)..(404): unsure at all n locations
cttgtttgtttgcatttgcaaaaattgtgaaatccggtattcttcatatcagcttctggaatttttgagctttgacccttttctcgacttttcgtctcgatgatgatgttattcgattgtgccatcgagttctttttcccatttgcttgcacacgcaccttcattgaagacaaattacttggatgctcatattcatgatgtttatagctcatgcttctgttgtgtttaccaattacacagctcgggcgttctaagtggaacggaaatgttgggaactcggngatagtagtaagagttgacacgccgctgtccagtgtgggacgtccatccttttctgttctgataaaccacgtaattgaattttgatagtttgacacccaaagcatggggtagagtgttatata

SEQ ID NO: 242090 - DNA, 420 bp, Gossypium hirsutum
  unsure (1)..(420): unsure at all n locations
acagttctgaagactataccaatagtattaagtgcgatatctatggcaatagtagatgttggatttagatcataattattaacttagaagccagactgatggacggtaaagtgcttcatttatgatttacatcagtgtattagccgtaatttatgcagacaggtaccaatcatcccgtctttgggtctactttctctcatttcttttcttcggataaatcattattaattgtctactttgcatatacaggaaaatgtcttttgtgaccacaagaaggcaagaagaaataagcaacgacttatgttaagatctacgacattttgaacttgggaaatccttttcaaggacattgtgcanatagtgaatgaactgttaatactccaaccccaaattttcatttatgggttgtgtctatattta

SEQ ID NO: 242091 - DNA, 188 bp, Gossypium hirsutum
gggtctattaattgattcaaatttagggtctgtttaggtttggctgattttgggctaggaatcgcggtttatatttagtatttgggttaaggactgaattaggctttgaatctgtaaatggacatttattttttgaatttttgatttgattttaatatttataaaaactaggctgttaatagtgaatc

SEQ ID NO: 242092 - DNA, 429 bp, Gossypium hirsutum
cccacgcgtccgcccacgcgtccggaaaaacgtagtgagcaagaatctgcagagaacggtgccataaaaggtggaaatagagcagttggacagaagcaaccttatcctaatggaattgtgaaatctctgaacccggcacctgccgaaataagtcagacactctctgcagccacttctgttttgaatacagatcttcctttaaaacatgaatcgtccatagggaaagaggacacaaaaaacgtaggaattgaaggctcaaattagcttagtaagatagttctctcactatcagtcagcgttctttcttatgtttcattatctcgcagccttttaattcttggatctgatgttggggccaattgtttgaggaattaacaccattatagctagacacagagtcccttatccatctttaaacattaggaacag

SEQ ID NO: 242093 - DNA, 395 bp, Gossypium hirsutum
  unsure (1)..(395): unsure at all n locations
cggacgcgtgggcggacgcgtgggtgtttacagaccaacctatcctctggccgactttcagatgtggtgatagcaagaattcggtccactgtactctcatcaacaatctttagaagcagcgctctatcccacgtacacgtttctgcatcgattaattgattaaccgtagaccatgaaggcctaatttcctgtgcttgaatatggatgttctctctaccaggaatatttttatacattttcaattcttaaacattgcgaattgagaaagatatcattatcctgaaagcgaatagaaaactcttaaccntgnnacataatctgacagacttttaataaataaatctaaaaatgggggccccctctttaaagtatcaaactttttttacgtggacaca

SEQ ID NO: 242094 - DNA, 436 bp, Gossypium hirsutum
  unsure (1)..(436): unsure at all n locations
cccacgcgtccgcccacgcgtccggaaaggagaagaaacatttctgtgaataactatgtggaacgctattaagactcccctcgagtcccaacctacaaggccggacactgaactggaggtattactgtcgtacgctgcatcaaaatggatcctggctgtcggtaaaaccatatccaccatagcgcatagcaaaaggaaaagcattggtcattgtttcccctcttgaaaacccagggcaatctcgaaagatgtggaggctgtcttcgacctcagagctgcaccggggacatctgtcgtttgaaaccactctccttatactgagattaacaaagtttggaataaagtcccaagagatccgccagattgtaaacgtaattttagatgggaactcaccagataattccnctttccaagcctgaaaatcatcatgcgcaaa

SEQ ID NO: 242095 - DNA, 433 bp, Gossypium hirsutum
cccacgcgtccggttcgacaactcagaaaggaggagcaagttagagagagtaagcatgtgcggtctggcttcatcttcaatccccacttctactttcccctcttttcaacaatctaaggttcaaaccaagccttgtatcaatccgtgcaactctcttgtgcttcctcctactaagctatgttcctcagatctctgtcttacaagttttagctttggtggccccagactgattcacagaagtagtgttatctccagaagtagcactggacctggtggtgctcctggttcaggtgataatgaaagcaggaatgtgctggatgcttttttcttagggaaggctgtagccgaagcattgaatgagagaatcgagtccacaattggggaatttttgagtgttgttggaaggttgcaggctgagcaacaaaagcaagtg

SEQ ID NO: 242096 - DNA, 329 bp, Gossypium hirsutum
gcgccacgcgttcgattctttattgacaattggggcttttggacatgtttggaataggggggtcaggctatagaacagtcccaaccagtatttctgagttggtcttatcatttcttttgttgttttaaccccaaatgatgattaccgaaactctgttttttgtggtaatttcatcgggaactaataatatgataattcacttgagaaccaaagtggatactgtaagacatgcttttcatttaagtggcatccatgttcatgaggaacattcttttatatcatctgcttcatttgcgatgcgcaaagcgaatgaataaatccttattttt

SEQ ID NO: 242097 - DNA, 358 bp, Gossypium hirsutum
  unsure (1)..(358): unsure at all n locations
cttctgnnacttagctgatgagaaattgcannacttctccagaaatcanngaagtagaagcctgctttactgaatcagccgatgggccacanttctggcttagnctgatgagaaattgcagtttcttcctgaatcagnnaagtagaagttgctaccagaatctgtcgatgggaggaacgcgtaaacatggcatatgtggatccccgatgatgtgtagaaagcaacatagacccaaattttctttaaagaggcagctaaagctgctaaaaataataaaaacaatggaaacaataataaaagtaacatccatagtttttgtaaaatatgtcttgcagtaatttacttttataaataaaaa

SEQ ID NO: 242098 - DNA, 436 bp, Gossypium hirsutum
  unsure (1)..(436): unsure at all n locations
cccacgcgtccgctcaatttcacccatgtcgatacctccctcttccgctacacctcctgggtcctcatcctcttgtcaattcacctaccaaacgacggcaaatcaatcgtattttcctttgccctttcatctccagcaacagccccagcattatgcctccgcgcccccctccgtttccgtcgccccggctcctgtctaccctgcctctgttgctcccgtacccggcgtctattctctccctcaataccaacaggcccaacagttatttcaaagggatgctcaaatagttaccccagaagcactagagagcgtaaaggctgctcttgcaagcagtgagattgagcacaaagcagaaactaagaagaaagcgatcccacggaaagctgctggtcagtcatgggaggatccaacgctngctgagtggccagaaaatgac

SEQ ID NO: 242099 - DNA, 406 bp, Gossypium hirsutum
  unsure (1)..(406): unsure at all n locations
cacacaattgcatttaacattgtccataggcataaaattaatgtgaagaacctgatttggagcttcttcagagggttttttataatactgcaagaggatccctaaaagagcatgaagggcctgctaggagtagataataactacttattgaccaagtagagcagcaaagttttatgtgatttgtttatatattatatacatatattctgtcataatgaggtcttttttgcaacataaattaaattcccaagtttagttgtctgtttaggaactgattttactttataatctttttttttagttctttaatatcttttgtttacccagtttttttgttgtcagtttcgtaagagtcatcatatatcaattcattaatgcacaactatgtggaattaaagatggnttt

SEQ ID NO: 242100 - DNA, 449 bp, Gossypium hirsutum
ctcaaatcaaagcacgagaatacttgaatctttctcatttgatagctctagctcaacatggacctagccaacactcttaaacatacctgagctgacaggcttatcgttgaactcttctgcagcatccataaacaccttggactgctcacatatctttgcatgctcctctttcgcagcactcaactcagccactaacttggatatcctcaaacccgcactatccagcttttgacgttccattaaaccgatgtatgcacaagcaattttcttcaaatgttccatggcgaaatccaccttgaaattaatgcgtaaagcatctttgaatgcatccctccacttcaatatcagatcctcggtgacgtgcttctgtgaaagagatttgcgatctatgcctgaagcaagttaccaagtggagggatgcaataaaggatgctttacacatcaaattc

SEQ ID NO: 242101 - DNA, 443 bp, Gossypium hirsutum
cccacgcgtccgctttctcaggatgctattggaaccggttttacctgtcacttctccactgggccatggaaatgaagttattttaagagagactttgtatgatgcggttataaagatggaccatgcattccttggtccagagggaggaattctgctaccaggcagacaagtaaaagatctcgcattgacatggtcctttgttgctgacaatgccatacggtcagtgagggagaatggtaaccagaccaaagctatctcttacataaatgctttctccgaatcttggctactctctcagttgataagataagtagcaaatattcagctgagaatcttgcttgcatggttcatgagaggaaagaagacaaaacagctgataatgatctagagatgattgattcaatcgatatggttcccttgtctgctccttgctcgatgaaatc

SEQ ID NO: 242102 - DNA, 436 bp, Gossypium hirsutum
ggaaaagtgagagcatatgttttaggagctttgtaagcatttcaagaaatcaataaaaggtctccctcacggagaatttccagtaaaactattctcaggaggcttatagccaaaatctaggatttaggagattcaaagagtttctgaaaattttcagagatcttttctggaggcgttgatacggcttggtggtaagacccgagaggcggcagtaaattccagtagccatccgcttgaaaagagaaaatcagcagaaacaggagaatcattccaaccaaacaaatccagaagaacgatggaaggtgtagattgcaaatttttctatcttcctacggataatagtcgctaagcactcaagggcatcgcctcacagagaccaaaatcaaacaagcacgacaaactaacataaaaaaatatagcaaaacctaaaacttat

SEQ ID NO: 242103 - DNA, 389 bp, Gossypium hirsutum
  unsure (1)..(389): unsure at all n locations
atgagtttgtatgtatttaaaggtaggagttgtaatacccatctgtaatagtttgtagacgctgtgcatcgagaacactcctgatggctcacccctccaagctagatcatcttcataagaaattactgccagtgtgatttgaaggatcctttccgcatcaaaggtattagaaattnaaaaaaaaaaaaaaaaaaaaaaaaaaaaaaaaaaaaaaaaaaaaaaaaaaggaaaaaaaaaaaaaaaaaaaaaaaaaaaaaaaaagcatgcaacaaaaaaaaaaaaatgtgggggggctctacataaaatccaatctccgtccctcttcaaaaccaaaacttactaaaacaaatggtggaaccaaaataaattatcttggagtacatctacct

SEQ ID NO: 242104 - DNA, 359 bp, Gossypium hirsutum
cgcggaagaacccccgcgacgcgcgccgccggccacaccttccaaccaaaactgagttgcctatccccaataatgccctcttttgcgctgcgcgtaggcaaattacaaaggccgcaggatgtatcatcgtcattggcaacatcaatcatagagggtagatcaaaactgttctttacggtgctgatgattgcctcgacccttttcctaatttcccgctaggtgcttttctttcgggatggtctgtgcttgtccgaacacatgcttcacacgtaaggtttgtgtttgtatgtttaggcgtgcgggtgtagtgttgttgatatgaatctttggtgaatttgataagttctattagtttttat

SEQ ID NO: 242105 - DNA, 331 bp, Gossypium hirsutum
  unsure (1)..(331): unsure at all n locations
agccttccgcctacccgtccggttgtgccatctattcgtaggtaacttggtattgtgaagttctttgggatgtcttctgtcagaagcaaaaggatgcaaaaggattgactcttttcatattgtactcttcatatttgatgtaaaaggattgactcgtttcattacgttgaggaaaaagaaattagatagaggtgaagtcactttgcctggatccaaaaaaaaaaaaaaaaaaaaaaannnaaaaaaaaaaaaaaaaaaaaaaaaaaaaaaaaaaaaaaaaaataaaagaaaaaaaaaaaccgggcggccgttttaaaggatccaagtttac

SEQ ID NO: 242106 - DNA, 353 bp, Gossypium hirsutum
  unsure (1)..(353): unsure at all n locations
gcagttctcggaaccggggcgggggtattggtggtggttggataccggaggtgggcacccccgtgaagggggaagtacggtgacggcgggatcttcgttacctcaagaaagagcggcggtgccatcttgtaaggcannactgtgaggtcttaaatttannggtttcaacagtgggctttgaggcctatannttgttatgggtnnttggtttgggtnnttggtagttggtaaattcttaaagttacttctgtnntactgtttggtnnttgggttctcttcgttatttgaatcgaatgttgttacctgtatctcttaaaaagcatannaaaatggaatgaagtatcnttcttttc

SEQ ID NO: 242107 - DNA, 402 bp, Gossypium hirsutum
ggagtataagaacaatccttgtaggaagtaggaaaaggaaactcatctcctaactggtgcgtatgtaagttggcctaacctaaaccaaaagtgaattacctcacatcacagagcaacatatttctcaactttctttttaatggaaatttgagaagtaataaattttaaaaatactaacatgaagtgattcacacttattatattaaaaaagaaagcatcaaagaagacagcccaacccgcaatgacctgagcatctctatctgatggccaacacagccaagattaactatgatgaacctgcttaaatagtaaaggggaagaaaagtgtctgcgaacattactaactgtgagactatattataaatcatactgtatgtgtaacttgatctgacaacctcaaca

SEQ ID NO: 242108 - DNA, 411 bp, Gossypium hirsutum
tagaagtctgcattatgtatcatgctcttgtgatctgaggccatatatgacaatcatttcggggggaaactctctcagagagatgacttagcatccaggttggctttcacagttgataatgcttcagttggacctcttctactttcagattcattaattactataatggatacaaatgactactcttcaattcctcaagaactcaaagatcagctcggtgagaggtatcccgctgctaggcgagcttatctgaaaacaggcggggatttcccatttctttcccgcccagatgaagttaacctacatcttcaggtacataacgtgtaatacttaaatacatgacttctctcataatgtttagtactgtcagtatgttcagaagcctgttatttctactggtgtgttaaacat

SEQ ID NO: 242109 - DNA, 392 bp, Gossypium hirsutum
taaatgtttaaaattcttcttatttaattgatggttgctggtgtttaaatgctgtaaatggaagtatttaaatgctgtaaattgaagtatttaaatgttgtaaattgaagtgtttaaatgttctttgtgtagcattttaagaacttcaaagctcacagatgatttgttatactctatatgagttcattgattctatgtttttgcaattttaggtatgatcatgggtgcaacagcttcaactaacaaggacttgtgcaggtctggagcaggtcaatcaagaagctctgctggaattaaactgacaagtaattgtagtatgcttgtagttgaagtttcttatagtgaacatcatgttgtttattcgacaaaagtttcaaagaatttactttttt

SEQ ID NO: 242110 - DNA, 286 bp, Gossypium hirsutum
attctttcatattgaataaaagatcctgcacgtgcatctcaaggagcgcggcatttcacggctattcataaacatgtttgggaatcttaaccaattagtgcaaaacgcactatgatacatgggcaggaaaggacaaaaaatcaatgatgaggacccacacgcatgagtctatgaacgaatccaccctagcctagtcatggagcacttatggaatcaaagtacataaaatgcactgaacaagcattggtataggcgcacctgtccatgctggctctcaaacctatac

SEQ ID NO: 242111 - DNA, 338 bp, Gossypium hirsutum
actaaacccaattcttctctttatcctgaccttcaaagacttcattttccctctcttcgggggtcaatcaaaccaagaacccacaaaaagcttcgattactacattgtagggacctaagtagttattaacttcaaatttgtatgttttttttgtcgtaatttgcaatattactactttctagggacttaagtagttattaacttcaaatttgtttttttttgttgttgttgtaatttgcaatattactctttttatctatattatttattaactgttttaatgaaaaaaaaaaaaaaaaaaaaaaaaaaaaaaaaaaaaaaaaaaaaaaaaataaaaa

SEQ ID NO: 242112 - DNA, 452 bp, Gossypium hirsutum
cccacgcgtccggggaattattagttttatcccttacttcaattggctgagctgggtttgggcttggcttgattctggaaagcggcgctacgccgtgtattctgttgtatacttggttccttacctcaggtcaaatttctctctttccccagaagatagctggcttcctattgctagcatactattttgcattgttcatgttcagctggaagcaagcataagaaatggcgatcttcaaggctttcaaatttttagtgaggctgctaagcatctttcatcaaggagtagagaggaagatgaacatttcaaagggtataatgaacccaagaaaggagaacataggaatctgcctgatgctgaagaacattcaagaaatgagatcccgcattggggaattccgaaaggccctcacaacatcatgaaacagctgatgattttgaggatgatggaaa

SEQ ID NO: 242113 - DNA, 251 bp, Gossypium hirsutum
aataaagcttataacaagagaggctatttttggtagccagaaagaaaagtaggtaaaaatgagttagaaagtgtactgtatagatactggggagtatgatatggtggtggtagttagaatttatggtatttcgctgtaaaggttttgatctgccgtagttagtaactgctttgtcatctgaagatgaccaaagccaaaactctatttgccatcatcctcgcataaatctgtggagcatatttcattactgc

SEQ ID NO: 242114 - DNA, 381 bp, Gossypium hirsutum
cccacgcgtccgcactttttggtgtcgtagcttgtctctcctatcctattagggtcctatgggcatgcaaccagttgtttccaagagttaggctttcatagttaaaataacaactgctatgggtatttctagttatagttatagtttttttatattgttctatgttgtggtaatcccaaccctagaagctcacatcactgaatatgatgagtattggaaggcacgagaattggaagctgttgagaacctggacaaggcctatcaccctaacccagaagaggtggtccgccattacagtgaccacttctctagaaccatgctcgagttttatatcaccaaaagagtgctagcggaatcaaaaaatggtccctgtgaggttac

SEQ ID NO: 242115 - DNA, 374 bp, Gossypium hirsutum
gacttctatggtcaagatgcagccattgcatttcgtaaggacctagcgaatcccgatgaatggaacatctttaccaacacggagatgagtttgttttggggggttgaagatgaagttgaaaattcagatgtgaaggttggtgagagtaacgatgttactttggacaaagccatctcagaatgcaatgcaagcgactttaaagagggtaatcatgttgaggacgcaaatttctcagttattaaggatggtcctgaagataatgaagcaacaattgagtttaggaaagacatcttggtggaaggtgcagcagtggcagataaatctccccttccaaagacttcagaaatcagaagagctgtggacggtgaagaagc

SEQ ID NO: 242116 - DNA, 374 bp, Gossypium hirsutum
  unsure (1)..(374): unsure at all n locations
gctttccctcccctgcgtgctcatcggcgaccgtcggtaaccaggtgttgttgcggatatgtgggaagcacgaggcgtgacaaagagggactgctggtagcgcacgtctcggaggtgcggtggatggtggagtgggacgctggtgagaggcgtgcggcgcaagggctcaagcaacagctttaggtttctgtttgtttgggccttgtttgggtttatttttgggcctgtgttttagatgtaaatgagtcttggatttgggagctttgagcccgggcattaatttggtcctacagctattaataatgaatcattatcatctgcatggatgtattatacatncatccctacccatactgctgcatttcaatttaaat

SEQ ID NO: 242117 - DNA, 377 bp, Gossypium hirsutum
ggagattgtagttcttagaggaaagaaagattgaaaaagctgtttgatatttgttcaattgtgacagggttgataaactagttttcttatgttgttagattaggctctggcttttaaggtgggtctcttttgtattaatttgttatctattcctcgtacaaaatttagttttttgaattgtcatccattgtcttgtgtagtaatacggatagggatggaacttgtgagagtttgtcttgaagaaaagaatgatgatatttcatcagttccaccaggtttcgagcctcgtgcattgtttaccttaaagagtgaggcacaggatactaaaagacatgagcgtgataatttgatctgttgttcagcctctactagagcca

SEQ ID NO: 242118 - DNA, 360 bp, Gossypium hirsutum
tggaaaacccgggccgacccacgcgtacgcccactcttacgctaatatttacttgtttttttgtccagtgtgagcatctctgcggtctcagtatatattgtgactattacataattaatgtaaggaagtgagtcatattcctaatgaatgagaagaatctactatttctctttaaaaaaaacaaaataaaaaaaatttgaaaagaaatacatagtattgtgtaaaaaataaagatagggatggaacttgtgagagtttgtcttgaagaaaacaatgatgatctttcatcaatttcaccatgttttgagcctcgagcattgtttaccttaaagagtgaggcacaggatactaaaatacatg

SEQ ID NO: 242119 - DNA, 372 bp, Gossypium hirsutum
gggaaaattaccttccaaattgatccctacttcacggtcgatggatactccagttggcgagttagtccttattctccatggcttgtattctaaattgcgttcgccatagagactaccacatgtgccatcttctctatctttgtgtaaccagatactattcattgccaaagctcttttagattgcgctcgtaaagacaagtcccagcctatcatgccgcttccacccctaacgccattcttgcctcacaaaaagaatcactgtgacccagccgaccataataaaaacagaaaagagtcagctttcatatttgaatctgacatatgaacagttccctgagaacataacctgctttttcttctttaatgtgtgac

SEQ ID NO: 242120 - DNA, 463 bp, Gossypium hirsutum
  unsure (1)..(463): unsure at all n locations
aaaaacgggccgccgacgcgtacgcccacgcctccgctgaattattagattattccctttgcctccttttgctggcccctctgcctcttttaaagggttgtggagtctcaaaattcnaaatcatcaaanagggagacgcctcgcagttatacactcaattaagcctcgttcatcgacccaatgaccgtgccattacccatagtcgccttgtttcgaagaaaacgttgcctaacaagagggaagagcatgcaaagggagagggtattcataataagaaggtgaatcccaaggaaaaaggaatcaaacaaagggaaaaagaagaggccttcgttgataaacaaggttttgaggatgatgtatgtgatagaaacgatgacatttcatacacacgatcaccaagttttagggtatactgcattccatctcaatctgacgatggtaataatgaatttgatcataatct

SEQ ID NO: 242121 - DNA, 300 bp, Gossypium hirsutum
tcgacacgctcgttaagactcttaaatctgaactgatttacatgccatcttgtatgtgatggtactaccaccatgttacacataaggaaagcagctaaggagttctatgctgtatctatcttttactgacttaaggggtgtactgatccaaataaaaacaaagcggtgcatggaaaggtaccaaaaataaacaggagttaacgttattgatgtatgtaaagaaaaaaaggaaatcatggagtaatgtaaattggctaccaactgatcatgccattctgaaagtacggaagattttctccc

SEQ ID NO: 242122 - DNA, 159 bp, Gossypium hirsutum
accaacaacttacttacacctccaccgacaaccaccattaaggagaacatctcaacccacatccgcaaggccggcatccacattataaactcgttctgggagcccgactgcctctagcatgactttcacgccgatcgtcagatgccctactacaagacc

SEQ ID NO: 242123 - DNA, 224 bp, Gossypium hirsutum
gcgcggacgcgtgggttccaaccttctccctccttttcatgctactatcctgaccagccctttagcaaagcctaacattcctaaacacccgtaaaaaaggccttcatttacaattcttttaaggtaccaaattaccaaaaattaccaccattgtttccaaagttcttcttattcctgtcattccaatggtttttgttacttttttaacggaaaatgaacttatc

SEQ ID NO: 242124 - DNA, 377 bp, Gossypium hirsutum
tctatgcccattaagaaattgaaggttgagatttcagagcctgagaagagtgaagaggctgcagcaactgaaagggaatgcgtggctgaaccttcaacaccttctgaagatagaatggcagttgatcagagttgagaaattccatttatcacttgttatccatctaacaaaaggttaaaaaggtctaatgttcaaaaaccagcacttctccctcagccttgctcgcctgtaagttttagcatgaaagagaggagaaaattagtgtaaccgaactcagtgttaaaatgttaattcctataaactgaaagaagggatgaaagaaatgatgatcccgatatgaagaggcgattaagatgtcctaacatttcatatttatt

SEQ ID NO: 242125 - DNA, 365 bp, Gossypium hirsutum
cggccgacgacgcgtacgcccacgcgtactttggaaacaaattttggattaaaatcgatcttacaaccgcgggggcttggacttttatctgcattgtcggtgctcaattacctggtcaatcaccgagcgccgctcccactaaagcaaccccggctgctactacaccttctactgcacccgctactgatcctgagagtaaatctaacacaccagctcccactgctgttccaactactttaccaccggctgaggctccgtcagattctgccgccgctccatccccatcaaaattttctccagcttcttcccctccagctactactccagtgagtacactacctgctacagctactgtaagcacatct

SEQ ID NO: 242126 - DNA, 345 bp, Gossypium hirsutum
  unsure (1)..(345): unsure at all n locations
gaanacccggggcgacggaggcgtacggttggataatgtgcaaacacccgctcttttatgaatcataaacctgctggccacactagcttgcttataatcgagacactacatcattctttcaattaaaaaaaaccccccttatttagtttgttcaaaaaaaaaaaaacatacaaaaaaaaataatttaaaaatttataataaaaaaaaaaaatccatataaataaccatatacatttacaaaccaacggtttaacaacaaaaaaaaattggggggcgcccctttaaaaaaaccaaattttattaccccttcttttaaagtaaatattttttatatctgcccccaaa

SEQ ID NO: 242127 - DNA, 170 bp, Gossypium hirsutum
ataatgcgcctatcactatccaatatgttaaaaatatcattatacatgcccttcaaatccatcacattattcccgccaagggaggcaagatcaacgatgttaaaaaccaccatttgttacagtgtgacatcgacagaaactttgtaaatattttctgatcaaccaatttt

SEQ ID NO: 242128 - DNA, 368 bp, Gossypium hirsutum
  unsure (1)..(368): unsure at all n locations
gggatcttgtgggaatatggttcaattgcattcaatcgtttggttgcagagattgggaacgaaggagtcaatggactgcaataatanagctggaattctttacaaggaattgcaatagtagagctggattttagtgaagtaaatgctctgggatttgcaagtcaccatcattatttcactgtcaatatcagctccagattttgccaagctaataggacatgctatgtggattacctgggaattgcaataataggggagcttgctcattctctatacgctggtgttgaaatgtgaaaagctattcttttaagaatttcattttgttagactaggtttctttccttaggcaggtttgtgagctggtccta

SEQ ID NO: 242129 - DNA, 437 bp, Gossypium hirsutum
gaacacccggggcgacgcgggcgtacgcttgggatcacgataatcactactctagttctaaagtcaatctgtaattttattgagcagtcgtggttatatactagttttaacgctttccctaaacgcataattgtgtcaaaggagaagctaatggacgaggcccatagcacggactatagcttggttcttgataatgacggatggacttgcttcttactcagagcaaggaagagggctatgcacaactcaattttcttgcaaccattattccaggttaggcaagattactgatgcctttctctttggacgaggatgatgagtactgtagctctaaagccaatctgtaattttgttgaccttggtgggaatcctgttttaacctttggttaaaggcataatggtgtcaaaggagaaggtaatggatgaggcccatagca

SEQ ID NO: 242130 - DNA, 328 bp, Gossypium hirsutum
cacttcttttactaaacacttttcccttttcaccaaatgctaattacgggcgttacggcctcaaagatggggacgtgctatccactttcttctaatgcggaactacccaacaaaacccacctattgcataaatgagtaaacttcatccttctcttcagagtttggaagctgtgaaacatgaaagtctttcttttgcctgttagatctgatggattcacatacctgccatgcggtttcaacacaactggcttttggtttccttcggattgagcttataactatactgtttgctccgatttcttttgaattgcgattgatattgatcatt

SEQ ID NO: 242131 - DNA, 370 bp, Gossypium hirsutum
acgcacgcgtccgtggaaagccatatcagcttgttccaggtttttcatactttcatgctgttcctgctgctgtgcaggtgaaaccggcagagcagaaacaacctgtcggtgagtagaaatatgcgctttgtgcttcgtattgctatcaccatacaggaaacaagatacagcactgagaagagattttggcattgcagttccttgttgattgtgcttaccatatcatccaagacgctcataaactttcttgacaaggttgatcattgtccagtctaattaaattagaatggttagatgcgcgaaagatgggaaactaggttgtcaacaatgtttttgtagggcaaatgaagatggtgtaggggaatagggc

SEQ ID NO: 242132 - DNA, 125 bp, Gossypium hirsutum
cccacgcgtccggtaaaaattgttcactttcacttccatttcaactgttaatgggcttgtgaattgtccttccttctttgatcctccatgtatgaactattaatggagttccccaatttttgttc

SEQ ID NO: 242133 - DNA, 392 bp, Gossypium hirsutum
  unsure (1)..(392): unsure at all n locations
cgggccgaccgacgcgtacgcncacgcctnnttaattatttactcttccttttttatcaactaaagcttatagcgggattggtgagtattcaaccataaaggagttaacgctaatgaaacaggaattgcttttgtttgcacaatctgcaaaaagcatgttgcaagaagtggatgaatctgcaaagcaagaaccgagtggttcctcaaaaccttctttagatgctgtagccgaacaaccaaaaaatcctgctcccgaaagggccaaaatagttatttcaatccagaacaaggatgaaatcaagcaatttcgtatatacatggatgacaagtttgagaagcccttcagcttgtatgccaataaagctaagcttgacctgcaaagcttagtattt

SEQ ID NO: 242134 - DNA, 318 bp, Gossypium hirsutum
  unsure (1)..(318): unsure at all n locations
gacggacgcgtacgcccacgcctccggngatttgagatttctagttccgagcaggcgaaagcnaaaagggggcgatccgatgtggatgctaattaccattatatgaaagtttatgatcggttggctgtagatcgatggcaaagacagaggattccatgtgaaaatatgcaggagcttagcttggtcaattgcatcatcagccctggaagagggctggcttgtgtattagggaagtgcatgaacttgtagaaaattcacttggacatgttcgttggagtacgagactctgatatttgaagcttagcacataaatctagt

SEQ ID NO: 242135 - DNA, 452 bp, Gossypium hirsutum
  unsure (1)..(452): unsure at all n locations
aaaaccggccgaggaggcgtacggtttgattttttttttgaaagacccgatttttgatcttcaacggtagcaagatcggaagcatgatcttgaacggtaacaagctcgnncatgaaatttgaaatatacgaagcatgatcttcaacggtaacaagatccgaaacatgatcttcagcggtaacaagcttggcggtgatgtttgaaatatccgaagcatgatcttcaacggtaacaagcttggcggtgaagctccaacggctagattttgggatacccactcccatctatctataaataagcatcaccagtaggttcatcatctatctaagcttttcagcatcctctcctctgtccttttgcttttaattttttgtgctttgattcattctttaaaccatggaatcaaattcacgaaagagaaagggatttctcaaccctttgagaaatcccat

SEQ ID NO: 242136 - DNA, 310 bp, Gossypium hirsutum
  unsure (1)..(310): unsure at all n locations
gcggaagatcttacacgtgattttgacagagattatattgctaaaatggctaaatagagtggagtgtcatgtccttccgcctgctagaatcccgaatggtttcatttgactatcactggctgggataatttgacattgtactaaatgaatttttatttgaaaactattttttttactcataatttcgactataatgtacttgtgttctttttttttttgaaatgatactggtcatttgctattatttaaaaaaaaaaaaaaaaaaaaaaaaaaaataaaaaaaaaaaacatcgnctcttaaaaaaataaa

SEQ ID NO: 242137 - DNA, 369 bp, Gossypium hirsutum
  unsure (1)..(369): unsure at all n locations
cccactcttcctatttattcatgaccctgtttatgcaacccacaatgaactgttcaattgtatgatttaaaactgcgagccgtttnaagtancacctatctacgatgccaagtgctttaagcgataaaatatcttcttaattttacttttttatatttctggtacctctttgcatgtcaagttttatttatagatcgctgcaaacacactttaattaaggcaacattacaattaagtttttatgttctaagatgtttgatttgaaatgctctatatacataatattacagagatataaaatctattgtacttaataaaactagacaggttcccatttatttaaatttttggtgtaaaaaaaaaacaaaa

SEQ ID NO: 242138 - DNA, 463 bp, Gossypium hirsutum
  unsure (1)..(463): unsure at all n locations
ggaaaaacccnccgacgacgcgtacggatgaatccttcnctttttattactcctttttttatcttttcaacctttcttgnattatttgattgtttattacaactggtcgccancaacatacaaaaaagcatcaatttgatggagtgcttccctgacttgttcaagccactagatatgtttaaaatattggaatctttgctaaatttgttattatctgcaagtttttaggctttgcaccagcttgtaagataacatacggtttgatctggaaatgtcattttcaatggaagaaatggaaattaagaaaaaaaatttcganaaaaaaaaaaaataaaacaaaaaaaaaaaaaaaaccttaccatctaaaaaaaaaaaacacaacaaacataaaaataaaaccaatcaactttcatttctgtaaccttaaatataacaaactcccacctcctctaaaaaccccaaa

SEQ ID NO: 242139 - DNA, 320 bp, Gossypium hirsutum
cccacgcgtccggttgttaaagccttatttatctttcttaatatcgtaccttctctctatggtcgtggccatgaaaccttatacaatcaggaaagattatatgatttgcttattgttgaatcattttgaccagacaaaaaaatgccgttacccaactcaatttaattgcatcacatcacattctcgtctgctgacctaatatcaaagaggacaggcccgatcggacttccctacagaaccgctgcctaaattgaaaatggaacgcgacctgcagctgcgcatttcattaagcgcatgtgttagttacgctcagcgcaacc

SEQ ID NO: 242140 - DNA, 373 bp, Gossypium hirsutum
atcccaactagtgtttgatatgttttcatataataatttattcctatttgtccagagtaacgagagcccacaacagaaactcctgcactgttcatttgtcccttggctgaaaacccagggcacagatagaaaacatggaaactatcttctccttcctgaccgcatctcgagcatcgatcctcagccatcactgtccgcattttcagattgaaaaagtggaaatgtagttccaagctattctccaaattgtaatcttgatttttgagggtaaatgtaaattccatagttttctaaagaaattttttgtatcggtctgtaaataaacactaggatcaattgtagctttctgtaataatttataggcgctccttac

SEQ ID NO: 242141 - DNA, 469 bp, Gossypium hirsutum
gaaaacccgggccggccgacgcgtccgattgttttaactattatttaatgtctcatttaaatatttttgcatatattattttaatcgttaaattattattttaaaaagctttttccttttgtttataaaattattgttcggaaattctttatattatattcttttaatatattagttagtatttcattttaatgtttctttatatatatatatgtacatatatagcaaaatcaatttaatcttgtaggcatctccatgttatttttataaataattatttctaaatttgtatataatttataagataatctaattttatatgtattattgatttcatattttgtttatataaataattattcctatatcatatgtgcatgtctcaaaaaaaaaaatctattatgtgaactatacctcatcatgtattttccttcttttgtatttaatacattatttaaagttatcatgt

SEQ ID NO: 242142 - DNA, 423 bp, Gossypium hirsutum
gaaacaccccacttccttgttcttattgcttctctcacctcttatacagaaagtatttaggaggtggttttagatatagaaagtaccttttacgacatggttttggtatctctgttcgtaaaatatctattttgaggaggttagagggttcgggaatcagagtcgtgacatggtaaattaaggtcaatggttttcagtagggttttcttgtttagtttctccttgagataaactattgtacggaatttgacagagataaggcaacatttagtccttaaattgtgcagctttttccaattttggcacatgtggtgatgtgaaacaatatcaaagtgtcacgtcatcacattgaccaaaatcgggaaaatttgtcaagctccaacattaatttggattaaaaaattcacggattaagttggaaaa

SEQ ID NO: 242143 - DNA, 452 bp, Gossypium hirsutum
  unsure (1)..(452): unsure at all n locations
cccacgcgnacgctagcaggctgaaacagcatcactactatcatcatctttctttatagatccttttccctcaacctgcacgatttattcttgtagaaacgaactctcagnagttcttaaatgccatttcctccgacccatttcatcctcatctcatagaccttctgtcttttccatctgtcgcttctactctaaaaggcgcctcctcaatccatatcctccgcgatgaccattgttttccctcctccgccattgtatgtgctatttagttcaccgatcaacccacaaagctacaatcaaggagtccccctccaccaccagccttcagaatctcagttctttagctaccgtcatcgcttgtaagcaagctctcacctcagccgtatttgcatcggccacaaagttatttcaataagtacaggctgccaaagtatacctcttattgtctctaa

SEQ ID NO: 242144 - DNA, 410 bp, Gossypium hirsutum
  unsure (1)..(410): unsure at all n locations
gtttttttggcttgtagggtctgccctctttgtcgtggggatatatgcggacctgatttgatggctggggagaagtagagcttctggtttttatacgagaggagcattggcaactgactttggttacaaaagggaaaaagaaagagaagagaagtgataattatatactattattattgaggatgaatgtgaatgagtttgtttaatataccatctgtgatcagggtgatcaccttttggctgcacaataaaataatacaggaatgggttgggagtagtaaggggctattgaactttgtgatttgcagtgtaaggctgtgtgtaagccttcttgccttggggccacaactcagctggaagaaagaaaggaaggggaagaaatttgattgttcnnnanaaaaaanaanana

SEQ ID NO: 242145 - DNA, 133 bp, Gossypium hirsutum
ggttgtaggcactttgagcagaaaagatgcctgatggttctcctccccatgcttggaaaccgtcatgtatttatcttgccaaagggatctgtataatatttttcgcaatatcagcactaaaggttttaactag

SEQ ID NO: 242146 - DNA, 373 bp, Gossypium hirsutum
  unsure (1)..(373): unsure at all n locations
acgcgccccgatnttgccaacccnngcaaattctgaattccatgtgtattgttgtacccgaagccctccgttcaaagccacatcacttcataatgaaatggacgatcgagcgcccgcctaaaagaaaaacccctagaagaaaaaaaccttnngccagagaggccagaccagagacccgtgctnnagggtagccagacccttttnnttaattattannaactcaattgcaaaannacctagtnnaaatttataatctaaatatatatangnntttcaattaaaaaaattatttaataccccaaccaaatcgtnntgggtattaattgtacctnnttcaaagaaagagaatgccaaanntttaaacccatttaat

SEQ ID NO: 242147 - DNA, 435 bp, Gossypium hirsutum
ctcggacagagactagaattagtaactattctataatgtatattacatagggtagaacgatcgctttttgagattcgccatattgtaattttcagttagagggtaattttaagcctcacattttttttttgtaaaaatcccctatttctgcctgattgtatacatgtgtagcctctttactctgctgtagtagagctttgtatgcgctttggactgtgaaaaaaaaaaaaaaaaaaaaaaaaaaaaaaaaaaaaattaaaaaactcaaaaataactacattattaatcagattcactactgattataagtcacgcatggagtctcttaattacaatcttttgatcctactaaatataatcgtgttacatgaaaaacacatctgataatcccacttatttatgtttcacaattttgccatttttattttgtttaca

SEQ ID NO: 242148 - DNA, 436 bp, Gossypium hirsutum
gattcttcagtatgtcagcgtggggaacctcaatgatattagcttatgaatacttgaagcgggtatgcgtgaaagatgactaaatgtgaccgataaagtcaaacaattttggttcttgtcacatgaagagcagaggatataggaccttgagctgactgagagtcattatatttcagaaggcagctgttgtcagattattattttcttgcattctcccaagtagcctgcgattgtgcagcaaatttggttacctatcttcttacaaaacaccaatttaactacttcattaaacagattagctactgattttaagagacgcattgtatctgtggctaagattctttgatgcttttgaatattttttgtttacatgagaaaagaactgaaaatagccatttgtatgtctcacaaaaagcaataaaatcttgtatacaac

SEQ ID NO: 242149 - DNA, 431 bp, Gossypium hirsutum
agataagtaagatatttgtctaagaaggtaggggagttagttatgcttattatctgagtgaaagggatgattgtatatcttgttgttcaaactatagtttgagtgtctgatatatatgtttgacacgggtgtgttatgttcatttttttgtccaatttttttaatgtatttggaggatttttagaggattatctccctatattcattctggtcccagacttgcatcaaacatggatgcataaaggaaaagaaagagtcgaactaacatagagttacagatgtttggtctgctgatctgcgttatgcttttttggttcaatgccagattgcttaaaagactgagatgtctgccttcattcatcttcagttgctgaaattcgcatttgagttcggatgaatgtttctcccacagtttaaaacatcaatgacaa

SEQ ID NO: 242150 - DNA, 437 bp, Gossypium hirsutum
cccacgcgtccgcccacgcgtccggcttattgctattcttgcttttactcagctagcacggatgcgcgcaaggaataaacagttaggatggactcgccaaaaagtgtttcatatactgattggaactactaatactggttacttcatttattttgtcttgagtcttgttgctgcatgccgagggtggctatgctggtcttactcttgtggttttgtagccatggccttccccagaattctattatttgcaacatttcttctacttttgtcattctggcagatgatgaagaggaagaggatgatgaacagggatttctagaagctttaatacaaaattctttaaatagaccaaggtcttcgcctgcagatagtcgcagatcatgttatcctttccgtttaattcatgttggaagccgtcaaaagatagtgattctggt

SEQ ID NO: 242151 - DNA, 283 bp, Gossypium hirsutum
  unsure (1)..(283): unsure at all n locations
cccacgcgtccgttaaacctgnttcttattatatttgttattttttaagctcacacagagaccgctgtggttcttctcattaaaacggtggagcaggaagacctttcaacttatcattaatgtgaaccttccaaatcaaagagatctagacgggaaggattcttagaagttcttatattaactctattgaaaaataactctctttgtggcattccattataatgcgtaaaagtactacttttgaaagaaaataataaattatatttacgcatagctatatttc

SEQ ID NO: 242152 - DNA, 231 bp, Gossypium hirsutum
  unsure (1)..(231): unsure at all n locations
ctataattattaactattctattatttatacacatancatanaanccccgctttttaatattcgccataccctaacttttacatantatgtttattttaaacctcacattttttttttgtaaaaatcccctatttctccctcattctatacatctttaacctctttactctcctctaaaacaactttttatgcactttctactctaataaaaaaataaaaatcaacttttt

SEQ ID NO: 242153 - DNA, 421 bp, Gossypium hirsutum
aaaagagataaaaagaaaaagaaaatgtcgggaatagtttaaaaactgaaggacatgatgggtcgacgtgtactaggacgacaagaaggacaagaaggacaaaaaggacaagaaagacaaagatcacaagaaaggtaaagatcataaagaagacaaagatgaagggatgatggataaaatcaaggacatgatcacgggtgataaagatgacgataagcataagaaagatgaccataagcacaaggaccgcaaagagcacaaggatgaagggatgatggataaaatcaaggacatgatcactggtgataaagatgacgataagcacaagaaagatgaccataagcacaaggaacgcaaagaacacaaggatgaagggatgctagataagatcaaagacaagatccacggggatgacgatcgt

SEQ ID NO: 242154 - DNA, 436 bp, Gossypium hirsutum
cggaatgcatgactattttcgcaacacttatgaacccatttactcttgaaagaaagctgaggggctgtttaagagccaacaagatcacccgtcaagagggacagccagagaaaatgtatttaatcataaatttactggcagagagagtagaaaatttaaaggtgcccagccaagagagggtttccacagatggagtaaaaatcttctagtaaaactgttcaacgacaagcaaagaggcagcactaccttgtcccataagagaaattttggaaaaggaaaagaagggacaatatttgaatggggagcatcatttatctgattttgtagagccaggtaagacacaatccatttgactgaagtgggtacatgaaaaaggaaaagaagaaagcaaaggaagaaatgagtgggtatccatatgccaccgtctcactctttc

SEQ ID NO: 242155 - DNA, 321 bp, Gossypium hirsutum
gaaatgccgaccgaaatgaacaaagaaaacttaagctttgatggcacgcctggtttagttacgcgcgaaaaagatgctcttatccttgtggctaggaagattaatgattaatcagtgtatcattatagtaacttatttgatgcttattgctctagtttctacttagtacagtttcatattgaacacttatcaaacgttagtaacacctcgcttgtttaattaaccagcagtttctgctatgtttgtcaagctaccatctcatttgaatatatttatatatatatatatatacattgcaaaaagcaatttatatatatctgc

SEQ ID NO: 242156 - DNA, 417 bp, Gossypium hirsutum
  unsure (1)..(417): unsure at all n locations
ggagacggagcttggagaagtgacttccggagataagcgctgtgattcttgagaagatctggcggtgtttttattgggctcttcaatattcaaggtaattgtcttttctcattaatatctatcttgcataattactccggggatagtattcatgcctaagaggagaatctgcgacgtgcattttacgtctgctgcattgcataatggtgtacttacagttatcttatgtgattgttttgacttagaaagcagacttatataggtaaatgaatgcagtaactacactatgtatgattgctgctatataataaaacaacagcagtacaatcgtgaaactcgactgtatatagactaattgtaatgtatgcaaaattggatttgtttcctttanaaaaaaaaaaaaaaaaaaannnnnaa

SEQ ID NO: 242157 - DNA, 413 bp, Gossypium hirsutum
gcgtacggaattttgttaggtggtgtctaaaatccacatattcactcaagaagaagtggagaagaccagccttttatttgggagcgatgacacgcaaagctgtttggagcaagcagcagtgataatggaagcatcaaagtcatcctcagtggggcagccagattcatcatctccaatgtaataagggtttgaagatttgatgtttgtttgtttgtttgtttgcttgtttgcttgcatgttttttttgttgatgttgtgtttgctatgtgtgcaacaagttgtttaaatgaatccttaaagaattattttatctaccaagtaattgtcaaattggaagctaaaagtggccttctgccattattattattataatggtatgtttgacaattgaaggttttggcgttttgcctatt

SEQ ID NO: 242158 - DNA, 438 bp, Gossypium hirsutum
cagcagaacccttcaaatcccccaaaatcttttagccttctgctacacgtttccaaaagatcagttcgtttcctcagtctggagcccgtggccttctcctttccagaactcttcgaacatgctccggaattcccccatccaggtaatgaccttcattttctttcaacgcttcttttgcaatcacatgagcaaaggtgttttctgactttggaatatggtgaaagtttattttctggaagaaatgtttcatatcttgaatgtcccttattatagccccaataatcgagttatccctgtctgtactctggcatttttttataacagttcttgaatctccattaatgtcacattcgtgaagacccaatagaatcgctaactttactgcttgtgctcctgcatgtgcttccgccgcgaacggtgaggcgacattctcatgga

SEQ ID NO: 242159 - DNA, 213 bp, Gossypium hirsutum
aatttaattaaatacctattatcgccctcctcaactactcttttctcatctataccataaagctaacatttcaaatatctaccccaacaaaaatcatccatctctcatttctaacatatctcaacacaacacactttaaatattccaattcccacatattatatatccacactaagattacactcaaactgcctaacaccattcatattccat

SEQ ID NO: 242160 - DNA, 312 bp, Gossypium hirsutum
  unsure (1)..(312): unsure at all n locations
cccacgcgtacgcgcacgcctccggcttcatgctantgtttagtagtttttatgtttttacagctttgcaccccgccattaattcaattggtatcttctcctctcctgctcataataaatgtgctgatgctgtctttttgaattaaaataaacatctttggtttcaagcctggtttgctgaaactaatggagagttttgggtaagatgagtgatcttacgcctaattgcttggttaagctacttgctataatctttatactggccatgaaataacattattgtttgacttcttaaaaaaaaaaatttatatt

SEQ ID NO: 242161 - DNA, 432 bp, Gossypium hirsutum
gaaatatctttcttttttttttattaagaacaataaagatagagaaaaaagccaaaaccatccgcgcgttctttaatgctcaacatagttttaagttaaaaaaactactttcaagttcttgccctcaatgtgatcaatgatggtggtttagaagtcaatggttgctcaacctaaagcaaatggaaaccaatggtactaatcaccattcccgtgaaaatcgcccttcaacgggttcaaataatgctaacagaagtcaatccactaaagaggaggtttttgttaaccaaggtttgcttgtctttatctgaatatggacttcagtagcagaaactttatcaacacgagattggtgtgaactggctatggtgttgcgaactatctggacttattgttgttggggtgtatgacgtttctcaataaaggggttataaa

SEQ ID NO: 242162 - DNA, 406 bp, Gossypium hirsutum
  unsure (1)..(406): unsure at all n locations
tcaaaaatcctttaagaagtttattttttgtgccgaacnctggccgaccgcattttataattcatgtactgcctcaaaaatggcaaatgtgatctaccatgctatggttttgctaaggcacaaacatgtaaagatagaaaatgttctataagttctcggcgaagattctctcaatcggctatagaggagaagcaaagccgtgcatcaaccaaaagttaaatgtaaactgtacttttgctaaggtctagatttgcagcttttatcccatgcttacgttgttttcaataaattccaaataacctatctctgtcataattaccagttttttgcatttcttttcgaaatacacgtattttgattttacttgaccttttcttgtatcacaataaaatgcattttgtttctt

SEQ ID NO: 242163 - DNA, 434 bp, Gossypium hirsutum
ggaaggatagaaaatggaagaataaaatcgtgaggagcatagagtggagagtacaagctcttgggccggatttgtcaagacccagtgcgattgaaatggaacccatcaacgactctgatcaccttgatcagattctggctcgtgctcgacagctctctcagcctattatcattgattggatggctgcttggtgccggaaatgcatctatttgaagccaaagttggagaaattggcagctgagttcgataccaagtaaagttatctttactcaaaaagtgttgatatttaatacactcactttgctgaattttacacatttactacaaaagcaaaatggttccacaccatctaaaatttttaaaaataaattcttattggtattgtataatttaactgattacttttggagatgggattatatctgtacaccttt

SEQ ID NO: 242164 - DNA, 196 bp, Gossypium hirsutum
  unsure (1)..(196): unsure at all n locations
gaccgacgcgtacgtacttgtggancttcttgtgttcattgagtgaatctctttatttgaatcagacttcggggccgcattttaaactttgtttatcttcaatttatacttcctcaaatcatgattactaacgaaatgatttcaagtcttactttgattttgaacatctctaacaagccacatctgttttccatca

SEQ ID NO: 242165 - DNA, 384 bp, Gossypium hirsutum
cccacgcgtccgcccacgcgtccggtccgtcagtattgcactgagagaggttttagtgtctaatattgctggtcggacatcatgcaaacatttttttctggatacagcagcagtgatgaatttctgggagcattcagtggatcattcatttatattttagatgtagatatctatataacattccttttagaggatgaaccacagattaatctgcatttggtgactactggttggttggacagaggattttgtttgattagttttatcaagttcagtagccattttcatcagttgcttagatgtaataccttgaatatttgttcccatcgaagataacagtgcggtaatgtcaaaaggtcaattaaaaacctggattttgcattt

SEQ ID NO: 242166 - DNA, 415 bp, Gossypium hirsutum
  unsure (1)..(415): unsure at all n locations
aaacgacccgcgcggacggcaacaaatagggcannntnaagcatatatatctacactagattattgcccaatgcgtatatcggccgcttgacttcatagaagcggcacgtaaaactcaacgtgcaatgcacatgacgtggtttgcacgccgatcaatatcagccttatttatgcaaccccaggagtacgaagcgaggtttaaatgctgaagcagaagcaatattggatttgtttgttatgatatgatgtgtgttgatgggtggtagggtattacttttgaagacgcgttttattctgctgagtttagaattttattattataagcatagtacacaacgacctaattgtaagataaatgttatttgctaactcatttttttgttctgtaataaccatagaatttcggatgtcttta

SEQ ID NO: 242167 - DNA, 294 bp, Gossypium hirsutum
cttgccttgttttgttattatctatatagggttttattttggttattaagcattttcccggcccattaaatctaatgttcgaattgctaaacaaataattcatagaataacatgtaatgttctgtccttaaaatataaaccttatttatacaaccccaaaaatacaaaacaaaaatttaaatgcttaatcataaacaatattaaatttctttcttatgatatcatctctcatttatgcgttataaacgtatcacttttgcagacgcctttttattatactcaaattacaattcc

SEQ ID NO: 242168 - DNA, 329 bp, Gossypium hirsutum
aaaagaaggctcaattcacattcacatgagccctatttgtttagcatcaccgtttacgacacgcccggggatagaatgcaaaaccctgtctccaaggttgccgtggtgggaagcggaatttcagggtctgtttgtgccgctactttggcaaggaatggaatttcagtgaccctttttgactctgccaggggtcctggtggccgcatgtctcaaagaagagagataagtgaagatgggagagagctgttattcgatcatggtgctccttacttcacagtgacaaatcccgatgtgttgaatgttgttactgagtgggaattaaaaggcct

SEQ ID NO: 242169 - DNA, 345 bp, Gossypium hirsutum
aaaaaactgatgcctctctttttgctctgctagggtttggaaccctagcgtccttgcgccgcgtctcatgcgatccggcctcgattccgaccccaactcaggtaagttttctttcctttgttacttttttttaaaaaaaaatcaaaacaaatgaaataaaaagaataataaaacgaaaaaatttcaccttgaatcaaaaacaatctgtattcagtgcttttttctatttcttgcgtattttctccgttcatcaatcgtcccttttacagatttaaaaaggccttttataggccgaaaaaaaaaataaatcgaggggaaaaaaaacaatattgcttgctggttttt

SEQ ID NO: 242170 - DNA, 254 bp, Gossypium hirsutum
  unsure (1)..(254): unsure at all n locations
taaactattttttcattctcaataccaaacccaatccccgcctctgatctaatcaagaggcggctcaaatccaaatccaancatnttatgaaagggatgaagaacatggcggaacgcttcacaagattgaaatctgaaatggaagaaataagcgaggaacataagaatatcagggaagggcaaaggcatgttaaagacaaattcggaatcattgaatcccagcgcgaggaattgaagaggggaactaggctcat

SEQ ID NO: 242171 - DNA, 213 bp, Gossypium hirsutum
  unsure (1)..(213): unsure at all n locations
gttttaaattggccttgtgagcaaattcttttattttaaatataccanataatccgatggaatggaagttctttgacgatattatcaattagaattcagttgttaaataaaaaatagtaaagggactagatcttttgaattaaaagtagtggtctaaatttcaaatgtgtgaagagtacaaggattgggagcataattggacttacttttttt

SEQ ID NO: 242172 - DNA, 422 bp, Gossypium hirsutum
  unsure (1)..(422): unsure at all n locations
ttaaatttgttatcaacaccctttttggttcccattcaaaccccnncngctccgccaactttcatganatgcaggacacgcaaaagtttgctgcacagttgttgccaaattttgttgcctgactgaaatccaatttcacattgcacattgatgcactcatggcatggggtattatacttttacaatatttacttcatttcctttctaaacggctggggttattgggattactagtttgggaaattacccaataaggttctcattcattaatgatattatattgcccccgacattcaaaagatatatttgatgaacaagtttggttagcaaacggttttttcggctttatagatgggaaatattttgagttttagactgtcagagtttagacggttgacagatatatatatattttaaaataa

SEQ ID NO: 242173 - DNA, 447 bp, Gossypium hirsutum
  unsure (1)..(447): unsure at all n locations
aaaaaccgggccgacccacgccgtccaaacaaaaaaaaacaaaaaggcctccccttttttctttgctagggtttcaaaaccctagctgttgcgccgccatcgcctttcattcctccaccgaggacggtggttgtgacagcaacaaacaggcttttcagcccttgattgagccacgtttgaaggccaaaccttcaaagtctgaaaaatcgagataggaagacacctccccaccttcctcaggttcgaactcgacagcggagggaggatctccggcgaagcattcacggaaacccccgtaagttccctctttcttctttttattcttttttaaaatcgatgaaaaaatagatcaattaataaaaaatgatcgaaacgaaaaaaacgagaaaacgagattctaaaatcaacctctcttctgnttttgctttttcgattctttaatctgtg

SEQ ID NO: 242174 - DNA, 214 bp, Gossypium hirsutum
aaaaaccggaccgacgcacgcgtacggtggatttctaacattcaaacttcaacatttctacctatacctcactcttcaaacggccgccctattattacatctggtgcgtccatatatcatcatctgcctttctacacctcttatttggcttcttacaactcccataacaagaactaaattcaaatatctaaacactgccaataaaaaccaaccc

SEQ ID NO: 242175 - DNA, 211 bp, Gossypium hirsutum
ggtaaacattacgcaggcattgtctgaatctaatcaaattgaactcccaacttagcggggtatctatctctaaaaggtcatattatggttttagtccctatattttaattcatcataatttaatcttaaaaaaaaaaaaaaaaaaaaaaaaaaaaaaaacaaataactaacaaaaaaaaaaaaaaaaaaaaaaaaaaaaactaaaatatat

SEQ ID NO: 242176 - DNA, 149 bp, Gossypium hirsutum
  unsure (1)..(149): unsure at all n locations
cccactctttctttaactcctnncctgtttcatanatctatccctccctttttaccccgccctgttaataaaatcgaccacctctaaaaacattcttnttaccatanaatccttttatatatccacccacacactctttcaatttcttt

SEQ ID NO: 242177 - DNA, 419 bp, Gossypium hirsutum
  unsure (1)..(419): unsure at all n locations
aaacccggggggacggaggcgggcggttgtttancatcatccctttctctttctctttctctatctctctctttctactcggggagttcttattcacctaggagggtcatntactttcataaatacgtatacagcttgctttagagagagagagagagagagagagagggatttctgctaaagcaaaagcaaataaaaaaaatgaaaaaaccttgtgttgggtgattgttaaagggtcaattttgtgtctataaatgtctatctggtaaagcagaaaactgcctttttttgcaacacaaaactgtagctctacttaacctatattcatcaaaagaaggggaagagttggaattcaagagcttagcctttctcatagttcaattccttgccagctttgaaccatggagttccctaatcta

SEQ ID NO: 242178 - DNA, 442 bp, Gossypium hirsutum
ctgggaatcaataccatatccagaggagaggtgactagcaggcgtgcaatcttttgagattgtattatttggctcacgcaccctggatctcaaacttttgtcccttttcttttgaagctgcagctggtagaagcactctataaacatacaccccgctgttgtcgtcgatcattgtctccacgattttttttcttcttttactggcatacgaaacataagctgattaaaagcgataaagagaaagaacgcgaattcccgtttagtatacggtatgactgactttgacgaacaatcgtgtaataccatcccgattctgctggttccatttgtatgaaataagaaaactattataagaaaaaaaaatgaaaaaaagaatgtagcagatgtatggttggtgctgatatgtttgaactatttgcatctctggtttttttcttctttt

SEQ ID NO: 242179 - DNA, 277 bp, Gossypium hirsutum
  unsure (1)..(277): unsure at all n locations
taaatttccggaatcgtttgcttagcttagcttaccttcaccgccccggcaccgtttcggataatgtaagcctnctttcctctggtttcacatgaacttcactcctccgcctcacctttttgttttccccgtttcttcacgcgatttattattttgtttgattattttcttatcgacaaattgatattttcttttagttcatgaactttgagtaattgattaaattgtaattattgaatcatttgaattagagcggggaacttattattatgtagct

SEQ ID NO: 242180 - DNA, 402 bp, Gossypium hirsutum
  unsure (1)..(402): unsure at all n locations
gttcaaaccttgggaaaatttcaaaacggcgaagatgactgagctgttgcaggctgttcaagaaaacatgagagaaaaccaagcatctcggatcgaacagccagccatcagttctgaaggaaccatgctcagagataaagcaacgcatgattcaaacaagcagtcataagtttggagtgtggaatgttgtagagtgttttagtataatgaaatagactatgtaaaatgttttaaaatcctaaacaaggtgaaggagctagacttccccgaagggctaacctaaccttaaaagttagagaaggctgcagcatcggattttctttgctctaaccctnttaagattagaactgttgccattacttagaataaaagctttcgtttntcagtttatagatatatata

SEQ ID NO: 242181 - DNA, 223 bp, Gossypium hirsutum
atatcacgaaaatctaacgaatggaaatcttcaccactatccaaccatcaaccctggcttaagttccgctcgttatcctcgttgcctttctctcttacaccctgattccgacaaagcttaatggacaattacttcaattttggacgatgccactgcaattgctttctcttatatctgcggaaatcttattcaatacatcgctttaatactccgatccctttcc

SEQ ID NO: 242182 - DNA, 371 bp, Gossypium hirsutum
  unsure (1)..(371): unsure at all n locations
caccccccagaaaatccattccaaccccgcaagtttttccaccgccgttgtttaacaccgtaatcggtaccattcaagcctttctcaaactcaaactaagccatgcattctctattttctaaatatacaaagaaaatcactaaaaacagttctcaccacagacaaagcaaactagaataactctataataccttgctccgtcaccgaacaccgccttcgcctgccgtccaatcagccaccggttttgactcgcggcttgtcctcgactttgatggcttccccactatccggattttgactagtgctttggttttcaaagatctgtaaaggatggctcctccttttaattgcttctccggnttctttctttc

SEQ ID NO: 242183 - DNA, 432 bp, Gossypium hirsutum
aaaacaaacccctttttccaaacttggtttccgggggtggaagcctcaaccttataacgccctttttttttcgggttccaaagaatccctcaaatgttggtgtgagaactataaatatagagatagtaggaggcagccaccatgaccttgttcatcactgtgtcgttggaagtattttccttcacaatggaaacgtaaaattgcagaattcaataggagaatacgtctcgttgatcagatcatgcggaatctcggaacatggaaggttaaagtcggtataaaacctccaatttgaggttggttatttttgttcactattattgttttctaaacacacgatatagttactacatgattcgttaccatgtctaaaacgtacttatattggtttgcattacatcctccttattaaataaagatttgccttttatt

SEQ ID NO: 242184 - DNA, 428 bp, Gossypium hirsutum
  unsure (1)..(428): unsure at all n locations
cccacccgtccggttggattgagatcatctaggtccgtgagcgtggtactggcaccacgcctgtttctgaatatctgcgtggcggtaatagggataggggcggtggcgatgacccaaaatgcgttggccacggaacggcaggacagttgcccggacaaagttagtgggagtataagctgcttcttaaattgcgaaattttcagttgtcttgcaggttgcttcacgaatccaagcatgggatgcggcctaatgtgttttgcccgaaacgtcggttgcaccactacctgctccattattgaatttccagacccatgaacatcacctggcaaaagccgtatatggacgctgtttctcactttatgttattaccgtctntgtaattattacaaaagcaaaaatatgatgatagacaattaataaagtaattg

SEQ ID NO: 242185 - DNA, 235 bp, Gossypium hirsutum
accaactataacttttctcattcaaactaaaatccctgcaccatgtcaccaacaaaacataaaaaataattatattaaatgccggccttactaaaaacccaaccttatcacccatacactccacgtaataacattcatatagactcacccaaattcaaatcactcaccttccttttacaaccttcttaccgttaaaacccacaccttaccactctaactcccctcacaataaatc

SEQ ID NO: 242186 - DNA, 439 bp, Gossypium hirsutum
  unsure (1)..(439): unsure at all n locations
aaaacccggggcgacggcaggcgggcggtggtgtttatcagttgttttgcggtctatgtgtctataaggattctttgaatgcccggctttatatataaggttactgaatttangatgattgaaattcttttcgtttatttccttaatgaattgagcaaacctctaggttatattttaggatctgttgacaagtggcttggcttttatatgaagaagattgtttgaactgttctgtgagttctatctctctcatggactggaatgccaaaaccccgttgcaatgggagtgggagaacctaatgatgttaaatgcgacaccaactgaaattccaaggaagctaagatcggcagagtgggatattgagggcgaggaagagctggactcttgggctctctattcttctggtgctgctgctggaggtagtggtggttctggatc

SEQ ID NO: 242187 - DNA, 284 bp, Gossypium hirsutum
attgttgaatgtaataccacatttgctaaaatacttcattttaaatgtcatcccagctcctttaaaaaaaaaacccacccaaaaaaaaaaaaaaaaaaaaaaaaacaaaaaaaaaaaaaattccggccgtcctaacacgtcccaacaaccaaacgcgcccctcctacctccacctaatataaatccccccccatctccaaacaccttccaaccattaacaacctgaacactccaaaaacaccccccctttcccaactaacccccctttcccccccatccccaaa

SEQ ID NO: 242188 - DNA, 386 bp, Gossypium hirsutum
  unsure (1)..(386): unsure at all n locations
gcaaattgtgcggagatctggtaggcgtaagaagcacatttcaggaaggtgaatttaagtgatgaggaggaccttggtagccttccaaaaaagactaaaacaagtggatcaccctgtgccaatgaagaaactaaagaaatgcctaatgaagacgagtctaaacagaaaaatcgagctggtgaagtgaaatatcagaatgcaagggatcatagagaaggtaagggttttaagtcaagctttttaaaggaaatgagtgacggagatgatcttaggaaacctgngaaagcttatgctgatggccttaaggaaaatttaaaccccattgttgatgattctgtgtcagatttgagccaaaaagaaacaaaggagccccctgtttttgcatg

SEQ ID NO: 242189 - DNA, 211 bp, Gossypium hirsutum
  unsure (1)..(211): unsure at all n locations
cgggccgacgcacgcgtgcggtagaatccttaagcccttgccgtcccctttctttttcccaattcnaaaatcaaccgcncgcctccaccaatctacctccacccatccacctccnntcctccacnnctccactcaattcccnaatcanaacttaaaaccntccttctacctcttctacctttaaatttcaaacaaacaacttacatttaaa

SEQ ID NO: 242190 - DNA, 447 bp, Gossypium hirsutum
ccggccgacccacgcgtccgcccacgcttccttttttttttctggggttaaggcatgggttcatcgactgcaccacttcgggccaacaatggtactaccattgatcaaggaattgcttacattctccttttacttgctctggcgattacctatctcatccattgatgatctttttttatattttatttttattgggatatgagctataaatgatttttttatgtattttctccatatatctaatgagagaaattgcagcaattttgtatttttcttctctcctatctctgtgttgtaaatctatgcagaaaataaatccagttgagaatttgagatcacataatcattttactatatatttttttgctccttgtggaatttgaaatatatttagattcatatgaccaaatcgatagatcaaaacgtttgtatattagcagatgattc

SEQ ID NO: 242191 - DNA, 338 bp, Gossypium hirsutum
  unsure (1)..(338): unsure at all n locations
tcctttaaactggcttatcttctactatccaaattgtttcacctccgcccgttttaaacaaacatggcacctttatactncttcacgtattccttcaactggctcancttctactatacaaactgtttcacctgctgtagtcaatgcacaaaccttgcagcgttctactgcttcagggatcccttcaactggctcagcttctactatgcaaactgattcacctgctgtagtcaatgcacaaactttgcagcgttctactgcttcaaggatcccttcaagtaactcaacttctactctgcaaactgcttcacttgctgcaatcaatgcacaaaccttgc

SEQ ID NO: 242192 - DNA, 387 bp, Gossypium hirsutum
tgaagagaaaaccttagtcgtttggaattcaaggttgctaaactattggaaagcctctccgtactatcttgaagaacatgtttcaaagaaaagccagagtatggatattgaaagattttctgactgggggaagccaaagaacacctcaaaacgggatagccttaaccaggttctacaactccaatctcataattttcctaaagaattgattggaggtttgcaactgaaaccacttatggaaatatttacctgattgtaatgatatatttttatatattgtacttgagagctttcatctttccctttgctggtttggttacaatcgaacattggaatttcagattcaaagagagcgcagcgaagtgccaaaagaatgcgatggaatct

SEQ ID NO: 242193 - DNA, 225 bp, Gossypium hirsutum
  unsure (1)..(225): unsure at all n locations
cctatgcatgcacccttcacaacgggcggcgtcatacaaaactcctccggcctcacaattcctcaactanttcactcatatctaaaacaaaacatcttcctcacataacgactttaacacatataacatctcctactaaccttactcccacaaccaaatcaaagatccaccacataattaaatcacttcacatatcaaaaataatctcaccatttcatattataa

SEQ ID NO: 242194 - DNA, 422 bp, Gossypium hirsutum
ggtggatttgctttaaaaaaagagatgctagacgatagacggttccccaaaatgcggctaaatttgcaacgtctcctgcaggtgattgcccatggggagcaagtatttcctcgagtgaaggaaaaatgttcttctaaacattggtttgcaagtgaagacatcggctcccttgaagagcttattggacgcttgaggaggctgaaagagaatgtagggtttctagcaaatcgtgtgactgcaattcaagccggtttggatagctggcagtctgagcaaattaacagaaaactctattatctctctttcctctctataatattccttcctttatccgtcatcaccggagtgtttggaatgaacgtggggggagttccatggactgtgcaaaaggatcctgcactaaaagatggtttccgcaatgt

SEQ ID NO: 242195 - DNA, 290 bp, Gossypium hirsutum
ctctggtcgaattatacccccaaaagtggatccaacagcatgcatcaagtccttcttatcacattcgggtggacacgggccaaacgtaagccaaaacagagaataaattagtcgaatcttgtttcgctcaattgacttcaatagccgatcaaaaatagttaattgttttcgaaaaaaccatggatgcccttccataatatgctcaaaatcattctcatcttcgaaagatattatgaacaagttttgccctgcaacaaggatctcaaacttcttttttgttttgcagatgc

SEQ ID NO: 242196 - DNA, 406 bp, Gossypium hirsutum
ggcttttctggagttatttggctaaaaagaatcaattgatgtagaggtgactggaaatcatccccaatttattctgtttcacatttgctccattctccaatcacagccgatctttatcgcctttgtgtatgggagtcttgataggcaaaaaatgaagattccttcggagggatttgagtttgtctattctgccagggcatttttcatggatggccatcgaggattttaacaccattctctcgccggatgaaaaaaaagtggttggaaatgattgatcacataattatgttcatagttgaattaatagattaagggggaatgaaaaattgttagttatatgaattagatataactcccccttttaatttagtccgtctttggttggccaatgtaacttgtcatattt

SEQ ID NO: 242197 - DNA, 418 bp, Gossypium hirsutum
gttttcctcttttaacggcaatagcattttctaacatagccttgtcatacatttatttaagaaaaccatttccggaaaaggaatgcaactaataaatactatgctgttgtacttaaccgagatctgcgagtgttgttcatctacaggttgacatccctgttctcatcgattggtctcgacattttttcatgcttggatattatacgtttctctcgacctacatggatcctgttataaggtcatggttaaatggtttgccatctaaagtgaggtatgaatggaagaggcaccttgaggcttggaaatatggatctggtttagactacaggctatgaatttcgagttgaattgatgctctttttcagctttcaaacttaactcgaaagaccacccaaccagcaattgaaattcattgaaa

SEQ ID NO: 242198 - DNA, 278 bp, Gossypium hirsutum
ccaaaaaaaaggttaaacatttaccttaagttggtttccacggaaaggtataaaaaataaaaaatccttgaagacgtctaaaggaatgctagggtctatctaaaataagggacttgttaaaatagttaaacagttgggtataaaaaaatcttggaacctgaagaagatacagattattgttgataccaacaaaacgagaaagcttattgtcctatcattgaggtacaaaagtttttttcaacgtactatataaagatgttttttaaaattatttcacc

SEQ ID NO: 242199 - DNA, 362 bp, Gossypium hirsutum
atagcacacctactatttcacaggccttaagatccatctcaaaggccagttactgatactgcattgttgaagtctcatggcaagatccatggctctatcacgaatccacctctgatgatgcctgaaaaagtcattggtcacgaagaaactgatgccgtttcagataaaaaagtgccgacaaacagtaacagcaggtaactgggaatttattaatatctttgtaaaatttaatctatttgtttatgataatgtataatggtggtcgctgtgagtccagccgacacataagatgcaggtttccttccctgttttagacccttttttttttatatcttagacaccccatggtcttttattagtct

SEQ ID NO: 242200 - DNA, 434 bp, Gossypium hirsutum
aaaaaaatacaatcggtgccttcttggctttatagccgaaactaaaatagaaaaatacaatatttccttgctttgctgctgttgtgtttgtcttgttcacaggtacggagcagaggacatgcgctggcccttggcgtgaggcatacggggctgtgctggcgcgggtatgggggctgttctggagggtacagaggtagctggcgtgggggctagggtcgctgttgcggcgcaagcaggagccactagggtttctgctttggttcttggtttgggcattgggcttgttgggccatccgggttttaggttagggttttaagtttggttttttgtttttgtgttgtaacgggccgggcaaattttgggccttacaaagactaaaggccaaacacacgcacgccactgtctcgccagcccgtatctgtgttaacacatg

SEQ ID NO: 242201 - DNA, 385 bp, Gossypium hirsutum
aaataagtgagactggagtactgacagagaacgaaagagaaggccaatattacacttttgaattgcgtatactttttcttttatatacgaatctcctttggtatagatacatctttatgaacttgggggtgttgcacagtgataatgaaatcaaacctcttattctttaaattttatgggaggaattgcatctgtctctctctctctcctctcagccggacgaaatatatgaaatgtacgttggtataaaaatgcatgtgactgatagactgactattgcaattcagagagattggagcggtgtctgcaaccgattctgagctcatagaagtgctcatatgaagcttctaaaagatataagctctttcgaatacgaagatgtgcg

SEQ ID NO: 242202 - DNA, 395 bp, Gossypium hirsutum
aatgcactaattgttgagggaacctggcgaagaatagctaaaatactaccaggacatgcacaaatggaactatggggcctggtgatatcgaacattgcaatggaaatggtaactagagtagaacctgatcatgatgtgaatagacgaatttttaaggggacctaacttaacctctactgtttatttgaaatgggatagaggtcatacaaggtccctaaagtgattgttaaaccattcctctactttgtcagctgatctaattttgcaggcagttgattttcacgaatgggacaatgaaatgatgcaagaaaattaattccatgatttgttgtgtttggtattggtgaatgaacatggatacactaattgcaagtagggggtgaagctagaatttt

SEQ ID NO: 242203 - DNA, 355 bp, Gossypium hirsutum
gtcaaactcacatatagaaagaagctgcatctccctgaactaaaaagtaagagctgcaactcgctccaaataatataactataatctattgttctatgtatgtagtaaatattactgattggtattactacatttggacgaacatatactaacggatttcatttatctctggcattccaagtgcaattgtacatgacaaagttagtcagtgccaaagtaacctttacgtcttactgattctctttaagcaatagacttgacgcgtggaggtttgaactacttcgcaccggttggatccttaacttgaatgaatgcataaacctataatatttcatattgccctaacgtttattct

SEQ ID NO: 242204 - DNA, 410 bp, Gossypium hirsutum
gagatattcaagtgcggtcacaaatgtagtaactcaaactctttctgtcattctatctgttgttgctacactcacagtaacagctctgcttgtgaccactatactgcatgcctttgtccaacgagacctcttccccaatgacattgccattgctattagcgacagaaaaccaaaatctcataggaggtggttcaatcttattagacatggaagctcagagcataatgcagacattgacactttcttgaaatttgcaaatggcgacaccaaagacatagaagctgggctgaaaatttccagtgcagaagctaaatgagtttagaaacttcatgcatgtgccactgtgatcagccttaggttcaactttcatcaggttcttgcctcttaagcagtcagacatgcgaggaacg

SEQ ID NO: 242205 - DNA, 400 bp, Gossypium hirsutum
gttttaacagaaaggatccgtttactctttagtctaactaatttgtccgcttttttagaagataggggcaagatgcaatctgactattagcactgatactttttcctaaataactactatatgtaatagtcgggattcagatgtctcctcgtatcgccgcacgtatgaatttggtctcaattggtactcgatcattttgcctcaaaccaaatcctggtatgtttggtgatccaggaaagagtcggaatcccatttttgatcaccacactcgagtctcgagtccagttagcatagaactgaactatactacaagagctctgcatagcattgaaagcggagaaaacaagtttggcacaatagtagttgataagtctatatgatttttaatagacaaattttt

SEQ ID NO: 242206 - DNA, 339 bp, Gossypium hirsutum
gagtgtacaacagagcctcgggttctttttactctaactaatgcgtgccttttgggggaggattctggcactatgccacctgactattatcacggccactttgtggtaaataactactatatgtaattgacggaattcaaacctgttcttatatctgcaaacgtttgaatttgggctgcatagatactcggtcattttgcctcagacctaatcctggaatattatatgatccatgcaggagtcaaggatccatttgtgcatcccacactcgagtctcaaatgcaagtagcattgaactcgactatactacacgagctctgcttaaacatcgatagctga

SEQ ID NO: 242207 - DNA, 371 bp, Gossypium hirsutum
tcccactcctccttaaaaaaaaaaattttttttataaaaaaaaaaaaacctttttaagaaaaattataaaaaaaatacaaacctactattatcacttacacttttttctatatcactactatatataattattctttattcaaaactcttctcctttattcacacttattaaattagtctcaatacttactctatcattttccctcttaccaaaaacttctatatttaatttatccacgaataaatttaaaatcccttttttcatctccttacttcaaatctttatatcattttttctttttaacttttactttacttcatttatcctttttacatccatctataaaccctattaaaaccaactctatttt

SEQ ID NO: 242208 - DNA, 345 bp, Gossypium hirsutum
cccacgcgtccggaggttacaccaaaggccatccgattaaggaagagatatctggatgtaaacaagcgcaaagccatgagtaaaaaggccaaaaattgagtcttctcctaacatactataattttgtaactatagttggggttgggttcaatttttgtccccacaatttatttatagaatatcaacgatattatcttttttatgacaataataaggggcaaagaggagttcatgttttgtctgtgtaattgccaaagaaacaacaatggctattattattattattaagaaaaaaaaaggggacacaacaatgctacaactcaaaaaacacaaccagtgaaaagg

SEQ ID NO: 242209 - DNA, 248 bp, Gossypium hirsutum
cgacccacgctcgataggaaaagagaacaatttgacagaggaacactgcggtgaggccggcgtgatgctcggatgagaagacaacctacctttagcccatgcgctaactgaaggacctttgacctaaaacggtcgttgcacaaacccgccgtgtggggtactgtttgtctgagaggtgatgagcccgaaaagtagtatctatttcttaatataggccgacttgacgcgaagggtactgactgaataca

SEQ ID NO: 242210 - DNA, 434 bp, Gossypium hirsutum
  unsure (1)..(434): unsure at all n locations
gcgagggactctcctttgattatgattgctgcccatttcttttcaactcttatttggactgctttccgacatgcaattgcttcagcagcaaaggcggagacgaccccttgatggatctctgagcaagataagagcactatcccttcttcatttctgaccacaatacctaaagccgaatgattataattcctatcatacgcactatcgaaattgattttaatgaactcacgaggtgggtggctccaacttctagtctccttcgtaattactgattttcttttttcaagaccattaagttcaacaatgtagttgctaatgaagtttactatttccttgcatgtactaattctctnttcatgtattcttgggtttctatctcccatatggccctgagtgcacagcagaaatngcggtattgacaagggtaaactgat

SEQ ID NO: 242211 - DNA, 356 bp, Gossypium hirsutum
tagaggtttctttttgcagcgacgcatcattggcgaaggaagctttttattatgaatggaaccgccccccaacacaaagatcctgttcgtgtcaagatgaagactttgcaagctgtgctggaagagcgccacagagctctcgaattgcttatctactgctaagatggaaccgacgatcgacgatgaatacctcaacacgtaatagatcaagtgaaccattcatgagaactcaacgtcctctatcttatatcagatcaagaagcatattatttgtacgatcttctcaaatctagagttcaatgccctgactttcctgataacttgagtgtcttcagttccattccctaaaacattcc

SEQ ID NO: 242212 - DNA, 433 bp, Gossypium hirsutum
cggacgcgtgggcggacgcgtgggcaaaattctaattaggccaatcaagtatagtctagatgtatttagggatgacaaagaaaaaacccgaatctgacccaattcgttagagttgcattctatttagaaatcgggtttggagcggggtgggctgggtgaaattaaaaaaaatatataatggggttgggctcaggtttgaggtaaatccactcgtcctactttgcagtatttactaaaatacccctgatatatatattaagtttttgcttcaataaaaaattatgtatatattaagttttaggtctaagctcaaaaaatttaatcttagtttcttcaaaatgcacattaaaacaattaaaaaatgtgatcttaattgtttcaaaataaaaataggaaattaaattaaattcaaatatggttggtgtggagtcga

SEQ ID NO: 242213 - DNA, 435 bp, Gossypium hirsutum
atctttgatgatcaggtgtttgagatgttgaatcgtgaagcattcaaccaatctattggtgtgaatgtaactggaatacgagaaaattatttacaattaagcataggtcaaggaaacactcttttcatatcacttgtgccatctagcaagggtgatgatcaggacgctgccaatacccaggattcagaatctgcaattgtgcctttagactcatttgataatgtgaaattagaagaaggaaaacatggtacttctaaaaggaaatggggtttccctaatcgtaccagttgcgaaatttatctgcagcaaattgttcatgaacatgcatttgttaaggcaaaggataaaccaaatttatctggtactcgtgtatctggtcaatcaggaaaggatggacctggtcttcttggtcatttctgtctgtctctggctcat

SEQ ID NO: 242214 - DNA, 259 bp, Gossypium hirsutum
tctatccttatgtacccacttttcttttatttctctgtgactctcataaaaaaaagacttcttcattatttgtctcccctctcccccccacatgtttcattttgtatatatcccacctagatgactacatacttactcgcacatttatctacttatttacacctctaaaccaaaaaacacaagaacaatctacctcatctcctacatgctccaaaaaatatccatccctcaattatacacccaccaacacctctattca

SEQ ID NO: 242215 - DNA, 422 bp, Gossypium hirsutum
ctggcgttttcgggtgttccctattataatcattgcaagttacaggctctaacggcgagggaagcgcatatgatggctgcacacgctgactaggaatgtgggatgctgctggacgaaagggaatgtgagggaactgacaaaaagagcgatatctcaaaattagatcttgtcggagtataattttaggatatgcaacatggaaggaggtatctgataaaggctaaagggacagtggttggggtgatgatcgtgaatgtttgcatttaatggcttacggaaacgaggggatcggatatcttttgccgcatttgactgcctatgagtttcggtatgtcgtgtttttaggcctccgatccatagacttagctttatggccattacttactaataccagaggattgcgattcacatatgttgcttat

SEQ ID NO: 242216 - DNA, 433 bp, Gossypium hirsutum
cgcattctccatctctgtctttactttctttggttttttcttgcatcatcaaaccttgttctcttctgctctttttacgataaccaaatttcctaaaaagaatcaatccgtgcgggtttagtttaactcttttgcagagttgattttcgattgttcagatggctgccatcgctcggtatcgtttctcggacctgacgagacaattccctaacacgagcggtgctcgccctctcaagtcacaaccaccccatgttgtttccttccctcgaaaccaaccgttccggtttcagccttctcagatttccattcccaaacttcagttttcatgcggcggaggcgacgacggaaaccatggggttggtggtaatggaggtggtggtaaaggcgatggcggttccaactctaacgatgatccatggcagcgctttggcat

SEQ ID NO: 242217 - DNA, 154 bp, Gossypium hirsutum
cgcccacgtcgtccgggttcagatacggatgtaccggagaaagtagcgagaggtgatgcttcacgagggcgtgaaatccgcatgctcataggtgcgaatgcaccccaagagcaagctgatagcgagtagcatgttctacaatgatccgcagttt

SEQ ID NO: 242218 - DNA, 293 bp, Gossypium hirsutum
tgaatgcttacatggacacgtttctgcatggtatgcgtgagcttgtcaattgaaagcatggtgggagagaggataccccccccccccaaatgtcttatggcttgaaaaagcttggaatcagttgtgcattcaaatgccatggatataccttattcgaagcttactcagagtgtgttttagttcatgatcagctatatttattcttatgtgagcacaacttatatctttttagttgcagctatatgatttaagaataaaaatcatttcatcactacatgtgctttttatttatt

SEQ ID NO: 242219 - DNA, 433 bp, Gossypium hirsutum
tgaatagccaatcttttcgaggtgcagtgctatcaaaaccaaacaagcctgggaggaaaaagcagaagtttgatcatgaaccggattcatccgttggacgtgaatatgatgtgtatacaaactttagattatacgaaagtgcttcagcccgaaagagaaccgtgacaacggaagaaagagagagggcaattaacacagccaaatcgtttgagccgatgaaccctttctgcagagttgtcttacgaccatcatatctataccggggatgtattatgtacttaccatcatgctttgctgagaagtatctaagtggggtttcgggatttattaaacttcagcttccagatgggagacaatggcccgttcgatgtcgctatagaggtggcaaagccaagtttagtcagggatggtacgagtttacgttggagaataa

SEQ ID NO: 242220 - DNA, 328 bp, Gossypium hirsutum
acgatgatccgtctatgttgattgtaacatacgaaggggagcaccggcacagtgaaggcgcggcgcaggagaacatggctccaggtgtggggctggtagtattcaagtcaacttgataaacaaataaacgtagagttttgtaatattttagagtggttgagggggctgaatgtaaatttgttttttctttagatatatttataaattttcctagtgaaaaaaaagctagatcataaaaaatttcaaacatataaacatgatggtcttgaataaaaaaacggaattgttgaaaacaaatttacgatactatgcatctcattataaaact

SEQ ID NO: 242221 - DNA, 232 bp, Gossypium hirsutum
gtccgcttcatatgcggagcttgttcatgtatcggcctatgctcaactatcgactgcgcgcggagaacttactgatggcggcatggtagattagactgcacgggacaagggatttatgcgagaacgatgatacgatgtacatcctatgcatccatcaattggggcaggttccatttatatttatgtggaggagggattgtatgaagcacctacgaaacaacagactattctg

SEQ ID NO: 242222 - DNA, 311 bp, Gossypium hirsutum
cttggaacggttgtactatggctaacaccttgctcctggctcatgaatgggtgagtgagacggaatgctttgagccctcgctgaaggcgctgaccactaggacaaaacctgactatcgaggacatgctggtaaagaaaggtctcgacatgctgactactgtattgccactgaacagcatgcgggctgatatgtatatacatgatggaaaagaacaactaataatcgtggcaagctggtgctgatgctgtggagaggacagcgataccaaatggttctactacatggacacatgtgctggacactactggtg

SEQ ID NO: 242223 - DNA, 390 bp, Gossypium hirsutum
cccacgcgtccggtcatttcgtcttcccatcatttcatttccattccgacgatttctctggcaaagcttcttttgaaccgtttcactttctttagttttgaagcatttcttcctttcttccctcatcttctgtcattttctagtctggttcacgcaaccagtcatatcttctctgctcctttgcatactcaggaacctctatttcaaggtaaatctcctctttcctctttaaggtttccgttgcaagaatgtgtgcgagattatttgcagatcttggtgtgcgctgaaatctgactttattaaacttactgatttcctactggatatcatgaatataaacccccaccattgatcgatcttgatctgtggaatagcatttttttaattatt

SEQ ID NO: 242224 - DNA, 300 bp, Gossypium hirsutum
attatatatatattatgctgtgcaagtgacaaaaatccatgtcagattttcgatgttttgaaccgacatttttggctcagaggttgttgcattgtcgcagtatatacattcattacacggttttctagtcaaaatttaacactgtagaaggtacttttgtttagatatgtcgtcgtaattttgctgatatatagtttttagaccatctctgcttaaaaaaaaaaaaataaaaaaaaaaaaaaaaaacaaaaatgaaaataataaaaaaaaggagccacaaaaaataataaaatatgcaag

SEQ ID NO: 242225 - DNA, 368 bp, Gossypium hirsutum
ctccaactgcaatttttttgcttcacgtcatattgtcttggtttgcttattacttagatatgactcctttgttatcccatggtaaactggttcacaatatagctaccacgaagtcgtccatcattcatcttccacactgttgatttttctacacaatcttcattttgcagatccaccacagctgagtctgtctccgctatcatctgtttgtataaatctaaaataagctgcatgtctgaaaaaacacatactggatgtagtgtatgtattatcactatatacatttcaaattgttcactaagcttgagtgtaagcatatcaaatatcgataatcatatttatctccggttcttaaattgaaaattaaa

SEQ ID NO: 242226 - DNA, 342 bp, Gossypium hirsutum
  unsure (1)..(342): unsure at all n locations
cgattgtgcagcaatggaagacaacgagtcggtgagggtggattcgggtttgaaggcctccgattggtggtgatgtagcagttgagggccatcataaacttaggccgatcgccggaagtagctgagggtaggtgcgcaaaatgtgcctggcggctgctaggggacaatctaacgtgatgtgctagaaggactagattgtagaagacgcaaaaatctcagggccaaaatgtaattttagaaaaatttgaaggccaaaatgtaaatattaaaaagtaggggccaaaatgtaaatagtatatttttgtatttttcaaacnaaaaaatattntataataatattta

SEQ ID NO: 242227 - DNA, 301 bp, Gossypium hirsutum
agggcgtgtcaacgtgaaatatgggaggtttaagcgtgggctgaagcaatgccctccaacgaagcggtacggggagatgtgaagagggcgttcatgggcatgtcaacgtgaaatatgtgaggaggaagcgtgtgctgaagcaatggcgtgcgtattggctgacacaaaagcagcagcaccgcaaggtggaaagggaaagggttctgttaactccaaaaacctgtgcctactgggcttggttcatttcattcagtattatgccatcgtcaaactttgtgggcctgtccaaaatgcaattggc

SEQ ID NO: 242228 - DNA, 334 bp, Gossypium hirsutum
gaaacggttgatgaaaatgttcgacatttattattatgggatgagaagttggttggagttccacgtgttttggaggaaatgaaaaatgtttgaacagtaatcatccagaatgcttcaaaggaatcaaagactacttatgaatcacttataaatctgtgtctctccaatttcaagtatctacgagcattagatttaaggaattcaccattgacggctttaccgaattccattggtaccttaaagcacttactacaccttgacttgatcggatgttcgagtctacttaaactcactaggtcttttgataagcaacagagcttgtatttgttataat

SEQ ID NO: 242229 - DNA, 291 bp, Gossypium hirsutum
  unsure (1)..(291): unsure at all n locations
cgacccacgcgtgcgnaaactttatttttaccacaaagtcaattttcctaaggctctatgtgttttattgtctgggctaattcaccccgaattttagcaactcttaataaataaaaacccggtcttagtgttaaccccgaacaatctaggctgttattgatgaaggtaagccccaacatcatagacctctcatgaaaggcaagcttgtcatacatttccatgttattgtttccagatcctggaggagccccacctaatcaacgcgggtacattgagagtgtatcgcccatg

SEQ ID NO: 242230 - DNA, 407 bp, Gossypium hirsutum
cttgaatgagatcgcgagtgagggaccatatggaccctagcgcatatccgcgaacccgccactggttatcgctgctgttctggaaaacacatgacactctctggacacatgaagacactcttctacttgaaaataacattggggacagcgggcataatgaactaaccctacatacgctgagattaccaattgagggatataatacaatgaaatcctgccattgttatagcaatttgtgaaggcagtatggcgcatgatactctctctgtaacatttcatatttcgcggctgaataagtggttactcgctgcatgaccatttcagttgactgtatactcactacgtactgaaaactcaccagatatgttcttcactccacacctgaatattctcatgttcgagctctg

SEQ ID NO: 242231 - DNA, 327 bp, Gossypium hirsutum
cggacgcgtgggtttggctctcacctccatcatccccaaccgcaggcgtatttgccttttgaagatgattttcggcctcaagacccctccttcactctcgatttcgacggagcaaggaggagtcaacgacaaactctcgaggtaagcctctttcgttttctttttcgaataccagaatcacaaacccacgaaagaaatgaaaaaaaatagaaacggcgggagtaaagtatggagggattttgattcgaaagtcacctttttttgattactttgtatcgagcgtgtgtattatctctgtgaacgtaaccgttacaaagattaaaagct

SEQ ID NO: 242232 - DNA, 398 bp, Gossypium hirsutum
atttagatttgtatcctagagacaatattattaagagaaacagtcacaaaccttgaaaggattagttttcataaaccataaaaatggagatgaaagatacttttggttataccaaaaataaatatatcaacattgcatcaataaagtcttttcgttcacctactttgtaacttgggaattaaattctaacttgaatatgacatggagcatgtttagaacacctgaatcaaatttatatacctaatatatgaaaactttgtatctaacgtgtttgttaaagaaaaaaataatatcattaaaatttatgaatgccatttattaacgcattagatccaagatgcctatgcaatcatatacgttaaaatttgagccacgagttcaaaatatgctcaacatca

SEQ ID NO: 242233 - DNA, 378 bp, Gossypium hirsutum
gtttacacataaaagaaaaaaggaaagaaaaatagtaaaatcgtaaaaggaaaaaaaaacttcaagaatcacctttaacaagtgttgtaattatcgatctctgcttgcttttgattttgtatctatattctctctaaccaaaagtaaaacaaaaacccctcgtacaaacaaaaaatcaaagcttttatagccaaatacaaacggttttctggccattttcttgcttcaaaatcgcatgttgtggagttgtggaggagtgcatgatcgtggggcatggacgcacgagccaaggggtcgtgctcggtgtgccgactcacgtggtggaggggagcaacagctctttccttttttttgtgaaaagttagtctaatattgggc

SEQ ID NO: 242234 - DNA, 341 bp, Gossypium hirsutum
gaggctaataaacaataaagaaaaaaaaattgaaggcctcagtttcaaaatggcttcaatgaggctccttgcaataattgccattctggttcagggcttagttaatggtgattctcacgaattgcctagtttcgatccggaactagccgtagccaaagtttgggaagttgctgttggcaaggtcggccctgatgtttaaggtgttaatgtggcggattccggggccattcctgatagaaccaccattgacaccttcattgctattttgtcattttatgccacttgcgatcgcggttgcctcaccattgatgaacttcaacaagctttgcaagagtttggtc

SEQ ID NO: 242235 - DNA, 395 bp, Gossypium hirsutum
  unsure (1)..(395): unsure at all n locations
aattcccggggtcggacccaaacgcgtccgcgccctttcnntttcaatcnncaaatcctaaatctgttcactctngtcagttannacccctatgngtnctcgtaccgaagcaaaccagcaagtgtataatcaagccgtgtggtaaagtnctccacgtaaggcannactggctacgaaggggcggctcggaaggtcggcttccggcaactcggagtgagtgtatagaagcctcatcgttttagggcccggaacctgttgcttcttagagnnaaatcaggagagtaccagaagagcactcgagcttttgatcaaggaaacttccattccaaagggttggtgacgagaaatcgctcaagactttcaaggactgatttgagtgttccagggagtagcgc

SEQ ID NO: 242236 - DNA, 377 bp, Gossypium hirsutum
cccacgcgtccgctccgatagaagaaaaaaaaaagaaaaaaagaaatttgcaaagtcgcggcgaaaactcaaatgctaaacgggaagaagcctttgttctgaaatcaaaattagggtattgcctgtgtacataatgaggaaccaaactttgttcggcaccaagcttgtatttgatacgattgttgggtttctttatcataatcagccgcactggaagtgtctttgtcttaaaaaaaaaaaaaaataaaaaaaaaaaaaaaaaaaaaaaaaaaaaaaaaaaaaaaaacaaaatataaaaaatttaaaataaaaaaaaataaaatattaaaaatttccttatcccaaattttaaaaataaaattaatggggggggccct

SEQ ID NO: 242237 - DNA, 393 bp, Gossypium hirsutum
gaagaatgtttcttggccgggacaaaagatggaagtcttcttgtgtattctatagaaaaccctcaacaccgtatagctagcgtctcccggaatccaaaaaccaaagtttctttagcaggctaagcaatgattcaggattggaatgactggtttgacaattacggattgattggcggtactgatctcaggaagcatttgaaaagcctatccattccatttccaggtactggggccatactgatctatatatttagcacatgaagaatactgattagtctttcaacagcgttttattatccaacatacaggattcttacctattttgtaacatttaagatatagggaaggttaagatgtgcaaaacttttttaagaaattcaatttgcctatttt

SEQ ID NO: 242238 - DNA, 277 bp, Gossypium hirsutum
ctgttctgtaaaccaatttggtagtttcgtatctggataatatctattgtaaacttaaaagaacaaagctcattgtttcttatgtcctactgccaaaattttctcctacctgcatttgctttgaatttactcaaataactaaatgataagctaccattctctgttccttgtggttaaaaaaaaaaaaaaaaaaaaaaaaaaaaaaaaaaaaaaaaaaaaaaaaaaaaaaaaaaaaaaaaaaaaaaaaaaaaaaaaaaaaaaagaaaaaaaattttgg

SEQ ID NO: 242239 - DNA, 394 bp, Gossypium hirsutum
ccatcaccggatcctctcaatggaagagatgttgccaaatctgaaccttctgcgaatggaaaatttaccggtccttcacatggctctgaacaggacagttacaatctaccctcccccaaatctcccgaagatgatgattttgatgacaataaatctggggaattggatcgtagcaatcgacggaggcagagacctcaacgatattcagcgaaggaattcgttgaagctgtttcggataacgaggctgactttgacagtgatgatgatatagttggagaagcagtatatgatgaggaatacctaagataaagaaaacagagaaggcaatccagcagctcagaaagagatgaggaataccgttgggacgaagaaatgctgaagatgaggaggagga

SEQ ID NO: 242240 - DNA, 394 bp, Gossypium hirsutum
tcttgagtaacacactcatgaacagaatctcttatgacctccgtgtacccattgattcctattcgcccagatagcccaaatggcgcagacaaagatgcagcattccttctctttactgtgcaacaatacccagggtagggaggtagttgagaatggtattccaagctgtaatacgtacctttgaggggagattacaattccacagtttcttgtaacattttgtaattacaggcaaactgtaaccattactgttgtaatcattgccttttaataatagtttgtaaccactgcgcacagtatattggcctgatgcttctcccctccatatcaaaagatcattatgtgaacgctgggccaaagggatttgcaaaaacttttgaacatcaactttcgc

SEQ ID NO: 242241 - DNA, 133 bp, Gossypium hirsutum
agaagatcaaaggagccacgcatcagcagcaatttaaatattctagcccgttcccaccctccaacaaatcccagtctttagcaatcctttagctgcccatacactcttccagatatatgaaggtagttgtcct

SEQ ID NO: 242242 - DNA, 317 bp, Gossypium hirsutum
cccacgcgtccgattgattaatctgaacaactttttcctattattataatattaataagagtattcaactcttattgaaggcaaaaaaaaaaaaaaaaaaaaaaaaaaaaaaaaaaaaaaaaaaaaaaaaaaaaaaaaaaaaaaaaaaaaaaaaaaaaaaaaaaaaaaaaaaaaaaaaaaaaaaaaaaaaaagggcgggcctttttaaagaataaaatattacgtcccattgcatgcaacgaaaaagttttttaatacgcgaacctaaatcaaattcactggccgagttttaaaaacgtggtgacgggaaaaaccct

SEQ ID NO: 242243 - DNA, 355 bp, Gossypium hirsutum
tttgctttcgaataaaaaaaaaacaacacaaaacgaagaacaataaaaaaagaggaacgcccgcaaatctaaatcggaaaatcgccttcgaataggtggccttttctttgtattcaatatgcaaatagtgtctgtttgtattgcgttcgtattgcttgcgttcgttccccaaaaaaaaaccagtttacaatcgaaattaataggctttatagccgaatgtaaaaaaaataaaataaaatacaattcttctttcttcgtatttttgttgctttcgtttgttctcttttgcaggtaagagtacggagctgtgtgttggcccttgcgtgaggcatacgaggactgcgtgctggtcgta

SEQ ID NO: 242244 - DNA, 379 bp, Gossypium hirsutum
gaaatgtagaggagttacttcagaaggggcagattggttaagagcaactcgaggatcacttgtcgttaatttggatatcaatttggatatgggcgagcatttagatgcaagtgccagtgatggtggggcacaagataatggaattgaatttcctccaatggtgggcagtcaaattggagcttctagtattgcatcgagcagtacaggtcgatcgacatcattcaagttgttagggcttatgagtgggaggagttttgtggcttgcacattaaggaggttggcaagtagttctcggagttaactcggaatttgcacaaccaccaaaaggaaaagagggacaatagaaaagcactttggtatgaactggttacattatttt

SEQ ID NO: 242245 - DNA, 362 bp, Gossypium hirsutum
  unsure (1)..(362): unsure at all n locations
aaaataatcaaattcggagttcttccggatcatcatcttcatcattactcaaaagctgtcaagatgattgatgaccaagaccttggcttcttcgcgaatttccttgggatcttcattttcgttctcgttatagcctatcattatgtgatggctgacccaaaatttgaaggcaactgaggattttgcactttttgtttgtgtctgcaatggatatttagatgataattttggtagactgagttgtttcagaaacgaagacgaaacaatgttgttaaaaaccttcaacaagttatggatataaatgtcatctaatggctnaaaaaaaaaaaaaagaaaaagaaaaaaaatttaagagggaaaaa

SEQ ID NO: 242246 - DNA, 427 bp, Gossypium hirsutum
  unsure (1)..(427): unsure at all n locations
cccacgcgtccgattcacccatagcaagcaggacttctactgccattgagatacccacacagctggcaggaactcaaggtgacacgaacactgtgcgatatggtgaagagactataaataaacaagttaaatttcttgtccctgtcagcaatagcgagatggattatcctgatgctgagggacagcagattgaaagagaacttccctccaattggcgttcaggaaactcgccttatacacctgcacaggatgatcccagttcctcctatcctccttatctaccatcagtacttgaagagccttcatcttctttttctgaggctgcagaagatgatctgcttncagctatagaaggtctncaaatttcaggggaagcttatccaggaagggagctacaggcgtgtggatattctattaatggaacaac

SEQ ID NO: 242247 - DNA, 325 bp, Gossypium hirsutum
agatttctcatcagatacctgcttttgcttccttgtttctgctactggcttgcagagagaatggagcttatcattagctatgattgacattaatgctctcataatgatactgtcacttaaaaaatatcgaacttgatacttctctttaccattaggaatgcgatcgcattcactccgacatttaccgcatgtagaacatctgcatgcattaccggacttattgacaaagatcttgatatatggtcacaataccatgatgtgcagtgtgaaactgtgactcgcaataaactgtattaactgttttcctgctttacttaatcagtct

SEQ ID NO: 242248 - DNA, 224 bp, Gossypium hirsutum
cccacacgcacagccaagcgggcgatggtgaggggcgcttggggtaatctttggcccattggtgccgccgtcgtgcaggagttaaagacctttaacataatcaatggtggaccagacttacgagctaccagtctgtctgcagattacgatgctagccgaacgcttgatatgccctgtagtgcttgtgcaaccatcaccgatatggaaggaagctgcgatgcgat

SEQ ID NO: 242249 - DNA, 265 bp, Gossypium hirsutum
cccactcggcctgagcgtgggactgctacctgtgagactaacctgggtcacagattaagcatcatatatactggaataacttatgctagactgatgacttgcaaacaagccctgagcgacaaacctgctactcggtaggccattgggttgactctgatccatgactggacattatgaaaaggagtacagtatgggcgactgtgattctcacagaggaaacgaatttacaaccatagaagaaacttgtctggcgagcatctaaaca

SEQ ID NO: 242250 - DNA, 301 bp, Gossypium hirsutum
cccacgcgtccgaaataatttgctcattatataaaaaaaaaaaaaaaaaaaaaaaaaggggaaaataaaaaaaaaaaaaaaaaaaaaaaaaaaaaaaaaaaaaaaaaaaaaaaaaaaaaaaaaaaaaaaaaaaaaaaaaaaaaaaaaaaaaaagggcctccctttaataaaaattcaaagtttatttacccacactttcaacactataaattttttatatgttacccaaatttaatttcattgcccatattttaaaaacgccggaactgaaaaaaccttgaattcaccaaattaactccct

SEQ ID NO: 242251 - DNA, 362 bp, Gossypium hirsutum
acgcccactcctccttccactcatcccttatttcttattttgctttcatttttttcttttcgcgtcttgttcttctacttattgtatgtgcacccacattaaaccactaaaacttcatctcacttgaaactttttttcttcttttcaaagaacaccgacacctatgttttagttcttgtcacataattattttattccaccttgcaagtttcacaaaacctctcctctttatttactttcttcatcttatgaacagaaaactaatttgttggatctaacaacaccacctcttttattttttgaatggtggcgaatggaatttgaaaaatcaacttctcttttatgttttcccaaaacaattt

SEQ ID NO: 242252 - DNA, 424 bp, Gossypium hirsutum
agtcaattagggtgataatgcgttgccttctttttgcttgtttttctgcttgcaagagtaaaaaagaccagcatttggtggatgggacttcctctattgatcaggttagttttgttcttcactttcattgtttatgattcttggtttttttttttttaataaatttataccatccagaaacctgaagccaatgaagcagttcaatcaagtaaagaagattttgggataccctttaatcccattatagtgaaaaagtaagttatggtaatccagtttcagacccttttttgtaaattattatttatgtttatgcatgtgttgatttgcttgtttcatgtcaatttatgtagagagaagctaggggagctattgaataacagtggtcaagagaagttaagttttgatttgtatgtgaagactcatg

SEQ ID NO: 242253 - DNA, 152 bp, Gossypium hirsutum
acggtaatgttatcctattaacctccaacttatactgtattatcatatatgcccgctactctgaatttattaactgtctcttcaacttttacttcgacttcacaaattctaccaaactcaattcttataacattttattattcaacttcaaa

SEQ ID NO: 242254 - DNA, 289 bp, Gossypium hirsutum
gcgaccgccggaatcggtcgacccagcccgttgttgttgaaactcactctataatggcggtcccggtattaccccacgctgtgaaagaactgcatggatcaccattgaactgattttggagaggggaccctttaaccttaattatatagtagagcaccttaaaggctaagtctgaggttgatacacttaccagaacgataatagattgggtctactcttgattttaagacttgtgcggttgatacatggttcagagagcatatcatgcacatgttgtgtaagacttgaa

SEQ ID NO: 242255 - DNA, 291 bp, Gossypium hirsutum
ttttatttgaggaatttgcaccaagccctaccctagtggattggtgagaggttgcggccatgttcagataaaaaaaaaaaaaaaaaaaaaaaaaaaaaaaaaaaaaaaaaaaaaaaaaaaaaaaaaaaaaaaaaaaaaaaaaaaaaaaaaaaaaaaaaaaaaaagggggggccgacataaaaaaaaaaaaattccaaacccatgcaactaactgaaaaatttttaaaaagggaaaaaaaaaaaaaattcattggccggcgttataaaaccggtagccaaggaaaaaccctg

SEQ ID NO: 242256 - DNA, 427 bp, Gossypium hirsutum
aaaataatctaaaattaacagtatccactctttttttgcaccaatgattggctaatcattgtgttggacttaaaaacattatttttttgggttctggcctgtcaatggtcggaactcatgtatttttttaaaaaaattgtgtaatactgaaatacggatgtacgaaaaagaaaaaaacaaaaaaaaatttttggtgctggcctgtcaatggccggcacccagtacacagtacaaaaaaaaattaatttttttttcgtgtcagaatcagataaaaaaatacgaaaaaaataaaaaaaaaatttgggtgctggcctgtcaatggccggcacccagtacacagtacaaagaaatttttttttttcgtgtcagaatcagatagattttttttcgtgtcaatggccggcaacatccgacacgatccggatcg

SEQ ID NO: 242257 - DNA, 298 bp, Gossypium hirsutum
tcgcataggccaatggccatatttaatggggtaccgacagaaggcacaggggcctgtgaaagaactaagctatgccaggtggaaaactgctgagtctaacagtgagactcaagattatggaggtatgatatggcagaaatccagaatgcatatacaaactggtgaacccaagaatccttggatgtcaattactaacctacacaagatatgcgggtttaaaatttacaaacttgatctaagagctgagtaaaccacgtaaaagatataatgcttatgaagttaattttttcccttttag

SEQ ID NO: 242258 - DNA, 192 bp, Gossypium hirsutum
atcttataagattaataattttagaccttataataacttcaacgagatcctggcgcttgtcaattacttcacgctttacacattcgatgaaccttgattagctctgatatactactccattctttagcttcatacccataagactttacacattcggcgtattttgttgaacaaactcacgcatactaactt

SEQ ID NO: 242259 - DNA, 331 bp, Gossypium hirsutum
gcgggattaccccgcttggtttaaacctattaataaaccgggaccttaaggcttaaaaaggatcttgggttattaaaaaaccgggtattaaatacctctattccttctttaaaaaaaacctccagaaggggattggcaaattgaaccggcccgattcaccttttatttaggtgggcatgacttacatggtttaagaaccgatgtgtactgaaatcaaggaggagtggttaagaaaggcccgcgctcaaatagcatgctacaagagatgcaaattcaccattgtgttgagcaaagctgggcgcttgaatcaacaaattttagaatcatgtat

SEQ ID NO: 242260 - DNA, 412 bp, Gossypium hirsutum
accacacgtaataattttaatatccatacatattttttaacacttaccaaaatttactgcggacgtgctcattctgaaatttgtactctaattattataaaattttgttcctacttagaccaaattatcacctactactatccaaattttaaaaataactatctttttcattcattgttcaactaaacttggactctagatgaaaaagttataaaaactgttgatcttaactacaacgtgttcaccttgttttaacaatttactacctactcagttgattaccttttacataataaattccagactttgatcattggaaattttttaaaaaagtggctcctcatattataacttttttaaccctcaatccattacaactttttgaactaatttttcaccctttttttttttt

SEQ ID NO: 242261 - DNA, 282 bp, Gossypium hirsutum
ggagtatgctaaaacactacgggattgaattcaatccgtgttcatgttgtcaaatgtcaaccagaaacaatataccgaaaagttggtagtgccttcctaacttaattatggccacaaagacaaattaacattagcagagtgaaggagacaaacaagattgtaatccaatagcatcaaaacccgtttaatgcagagtcctctcttccacccctccccatacaatcacaagtgatacgagaaagcaaagtctaagatatacaaggaaagaacttgatctactta

SEQ ID NO: 242262 - DNA, 272 bp, Gossypium hirsutum
ataatctatcttgaccaacattaataccatcaacacgatcacgaacggcacgaccgggggaggctttatatcctgtactgcttaacttacggactctctctaaactctcaactatcatgaacgaggaaacgacatcaaaacctcatacttaccatactctcaacaacaacagcaacacagaaaaagacttagtgtaaaggaactaaaagaagccccaaccctgactcacatgatcggtaaattcaataagtgccctaccacactatataaat

SEQ ID NO: 242263 - DNA, 396 bp, Gossypium hirsutum
acgaaccagatagtggatctatgagagaggatcaagattatgatgactggagaggtggacgggagcgtggtagggatgaagaggagcctcaagggagagaacaagaaagagatgagattgaccataaatatagaagtcgtggaagggatgaggaggagcaccatggaagtcgtaggcacagaaaaggggaggaagatgatcgagggaacaaaggtcatgtgcgggatagacaattcgatcattctgagaaaatggcatataatgatactcggtctagtgacagaagatcgtgtagagatgaccgacgttgatggttgtggcatcatactggcttcaagtacaaaatggaaccacttcaaattgtcttcaggcttttcgaatgcgggtgtccttttt

SEQ ID NO: 242264 - DNA, 442 bp, Gossypium hirsutum
  unsure (1)..(442): unsure at all n locations
acgagtttataagctctgcagaccgaaaactcaccagataattctcctttccaaacctggaaagccttgtgctcaatctctgtgaagggaatctgaagaattttctgagcaatgtcctcttgaaagcaatctttccatatcgagattttatcccctctgcccactctccaacacatccctttttggagaagaccctttgcagcccacatacttttccaagtaaaagaaggagcaaaaggatatgacgtctactcccaaaatctgccaacatttctggtaaaatactgctggaaatccatcctaccctgaagccttccttggtcccatatcaaaaattgcttgcttgatttcctcccttgtatatggtgctgcaagattttgattgccctctacttgaatacatcgttcaatccctgtttgttcaaatgntacaccttttttt

SEQ ID NO: 242265 - DNA, 457 bp, Gossypium hirsutum
cccacgcgtccgcccacgcgtccgaacaacccaaagctgcaattcacgaagaaatactccgggggagaaccgaaatcgccggagaaacggccgccttccacggcacgcaagagaataataagcaacgcccgtttagaggagaagtttaggacgacgatgacgaagtcagaagagatatccaagggcgggcacattactaggcatgtttttagaaacaaggtacggagatataaacttttggatgaggtttcaagttaaacacacacacacacaaacacacatataaacatacaatttcttgtctgaaaatgaaactacaagagactgttttatggtttggtttttctttcattttccctcgatccaaacagataaaaaaaagtgtaatttgggagaaagtattattggaatgatggtaaaagaatcatggatatattaccatcgatgtcatgtcata

SEQ ID NO: 242266 - DNA, 447 bp, Gossypium hirsutum
cgatttctttgtctctttctctgtttatccccttttacagatttaaaagggccttttataggcccaaaagaatttaaatcgagggaaaaaaaaacaatattgcttgctgtttttttctctttggactccttgagtccgtttttcaggtgttcgcggagagtttggcgcgcgtggaggctccaagacgtgcgcatgtatgctgaaacctgcagcggttgggggctgttggagcggcacacatgcaaggctgcttatggttctaggttttctttaattgctggactaaggaccattatttttggcctgtacttacgtttattattttttttgggccactgtattgggttgtcaattgggccctattacatatatattataaaattaacccatatttggaaaatttatttttaatagtgttaaatttattattattatctagaatgtaat

SEQ ID NO: 242267 - DNA, 408 bp, Gossypium hirsutum
attgaacctaaaaccgataaaattaattatttagttgatttgatcatcggtctgatttaattattgtttttcagaatattttcttttatcttttgtgatattttttactaatttaaatataaaaataatcataagttattattttcctttttgtcttcaattaaatgaaaaaaatcagagcttcttgggttatctccgagctcaccagacgccgccatcttcaccaactcctcctctaaagcaacgacacccagtacttcaacaaccaccgcaacgccgtcttccgcggccgataaaaccgatagcaaatccagtggaatcaagcttggtccccacttcgtcggttccacggcggcgctactggttgctacagcggccgtgtttttccttgtattcccagctggattt

SEQ ID NO: 242268 - DNA, 346 bp, Gossypium hirsutum
aaaaaagggcgacttttctaattaaaatttacctgtctcttaaccttgtttgtagtagagattagtgaaggaagaaaacggaaaaagaagggaaaaaatttcctttagaaaaaaaaaaaaaaaaaaaaaaaaaaaaaaaaaaaaaaaaaaaaaaaaaaaaaaaaaaaaaaaaaaaaaaaaaaaaaaaaaaaaaaaaaaaaaaaaataaaaaaaaataaaaaaaaaaaaactataacgaaaattaaaaacaatagaataaaaaaaaacaaatggcggtacagagaaaaaacctgctggtaacaaattatacttattgacatttgggggttgagtttttaaaatttta

SEQ ID NO: 242269 - DNA, 348 bp, Gossypium hirsutum
acggtgaaaacactgacttctaaagaatacatgatcgccaggtgggcacctaaggtgaattgttgaataaactggaaacagtaatgtgtttaaagagtcaaaatatgtaataaaatgtaaggaattgtgatgtaataaaatgtttgaatatatgaatgttaatgctacttaataattggtaaacaattaatggaattacaataaaaaaattgaaccatgactaatactttcaatggtgttaaaataaaaacttggacaagtgctgaacctgtgaattgttcgaacattcacttttaagatattaacgagaccaattgttggtctcctattataattgatcagaaatat

SEQ ID NO: 242270 - DNA, 323 bp, Gossypium hirsutum
tcgacccacctcaaattatactcatatggagggatgatttgagattaaaacagcactggggtatgcactttcgccaaattacttaacagagcatcaaggtccaaacaatgttgattcatcatacaaacgataatggcacagatagatgactaacaacataatgatctcaaagcaaatgggtgcaagaactctctctcagtcctctgcggaaaagagattcagtcacccaatgatctaagcatgcttaggaattcgattaagccgtattagcctctctaattgctatttatgactaccctattttgaactatctttgtgatgtg

SEQ ID NO: 242271 - DNA, 293 bp, Gossypium hirsutum
  unsure (1)..(293): unsure at all n locations
gcgaccggccgatcgggggacccacgctcaaacaatgggattggtcaatggattcgaagtagagccgctttggggaacacttactcttgcaatatgtaaaaaatctatcgggagcaaatgtcacctgcaacagcctaccgctggggatatcatggcagtcatgatctaatgaagctttaacangagcatgtccgatcaaatactttatggaattgtgatcagtatatatctgaattactatctttgtttaaggcagatctgtatatacctttgcgggatatgaaccacactac

SEQ ID NO: 242272 - DNA, 374 bp, Gossypium hirsutum
catgaaatggttccaggtcaaatattaatgtgtcattcttaacaagtcccaaaatattttgcgctgtgtaacatttcagaatgagtttatttttagatttgaatacctgatttttgctattttatatatatcagatcttattttcctgaacaaatttattttatgttttaaggtggaatcctaagtttaaaaataaaatattttatattctaaattttttctaatatattttttttttaaaaattcttcttttttaaaatgataattcttatacaatccattttaatccttatacccaataattctttaatttatattatatattttttaataataaattggtgccgcccccttttatataatttcaaattttt

SEQ ID NO: 242273 - DNA, 249 bp, Gossypium hirsutum
agtatgtattgtgggtctccaagaatacattgtattagatgatcagacaatcaacttcgtgatcggtagaataaattcaacaagaatcactcacaccactgtatcgaatgacgaatctttaaagtcacatgccattcttcaacttgccatcaagagatcatcttatggcacctaatcaaaacctcctaaacctgtagggaaactttacttcatagatcttgcttgaaaagagcgtggtgctgatacaac

SEQ ID NO: 242274 - DNA, 220 bp, Gossypium hirsutum
gcgaccgccggaattcggtcgacccaccctcggacctgcgacctggctgtgatattgtggaggtaggaagggggatattttgcctgggaatgctttttatggacgatctatatttacaggtctaaataaaaagtagatgctgactggatgatacaatactgtcttttattgcttgttggcttcctattcgttacatacttgtgttatgttggtgacaatt

SEQ ID NO: 242275 - DNA, 245 bp, Gossypium hirsutum
cacctcgattgttatgaaaacaaactaagttgtttttgtcaagcaagaaacccaaaattatatttgtgaaaagacaaaattattatttctagtgtagtgaattttaataaaaattaaaaagtcaacactttgggattttaaagatcatttggacttgttgcgcgtacccgatattgagaccgcataacttattgacgtgacatgagatttgagtgacgacagtcgaccgattcagcccgattgta

SEQ ID NO: 242276 - DNA, 244 bp, Gossypium hirsutum
atttccttgaaacatccatgtggccacccttgcgaaagccattccttttttaagactgtgggtaatccactttgaaacgaccttgctgtggtagataaattagacgattgaatctaaataaattaggatgaaactgttttaaattgttaaaaaaaaaaaaaaaaaaaaaaaaaataaaaaaaaaaaaaaaaaaaataagacgtaaattttaaaaagaaataaaaaaattgatatggggcatttt

SEQ ID NO: 242277 - DNA, 224 bp, Gossypium hirsutum
ctgaaggctgtaatcaagcgcattgaggatcataatattaaagagcaataccctgctcgtccacttgataaacaatttctcctatcacaaaaagttaaagcacacaccaatcggatcaactgaaactgaaaatcctcaacctaagattgcttgtccctatacctcacaatataggacacgaggcacttactcttcccctgacaaatcattccacactctaacca

SEQ ID NO: 242278 - DNA, 334 bp, Gossypium hirsutum
tcgcccacgcgtccgcccacgcgttcgatgggatataatgggagaagaagcatcgaggactggaaataaaatttttcagctcttcactcacgtttcttttttacttgaacttgtacacacgcacatatcaccttatgcaaaagacactctcattggccttattttaaatcattgaaacgctttcagctgttccatcccctgaacttgcattaaggttgtacctgcaatgtgctgaggtaatcttgagtcttgacttaaaccaactctgcatcacacacataggttcaatagagagttgtaccctgaaaattattttaaatgataacaaatttta

SEQ ID NO: 242279 - DNA, 387 bp, Gossypium hirsutum
cccacgcgtccgctgaaattccttctgaaagtttctctgtatctgacagtgaaagcaggatccaagacaatttgcttggtgaacatggaggaagcaaggatgctaaagagtctactgaaaagctgtctccatctgaggaccctcagttgtcaaattctatcgattcccagtcattattgtgtgacaagttagatggatctgataaagctgtgccatccttgaattctactactcatgcccagtctagttctttatcgaaggttagtgaaaaaccaagtgcttccggtgatctcgcagaaggtccagcttctagcaaagtgactggtgaaacaccttctgtaaacacccgtggacaacctggtagttctaaaccatcaaattcagatt

SEQ ID NO: 242280 - DNA, 103 bp, Gossypium hirsutum
cccacgcgtccgattctttgggaatgaaagtaaactcaatttcctggaacctgtgtttgagactttggatatctgtgataattgctccaatgactgatttatc

SEQ ID NO: 242281 - DNA, 273 bp, Gossypium hirsutum
atgcagtcaacgtcaaccaaatcatcatgcaaaaaaagaggataagccaaagggtactggagctgttgttaaagagtcaggaagcaaggcaaacttacattcatttgagacaacatgcagtactgtagtttactagaaaacgaatggaattgatcctgttgttttactttgatgattgtattccattttctccaaaatccaaataactctacctatttattgaatcgaggaaaaaaaaaaaaaaaaaaaaaaaaaaaaaaaaaaggcgaacta

SEQ ID NO: 242282 - DNA, 235 bp, Gossypium hirsutum
caaactcgcattctttgctgtagtagtagctatatctatagcattcacaaatggataggcagataaacaagcaaggttgctagcagatgtgggtgttgattgctgcctttgtctcccacaatatgttcatcagtaggaccatcactgtgctctgcgatgagaataactactatacaaattctgatcctcatgctggaactcacgcttgaagttcacattgcagaccaccatgttc

SEQ ID NO: 242283 - DNA, 428 bp, Gossypium hirsutum
ctcaggggcgacaatggcaaagataaaggggaaactggcattatcaaacgcgttattcgctctcagaatcgtgttattgtcgaagggaaaaattggtaaaaaagcacataaagcacggaccaggtcatgaaggtggtatattcactgttgaagctccctttcatgcttcaaattttcaagttcttgatcctgttactggccttgcaagataggagttaaatatcttgaaaacggaactaaggtgagagtgtctagaggtataggagcatctggttccataattccccgccctgagatcttgaagatgaggactacgcccagaccaactgttgctggtcccaaagatactccgatgaatcttgtactggagaagacatacgagcctaagtctgggagggcatgcctgaactataacatattgacgacgt

SEQ ID NO: 242284 - DNA, 310 bp, Gossypium hirsutum
cccacgcgtgcggcacttgtgctgctatgactcccaaggttattgtttatggtgacttgtcacaggagacaatcatgaatgaagtgccatctctgcacaaccatgtaatggcagaaggttcagtgctcaaggagtcttttttcccccctttcaatgtgccatcaaaagactcatcagaagcatgttcttcaaatctagctcaaggtgaagacttgcaaccatcatgttgatctgtatgtgagaatcttggcagctctacaacagataattcaactgttactacttgtggcaaagatagtgactgcaatga

SEQ ID NO: 242285 - DNA, 414 bp, Gossypium hirsutum
cttgctttatgaagaacttgccccaatagctatcattaccagcgcatgctgcttattaggggagcgatgaccgtacattgtcttttcacagtctatatgactatactgaaaattcaggaagaggcaagaattaaactgcatgcctatgtcctgtcaaggtctttggcagttgccaatacgatgactatgaagaggaagacatctatagtgaagtgaaagaagaccacgaaaaatatgaatatgatctacggatgaaggcagatcatgcgagtgagaatatgaaatccattaaccaaatgtaatcttcatacaacagttgtgtgataaaagcctctgctgtataggtttgagaacgttatattgccaactactcttggatgattgctacaaatattgatgttctagactataaca

SEQ ID NO: 242286 - DNA, 307 bp, Gossypium hirsutum
ggagtatgtcaggagagacatcgcagacaaagaggagaccttgcatggaaacagagaatccagcagcagtcgcagaaagcgagaaagggatgaaattttagacccgcgtaagagagttgagcaacaaagaattagagacacttttgatcatcattcagttcggcacaaagacgagatttggttgcatagagagagggttgagaggcagcgggagagggatgactggaataggctaaaacaatcgcatgatgaaagtttatcaaaacgggagagagaagatagacgaggtccagtgaggagtggacgt

SEQ ID NO: 242287 - DNA, 384 bp, Gossypium hirsutum
ggatgaacgtaatcctaccagcaaaataattttgccaactgacctgaatgtaccagacgaaaacgatcggaagctagtagatcatagagattctgaggcagtgcaaactgtggattctgatgcgggccgggctgagctgattactgaatgtagtgtggatatgaatattgatagcaaggctgggtcactgcaggttcagaaaagtgttgttgctttggggaacctaaatgcaggaagggatgttactgaacagggtgtttctgttgcagtatcagcatttcttggggcagcagcttatccttgcattcctagtttagattctgtggctgagtccaaacctgctactagtttgtatgaacatgatacaaaatgcagtgcagagac

SEQ ID NO: 242288 - DNA, 270 bp, Gossypium hirsutum
ggattatatttgctgtttttgtttcatctacttaccatcatttcttttgtaagggtgagaattgtgagacgattatatatttatatgtttagtagacctcttgaaatactctacgaagaggttattgaaatgtttgtgtaacgctttgagactgacttgtcatattctgcgttttctggacaaactttaacttgtaggcaacttagggtgtcgttttttgtgcctttgacagctatatgaataagatacttttcttttataccccttttc

SEQ ID NO: 242289 - DNA, 341 bp, Gossypium hirsutum
  unsure (1)..(341): unsure at all n locations
cccacgcgtccgcccacgcgtccgccgaaaaggtactggtaattaactcttttttccaacttctgttatgactgtcaatcaactcatcaactttagcatcgcgcatagaattaatttctgntgattaatgaaaaaaaaataaaaaaaataaaaaaataaaaaacgtcaaaaatgaaagaaattaaggagcttcttttatggaatagaaaacttggaagtgcatacttatggtctctgaaaactcatttggaaaggagcttttctataaggcaggtgttcatacagcattggctgatatatctcctagaggcactaaattggtttcagaaacaaaacgaatg

SEQ ID NO: 242290 - DNA, 366 bp, Gossypium hirsutum
aaaaaaactaaaagaactttggagttctctcctcctctcctctcaaaacttccttcatatgcggcctatagggccgttcgatagtccgacgcaaccgccggtcgacaatggcggtgaccgctgtatacggcggaagagcgcaacccagtttcatcttgcaggtgtcagacgcgtggaaggccggtggttggtgccccaagcagtggtggtggtgcgcgtgatggccaagggcagaggggagtgacagctgaaatcttgatggctaggtttttttgctgctgaaaaatgtttagtttgttgggctaagtgggctttaaggacttagatcatcagggtcattagttttgggtgtgagctattcaatgt

SEQ ID NO: 242291 - DNA, 128 bp, Gossypium hirsutum
aaaaaaaactaaaagaactttggagttctgtcctactctccaaccaaaacttccggcagaggcggactattttaccggtcgactcaccaacgcaacccccgttcgtcaatggccattaccaatatata

SEQ ID NO: 242292 - DNA, 404 bp, Gossypium hirsutum
cacaatctgccatgagtgctgccatgggattgggcctcataccataacccttcctgatggccgaaagtctactgttagattggagcttcaagatttacactcggctttggaagaagcaaaagcagacatagtgggtctttgggcactgaactttctaataaaaaagcatttacttccgactagtctggaaaagtccatgtatgtttcattccttgcaggatgctttcgctcagttcggtttggcttagaggaagctcatggaaaaggtcaagcattacaatttaactggttattggaaaaggaagcctttgttttccatcccaatgagacattttctgtcaactttgacaaggttgaggaaagcaagtgaagttttgagtaggactatactttaccatacaagc

SEQ ID NO: 242293 - DNA, 356 bp, Gossypium hirsutum
  unsure (1)..(356): unsure at all n locations
ttcctttggaggttcttaatctgccttaatcaactaatatgtgctacttgtagttactttattgtactctggacaaggaaaaaatttgcctgacttatgatttagaaattatttaaggcaggcaatcttgcggtgacaatttgggtcnncaaaaaaaaaaaaaaaaaaaaaaaaataaagaaaaaagaaaaaaaaaaacccgttaaaaaactataacaaaaacatagaaacaataaaaaactaaatgtaaaccctacttgaaaaaaaagctaacctaactttagaaaaaaaatgggggggggccgttttaaaggaccaaattttatgtccccgggttggcgagctttaattttttt

SEQ ID NO: 242294 - DNA, 413 bp, Gossypium hirsutum
  unsure (1)..(413): unsure at all n locations
cccacgcgtccgctctttgaaccttacgtccttgagtaaaaaaaccttgtccaagtgtcacggccaaagtgcaaagcccgtgatcatggcataagatgtgtcccatggaggtctatcgattagatggagaacatttagcccacgagaactggcccgattcaaggaattgttggagaagcctgtcagattgaagcctgattggctcgataatgaagacatggtaacttaggctaattttggtaattaatcttagaagatatagggaatcatatcttgtaaaaattagattagatttgatatggcatatcttataaattcttaaaattaggggatatggttaatctcgtccggcgatgtaaatgtttcttgaccgncggtttttgggagctcaactataaatagagagtctcccc

SEQ ID NO: 242295 - DNA, 218 bp, Gossypium hirsutum
ttcaaaaggtcacagaatctaacctctgttctagagggaaagaacactgtggggaggtcgggaccatctaaccacgcttgatctcaatacttttgacttggaccttattcaccgccctgatcaaaattgagcaggaaccttttaatagccttaacttacaagaggagagtgctggcatttttatggtatgaatcctgagaatctctctcattatgtta

SEQ ID NO: 242296 - DNA, 310 bp, Gossypium hirsutum
cgacggtggttcggcgacccacgcgtcgtttttttaacaatgatggacactgctaaacactttacataggacagggttggagcttgattggttgggatatttgaaaggatttgtaaatgatttagataatgtgaaatgcaaaattagggttgatggatttaagtattaggctgttaaggctagaaattggatgatattgttgagaaaattagtattgtagatactattagggataatgcaaattgtaagatggggattctaaataaaaagattattgtaatggatggaagaatttgctataatgagtttt

SEQ ID NO: 242297 - DNA, 393 bp, Gossypium hirsutum
tgcggttagattctggaattcaaagaaaggagaggtattacgtatttccaaacttttatatatagtgtttactatatacataataataatttcattatgtaggaccgtgagcgagttggaataagcagcaagcaaaaacaaaaattcacgcacacggcaggggttgagaagttttgcttctgtagctgaggccgaggtattataattttattaattctttcaaatattaataactttctaatattaaataatatttttactactatattgtaagaagtcaaatctggacaaaaagttggacgccttcagctttttgagattacacataggaagaaagatggatctcctatgacatctgaagttggagaaattatggagaaactaaaggagaag

SEQ ID NO: 242298 - DNA, 428 bp, Gossypium hirsutum
cccacgcgtacgggcttatcaatatgagatacccgttttagccaaagtgctctctgatggctctgaggaaatactacctagattatctcctcgacttggggcggaacttgtccataagaagatagcagctggttttaaacagtaagagtgctgtaagtctttgttatgtgatggaatggataccgaagttcgtgtacgactacaagggaatatgatttttgataaacatcatgtcattgttagtatgctctgactaggttttatctacccggcatcactgaccctggggctttactacgatgaacaaaagattcttttcatatctttgcgtatcattaattccatggaaacaaacgcaggccaccttaaggtcttgaaactgatgaaatgaaagatagcattaatcatggttctttaatgtcatattc

SEQ ID NO: 242299 - DNA, 118 bp, Gossypium hirsutum
ttttttaaatgcaagaaactggaaactatcaacttgatatttggatgttgccaaataagtttgaaatcatcatctgatattgttcaaaattttaatctacattttgatgctttaattt

SEQ ID NO: 242300 - DNA, 400 bp, Gossypium hirsutum
cggacgcgtggggctctggcacacttgttcatggcaaccaacatgataatagcagtctcagcattggccgtgtaacagccggtgtcgagtttagtcggccactcaggccaaaatggagtggaacagctgggctcttttttcagcgcgcaggtgctcatgatgaaaaaaaaaatccacttattaaagacttctatggcagcccactcacggcaagtggtaagctatatgacgatatgttactggccaaagttgagtgtgtctatcctggttctggtaacaaaggatcctcgatgtttataattaacatggaacaaggacttcctgtcattcctgattggctgtacttcaacagagtgaatgctcgtgtgagtaaaagtgttaaacttggtcctgctcgtct

SEQ ID NO: 242301 - DNA, 415 bp, Gossypium hirsutum
ggcggtccagatcaatttctgtagaaggcaaggttcgctccagcagtgaaatcgatgacgtgagaaaagatgaattgagacaccgtgattgaaggcgctcgcgatcgcgatcaggatctgctgaaggtaggcattacaccaaagagaggaatgagagaagcagagataagaaatctaagcatcgggatagaaggcggtcgaggtcaagatctgctgatggcaagcatcgggatagaaagaggtcaaggtcaagatcttttgatggcaagcatcacagaggaagcaggaggtcccccagaaattcagatgaaactagattaaaacaccgacggcgctccaggtcaaagtctactgatggaaaacatcgatccattgataaagtagatgaaagatcaaaacgtcatgacaaaaagca

SEQ ID NO: 242302 - DNA, 436 bp, Gossypium hirsutum
gaatttggttatatttgcagtaatcttaatgtttacaactcgttagtttctaactcagtgttgtgcctgaaccttaactcatatgtttgtttaatatgataaaagtagatgtgtggttgcagatacagagatggtggcggaggcaaggggacctatcatttcgtttagatgccatagaagtgaagactgtggaagtgtctgcgccaaatgccccacctgcacttgcctctttcacctttgtacttgccctaccgaccctccatggccattatcataatctcatttacttctcagcaataaatcactctgatcctttgtctttgcaacaagctttcagatcttataataataacaactcatgggcattggttctggtctttttctttttcttcttttaaattttcttttaccctacatgtttcttattttctggtta

SEQ ID NO: 242303 - DNA, 296 bp, Gossypium hirsutum
tggtatttcaactctcatcggattcggattaatggttgtttctaattttatactactagactgatagctccaaaaaaaaaaaaaaaaaaaaaaaaaaaaaaaaaaaaaaaaaaaaaaaaaaaaaaaaaaaaaaaaaaaaaaaaaaaaaaaaaaaaaaaaaggaaaaaaaaaaaaaaaaaaaaaaaaaaaaataaaggggaggtaaaatgaaaaaaaaaaaaaaagggggggaaccggtttaaatgggaaaactcctatggctctgccatagaaaaaaaattctctttataaggctc

SEQ ID NO: 242304 - DNA, 404 bp, Gossypium hirsutum
ccacttgagaataggtactcattatttatccaatttcccgttttgatcatatttaaagctaatattgaaaggaatcatttaatttaattcatctatattattgcccaagttgaaaaatgaaatatcatttttcccttccaatttaaatgctaatcacagacagcctgcgacagtgagtttttattgcataaccttcattttcaattttttaaaattttttattgcataacctctctctcccccattctcagtttctattaatctttttaattttttttttgtgagttcactcaagaaaggttagtaaaattttgttcagtgttacttgtgttgcaaatgcttacatgttgagacatggattttattgttgtatgttgagtttatatgtaaaaggtactgaatgc

SEQ ID NO: 242305 - DNA, 393 bp, Gossypium hirsutum
cccacgcgtccgaaaaaaactgaagtttcttgaatcacaagctgaattctgtagggactggtgaaggtttgtgtttgtatacgtttgtatattgaagacaacgggatgtgcacgcttgtttttggaataggagaaccaactcaatccagcgccttcctccttgtcagtctttttgaatctggttgatggggatggttcaaatgaataataacggtcccgtggctggtggatgggttgaactgaatacacatatctgtgatgagaacacgaacataagggatggagtcacgggtgaggggcagggcctctctgacgaagatgagtcacgtattaatgaggatgtggaaaacagaaataatgggaagaaagcggtggttcagcttcgtggtcctt

SEQ ID NO: 242306 - DNA, 419 bp, Gossypium hirsutum
cccacgcgtccgcccacgcgtccgataacacaaaggcgagagaatacattacaagaccgaggaggaaaaaaaaaaaagataaataaataataggagagccaaataaaaagagggatttgatagaattttcgttttcatttttattttataatttctattattatttttctgtttgtttggcgcaaagatttctatttacgcaacagctctcaagttggtcgtcgttttctctcgatctgttcttcacgttcgtcgatttatagctttctctcacgatttcctcgccctcgattattgttttttctcggtagattcttttgtctttttaatctcttctttaattcaaaacattgtttcttttttttttttaattccggggggttcaaaccctagaaaccgtgtggatttcgaatgctttt

SEQ ID NO: 242307 - DNA, 387 bp, Gossypium hirsutum
cccacgcgtccgtgcttatgggagcccaactaaaacacaaaaaattagttttattttagttttagatatgcgttttcttgtctttagttcagtttagtttcttagaaaattactgaatccaacttttataaaaaaaaaaaaaaaaaaaaaaaaaaaaaaaaaaaaaaaaaaaaaaaaaaaaaaaaaaaaaaaaaaaaaaaaaaaaaaaaaaaaaaaaaaaaaaaaaaaaaaaaaaaaaaaaaaaaaaaaaaaaaaaaaaaaaaaaagggggggggcctttttaagggaccaaattttttggccgggggttgggaaggtaaaattttttttttggggcccccaaaataaattaccggggccgggttttaaaaacggggggaggggaaa

SEQ ID NO: 242308 - DNA, 441 bp, Gossypium hirsutum
cttgaatcttttcgttgaactgaatcatagcctacaatgtaagaatcaggccagtccgaatgaacccatccaaatcagtcatccgtttgggaagcctctctcatctcttctgcaaccaccatgtcccttactgccgacggggaatcctccatccaaaaggtattttccgatctgcaactccccttccttgcaataaagtgtgccacccgattagcttcccttcttacatgtttaaatctaagttgatgaaaaaatcgccccatcgatttgatatctaagatgacagaatccaagtctgctcgaccaaacccttcctggttaattttctcaattaccgttctcgaatctccttcaacctccactgtggtaaaccccgtctctttggcaaaaagaagcccttgaaagcaagcaacagcttctgccatgaatgcatctgagaca

SEQ ID NO: 242309 - DNA, 388 bp, Gossypium hirsutum
gattttcctaagccagactaatggaagcacggtccaagcctctcaatccccaaacacttccaatgctcctgttttgagaaaaagccattctactttatctcaagctgaacgagctcagaggaaaaggatgaccgatcaggcatatcgaggaagagttaagttacacaaagagcaaatgaaatcaaatttggagacccttactggagaaaacgaatcactaaagaaagagaatcaatccttaaaagcggctaatgcttccatgaaccaaaccttgactgatcaagcaaaagagattgatcagttgaggagtgatcttttgcagctgaagaaagaccatgagaagcaaaatattcttttggaaacactttcagggcttctatctgatcca

SEQ ID NO: 242310 - DNA, 394 bp, Gossypium hirsutum
ctaaattgaaagagccatatcctcccaaaatcttcacttctcacctcctctcctctcgccggcccgcctctctctcatggcgttctttggctctcaccagcgctgtcatcaactccactacagattctattttttgggagtctaagaacgcaaattaggtgttcattgctacattgtcaagaatgggtttcggctttcatacgtattggacatagggattaggtgcctgatgttcttttgtggcttttacccggatggtttactgctttgttcacgtgctctttggtgttttgatttatagtgctatattagatttctgttgtttaatttttgagtttgggaattaggtgtagattttggagttatccatgggccttttcttttcatttacttt

SEQ ID NO: 242311 - DNA, 181 bp, Gossypium hirsutum
aagtatacctgtttctcttgtaaatgatgttgatgatgaaaagtggccatcaaatttcacatattatcctggtctaaagtactcgaaacctggtaattcaaatggatcttcaactgggtgggggtggcatgggggatggcttacttgaaacttcaactggccttgcattcaaagaaatggg

SEQ ID NO: 242312 - DNA, 388 bp, Gossypium hirsutum
  unsure (1)..(388): unsure at all n locations
cggaaaannngggaggacccacgcgacccacgcgttcgtccacgcgtccgattttaagtttttggattttctacgctaaaagaaaagaaggggtggtggacttacacccaagacaaggatttgatattggaaactatggaagaaatctccaaacaattctctaaaccagatgtgcgagtgatccatacaaaagtttccttatgtgtgtggcggtgtatctgataaactttatgagcagtgtttgctaaaagctgaaactaaataaaaagttattttgtcaattataccggctatctatgaaaacttgatcgagaacctatatatgtgtttaggttgtaaaacattggtaatgttgccgcactttccctaaaagaaaggtctgattgtt

SEQ ID NO: 242313 - DNA, 363 bp, Gossypium hirsutum
ctcatttttcccagcttccatttgctcaagaaaaaaagagaaaagctcgaattttggttgaaacatatagaaagcaaagcatgatgattttatgaaagtggtattccaacgtagaaaagcatagaatctctcttttaaaagattcattcactcaccaaaaaaaaaagaaaaaaaaaagaaagttttctcttcggttttctctttactaagataagatagaatgtgaagaagaagaagaagaagaagaagaagcaaagctgtataagttaagggtttttcaaagatttttgttgccataatgtgaacctgatttccatccacctaggattgccaaattaggcaaccttaactacaagctaaatc

SEQ ID NO: 242314 - DNA, 366 bp, Gossypium hirsutum
gagaatttaagaggtgcagctggtggtggtgctggaggagggcttggtggtggtttaggaggaggagccgctggtggtgctggaggagggcttggcggaggtgccggtttaggacgtggagctgatggtggtgctggagcagctggaggtcttaaggttagggttcaaagtgggcttgggcctatattgatatgggtttggcttggcattacatggtagataatttaagactctctattactggctggcttgggtgatctctatgttgatcgaggatacaactgatcgtctgcaattattcaaaggtggatgagatatcgtctttttggggagactcttgaagagcgagaatctggctctaccatg

SEQ ID NO: 242315 - DNA, 420 bp, Gossypium hirsutum
cccacgcgtccgattcgagattgttcataagtgattcgcatttgaaaatcgtcggtaatttaaaatgattggcatttatatttctctttatccttgaagactggcttaatgcaaatatatgcaatttttatagactcacggttgtctatggagaatgacaaactttgttttcaattgtttcttggctaatctagacgcacagaaatgattttgtttttacagtgctaccttgattgccactagtatagcttggactagaagctttactaatactaaaactgcagttagtcttcacagcaacatacgtacgaaaaagtgcctggcaacccaacctatctaaaagtgcagttagtcttcacagcaacatacatacgaaaagtgtctggcaaccaccaccgataggttgggtgaaaattaaca

SEQ ID NO: 242316 - DNA, 104 bp, Gossypium hirsutum
caatgttaaagtgaagtatgttttggatatgaaaggtgcaagttgcgtcatccactacatgagtgggaaggacaccgataaaatggtgatataattttattagg

SEQ ID NO: 242317 - DNA, 385 bp, Gossypium hirsutum
attcagcttcactctcctttacttttaagttcttttctttgcttgatttcattttgtagccaaaaaaaacatggggttctcactgaaacttcagtattgcctagtttctgtcatggtgctattacctgcagtgtgttactctcaggactatttcgtcaagtccagagcaacttactacggcagtcctgactgcttaggcactccaagtacatacatttctcctataattcatatatgcttgtttgttttgtcattaaatatttgcatatatgagctaacaatcacgtgaatctaggtggagcttgcggatttggagaatatggaagaagtgtcaatgatgccaatgtcgccggggtttccaggctctacaagaatggaactggct

SEQ ID NO: 242318 - DNA, 420 bp, Gossypium hirsutum
ggcagggattttatcaagtttgctgcttacaattttggtaaagatcatcaagatattgcaaaatggttgccgggaagtcacttgaaaaaagtggtgctctatggttgcgcttcccttgataaaaataatgtcttcgctgctaagagattgcgcaagttctttaaaattcaagaaaacaccgtatgcagtcgatgcatgttaaaggattcatgtgggtatgctaataagagtgtatggggaatcggtaccaacaatttgctcctggttgatgtaatgaaagttatcactttgtatgctttagatttagtgcctgcaaaactcaccgttccggatgaggtaaaagattcaatcaaccaattgttgaagttggttataaaggtaagtcaacccccatgccaagacttctaaaatgtttctaca

SEQ ID NO: 242319 - DNA, 313 bp, Gossypium hirsutum
cagatttattaacaggcagaactgcagctactttggagatgttcccttcttggcctatgagatatcagcaaacccccggaagttcaaaatcaggaggggaaagtacagattcaggctcagctttgaacactatctcaagcaaaactgagaaccagtttgaaccagactcccccatcagtaaaaaggcatcatcttcatatcatcaggctcttgaccagcagaatctacagcaacaacaacaacaacaagagatggcaagtgatccttcaagaacaggaacatcactgaatcaatcagctcccattgtcaaact

SEQ ID NO: 242320 - DNA, 310 bp, Gossypium hirsutum
atccgtcagggtacattttcccagtatgattatggagtcctgaaaaacttactgatatggggacaggttaaaccgccagcatttgatcttaacaacataccaaagtcattgccaatatggatgagttatggagggaatgatgccttagcagatgcaacggatgtgcagcgcactcttgaggaattatcgtctaaaccagaattgctttatctcgataattatggtcacatagaccttcttttgagccttaaaaccaatagagacatatattaccctatgattggggtttttaaggccgtgggaaaatcaa

SEQ ID NO: 242321 - DNA, 399 bp, Gossypium hirsutum
gaaaaaagttctggtttgatcaaacgacttctttctcgtagtatttaactacgccttcacttgtcttgaatcatgacatatgtgaaatatgtgattatatgctgacatatgatcgaaaagatgtgtagaatacttccgttatcaggtgaaatttgtctgcgacatacagggatacaagtctcatttattgacttcacactctgtcattccttctatatttttcttttatccatttccagaataacgtttcgttgatatcattattttccattaatgaaatgtattctgatgacatcttgttggtttaataccagctctccgcacagactcacctgaagaatgagatgcacgtttggtcatggaaagttcgaactggaaaggattttaatttttttttta

SEQ ID NO: 242322 - DNA, 430 bp, Gossypium hirsutum
agacttttcattttcacttttcattttttctctcctcctctcctttagccgcccctcctccttgttccttcgcctttctatcatttttcttccttttcaccaccttggacaccactttatcctcatttctcctccactccaccaccatacaaggatgttgcaccaccatcgccatcgtatcgtcgcaccgctgccattggccaccacaaaagttccccatttttctttttttctcctttactcggccaaatccccctttttagtcggttcatcatgtgaaattgtgaagcccctatccttttgattttattaaatcctggatccgtaccccactggttggaagagtgtgtttgttagtcaattgagattctagattcgatctcctcctctagagtggaaacggggttgctgctatgggagttgcgaaatc

SEQ ID NO: 242323 - DNA, 412 bp, Gossypium hirsutum
gttttccaagtattcgtttcgggtactttagaagcttgctatagatttttcactcttgttaaagaatacaggagatgctcattttgctatactgtttgcaggtattcctagaatgtggtttccttatctgttcataatttgcagaatttatgaagttgaacccgaaaaatcggaaacttgcaagaggttgtgaaagatgggagcattcagttcaaaaaatcagcagataagttcttaaaatcgaattttaggtttcatgatgggatcatattgaactgggaaatgtaatcgcttgagcatttgtatcatttgggacagcttctgcacagttttattatggctgaaatttgctattatttggcatcacttcatgtatctgttcttttgtcaagcctaataaaagtttttggtc

SEQ ID NO: 242324 - DNA, 448 bp, Gossypium hirsutum
atctccttatcaatcaattctacttctttgtcgccttggcaatgttcatatgtttccgggtggtctgagtccgtattcccagaaccatgccctgaacttatgaattcgagtacttcatcatgcggaatcctaatgctcgagctgcaattctataatataattctttgaaaaaaaaagaatctgggatttttcgacctattcagatttttttttgcaattatctctttttggcgaggtggaaaatgcatatatggttgatagcttcaattctttcttcttgaaaatttttgtagtgatggagtttaaacatacaaaaaaaaaaaaaagaaaaagaaaagtattgggtatattttaagggtaaatggttaatggctttttaattaatgttttataaaattacgattgtttggaaacctctttgtaaaaataattataataaattttgggt

SEQ ID NO: 242325 - DNA, 416 bp, Gossypium hirsutum
gccacgcgtacgcttctattaaaaatttcatccattttcactgttaaaacccggtctctgtgcatgagcatgccgtacacgcagcacaccatgtcattgtttggttattccatcaggcacgccataaatgaattttttacagaatggactaatttgcgcatcttttgagtagagagagcaaaatgcaatcttgtacagggggtctctatgatatttttaccaacttttgcaagttgtgaatgattcttactgacatctttcctccagactttgataaattttgcatacggcggctgcgttattgggattcctcttctcttcttaatggcaatcttgaccgtgatgcactgcgggaagatggtttggaaaaaatttagtgaaagccaaaggcaggttgatttataacaaccacctac

SEQ ID NO: 242326 - DNA, 364 bp, Gossypium hirsutum
cgcaaaagaataatagtatattaacaattagacttgtaaagcttttgcagtttttatgatgtatataagattagggttgtgaaagccccaaggcagtggcagggaattatgaaacagtcgctcgcctctgtgagcttaagccaatcatttttaaaatgttcatttagtgatttcggtttttatcttaaaaaaaaaaaaaaaaaaaaaaaaaaaaaaaaaaaaaaaaaaaaaaaaaaaaaaaaaaaaaaaaaataaaaaaaaaaaaaaaaaaaaaaaaaaaaaaaaaaaaaaaaaaaaaaaaaagggggggccgttttaaaggatccaactttacttccccgggcttgcaaagatataatttttt

SEQ ID NO: 242327 - DNA, 237 bp, Gossypium hirsutum
cgatcatactgtgttttgaaagtacatagtgttttaccttcaacttacactatctgcagaagataaaagtggtgctggtatcagaattcatgataacaatggaggagaggaatctgcggctgtgcgatttgaaggggaagtgtcactgggagatttaatggggctccgacttcttgggaagacattgcggcctgcagcgggcgatgattagagaattgttagtgagaccaatatacc

SEQ ID NO: 242328 - DNA, 419 bp, Gossypium hirsutum
tttctttcttattatatcctaaatcaccaccgtattccaacctccactgatcttttcccaaatggatcaccttgatctgatttccatggttctggagggtgcattggaagcgcagaaagaggagacactgcggttggaagagtcacatagggctgcttttgttgcgttagttgaaaaggagagggagcgttccatgcttatcacgaaaaaccgcgacttggtagctaatgaagcgcccaaggcaaaatttcttgaggacttcatggttttcattgaggctattgaaatgaagatctggagactgtccagagtttcgatgagaaagctatgatgaatactattttgtcaatgatgaactgtgacggcggcgacaacggcggacttgaccgcttttacggagacgatgttttcaaaatcgg

SEQ ID NO: 242329 - DNA, 458 bp, Gossypium hirsutum
catgtctgtagtttgtcgcttgagctcaaggagtccaaaaaggacattgaagaagaaacctcagcatcatgtgtagcagaaacagaagaaacaaacataaaggaaactgaagctcatgctgaagtcgaaaagggaaagaacgaaataaataatgttgttgtcgtcaaagagaacagcttagcaagaagtgaacatgaagagagtggtgtatgcagtgctgaaattgatgtgaaatcaggggactctcacctaacacacgagaaggacatggagaaagaagaagatacaatgcaacaaagggaagacttcaaagttcaagagaagcagttccaaccttgaagaaaatggcgcctcttccgccattctgttgctcgcttgcattgcctgcactccctcttattgatcaacaattacatatatatatatattaattaaaaatatatacatatatattatat

SEQ ID NO: 242330 - DNA, 397 bp, Gossypium hirsutum
caaagtaccacctctggatgcaagaccctgctctccttcaagccaccggatcagagcccctctccctccaacaggaatacgatatgcagctctcctggaaccaagaccctctcagttcttctctctctcttttacttccttttctgattgtttataccaatttctcaattgggttttcttcttctttaatttaatgattaagcttggttttcaacagagaaaactttcattgttttggataaggagatggtcggggaaaagtttgttcatggaaatcctcatgtggaaggtcacctcatctactacctttgtcttaattgcacagaatttagtgaaaccctttgatttcttcagcgtattggtttggactgatatgggagtgatggtaaacgatgat

SEQ ID NO: 242331 - DNA, 211 bp, Gossypium hirsutum
caactttgccgtagtttagattcttcgggttgtaaccaccgtcgaatgtgtctttaccaagtatcctacggcgacggttcggttacgtacggtgatttctcgaccgaaacgttgacgtttagaatgaaccgaattggacgcgtggcgctcggctgtggtcacaacaaccaaagcttgttcgtcggtgccgccggtttattaagtctcggtc

SEQ ID NO: 242332 - DNA, 486 bp, Gossypium hirsutum
  unsure (1)..(486): unsure at all n locations
cacgacgtcacggttcacggtggtcccttaagttggtttaccatgggattctcatngcgtgtgcatgnnacgatgatgtagtgcgacgccaagtggcagcctaaagctcgcgcattctacgtggctagcgacctgttggtgaacccnatcttganntcctcgtgcctttgtccttacngnntacaaaanncggcggtacccacccgctntgtcttgcattgctgcagttggggtaaaaagcacttcttactggcgaggttcaagactctccctcggactctgctcaaaacgtgtgctaagtgctatcannaatcggcggtgggaacggaattccgtacanctcagcaataacctcaatcttcgcagcccggccttaacctgctaaatggtggtctccaacttcccttttacagcatcagcccctccacttgactgcaacaaanggtgcagtgagggttgatgaatgatgatatgtgaagggagtgg

SEQ ID NO: 242333 - DNA, 273 bp, Gossypium hirsutum
aatgcacaatccatcaatgcatataccctattacgattgccaggttgaatcaaagatgtgaaccagggtagtcacctcaaagagcaatgctcattgcttgaaaccattgtggagctgctgtcaaatgacaaaggaatggtatcttatatcttgtggcttacattattaataacatgcatttgtttgcattgtctataaacaggatagaaataactgagatgatctataattacctactaacttccaaggacaacaaccaatgatctattaatt

SEQ ID NO: 242334 - DNA, 240 bp, Gossypium hirsutum
aagggggaacccgataaatgttgcacctgtggatgttcatataattgcactcctggcggatgagatgtaccctcttctcgaaattcatgaagctccggaattcccaaaatggaccatatgccacagatacaacgaattctatacatttgactactacatcagatcccactggtatgacagatacgacaagttccaaaaatctatactaatgctcaggatcaccggcatgacatagtggag

SEQ ID NO: 242335 - DNA, 350 bp, Gossypium hirsutum
ctttttgttgcgcatttcttgattattgtgagggagtctccttctattataaccttcgaccattcctgttccactcctacttggaccgcttttctacgcacgattacttcagctgcaaatgtgaaagttaccccatgatggatctttgagcaagaaagtaagacaaccccttcttcgtttctaacaacaatccctgaggcagattggtggtgattcacatcatatgcaccatcaaaattaatttttacgaactcactagatcgcccaaagtccacaatagaagaggaggctttgataggaagtaagctgatcaaaaatccaggacattcgcgaaaaatatggttaattgt

SEQ ID NO: 242336 - DNA, 319 bp, Gossypium hirsutum
  unsure (1)..(319): unsure at all n locations
tgcagatggagcatatggttgagcagctttccaaacttgaaagaaaggtatatatgtatatgtacatgtacatgtatatgtatatgtattattaactttgtgttttctagatatcatcatgcttgtattctttgtatacacaggaagagtagagcaggaaattagtgtgttttaaatgtcataaaatttgatacaatagttaaatattatatgattagacatcgatgaanaaaaaaaaaaaaaaaaaaaaaaaataaaaaaaaaaataaataaaaatgataaaaaaaaataatattaaaaaaacttctatcaagaatgg

SEQ ID NO: 242337 - DNA, 270 bp, Gossypium hirsutum
cccacgcgtccgcccacgcgtccgtaaatagatatgaccatccgaatatgcagaaaaagtttaaaagaaatttaactgatgttcattctgttagaataaaaaaaaaaaaaaaaaaaaaaaaaaaaaaaaaggtcggacgatctaaaagatccaaaactaaataacacgagcatgcaaaataatagataataatataaagaaaaataagggcaattgattgagaggatctatgacaacggcgggactgagaaaaccatatagttacccaat

SEQ ID NO: 242338 - DNA, 231 bp, Gossypium hirsutum
tgaaggttacctgataaatagcactagtttttcgaccagaagggctcttgagagccccccggtcaggagttttgtagtcaagaacctcatcagcccccaggctcctgactaaatctatgttacgagccccacaagtggctgtaatgtgtgcatttgcaaactttaggaggtgcactagctgagtatgctgtcgctaatgaaggttccacagtttaaaggccatcagaggta

SEQ ID NO: 242339 - DNA, 330 bp, Gossypium hirsutum
ggcctagggtgtcaacgacggtgaaaggatgccattttggtgtaaggccgaaggcaaagtcggcccttgggcatcgtgcataccgagggcacacatggaggggggtacggcgtgagggtgacctaaggttttcattttcctaaacatgagtttaggtcttcggctaacgggcctaatctgtaataggttagtggtttaagttgatgggtttgtaattgggttttgtaaatatgagccaatttaattttgtaactggacatttaatgatcttgagactttatttggttattttttagtttctaatgggccgggcaaaataaggctcttaca

SEQ ID NO: 242340 - DNA, 453 bp, Gossypium hirsutum
gcaaaatgaatcctgagcgatctggatgtatgttaaatcaccaggattgtactttcagaagcaaggaagttgactttgctgattcaaagagacacaaattgggtggtgagaatttgtggaagaactttgacatgggaaagagacacaaaggaaatggagatcgcatgcaggaaaagtttatggcttttcccaaccaaataaagaccccaagtgattttaatgttgaaaattcagagaagacaaataaacctagtgtttcaaagaggcttaagtatgatcttccccttccattgacttacaagcgaagaaagcctcaagccagaaacacatcagacctcaccaattcactcagaacaggtatcgatataagaactagtagttcaaaagaatcaaaccaacctttaaggaacaaggtaaatgcattcaagtttaaaattcttgggttctatgaac

SEQ ID NO: 242341 - DNA, 421 bp, Gossypium hirsutum
  unsure (1)..(421): unsure at all n locations
agcgaatggaagacgtgttggagcatgcatttgatgggggatgtccctggagacaacaccaacactcaaaattataacaaagctcttgaactcaaaggcattgatctatctaacatgtctcccgcgacaggtgattctaatctaacatgttgccttttggaacatgtaaatgaggttagctgttctggtccagcaaagagaatttaacccttttgcaaatggggccttcttatataggtgtgtgtttacaagtttcccaggagcggaaaatcactgattgccatatgcatttacttccgaagcaaggtatcctattccttctaattcttcttcttcttttgtgttttctttctaaaatatgtataatttgtagccacgcanagtatatttaactctcaattaagaattcaattacgaaatt

SEQ ID NO: 242342 - DNA, 396 bp, Gossypium hirsutum
attggatttggcattgcatagtaaatttgagttgtcccatacctggaagaatggcagtgtttatttcactgggtattatgttgatacgcctcaaggtagtggttctgagtctgaagaggagcttcttgaacccatagttaatcccataaagcctcatgctacaatatctgatcctaccacgtcaaaacaggttaagattgtggaaccaaaaaaagcagaggatagctgtgatgacgaggatgaagatgatacttctaccgaggatgaaatgtccagtgaggatcaggaacctggcatgttagtaaatggtgagaatgaaagtgacaatgatactgacagtgatgaggatgatagtgaagaagaaagttcagatgaggatcctgaaacacctgaaac

SEQ ID NO: 242343 - DNA, 395 bp, Gossypium hirsutum
ctgaaaactatacaaactggtcgcatttacttcgctgaccattgagaggataaatcggtggtacagacgggacagtcgacgaaacatttctggactcacttccattgacgccttttgcacgagacaaggtcatatttgacaacgtatatttggatggtggatcgattgcaagaaattgtatgactgaaaagaggtagatttgaatcacgcgacctttttataatgaaatcatgtgggggggtgttgcgtaaggataggctaaatgacaagtgtatggagctgggtgctattttggaacctgaaaggcctgccaaaacagacaagtctgctattttggtggatgcttgtcgaatggtgacccaactacgagatgtagcccataatatgaaagattc

SEQ ID NO: 242344 - DNA, 394 bp, Gossypium hirsutum
ctaaaaccttaagtggggaatttgctgaagggcaacggaaacttttagcaattgcagctgctggagctaactcaaatgctgcaacttcattttcttcccaacttagcaatggacctttaggtggtctgcatgacaaggttgttgtgcccatggatcccacaaaagagctatcaaagttgttatctgaaggcaaatacgaagaagcgttcacaattgcgctgcaaagaagtgacctctctattgtttcttggttatgttcacaggttgatctacgtacgattctgtcaactgcaccttttcctttgagccaaggagtgctgctctccctcttgcagcagttggcatgcgacatcaacaaggacactccacgaaaactcacatggatggtggacgt

SEQ ID NO: 242345 - DNA, 270 bp, Gossypium hirsutum
aacccttcggattaagcttccaaacacccaagatttccttgtttttgcgagagccaaaaatgcttggaccgccactacaagcttgcgcgacgattgctctccacacactattctattattacaaaaccactccccgtggaggttgggtctaccaattttatacaatatgcacggatgatatgaaccaccacgaccaattgcagaggactttattgctgcaaacaaaccatacaacgagtgatcagcctactctagcaatacaccttgcac

SEQ ID NO: 242346 - DNA, 391 bp, Gossypium hirsutum
agcaaatgaagggcccccaaaaatggagagagtgcctgcgtttacccaactgttcaagagaggagaacttatatagattaaccatttgttactgccttattgatcagctcatatttagctctttagcacaaagatagaaggctatgcaatggagtctacctctcaggaaatgaatacgactaaccaacccggtcacaaaccttcgttctcggctttgatcgatgctatcgcattgcaagaacaatgttttgaacagtcgctagctagtcaacagctttgggccaaacagcttgctaatgaacaggaggcaaagataaaagcaactgttcagaaaatcacagtggatgctgctgaagttgatgaaattcttaaagggaaaaacattcttaca

SEQ ID NO: 242347 - DNA, 426 bp, Gossypium hirsutum
accactcttctttcgctgaaaacttttagaacattagagagagagagagagaaggcaaatggcagcgtcgggagtagcagcaccgacgagaacggaggttttacagctttaccgatcgcttctgcgagtggcgcgtcagttctgcgactacaacataagggagtactcaaaacggcgaaccattgacgcgtttcgagacaacaagaacctaaccgacccttcccagctctccgccgctttctccgacggtaaagctcagctggaagtcgctaaaagacaagctttggtttattcactctatgctccaaaggtcaaaagcataatggatattaagccttcttagaaaatatttatcattccattttgacttgttcccttagagaaataaaaaggagtaaactgcgattcattgagataaatattgaa

SEQ ID NO: 242348 - DNA, 426 bp, Gossypium hirsutum
cccacgcgtccgtgagaacatcttaaaagatcgcggagcgagtaaccttgtgaatgttctgattgggatggacattcccgtacgagagaataaccaggcagtcggtgacttcaaccattcagacatcgggattgatgatgaagttccttttgatgatgaatattttgaggttatggattctgaaatatacgaggctccggttcgttgggggatgccagattcggctgatagcagctgggttcatcctatatattttgccaagtgcttgatgaaggctgttcatgtagaacatgacaggaaaatggaccatccctctaatggtgtttcgattgtcggttgccttcgaccagcctttgctgatgaagaatcatatctaagaaggctattccattttgactatgatgaaggatacacctcagattggaa

SEQ ID NO: 242349 - DNA, 417 bp, Gossypium hirsutum
ctcaagatggaggacgactctgcgctaagatcagcggatgagataacagcagcagttcatcaaatattcagctaaattcaaaattaaaatgaaaaaaaaaaggatttggtcattattcattaggcagctgacttgattcctgaagggaaagtagggtagaaaagagcagaccaggaaaaaaaggtaaaacgagaaaaaaaaatgaaaaaagaggggtccattccaagcaatgctttgttccacaaagacaattgaagacagagcccttgatgtttacatcttaacttaagaaacttcccttgtttatcatttaatgatttaatttgcttacttaatagaaatgataaatctatgtaatttccaagtttcttttcctttattctatgtttatattattctgggactagcttctggagt

SEQ ID NO: 242350 - DNA, 425 bp, Gossypium hirsutum
cccacgcgtccggagtcctgcagcagttgattctttcatacagcgctgtaatttggatgctgaatcattaataacagtccatcctagagaaatggaaaaccgccatattgacaacaatgtaaatactttggatgtacccattaaattaagaacttttgtggaactgacaatggatgtcacatctgcttctcccaggcgctatttcttcgaggcaagatcttgtgatgagcttctttgccactgctgaacatgagaaagaaagactccagtattttgcttcacctgaaggaagagatgatctttatcagtacaaccagaaggaaagaagaactgttctggaggtaaagtgaagtattggaggatttcccttctgtgcaaatgccatttgagtggtttgtgcaattgggctccaccactgaaaacag

SEQ ID NO: 242351 - DNA, 401 bp, Gossypium hirsutum
cccacgcgtccgttcaggatcaggcagggctgttattcttcatttcggtgttttgggcattctttccaatgtttactgccattttcacattccctcaagagagagtgatgctagctaaggaaagatctgtaggcatgtataggctcagtgcctatttgttagccagaatgatcagtgatcttcctttggatctcatcttgcctttagtgttccttgtgattgtctatctcatggcaggcttgaagtccacatttacagcattttctctaacaatgcttacagttttcttaagtgttgttgctgcccagggccttggccttactataggagcggcattcatggatgtaaagaaagcctcaactctggcttctgttatcatcatgacttccatgttatctggt

SEQ ID NO: 242352 - DNA, 400 bp, Gossypium hirsutum
  unsure (1)..(400): unsure at all n locations
ctttttactcatttttaatcccatgctataattgatttatgtatgtgtataacataaagcgtggtgatttggaaaaagaaatgtaacaaacatgcagtgcaagtatattttcttacacctactgcacatgttgattcacgaattctaaaagctattgctatcgagaactctaaggatgtggacgcagctgcggagattgttttgtctgagattctaccttacctatctaaacgaaccggggctggtagttcttcctcacggaatcggagccctcctgggcaagcaaatgaagctgggatgatgaagatgattctgttgccaagatgaaggcagctgaggaagccttggaagcaaaacaaaaagtaacaaatagcttgtctgctacctgttctttnttttt

SEQ ID NO: 242353 - DNA, 320 bp, Gossypium hirsutum
  unsure (1)..(320): unsure at all n locations
cccacccgtcctaattttattaaaactttattcaacccttttattccactncaaaaaaaaaaataacataaaagccgtttttaaaaaaaaataaccctcacaaacccccccttcaactttattaactcacacctacatcacatatccacttactactctctaaaaactattactatccacaaccctacttatctcaacatcatctttaaccctacctccactattattcttcctcacctatccaaaccaaccaatactaactataccccctaaattactatcaaccctccacccccaaacaactcccattagaacaaaaa

SEQ ID NO: 242354 - DNA, 417 bp, Gossypium hirsutum
gcgacccacgcagttcgatttcttgttccttaccttcgccgccacatttctcttttgtcacctccgattccaagatggagtcccttttgtctcgcaatatggcatttgtttgttgatttcaatctttatttgagattcaatttttgttttctctttcaatgttagatttcgggacagatcttgtttttattggattgaatctaagataataacgtgatctgaaattatttcgctgcatattttgtttacttatttttcgggatgatactgtttgccttgattaaggtattgtcttctcatcagcttttttattattattcagcataaccttagttgagaccatgactttcttcatctctgacttattaatttgaatcagcgtagctctgactttagagatctgctttctagcagttt

SEQ ID NO: 242355 - DNA, 185 bp, Gossypium hirsutum
gtctaaaggtttggcccaacaaggggtaaaataaggggccaactaaacctacctttccgggttataaaaatgcctatattaaaactttttttttttaaaaaaaaaaaaaaggggaaaggggtctttatatggaagtttaaaatatatgctgagaggataaattaatttgaaaagcttgctttgtt

SEQ ID NO: 242356 - DNA, 387 bp, Gossypium hirsutum
cccacgcgtccgcccacgcgtccgtccctttcatgcacaaacttatttctggagaaccatgttaaccataaggcgtaacaaaaaagtcggctttgatcatcagttcctcccttgaatacccaggacaatctcggaagatatggagactattttctgtccaagaacagcatcggggacatctatcatttgttgcaactcttctatacctaagattagctagattaggaatgaaatcccaggaaattcgccagatagtgattgcaatttttggggatagttttaggctccataattttctgtaaaattccttagtttcagaccccagattagcatcttgtaatagtttataggcgctgcatactgaatatttaccggataattccccct

SEQ ID NO: 242357 - DNA, 427 bp, Gossypium hirsutum
ctcatttgaagatgatagattcttttatcagttaatatagtttatgtaagcactacatgttcagtatgtttttgcagtttcactgctgttagtcgttgttttgaaatcaaaaagagctacggtgacattgatgttgtagggttgataagttggctttgttttccctagccatcagaattagttctgtttttggttcttcaaacaacttttactcttgcatacggtttttcagtcttgcttccgatggtttgagcaaggtcccgatcaagtggagtgatgttgctcccaagcttataaaggtatgaggcggtgtcatggaacactcctatgagacctgggaacggtccttggctcatgaagggagtgatgtaaggtccgaacttaaaggctgcatgatcgtgaagttgtagtctcggtacatgacaca

SEQ ID NO: 242358 - DNA, 427 bp, Gossypium hirsutum
cccacgcgtccgggctttattgtgcaagttcaatggttgaaggttctaacgaatgggggagaaactctgatcccaaaatgtcattgagaacagagaaaagagcaagtgttttagcaatggaagtagtggaagacttcatatacttaaattgcagctcatcagctaatagtcttcagatatggttgagaggaacacaacagaaagtggggagaatatcaactggcagcaaaataacaagccttataactgcaaatgacgtcgttctctgcgggacagagtctgggttaatcaaggcatggatccccctttaaaagacctcaaaagcaaagtatataatatacaaacaaaaatggaaacaattgaagatagtttttgaatgcttctaaaataatgcattatgtgtacagttgctatattgtataattat

SEQ ID NO: 242359 - DNA, 320 bp, Gossypium hirsutum
agttttacacatgcatggatacatgcacgcctacactgatgccgcaggaaataccgcacctaaatatctattgcaggaaacgacaggccacggaactcatcaatcgccacaaaacggggactatcattagaagggagattagatatttgatttgacaatgaagcatccttagtcgtagatgtatttaagttacagctttttgcaagagtgaatagaaacaactcttcttggcccttgcacccggagtgctatatgatatacctagacaggttggcctgatactctttcgttaggtgatgctgattagattatgcaccata

SEQ ID NO: 242360 - DNA, 431 bp, Gossypium hirsutum
cccacgcgtccgtaaacacttaaaaacgaaggcttttataaccaaaatacaaacagtttttagctatttttgctcaacttgcaggtcatgaagatgtggatgcgaacgtggagcagggcgtgcgtgcttgacgggagtgatcgtggctaaaggctatggtgctaatgaagcttttaaggatttaggatttcagttttctgattgtttaggttagagcatgagtattgggcttatgtaaacgggccaaaattatttgggttattttatgcaattgggctggttaaaaaaattaggattgctgttttttgttttattttttgtatatgtatgagctcgggttaaaaattgggtctacatatatcattttgctattcactactttaaagatttttattcatgtttctttactaatttcaataaataaggcaatg

SEQ ID NO: 242361 - DNA, 343 bp, Gossypium hirsutum
gaaatttggattcgtcttggttacgatggcagtggtcctagcaaccaccctgcctccgatggcaaccgccgctcgcaaagaggcagtggctctcctcgtcgactcaagctcaaccaccgctttggccaacattttcgacgttaaaggaaaacctgatgcgaattgcatccctaagtatgagttttgcttgtttgcgaaaaaggaatgttgtagtaattgcacatgcttcggactatgcatccccgtataatgtaattgtttatattgtataagaaaaaatgatgaagggggtgtctcattaatcaaaaaaaaaaaaaacaccattaaacaaaacaataaacac

SEQ ID NO: 242362 - DNA, 393 bp, Gossypium hirsutum
tgcttttgtttcttatatactactttcattgatagaaggtgttatcttgctagtgagggctatctatcatacaattctgttctctccgagtataataatggcaccatttgccgactcttgtggcctcaaattcaggaaaatatggcttgaagtcgtgcatcgcacactagaaacggcaggtccatgcattcataaaatggggtcaatgggcagcaactcgaccagatctcttccctaaagatttatgcaccaagctttcagagcttcacaacacggctcctgaacacagctttgctttcacaaagaaaactattgaaagagcatttggccgtaagctttctgaaatatttgacagttacgaagaggaaccggtggcttattgaagtatagctc

SEQ ID NO: 242363 - DNA, 377 bp, Gossypium hirsutum
  unsure (1)..(377): unsure at all n locations
ggaaaacccggccggacccacgcgtccgcccacgcgtccgagnagaagaaaaaggngttnngggaaggatatgngagggaggaagcgagggggacaagagccccgggggcngnatataggntgtatgctgggttttatcaactcttaccacctttggataagtaccgtttacatactagaaaagaggaggaagagaagaatgccgtgcctttcgtttcagttgttaagggtgttctatttcaacagcttgttcaagcaactgttgctaaattgctctttctgttgacatcaacggcagatgcatctgggaccacaatccagccttcagttcctgttcaacttgcgcaatatattgttgcaatgcttgtcatggattg

SEQ ID NO: 242364 - DNA, 249 bp, Gossypium hirsutum
  unsure (1)..(249): unsure at all n locations
cccacccctccggatttaacactaagaaatggagtacaataagaagcttgctttggtggtggcggtgatggttgtggcagccaccacaacggcaaccgcggctcgcaacgagctgacggaaactctntccatcaaagcaagtttgaactcgagcttgactaacatcatcaagaaaacccttggcaatattttcgaacgtaatgccaaacctgtagtggaatgcacccaaaagaacaaactgctttaaaa

SEQ ID NO: 242365 - DNA, 358 bp, Gossypium hirsutum
  unsure (1)..(358): unsure at all n locations
ctcccgtaaagctacgtacgcgatttcccgcgattacgccgcttccgtacacgttcaaagaatgtgcaagggtggtatttgctggcacggcgtcnccgtccgttcccctgcttctcaagtccgcttcaggatccctcctcaaattccataccgttctttgtaaatattcaattcaaattttgccacaaaaaagaaaaaaaaaaaagatttccagttttgaatctctgtaagataaaaaaggtcatttgtatttgtttttgtcttgaattttgattgagaggaaataatttgtttttaaaaaaaaaaaannnnnaaaaaaaaaaataaataaaaaatttttaatatttaaatattaata

SEQ ID NO: 242366 - DNA, 269 bp, Gossypium hirsutum
catcgcagccatcttattacctctttcccgttgaggacaaaataccaaaccacatgtccaagattcgactatgtttatacctatcctcttgcaaagctctacctcttgtgtgtcactagagccatgaacaacctccattctggcattctcaagaggctatctatgaacaaaaccaatctcccaccaatcttcattactcactcttgtcaatttcattttttgacaggatgaaaacatatccttaattgttttctcaatctctgatcaca

SEQ ID NO: 242367 - DNA, 273 bp, Gossypium hirsutum
cgcagctgctcctgcttccgatccgagcttttctcgcccgccggttcttctcgagcaattcttataaagcatcatcatcaccacttgtgatgggtggaagccagtacgatgatgaatgggtgttgcccagtgccgatatcactcttgttcttgttgggaaacttggctatggaatgagtgcaacttgaaatagcattctagcaccgtgagcatcttgataaaaatattcacatcctgttgttactaatactccttagcttggatgcactaccc

SEQ ID NO: 242368 - DNA, 414 bp, Gossypium hirsutum
cccacgcctgcgatcgccacttacaactattggaagactcggctcagccataacttatgctataagggtatgcagtgatgcatctcaaagctataatgacaggtgccaccaagagtgtatatattcacttcttgatggatcagtacgtaaatgtccattaccagatatgactggcacaagacatacacaaagcacaaatgctgtgaagggagggctggctgtaacaataaccttcaacgcttgtccatataagtgagaatcaggaccagccaagcactatctcaggtgtagaacctccattttactacgatgataacacacatactgagtcctctgacagcaacgaaccagtgcaccgaggaccatgggtgccacctaaatataactttattgacaagtcacctcctataggat

SEQ ID NO: 242369 - DNA, 166 bp, Gossypium hirsutum
acccacgcgtgcgtcaaaccctaccctctatttgggagccctttgcaatggctccgactatactcctatggcctttgctggggtacactttatagccgttcactctccaaaactcccaggcctacccctggccttcctttcacctttccccacgcaacatcctttt

SEQ ID NO: 242370 - DNA, 151 bp, Gossypium hirsutum
  unsure (1)..(151): unsure at all n locations
tcaaaccctancctctatctgggagccctttccaatggcttcncgtcgactgctntcggctttcctccgctccacttctcgcccatctctctccaaatctcccagaacctacccctcgcctcccttcacctttccccacgcgcccgccttt

SEQ ID NO: 242371 - DNA, 435 bp, Gossypium hirsutum
cccacgcgtccggaaaaagataaacctatcccgtaaatccaagtattacatgaagaaactcataccagatcgaagtggaataacagctgataaagcatttaaataaagcttacagccgataaaccggatctacggagaagacaatgctacctcattggtccgatttggcttagagaaaccatttacttccaagttaaatgtttagctgggattggatttgattttctatgcatctggtttttgttatgagctgtgattttattattaccacaaaaatagtagtagttgacataattttttaggcgaaatgtaattatgtagcagtgcttcaaaatatggtaaataaattttctttaggagtgctctaatttggtattattattattgaattattaagtaattttcataagctaatgagatcttggtttaatggct

SEQ ID NO: 242372 - DNA, 186 bp, Gossypium hirsutum
tcggccactctttcttccacacaatcgttcactctttcggtcttttcaataacatcccatcgggtgggatactaatatactgcgttcccctctcttaacacccattgcaccatttagatctaccccagggtttatagtcttcactcttccaactccatccaaatgggtatgggacctaaaaactat

SEQ ID NO: 242373 - DNA, 421 bp, Gossypium hirsutum
tgcaaaggtattggtggtggttcacagaaagggattgcctctttggaatgcttgataatgtgaactatacacgcaacgcacatgtttggactcaaatccgtgccctatatcatataaggcacctacagttgagaatgttgatggcttatttacccaacaatgcctcatatgttatagggaaaaggttaaaatctcactaagtacaaatatgagattttcttgccgaatgaccatgcgcattgcgtatatttcactttttcaagcatctgccgaggcatttttattctgtgaatccgtggcttctttgatagagtcgagagatcacttccgaggataatacttactcgtcgaggggtccactagctcctagcttatgataatttgcagacctcgcccgacagagttggcttctcctcaatag

SEQ ID NO: 242374 - DNA, 413 bp, Gossypium hirsutum
  unsure (1)..(413): unsure at all n locations
ggatattttgttatgatctgcggatatacagagaatggctgctttttcagttccaataattttggggtacggcctcgctgagatcttaaaagttgaatcatggtgccgacattttggctacgcctagcgtctcctcgtagttgctaaactggcaaagacaaactggatgtgcaactcatctaaggtagtcttgtgtggtagtaacagagcatatgaatttgcttctttatatatatatatatatatatgttttactggcaataaaattttaaaaagaaaaaccccnnttaaaaaaaaaaatataaaaaataataaaaaaaaaaaaaaaaaaaaaaaaataaaaaaatataaattttatttaaataaaaaatttaaaaattttttaaaaaaaataaaaaaaaaaaaaagggggg

SEQ ID NO: 242375 - DNA, 468 bp, Gossypium hirsutum
ggatgctgaacgcctcctgcgccgtaccgagaagcgggcatttgctgcatttaagaaagctgcaagtttagcagattcctcacctgcatcctttcctcttcctcttcgagttgaacccaagccaaagagtggaatcagacagcaagatttgctgaaaaaagttgttgaagttaaacccaaacgccccaaaatttcatccccctccagctctgagcctgaagggaatcaatccaatttacaatctcaggggcaggagtccaaccatgagaagaagattggccattgtgtttcggaatcaaatacagcagaaaagcagaataaggtggaaaagtctaccaaatccttactaggcttagcctatgcaagttctgatgatgatgatgatgattgactgatatatacatgcatttgacttgtaatctacatgaacatgactgtttttgttttctccctccataacaaacgctc

SEQ ID NO: 242376 - DNA, 437 bp, Gossypium hirsutum
gtactgaccaaactagttcatccgaatgcgagggtgattcgagaaaaccacttaattgtagggacccagaagtgttccatttgatgatgaaggaggcgattgagcgttttaaggatatacatttttatcggtttggaaagccagcaccagggcctgaggagaatacttgtgatatggcctggcggtttaggcctaaggaagggaagacagctgctttttataaggattataggcggtttgtgattaatagatctgagaattgtacacttagtgtggtgagcattggggattatcattcaggtgtgaatgcaaggaagaggaagaataagaatcaaaagctgggatttgagaagacatctggtaagcaggagcaagttgttgcggctttgcctgttgttggggaagcagtgaatgattcgcttccagtggtcgagtct

SEQ ID NO: 242377 - DNA, 434 bp, Gossypium hirsutum
atgaccttgaggccaggcttcgtgaagttaatgaaacacttgagcaagcatcatcccaacagtcaggtctgcagcaagagcttgagcgcacacatcaacaagcaaatgaagcattgaaagcaatggatgcagagaggcagcaattacgaagtgcaaacaataagtataaccactgttgaactacatgattctagcaatgaagttgaacaaaaaaaagtgcttatccctcataatgaatctcattgtgttaacactgattgatatagtggttaacatttgttttccttattatcaaacaaaccatgtgatattttcaggaaaaggaaaaggagagctgggaagctgcctctctggcatttaaaacaaaactggaagttgctgagagtaactgcattcgtgctgaaatagaagctgctaaaatgagaagtataaaa

SEQ ID NO: 242378 - DNA, 319 bp, Gossypium hirsutum
gtttttgaagacatcctacagatgacctttattgatattactctcaagtcaaacggggggatcttgacagccaccaactctggcgcaatggcgattgcttgtatattgacaacaaattgttcatgttcagttttatcctaattatcatacgctatctgttgagcttaattggtaccaaacaacatagtatgagcgtataatcctaatacaaccatcttatagaaagcttagtagaggaagttctcttaggaagcctcgcacgaacacgcatgtgctgtctgtatgaagtaacatgcatcaattgtgttttgatgaccaa

SEQ ID NO: 242379 - DNA, 319 bp, Gossypium hirsutum
gcgtgcgggtgcttaacgccttctgcgccgtacctagaatccggcatctgctgcatttaaaaaagcttcaggggtaggagattcctcacctgcatcctttccttttcctcttcgagttgaacccaagccaaagagtgggatcagaccgcaagatttgctgaaaaaaggtgttgaagtttaacccaaaccccccaaaatttcattccccttcagcttttaacccgaagggaatcaatccaatttacaatctcaggggcaggagttcaaccatgaaaagaaaatttgccattgggtttcggaatcaaattcaacggaaaag

SEQ ID NO: 242380 - DNA, 343 bp, Gossypium hirsutum
gcagcagaggattccatgacaaaagagtggatcatgtctggtggcccatattggcgggggaagcactgccatcggaatactccaacagctatattacatgtcttacacattaatatcccaatcgacatgaaagtcttctgagctcgtcctaacttatgaactaatctaaaatatctctgttgacaaataggtactccattcacagctttggtgattctaaataatctacacaaaggtctgacatgcatgcatactcaatcagcttagattaccccggctcgaactttttggacaaactatgtatgcccctcgggtatagatactaaataatagcttcaccatt

SEQ ID NO: 242381 - DNA, 223 bp, Gossypium hirsutum
acgcgtccgcttttgtggaaatagatatgataatatgaattttggtcaacaaaaaaaataaccattcatttcagggagggtttaaaatcctaaacattcctttttcctcttctttttaatatcattttacccaaatatttggtaatattccttctgttcttcttatcccaaacctttaaaccttacctctatttagtgttaattcttgcccccccctttttaa

SEQ ID NO: 242382 - DNA, 378 bp, Gossypium hirsutum
cacgcgtccgcccaccatacaatctttcttcacatccttaacatctcgtattgactgctatcttcctatactgcggaggggcctttgtcggtaaataagctcatcatatccttcatattgtaacctctatttttgttgatacattcatgctccaaagtagcttataaaaattactgcacatggtttgtgaagcataaactctattattttcatcccatctctgttataatttataggcacttcggacctttaatacaccctacatcttaccttcccaaataagaaagtcttcataaggttgccagcgctttatgcattccgacgagtcctgcaacgatttttctattaaggcattactaatcaactcctttttttttt

SEQ ID NO: 242383 - DNA, 422 bp, Gossypium hirsutum
agcgaaagtagctcctccagtatcacggtctattggtggctttggctggggtggagaagaagatggggatgcaagggaagaagatacagagcaagaggaagaggaagaagaagatgagtacgagaagacagtaaaggaggtacatgctagtggagaagttcatgtctcttaaaacttgttagtatatgcttttcaattcgagttctgtgtttagtccttgtgttcatatgatgtcggtttctacctaggacctggtgtcgaataaacaaactgtaaattatggtcttggggcaaagatgtttgtgcagtctttttatgattgtttaggttgtgttgctattgaaagtcggaagttggaagtactgggatttgaagcattacccaattgggatcaacttcataattgtgggttggtaatgtct

SEQ ID NO: 242384 - DNA, 341 bp, Gossypium hirsutum
gcgtgacgctctcttccaatttactggaacctggacctttaaccaatattctgtcatccagggggtgccatgttgcaggaggagtccaacctcccctattgattaaatatcgtccactatgtgtgggatatggtgcaggctttggggccacatgaggatgtgctcaacccaataatggtgaatactgttgcagattctggactgcgtgcccattgtcttgtctgcgctcaatgtgcatggcattgctgggcttatcggatcatcactgttgatatggacccacaaatactgggagattcttactagtttgggattacaaattttgggaatccaaaaaacta

SEQ ID NO: 242385 - DNA, 303 bp, Gossypium hirsutum
aaaaaaaaataaacaaaaatacagattaataaaaaaatattaaaaatacaaaatcaagaggggtaaacaatttcggaaaatcattcaaaaaataaaatttgcctcctctctttttcaatccatttttccttatcttggcacccctactctaatttccctttctgttgcctaaactttatttaattgccctcctttttccaatgctaatatttttacatcccttccttttcccacctattttactttcatccaatagcactttcccccaccatgtttatttttcttttttcccaaaaacattta

SEQ ID NO: 242386 - DNA, 440 bp, Gossypium hirsutum
gcggaaattaaggcattaagaatgtctgaaaggctaagagaaaaggcttgcgaagagctcggtgaccagctctcaaaaatggatgggaagcctatcttcaatcttgttccggtcctaggtgccggaatatctgctgcatgtacaaatgatataatcacctgtgagctgtttgctgggaaatcttgatcctttacttcactttggcaattccatcatttgttttctccaagggatggttcagtcatcaaagaaactcctttctgaaagttaaaacagccacaccaatgtggtttgttcttggatgaagaggtaatgcttttggtcaatttatttgttagatttattgtctttacaatcaagtattctttacatttcaaggaatctaaagaaccttggtaaagtcaaatttaaatgttaattgcaagattttgtgatatatt

SEQ ID NO: 242387 - DNA, 313 bp, Gossypium hirsutum
gcgtacgccctgtctaccaattccatgttctttggaaacttctcggaaacttatggtagtgagagattaagggttgcgtgtatttccgggaatgacaaatgaaaaccactctcatattctccattaaaagcaactgatacattatttgctatgttgcctcttaccaatgctggaaagaaccaacagggtggtgtcgatgcacatgatagtgcatccaaaaaacacagcttcacaagggattttgcttatgatgttacatttggagagccatactaatggttcaagtaagcatgtccctttgttaaacctatat

SEQ ID NO: 242388 - DNA, 219 bp, Gossypium hirsutum
ttacctcgaatgggtgtgtctacctgcacacagtcaaacatcttttcacataataggagattgttaatgacaagtgttacaaactacttgggttgtcacttctactcattagaggctacaatttccaaacgagaattagagttatcagggaaacatggaaagccttcgtggactaaaacggctgctcactctgaagataaaacttggttgtgcctcaaa

SEQ ID NO: 242389 - DNA, 362 bp, Gossypium hirsutum
cagaattcacacggttccaatggttttgaaaagatacccaaggatgacggagccggaacgaaagtatcggaccatctatcggacaaggtagccatagagacagatagtagtacaccgggtctttacagtgacaaggaaaagctaagatcgaagaaattgaagatgaaaacaatggagaataagaagaagaaaaggaggaaaaaggaagagtatagagaaataggggagagtatccgaatactagctgaagtagtattaaaatcagaagaatcaaggatggaaacactaagggaaatagagaaaatgaggattgaagctgagactaaaaagagggaaatggagcttaaaagaacagagatcat

SEQ ID NO: 242390 - DNA, 416 bp, Gossypium hirsutum
gcttgaaattgtcagtggggaaagcaaaggatgcatctccataatatcccattaggtgggccgagtgccatgtttaatgctatctttattgttgtctgtgttctacataattgaattccatgttaaataatattcagctcccaagccaggaaacatgctccttactgggaagaaactgcattcatgtaacatttagaattcaagctcatgtcaactaagaactgcttatgcaatatactttacagattaggctcatgtccaacttgaacttactttgacaacctgggagtagagacattatgcaatcccgctaacacggacatgggggtaatatatcgtattgaatcgattaagataacctcaacaccactcatttttttttaaaatttctggtttatcaaaaaaaaaatacctcc

SEQ ID NO: 242391 - DNA, 428 bp, Gossypium hirsutum
ggaaagaagataaaaatgaagaagcaagtaatttgttcgactgtctttcctcttctttgcattcttcttctttttcttagtgttgaagctgagacgtgcagccctagtggcaagatcaaagggaaaacccctccacctgggcaatgcaaccaggaaaatgattctgattgttgcaaggatggcaagtggtacacaacatacaaatgttcaccccctctatcaagccaaacgaaagcaacactaacgcttaacagctttgagcgagatggagacggtggtgcaccatctgaatgtgaaccagtaccactccgatgatgaccctgtggtggcactttctacagggtggtataacaatgggaagaggtgtttgaagtatatcaacatccatggcaacggaaaatctgtgagggctaaagttgtggatgaat

SEQ ID NO: 242392 - DNA, 370 bp, Gossypium hirsutum
ggtaatttatagcacaatggattcctcaagggataatgatattaaatttcatgaagttcgtatagcgttttagcagtttacccctttttcttatgtatctatctttgaaattttcacaaagtaatatctggagcaactttcatgtttgagagtagttttatcatatttgtaaaactgtggctaagtgtccaattggaaagcagtatttgtgagtgtgaaaaaaaaaaaaaaattttattattataattaaaaaaaaataataaaattttttttatttataaataattatattattaacttggtcggccgtttaaagaatccattttttttttttttcttcatgcaacataattttttttttttgggggcc

SEQ ID NO: 242393 - DNA, 423 bp, Gossypium hirsutum
attctcttgtaatagaatcgaagaaggtggaagtagaagagagaaagcggattttctctcttctcttctacattttttgttttttttttcttttgtttctcatgacggcataattcgtcgtttttattccaagaaattagggtttgggtttggtgaatttctaagatcatgaatgtgatgcgtcgtctcaagagcattgcttcctctcgctcttctatttccgattccggtggtgatagcttcaccaagagggcaaagtttgatcaagaatcagaattcaaggcaacaggggaatcaaatatatctgataggagtacacctgggccagagcatcatatggcttctacttcatcggaaactgtagcaagcacgtccaatgcagcttctagttctagtaatataacagagaaattagatctcgat

SEQ ID NO: 242394 - DNA, 189 bp, Gossypium hirsutum
attatcttttgataaaacccaccaacgcggaagtagaagacaaaaagcggactatctctggtgggctttacatttaagtgatggttcttcttttggtgcctctggacgccataattacagggttttgtttcaaaaaaaataggtttggggtttgggcaatttttaaaatctgaacctgaatcctttttt

SEQ ID NO: 242395 - DNA, 240 bp, Gossypium hirsutum
gggtcgcccacgcgtccgcacttttataccttggtaataattaatagatggaatgtgagaggcgcagctgtcgttggggggggagactacctttttttctgtagttactttagtggcttaatggatcatagaacggcagggtggctctaattgaccaaagacttgactggggacacatactgacgttttgatgaggaaatgcaccatttaacagaatctgtgcttataggtcacacatga

SEQ ID NO: 242396 - DNA, 332 bp, Gossypium hirsutum
  unsure (1)..(332): unsure at all n locations
caaagatatgttatcggactaccaatgcctaggaatctacctgatagggtacaatgtctttcactttgatcattaattgattgatatttttttgttgttttttgttttgggggggaggggggttggaggagagtgaacggccattgttatccgtcattcttctcttactatgctccaagttcttttgctcataattgaaccacacaaacaaaaatgtatgataagaagcacgtagatcttcacacattgtatgccattgattcttcatgctgatcangtttaaacattttgaaatttcttggttggatgtatggtttgatgtatgtatgtat

SEQ ID NO: 242397 - DNA, 358 bp, Gossypium hirsutum
cgcgtgcgcccacgcgttcgtccacgcgttctttaaactctaacactttttccttacattggcacactataaaagttgtggttctatgttttcaacaattctcatcattatattaattgggggacaaaaaagtttctgtcttactatgaaattaagatgttgattcttatcccaaagactttattgcaatttgttaaagatatagattacttcatccgagatttttttattaacattttttagataacaaattatttccaaattcgtttaaaactataaaaggtaggatcctgtttataacaaagctaatcgaaacgatagctctgatcagatctaagtatttctttcctgaaaaact

SEQ ID NO: 242398 - DNA, 435 bp, Gossypium hirsutum
aaatacatgagaagcttagcatcgccaaattcaaacctaaatcgaagaagaaagcaatgtcggaaatgggagagatctgagtcgccggcggcaatcatcttatttttccggctgttatacgatgtctccctcatgcttaccggtgaaggaagaaatggagtactcacgcatccatgagtgcagcagcagtggcagtgagaagagaaggcagagatggagaaatctgctgaggagattggtaaaagatgggaagagtagcatttatggatcctcaaagccattgtcttttcactatgatgctgttagctattcccagaatttcgacgaaggttttcatcatgaacaatcaatatttcaagacgttagatccagataaatttgtgcttatttatgtttcttttttctgggtttggtatcaattttgatgtaattgta

SEQ ID NO: 242399 - DNA, 413 bp, Gossypium hirsutum
gatttactaggcgatgaatccaaaaggccaggaattgctcatcaagaatatacctgtaggtccaattcgagctgtcaaattgacctgtggaagtgaaatatattcaagcaattagagcatatatatactaattataggaagcaaaatttataagaaaaagatgtttttaatccaggttttctgtacattataaaactatatatatataatatatgggactgcattagctatgggagtcctggtgcccttaatttgtaccaggcatgtagttattgcttaattgacattatgcgaagtacaaataaattagtacgtactttttactgtggccgacagctctttgggactgaatcggcctaatattgaatgtattttcagcttgaaatacatatgatggtttctttattgtgatc

SEQ ID NO: 242400 - DNA, 291 bp, Gossypium hirsutum
ctctacccttggtgtaacaaatatttggcatttggattcaacttatttttggcccttcagagtatgcatcagcagaatttttatatgatttgatgatgagaaacgaattaatgtttagcttcttaaacagaagatcgggatggaaggggttacaccaacagtactattgctactgctggagtcatgcatggatctcctttatctgatgattcatctcaacattctgattctgggattttgaatgatggtattagtaatggagtcattcgtcattcaaagtcaaaaccgggg

SEQ ID NO: 242401 - DNA, 192 bp, Gossypium hirsutum
  unsure (1)..(192): unsure at all n locations
aatnaaggcccgacccacgcatacgtccacgcttccttttaaattcaatccttaattataaaaaaaaatctactccataattaagttgtattaatagaaaattcaatcacctatcacccaaaccacctcatttctacactcctgatgagctccaaacttgtacctctgctaacacccttacttttaacaagg

SEQ ID NO: 242402 - DNA, 400 bp, Gossypium hirsutum
aaaaaactgagatatcaaaatcaagagacacatttctgtagcttaaaatttttccccttgcgcccaaaaatggcggatacagctgttgttgttgatgtgccaaggaaatcaagaaacaatggaagaaaagccttgaaacagaagaactcatcatcatcatcatcaacaacaacaacaacaaatgaagccaatactttggcacaaaagctctcacagcagctttccccaacgcaggctccttctccgatgaaatccgatccgtcgaaagagaaccacgacggactctctcaatctctcaaaggaaaagccgcgggcaaagggaaacagagcaagaaatctttcgagaaagacttgcaagaaatgcaagatatgcttcaaaagctaaggatagagaaagaaa

SEQ ID NO: 242403 - DNA, 427 bp, Gossypium hirsutum
  unsure (1)..(427): unsure at all n locations
ccgtccggcaccaanncattactgnnatgagagagncagcnncttgtattgnaaagctgnnctgaaacngnntgggtggatagcgtttttgaacaggcncccggcattttatcnnttggtgnnngttcaaaannncccaanntttggcttgnnaccttgnnctgtttttngnngtgttctanaggcnnctatccganntatctaacatnnccggtaaagaatatggtggaaccatacccacatatcggtgaataggtatgnnngtcggataggaaatatagctgtgggagaaagtctgcttagaattaagtgagtacagagaacaacttttgggtgcctggaatnagaagtcccagtaccaatcannacccaaattttgtgaagtagagtgtttctgaaaataatacatgcttagaaaagttgaaac

SEQ ID NO: 242404 - DNA, 432 bp, Gossypium hirsutum
ggccaagctaatatttccatctctttttgtttgaaaaggcttcttctttaccctgttatagaagttaattgttcaaataaatccagttcctctaatgaggacgaaattgtgctatgtcttggtatgtgagctgaggagcactttccatttaccgagcagaagcaaaccaggaaaggattgttgaagctggtggtcttacttccttgctgatgcttctaagaagttatgaggatgaaactgctcgcagagtagcagccggtgcaattgctaatcttgcaatgaatgaagccaatcaagaactcataatggttcaagggggaatcagtttattgtctactacagcatctgatgctgaggatcctcagactctacgcatggttgctggagctatagctaacctgtgtcggaatgataaactgcaagcaacactga

SEQ ID NO: 242405 - DNA, 396 bp, Gossypium hirsutum
  unsure (1)..(396): unsure at all n locations
cccacgcgtccgctaattccttgttgagttcattgccttcgctggctaatataaatggcacaggaagtgggaatatagtttcatcccagataggccctttaattcgtgtaggaaatgacaactcatctgtagttcgggatggaagggtttccaccagcagtcctcttgctactgctggagtcatgcatggatctcctttatctgatgattcatctcaacattctgattctgggattttgaatgatggtattagtaatggagtcattcgtcattcaaggtcaaaacctttggacaatgcaatgtattcacagtgtgtaccggctatgtgtactttagctaaggacccttctncacgcatagcaactctaagcaggcgggttctttccattattggga

SEQ ID NO: 242406 - DNA, 366 bp, Gossypium hirsutum
cggacgcgtgggtcaagttttacaatttgaggtacccccaactggagcaagcgtgattggaagagaatccgagacttgctgtcatataccacaagaccacagcaaatggtcaaagtcctccggcgcttccttgcaaattggacaaacgacatcaacaattaatttcctctgaaacagattacaaaaatgaggcacaaaattattaaacaatctctatatgtgtatttttattttagctggaatgtgcataggccaaaaagatctgcagaaatccttgtaattttctgtattagggaagttgtagattattattttgtaaatgttttgtaactaggacccgatacccacttttcggtgagtacaccc

SEQ ID NO: 242407 - DNA, 288 bp, Gossypium hirsutum
gctgacttgaacagaggaatgcaaataggttcagttgattcatatgctggagctggaagattcaaccttgccttaaccacatgctcaaatttatcgactcaaagacagaatggtcccataggattttcacatttggaagtgggtcgtccttcttcaactaatgattggcatactgggtatccccgctttacttcaaagcaatctcacttcacaccacatatgacacaaaatcatcccagtccgttggagcaacaaaccctgtcgcgactcaatcatgggagatccact

SEQ ID NO: 242408 - DNA, 232 bp, Gossypium hirsutum
gatgagtagtagttactagcacatcctctgcgagtattgaaagaactgacaatgggggggttttcatataagttgtgaagactataaccgtagccaatgacatcgctactgtgcaaaagccgtcaggtgacatcaaacatgtattacattgcaccaactttagcgagaattgaacacatgtgggactgaacgagcagaagagtcacttggactccgctatcgaccatgggga

SEQ ID NO: 242409 - DNA, 325 bp, Gossypium hirsutum
aagacatgataactatcttcttcctaagtaccacagtgaggacatatagtatttgtggccactcgtttatgtatgagatttactaggggagggatgtaattctaggaaattcgtcatattgtgattgtaattttttatggtagctgtagattccatagtttcttgtagaagtccttgatttcagcctgtattaagtaattattaggacatcttgtaatagtttataagcacttcgaactgagaattcactagagggttctccttcccacatttggaagtcgtcgtgaattgtttccgctagaggaatctgtaaaattttctgagc

SEQ ID NO: 242410 - DNA, 315 bp, Gossypium hirsutum
  unsure (1)..(315): unsure at all n locations
gcaaatgggaaggtattcaagcacacatccacagcttgtgataagaagatggccaagaaactggcttccaaagaagttttgaagtctctaaagggagccaattttagctagattttgcatttgacctgagctgagatcaaacatctattacattgcagtagctttagcaaagattgaaaacatgggggactcaacttgcagaagagtatttgggttaccttcctcaaccagggggacaaatgatgatatgattggtttcatgggaagagattatggngactntcaaaggaaaaatatgatcctttatgggtgaag

SEQ ID NO: 242411 - DNA, 352 bp, Gossypium hirsutum
atgcgtccaatcgtacattctttcatcaatcatctaaaatttgttataagctaagtgcctaaagacggggttatatacaagggatggagccaatgaaatgctcgcattttaattaaaatttgcatctctccttgattcataatcaaggatcaaaatcttgtgctataccatacgcggatctaactcacatggcaggtgtatctaaagaaactttgactctgtctacctctctttgcaaaaaaaacattgtaagttcccattcgtaaaatttgggcagactctgtgctctatctgactatatatattaatttatctaagtggcattctttaactttggcaatgagaaatgaca

SEQ ID NO: 242412 - DNA, 119 bp, Gossypium hirsutum
cccacgcgtccgattagcactctttagcaagttggagaatgagtggcttcattaatctggctcatcacttggtcagccagtggctatatggaacatgattcagatgattgccacatgct

SEQ ID NO: 242413 - DNA, 313 bp, Gossypium hirsutum
cccacgcgtccgctccgatagaagaaaaaaaaaagaaaaaaagaaatttgcaaagtcgcggcgaaaactcaaatgctaaacgggaagaagcctttgttctgaaatcaaaattagggtattgcctgtgtacataatgaggaaccaaactttgttcggcaccaagcttgtatttgatacgattgttgggtttctttatcataatcagccgcactggaagtgtctttgtctttaaataaatataacaactaaaaaaaaacaaactactaaacaaactgagcgaactactacagcaagaatcaaatgcgccctaaac

SEQ ID NO: 242414 - DNA, 359 bp, Gossypium hirsutum
cgcaaaagcttcctattttcatggctgcctcacttcggctcaatcctacttcaaccccggcgctctgcccaatctccacctacaagagcttgactccggtactctgtggcccacgcgacaaccggggacctgtcgttaaaggccgtatcttaagcaccgaagccatccaggccatccaatctctcaaacgcgcccagcggaactcttcatcgacggaaacggtcaccccactcccttacctgtcccgcctcataaaatacgacctgctcgccgccctgcgcgaactcctactgcaagatcaatgcgccctatgcgtacacgtactctccaccggccgatcagaatacccgcctcctgac

SEQ ID NO: 242415 - DNA, 279 bp, Gossypium hirsutum
cgcactagcactaagtttctataacaaaagttattcacgtccaaaagtacaaagcttgcagggcgaggtggctaccaggtgacactaatacatacatgacgaggatatggtgcccataaaacaaacaggatctaaatggacacatctttatgaccctcgacactttatagaaatgctcatgcagtaaaaaccctcctactcatttttctaaaatggaaacggagaatctcttctttagctgttctgctaatgatagggaaaacaaactgacaccctgta

SEQ ID NO: 242416 - DNA, 407 bp, Gossypium hirsutum
  unsure (1)..(407): unsure at all n locations
ctcacacgtacgcacagtaccaacattaatgctgctcccatctgccaaacactcactgcgagcccgcaaccaagtcgacgatcagacatacgtgactgcgatctcaaatgcctccaaacgatcacgctggcttaaggactcatcttgaggcaccattggcacttaatggaaaggcacatgccatacatgactctaccacaacatcgtgcttaaacagaaatggggaatattggtctttgcaacgccggtcatggttgngaaaacaaaatgacaatatctagaaagattgagtatcatatcttttcaacgacaccgaatcataaatgtcgtgttcatactgaacatggtcggaagaaatcttctgattttggatgctcacaagctacatgccagggtcaaggtacttt

SEQ ID NO: 242417 - DNA, 371 bp, Gossypium hirsutum
gaggagaagaatgaggaggaagaggaggaaaaatggcgatgccctgtacgtagaccaacagaagccatcagcaaggaaaaaggaaaagtacctgcaacataaccccatgagaatgcttagaaacgatgccatctttttcagctaaatcaaccatctgcacaacacttattgcagcacgatgcacctgacaagctacatgttatgtattggttaccaatatctttgttagcaagcaaaatgctccatggatgacataaaataatgaaaagttatgcagcgcctcataatcaattgaatgctcacagtcaaattgatgttataaataatagacactcatacatatgtttcagtctactagatgaagaaataca

SEQ ID NO: 242418 - DNA, 356 bp, Gossypium hirsutum
attgcaacgcaccaaacaggccttaacaaccagaagctaagctattgggtgacctgggagccttgtgcaaaattcagatcagccaaaagacttcacggcaaaacgaatgatgccagaatctgaaccgcaactgatgggaacatggcggaacattgggtgtacaactaactttggatgacattagatagggatatagcaaatgaaaagaaaagaaaaactattaattagcgaggaaaacatttgccttggcctctttttatctctatcttatgaatgattcttttttcttttaatgtactcatgtagctgaattggatgttgtgtctgtgactaatttacccttgcaatgtacttat

SEQ ID NO: 242419 - DNA, 411 bp, Gossypium hirsutum
  unsure (1)..(411): unsure at all n locations
aaatccttctctctttatatataatttattattattatatatcctttacaaattcatcttcaccttatgcgaccagggtgttcaaaatctttagagaggaaagcaaaagaatcccattctcctccttccagtttgcagtccctggaaagctgtaccctataacgggatggacgtgacagtgctcgacagacaacaagcaacctatccccttgaattatttgcaagatcagtgcctctgtttcagagttatttaggtagtggaccaatagttgagctgaaaaggccagaagcttatttgggtggtgatggttttcacgaatttgtctactttccaatgggtggaggaccaaaatttggtgacagtgaaaagttgaatttggtgcccnctgatgctgctccggttactgtatt

SEQ ID NO: 242420 - DNA, 372 bp, Gossypium hirsutum
ccggagtgtaaggcaacaaacctgggaaaacggaggggaacaaaatcaaggcatgtgggttcagcttgatggtggtggcgatggcgaggggagtccaaggcaagaggaatgatgccgcagccgcagccgcagctgatgggaacatggtggtacattgtttttacaactaactttggaggacattagatagggataaagcaaaagaaaagaaaagaaaaactattaattagcgaggaaaacatttgccttggcctctttttatctctatcttatgaatgtttcttttttcttttaatgttttcatgttgttgtattgtatgttgtgtctgtgactaagttacccttgcaatgtacttatgttgggcacatgct

SEQ ID NO: 242421 - DNA, 266 bp, Gossypium hirsutum
acgaacgtaacgcaacacaccctccaaatcgcgtgggaccaaaatcaaagtttgtaggttgagatcgataccggaggccattgcgaagccattacacagcaagatgaactatctcatactcctaacaacagtttatgtgaacatggcggtacattgtttctacaacaaaatctggaggacattcgatcatactactgcttaatataagataataatggcttttaataagcaaagaaaacattatccttgacctccttttctctcta

SEQ ID NO: 242422 - DNA, 325 bp, Gossypium hirsutum
attgaactgcacctgactaaatgttcattgcggtagctagttcatcgcatgtgagctcgggtttatcgttcatgcgagggcgcgcggattacatttcattagaaaatatgccgctcacgtaaccaccgctgacgtgtatcatgctggtccattccatgtacaactaactatcttggacctctcacagggataaggctactgaacaaaaaacatttactattaattagcgatgaaaacattggcctatgcctctttacatctcctatcctatgaatagccctttaatgcttaaaggttagtatatcgatgaagcgattgctgtgtc

SEQ ID NO: 242423 - DNA, 286 bp, Gossypium hirsutum
gggaatgaattgctcgaccgacgcatgcgtactatttgccagtgtgcgtgaaacatggaattgcacaccatacagaagcgcatgaggctgggacggtgcttgacatttgcttagcattctaaattctatggatgacaatatagtgaagacctaaccgagcatgtccagaatattgatgaaattactcgaagtgcactatcagagtcaactcagaaacatatctatttcaaaatagaatatctgattgttactttaattcgaaatcattacaatgtccttatgtctt

SEQ ID NO: 242424 - DNA, 357 bp, Gossypium hirsutum
cccacgcgtccgtgagaggcttcatatgaaagaggttgttacaaagttaaagaagatcaaagtaaagttatcaagggatatgcaacgcgttcgatgaagggaccattgttaaattgactaaaataaacataagctttgctttctagcaatatctttgataaatatttctacagatgctctgttttcctataaagtttattaatagttatttctgcattttgtgcatttttttttaaaaaaagaaacaagttcaaggaattagctacaattaggttaatgggaatctatattaatcattgctcgatgaacatctttttctaacaaagattgagcatgatcagttgggtcttcaaaaag

SEQ ID NO: 242425 - DNA, 381 bp, Gossypium hirsutum
cccacgcgtccgcccacgcgtccgtccacgcgtccgagcaaataaaactttgaattattcatacaaaacaatgaaaacccacttttttcccctggtttttctcctcatttttttcttagcccaaggtctgaaccccaaatgtgccatccaagaccatggctcaaacctgcaagtgttccatgtttacagtccatgctcacccttcaaaccctcaaaaccactctcatgggaagaagatgtgcttgaaacgctaaccaaagaccaagccatggtgcagtttttgtccagcctggtggctaaaaaatctgtggtgcctatagcttcaggcaagcaaattgtgcaaagcccaacttacattgggaaagccaatattggaacccc

SEQ ID NO: 242426 - DNA, 339 bp, Gossypium hirsutum
  unsure (1)..(339): unsure at all n locations
cggacgcgtgggcggacgcgtgggcggacgcgtgggcggacgcgtgggcggacgcgtgggccgccaatgtgtttcaccaaagatgatgccgattatcttgttgatgctttggattatgcaatgtcagagttgtgagcaaaaggggttatctaacttgtggatcctttggcatcaaagttcagcaaaatcttgtgtttaatagtaataataaaagtacattttatttgcatttgtatttgtcaaaaaggatcatcaaaatcccttttataatgtgaaatatgttccactgtgtttgcatttgttnaaaaaaaaaaaaaaataaaaaaaaaaaaacataaa

SEQ ID NO: 242427 - DNA, 247 bp, Gossypium hirsutum
  unsure (1)..(247): unsure at all n locations
tttagtgaagagagaaaagcagtccaagggtgaaaggtgctggcatctgacgatgctgcttgcnattgaaactaggactacaagcggctgagagttgtgcgcaaggtttagaatagaaaggcaacgtgaaacactgttagaaggctcaagctacataattgcagattggatttgcggagcttgattcaaaaagctttgacttgccccgatataggaggtgaactcgatacaagcttgaaagaaagat

SEQ ID NO: 242428 - DNA, 123 bp, Gossypium hirsutum
ggcggacccttagatccacccttgcaggtttcaaaggtgacgacagaatcagacacgcttagtttatcctggaaccactggcctaaggtcttgtattaacccatgcgtcttgcttttattcct

SEQ ID NO: 242429 - DNA, 271 bp, Gossypium hirsutum
cccacgcgtccgcccacgcgtccggtggaggagtcgttcgtggagcatggcacgagtggaagaatcgactagaggctgcagtggctgaaatttctagggtttctgccgaaaaaatccttagtgttttgggctggggctaaaaattgggtattacattactagcatgaagcatttctgccctattagtctttgtacggtgttgtataagactatctctaaaatagtggaagccgacttcaaaaagtattaacataaagatcttagaacgtaa

SEQ ID NO: 242430 - DNA, 163 bp, Gossypium hirsutum
aggcgtactggaccgagattggctatgcataaacccgacagaactgaaatgtcttgcgggcccaaaccgacgtttacgttccatatcctcctctggcttgcataacaaccaatcatcttcttactatgtaccgatgccttatcttggtctactggatgcattg

SEQ ID NO: 242431 - DNA, 220 bp, Gossypium hirsutum
tgtagtatacccaaacttacttacccgtgcatgcgatgatactgctcttacatagagtgacgatacatcaattcagatggccgtctatgttcagcgtcgtgactgggatatcccttgcacttccccacgctgttgtgttggctctcactcccttttctacggctggcgtcacaacgcatatgctcgcacctatctcactaatcaacaattcatcagtctg

SEQ ID NO: 242432 - DNA, 409 bp, Gossypium hirsutum
cttccgtttatttaaccttttaccggttccaaatcaaattccttggaaaccttttggagctctcataaatcatactagatcttcgattctgttctttttagtttaagctttccattctgcaagatcatgtcctaatagggtactagaaaatcggaacattagaagattaatgtatcagcatgttcagagtatccataagctgcaaatctatggaattcatttgtgcatgtacatattggttgagaatcttcctgctggtttatggaaaatgttttttatcctgtaagtttctttattaagggtcttaattgagcataagcagggttctttctctgattgttatctcgagagtgcgaattttgcacctcagctgatgtacgcataggtattttcttatttactttttgcg

SEQ ID NO: 242433 - DNA, 319 bp, Gossypium hirsutum
atcaatcttacaacaactccttcacttattttcacctatactcccactatcctgcagaagtttttctccaattacactgctaacaataaatcgactggtctcatctacagaaaatactcctcctaacacatatactaaatctccacaactctaaaaaaatgaaacttacatcacttcctaattttataatttcacacacatacctaacaaaattcttttttttacactttcacattataactcttacccctttatattcaacaatatcatattatactagctcaaccaccacacttttgatattggccataaccagatc

SEQ ID NO: 242434 - DNA, 312 bp, Gossypium hirsutum
gctctttgatgttttttgatgatcattctgcacatgatcaagatcatgaacggaatcgggaggtccagtccttaactgaaactctattagcaacatcgtcttttacaagagaacgctcaaactatgttttttgggagcgggaaaaggaacttacgagacatttgataaagggatttgtagctgcgtttctttttttggatcctttggtcatgggacatgaaaaaactgccaatctgatggcgagtaaagacagtctaaatcggagcttcttacccagatctctgacttccttcatgatgattcctccaaacc

SEQ ID NO: 242435 - DNA, 149 bp, Gossypium hirsutum
gcaaaataaccctgaagtaaaagatggtttcttcaaggttatggttctttgtgtagcgatgttgctgctagtgttgctatgctttcttttccccatactctattcacacgtgatggcctggtataagaaggcgttttttaaacgaactt

SEQ ID NO: 242436 - DNA, 420 bp, Gossypium hirsutum
gaaaaaaaaaactgaacctatcctctcccttttaaggttgccagctgccaatcatggtcgacgccgataaccggcggctactaaggccaaagctcctttactagcggtggtcgaagcgagaaaaggagggctattcaaccccgttctggacctccaccttaaggcccgttactccagaccaaacaagtctaaccatggagagacctttcgtcgccttctcgaaccgataacaacaccgattatggtctccggcgacgggctgtctagaccgctactggtgaattcatccggtattggaagaattaacctagcctttattgttcaaacctgatggtgctttaggcacttaattgcttttcatatgcacgaagagacgctccgttcactaaagcttgctaaaagttgatgcttgattttttt

SEQ ID NO: 242437 - DNA, 372 bp, Gossypium hirsutum
gattactgaatactataagtctcacgtgtctggtcactatgtcgttctcgaggacattaagaaatcttgtattcaggtgagtttccaatattcggaggaaagagtgacttgggcaaatggacatgatgtagatgttgtggctgttgatgctgtttgtatctgtaaatgaatgatcgtaattgcgatgctggttatagcaatatgctgattgcagggacaatctgctaagtacttttaactgatatctataattgaccaaggttaacttgcggtgatggtagaaaaggaaatttgaactgtgaaatgctgcttatgatgtacgtatgatgcaggttcctaaaataaagaaagtattgtcttgatctgaccttt

SEQ ID NO: 242438 - DNA, 415 bp, Gossypium hirsutum
cccacgcgtgcagacacgcgtccgcccacgcgtacgcccacgcgttcgcccacgcgtgcggttcagctctttgaactgaatgacatctcaaaacccatggtttaattaccttgtccggcctcttggtgcaaatacttaataatgatctactggcgggattgttggataaccatggcatgcaatagctgctttttgttgttatgatgatgccaactattgtaatatttgtcgacgctgaatcctaaattatgtcacttgttgactggtataaggtgtggcagactcgattgctcctcttaacgtttattgagtgaatggggagatcgagtgactgttctctcattggagctgccttgctaaattttgattgatacttggcatttgatgagtttcatagtttttgttcactggaatg

SEQ ID NO: 242439 - DNA, 415 bp, Gossypium hirsutum
ccaacccaacttcctacacagagacgttcaacaggacattcgtagaacaagtgttccctcgattccacaccgttttggcaccaactacagtagcagatcctctcaatctccgatattgtaggttactgaaagcagggaagaaattacgtgaaacacgccaaactgtaatctttattttagagggtagatctaagttccatagctttttgtaaaattgtttgtaatttgtctgtaagtcattctgatcattgtataagagaagtttatgcctactctgcaccgaatattctgcagtcggctcaccccgccaaataacaaagttctcatgctcatacaaagacaaaggaatgcatagaatttgctccacttcctgctccgagaagggatccaagcgtcttcccaaatagagacatgc

SEQ ID NO: 242440 - DNA, 241 bp, Gossypium hirsutum
gcgtccaagaccatctattcctattttcaccaagttgaaatctgccgcatcggggggattcccaggtgcgccgagcccggccgagctcgctacagccgggtatgtgctggtatccgcagaaattatggcacccgccaacggggttatgatggaaccttactgagctgaggattctattaacactgtacttaagtaatgaaaagatatggaaagttcctatgcttgcaacacaagtataact

SEQ ID NO: 242441 - DNA, 228 bp, Gossypium hirsutum
gcgtccgcccactcgtccgaccactcgtgcgatgatttttaaaatagaatttgccatcttaaccgcaggccggtttacaatggggcacgctacaccacccgtcttctaacaactcatttacaagccctttgccacccgtgaaacttggcatctattgttacaaatattcctctcaaacctctctaatacgttaaccatcactgaagaattggcaaatcttttccactt

SEQ ID NO: 242442 - DNA, 399 bp, Gossypium hirsutum
ggaatttgacacagttcttccggttccctttttacttgtggatactgtttcactaagtaatccacggatggatggacatctgtatcttcttttggacctttatttatttccatatggccaagataggttcaatacatctggaatttcgaagattgcatctgcctttagcagtcaggattacaagccgcctgaacagtactttggaccttatgttttcactggtgctgaatatgagtacttttctgatggacctgcacacttaaacaaatcaagtgctggcatcgcaataagaacaacaattggtgcttcaatgctttttatactattaatgggtgcttggatttatgcttaatctcagaagaagaaagcagacatagcaaccaaagataagcacccttt

SEQ ID NO: 242443 - DNA, 431 bp, Gossypium hirsutum
ctgcaacctctggcacaccgatagcagcatcaactcctggtgcaccagcagcaacaccaagcacatcaataggaacgccacctctttgtgcaccggccacaacaccaagcacgccaataggagcaccacctcccaatgcaccagctgcaacagtaggaaagccaattggagcaccacctcctggtgcacctgctgcagcagcaacaggtgcaccaccacccatatcaggagcaagtgaacctggttcagatgataaatctgctatttcctcatcaggcaatcaacatacgactgcttcagtagaaagtaatccaacaaagtctatcaatgacaaaccagcagatgcaacaccaacagataaaccattggcagatgtaccatctctaacaccagataaccaagaaacaagtgttccaactacagacccaaca

SEQ ID NO: 242444 - DNA, 325 bp, Gossypium hirsutum
ctgtacagtgtcctcctccatatcgctgtctacatggtcaagttttagtcggaactgaagtaccatttaagaacggaaattaattttaaagagtcgaaacgttatgttctttttattgtaatcttatgttcttcgctcatttataattgtttttttattaaaacatttttatttatatatatattaaaaaggatcgcttgttttctattgatcttcaatgtcttaaagatctccctttataattcaaaattgtttttctatatatatttacttataattcttactttctttaaattacttttataaaattctatattttttattt

SEQ ID NO: 242445 - DNA, 227 bp, Gossypium hirsutum
gctttacaaaccaaaatcttatttcctggagaagcgccaattatcaacgaactctctctctatctcacctaatattccccgataatcttaagcttcaaaaaaacccgacatcaacaaacatgaagaacgaagacacagtttaacttattaccactcaagcaatggaattttttattaaacaaaaaagctgcgtatggttgtctcaaacaatccataacatgcttact

SEQ ID NO: 242446 - DNA, 383 bp, Gossypium hirsutum
acatttacacatgcgtcaggtctgaagagctttccattccaaaatgttatctacagtagaggcggtatttatcaactacctctctattgatctcacctaacaatcgccgctcatctaaatgttcaaaaataacccaactacaaccaacatgaagaacgaagacacattctaacttactaccactgaaggaatggaattctgtatagacatacaagctgatatcgtttattaaacactccttctcatgcttacttctccacgtggatgcgctgaagcggatcatggagaagtgactatcccagacataagagctctgatcctcgagaagatctgtcacaacttttattgctactcttcactatttcaaaggtaaaaagactgtg

SEQ ID NO: 242447 - DNA, 353 bp, Gossypium hirsutum
cgcgttcgctttactctccaaaaaaaaaaaacagtattatggtttatgactttacgactaaattctagggtctttggtattggtggttgtgtttggcgtaagtgatacagacaagactgttggctgacaaaggaaagaaggcgatactagaagagaagggtgtcgaatagaactctgaacatattgacggcgcactcgtcttttccatctaaaaactttcaagagatccaaaactggcttgagaagatcaatgaggatgcttgtgagaaagtcttggaagtggagcttaaatacaaccacttactcattgccattctatgataagcggcactacataatcaaataaattcctg

SEQ ID NO: 242448 - DNA, 372 bp, Gossypium hirsutum
cacataaccagaccaacattgcttcgctattaaggctcggcccgctcttaactggctagcgcacagtaaatacatgcatgtggcaaccacctctaaccaagcgccggttcttgctctatgtgcagcccactacacaccagacgatgacaccgagcaccaaacccttgctgccgatctagagagctgggttcacggtccacccactcaccagatgaagaagcgcttactcaccgccgctttatacgacgatccttatcttttcgaggtcaaccgtgttttagacaccgactttggatccacctgaatcgtcagatgctgtgacaacagacgatcgatctcctgggttcacgcttggactgttcgtgatgggac

SEQ ID NO: 242449 - DNA, 160 bp, Gossypium hirsutum
cacaaaaccagaaaatctttgctttgctattgtggttcagagcgctcacaactggatggcgcactgtaaaaaaatgctggaggaaaccaacatgaaccaagcggtgggtcttgcccttttgaagccctaaacacacatacggaacaccggtacctaatct

SEQ ID NO: 242450 - DNA, 224 bp, Gossypium hirsutum
tccttttgttcatcacctcattttcctacaactaagcacatgaggggatctctaaccaggggaatttcatataacataacctacccctattcccaccgtcaattacaatcttactccctaatacctattaaattaacttaattcattactctactctccatattttaacttattaataactctgcatattacccttttgatactgctactttctaattaacttt

SEQ ID NO: 242451 - DNA, 175 bp, Gossypium hirsutum
ataaaccctaatgtatttgcttgacctttagcttaatccatccagcctagttaatggccaacagtgttctacgtcggggaatcattgcggagactgagctgttgctcaatgaaccatgtactattgttagcgccgtaccatactaagagcacatgcggatcatgtgcgaggtgat

SEQ ID NO: 242452 - DNA, 325 bp, Gossypium hirsutum
tgggcttcttaaactacgacgctgctgttaaatgcctacaggatgttttgcaactccatagcttccactttgtatgataccatttttgtctggcataaacttcagtcaagcatttactctgctgcttggaagcatttgataatgtttactccttcgaaagcctttcaatattctacagaaattcaatatcagtttaactgtagagtttatatattgatatgggatgacagaagaacaaaatataatgaatatgttattctttcgactcatgtagttgtaaacttcacttgctatataatccattcagtaacttgatattacaccg

SEQ ID NO: 242453 - DNA, 414 bp, Gossypium hirsutum
  unsure (1)..(414): unsure at all n locations
ntttttttttttttttttttttttttttttttttttttttttttttttttttttttttgttttttttttttttttttttaaaaaaagggggtgaattttcccttttggaattgaaaggggggaacttttgggttttgggggggggggccttccccaatttttcctttttgggggttggggggggtggaaaatttggcaatttccatttgggggggcttttgggaattttacaaggggcggtatttttgggtagggggggtttaaaaatcttttactgggctatttgggggttattcgggaggtcttttaaagggaaatggttttttactgggggggggaccttatttggactggaaaatccccactcttggggaaaataaaaagggggggcgcaccacaaaattttttggcctc

SEQ ID NO: 242454 - DNA, 383 bp, Gossypium hirsutum
gaaaatagctgcgcatggtcgtgtcttgttttttgcaattttgaattccgcctgaaatttgtgtctgcctcaatatttctctttcaaattcttattaggaatttttttccttttaaattcctataagtataattcttttgaagatctccttaaccctctgagaatctcccaaattttaactcttttgaatttttttgagatttctcaaagaacaaaaacgaactggaattgaaaagctggggtttttggctcctgtgtattctttcggttatgatttatccctgttagccttgagtatcacttctcattatgaacaaccaacctggtgaagatggagatgaagccactgtcatggggtttgaagtgccgagaacacctgattc

SEQ ID NO: 242455 - DNA, 418 bp, Gossypium hirsutum
  unsure (1)..(418): unsure at all n locations
gatccagccatatagaattttggggtcaggaaagagcagaaacagtgatgttgtgttcggtcttttgagtgatttgccagcggaggttttagtggtggtgtattgtactgtaggtcatgcccatgcctatgcctaaagagttagatgggcgagggttttgcttttgcctactttagcagtgaccgatgtttgagtcccttgttataataatgatgtacaaatactggtaagttaattaattaatctgaaatatggagtttaagtaatctacctcaattagaatcacannnnanaaanaaaannaaacaaaaaaaaaaaaaaacatattttaaataagaaataaattaataattttaacatataaaaaaaataaataaaaataaaccccctaaaaaaaaaaaagggggggcctttttaa

SEQ ID NO: 242456 - DNA, 409 bp, Gossypium hirsutum
cagggacgtgcagcgaatcctgatctggattcatctgatatggagaagctcttccgtgagcacataaagatgctatttgagagatgtgtgaacgacttcagagctctgttagcaaaagtcataactcaagatgcagctgctcaagagacagaaggtggtaaaacagcccttaattcatggtcaactgccaaacgtcttctgaagcccgatccaaggtataacaagatgccaagaaaagagagggaagcactgtggcgtcgatacgcagaggatatgttgcgaaaacagaagtcggcattagatcaggaggaagagaaacacactgatgtgaaaggcagaagctctggtggtgattttggaagatattcgtcaggtacaaggagaactcatgaacgtagatagttcgttt

SEQ ID NO: 242457 - DNA, 425 bp, Gossypium hirsutum
  unsure (1)..(425): unsure at all n locations
gtggccgaagctgtaaatgacattgtcaagcaaagaaaaagaggaggattttatggcaatgaaagggtgtaaacctcctcaaagacctagaaagagagccaagatcattcaaaggagcttacttgtaagtaacatcgatgaatttattccaaatttccaataatttaactattgaatcatatgtcgtttttgaatgtgagaattgtcatagccaacaatcgattggatcctttattttggttgaggtacccgtgtctaacccatatttggacataggtacgaggatatgaccctccaaggattctccaaatacatggaaaaactctgaaaatattgaacactcatagtctgagtaacatagagtaaattggttttgggttgtttcttttgcaaattgngtttacttatgtggtgaatggcagttg

SEQ ID NO: 242458 - DNA, 431 bp, Gossypium hirsutum
tgaggttttgggtgcaaatattgtgaagagtggctccaaaacatttgctgtttattccatatctgttacagatgtaaacaacaataatagctggtcaataaagagaagattccgacattttgaggagttgcatcaacgtcttaaacaatttccagagtataaacttcacttgcctccaaagcattttctctcaacaggtttggacgttcatgtaatacgagaacggtgtaaattgcttgacggatatttaaagaatctcctgcagcttcctactatttcaggatcaattgaagtttgggacttcctaagtgttgactcccagacatatgtattctcaaattctttttctatcattgagacattgtcagttgaccttgacagtaatccatctgaaaagagcaacaaggcctcaagtgttttggtgcctctgg

SEQ ID NO: 242459 - DNA, 346 bp, Gossypium hirsutum
aagccattaggggccgaaatacagctaatgggtagtaacggggggaatttcactttggattctgatgaaaatctcgacaatgggattaaagaagaagatgatttggtgaaagagaagtcagctgttgtggaattggctgttaatggccatgcttcacatgtcagatgtaaacatttagaggtttctttcggatagctgggtgaaaagcattgcaatcttattcttttgtaatgatattagtgaataagtgatgattgactttgcataaactataatataccctgttgtttgctgttttgctcaatgagatttgagctctatttcatgttcaaaacaaaaactttat

SEQ ID NO: 242460 - DNA, 419 bp, Gossypium hirsutum
cccacgcgtccgcttttatctttaaaaaaaccctaaaatttttgagatgttctctcaacctccagcctaatgtctaatgtccaggcctccaattgcccgcttgtaaccggcgaagcaaggccctccaacggtgcgggcacgatgcccgtgaaaaaatcgaaggctttatagccaaaagacaagcagtttttgcctatttctttgctcaaatcgcaggtgctgtgaggtcgtggagggggagtgcacgatcgtgggacgtggatgcgcgagctgggggcgtgccgacgtgcgtggtggagtggcgctgaacgtgggggttgcaacgtgggtggctaggagtaacttatggttttttttatttgggccactgtagagttttgggctttagaatttgcgtcaaaaattttatgtaattgggc

SEQ ID NO: 242461 - DNA, 403 bp, Gossypium hirsutum
tgaagagtgcacctgttcctcattcaaccacacaacaatctagttggagttctgctccttctactggcggtggcagtgatgacgatgagccacacagttcaagctaagacaaagaagcaaccgcatcaatccccttttttcgttcaaggtcataaaccaaaacattatcattattattatttttctttttgaaagtcttcaaaataggaggattcatttctttactatcacagttccgccgttctcttccatatcgaataagtctgtgccgccaaacccataaaaacttcaaccgaaaaaccctacataccttttccgaaaaaccctgcatttacattagggagaaccgagtcaaaaccatcctaattttcggagctcgtaaaaacgaaaacataggaatcat

SEQ ID NO: 242462 - DNA, 425 bp, Gossypium hirsutum
cccacgcgtccgatcaagctttgctcaatatcgagctcgatttttaattgggttcggtgtgcttaaacctacatcctttgtcccacaacccgtccatacattttgtttcaatttgaatactcttgagttgagcatataatcctaacagacctacctatttgtaatttagtaatgagaatgtacctgccaagggatcgaacaagcaaaaaaagcaaaatatcatgttacgtttctagtaaatatttgatcctttcttaatataaaaccatagatgtcatgacaacctaccaaccatgcatcatctttaaccctttttttttaaatggtgatgatgtatgcactaatcaaagtaattaattaaatgttcagtgtgagagcatgggagcagtggagaagaagctgaaggaaatggaactggaacacgt

SEQ ID NO: 242463 - DNA, 359 bp, Gossypium hirsutum
  unsure (1)..(359): unsure at all n locations
aaaaagagaaaaaagtagtgtgatccacatcagttatggcagtgtctgccaattatagatgtacgtaacttaggatgattattatttctgtcatatacacttgtaactgttagaatctaatttagttctttttctttaggtnaaaaaaaaaaaaaaaaaaaaaaaaaaaaaaaaaaaaaaaaaaaaaaaaaataataaaaaataaaaaaaaaaataattaaaaaataattatttatttttaataaaaaaaaataataaatttattatttaaaattttgggggggtttttttaaggaaaaaaatttttagtttggttgttttggaaaaaaattttttttttttttgggggcccttaatta

SEQ ID NO: 242464 - DNA, 407 bp, Gossypium hirsutum
gttgacaaagttgtgggggcaaggaaagatgatttgcagcagaaaataaccttacatatgttgaaagcatgaatcaacttcaattactctttgaattctgtaagctgtttctgaaactagaatttaacttatagatcttatacatatctgtctctcggatactaaaattatgttcttgtatgtcttgttcgataccttcattatgtgcttgtatttccttgtatgaacatcaaactcgaaattgcttgtatattcctactacaccaatctatttatatgttacaaatggctgtctttaaaaaaaaaaaattaaaagtttacattaataaaaaaaaatgaaaaatattttttgaatatttaataataaaatttaatagaacattttataataattattttttcataat

SEQ ID NO: 242465 - DNA, 177 bp, Gossypium hirsutum
ctcataaaaattatgaatgccatggttaatatggcccataatcccatatttagcttatggaagaacaagcctttttctcttgaattagtggtaaactgaaatgcaatacacgctgtaatctgtattttactattattttcatgtaatttcgcaaaaaaaaaaaatatatataaatat

SEQ ID NO: 242466 - DNA, 366 bp, Gossypium hirsutum
  unsure (1)..(366): unsure at all n locations
cgcgtgtggaggtcgttgtggaggtggcttgcggtagtcgaaagttagtgttacccatgttgaaaatttatttattttttgggccattcgggcctaagtttttaatcattttgggcttgtatttgggtaaggtttggtctgtaaaaaacaggccaattgggccgtgtttatttgggttttgtnaaaaaaaaaaaaaaaaaaaaaaaaaaaaaaaaaataaaaaataaaaaaaaaaaaaaaaaaataaaaataaaaaaataaaaattgggcgggcgtttttaaggttccaaagtttctttacgcgggcttgcaacgttaaagttttttttttattgtacctaaattaaattaaatggccgtggtttt

SEQ ID NO: 242467 - DNA, 331 bp, Gossypium hirsutum
gggttatcttttatccatctcgagactgcatgcagccatcttaggtctatttatgtacggaaaatttcatgctaacaaacttgtagttctactggaccttctgaagtacaacacatggagaaatggaaaattgttcttgcaacaataataactttgcacataaatgatttcatgtagtagatttataccggttcattggattaggagtgacactttatatcttctaactgaaataggttactttggcttcatttaagtgagaaacttggtttttgtttctatgatgttctaaaataaatttttgtttgcaaaacaaggactgatttaagca

SEQ ID NO: 242468 - DNA, 336 bp, Gossypium hirsutum
  unsure (1)..(336): unsure at all n locations
gtaggngctngggagcaatacctnggggagagcatagtggaacactcctaagagggcttatgtaaatcagaaccgtcacacatacgagaaagcagttaaaatatacaactaggagaaagctaatttgatagagagattagcaggtaagttagttgatgtggagatagccttttccttacaaatgatggcattgtagatatcatcattattatgattatggaggaaaccgttgttgcttagagagaatttatccagtagggtttgattattgttttttttgaggataaaaaaatataattattaatatatgatataggtttggtttcttttctcccg

SEQ ID NO: 242469 - DNA, 412 bp, Gossypium hirsutum
acaaaacgtacgaccactgtcgcattgtaacacgtgtcaccgatgagtggtgtccaaagtgcccattaattaaaggcagtgtcacgacaccagtcttgtggtgtcacaacatcaagtgaagagatgaaattttaattaaggtattttttgtccacacaaagtaacttaaacagcttttttgggttgtttaataaccttaattaggtctgatcataaactctataaatagatattttaagtctcatttgaggaggcttgaccaattgagtcacttagttattttagggttttactttagtttttattttcttccaatttaatcctttacatactttttgttcttgtttaacttggattcaattgtgatccaatagtttaatatagtagtttttttgttaaaaataaaaatcaa

SEQ ID NO: 242470 - DNA, 233 bp, Gossypium hirsutum
cccactcgttcttagacgcgtggtcggactcatgttctgactcgtggttgctaggagagcatattctcatgttcatgcaatctctgtggtgattaaggcctattcaaaggatagccagctaaatcttatgggagtggttatgcattcttctacatcattccatcaacatgttcattctttttgtcaacataattcttagaattatgaactgacaagtccttttacttccaaat

SEQ ID NO: 242471 - DNA, 406 bp, Gossypium hirsutum
cggacgcgtgggttgtttttcccttcgattccttcttcttccatgcgaagaaaccacctgtcttatccaaactcccttttctttacatttaatatcaaccgtctattcagatacagagttaatattgtatgtatttatattgactctgtgctgatgatgaaagtaatttgtacaatggctcatcttctccatcgcttagtaattttcaccatcttaataaccatggctgccaccgtcacaccaataacccatcaacattcaaaagaagcctctaaattctataattctccggcttgcctttcaatatctgaaccctatattttatgctcccatcaagcgcttcatttggcaatgaccatcgacaaagcttacatcaggggatccatggccgctattctttccgtac

SEQ ID NO: 242472 - DNA, 158 bp, Gossypium hirsutum
tcgcatctctgaagtgtactaattgtaatataatatgtactcatccgggtcccatatctggcgtatcttttacaaccaaaatattcctcacaaatttttaaataatgttattataaacttctaccttatcaaatacacctatagtcaaatcaatcttt

SEQ ID NO: 242473 - DNA, 400 bp, Gossypium hirsutum
cccacgcgtccgcccacgcgtccggctttcaacagctctatatggtgggattcaaaaagatgggcgtgccccttctcaaacccaattcgacagttagacacagtgaaggagggtttccaagaaagcacatatatagagcaagtggtggaagatgaaagtcaaatggaaggtataccacatggttgttcaaggattatgaactggcatctccatttagatacagacaatcttttttatcccaaaggctggttactagagaagaatctagaggttattttgcctattaagtgatggaagctcatctctacagttctttttatgcggagggcttaattggttctgcccatagtttttgctggtgcacagtagttcaaacttatctgaccagatttgccatcat

SEQ ID NO: 242474 - DNA, 435 bp, Gossypium hirsutum
aaaaaaactaaaggaacctttaatctctcccctctcttccccatgccgacgatcggtttcttcgtcgcaccaccgcaccaccaccgtatccggtggccggtaatgcgcaaaaaggggcttttagcctgcttcaaacggatccaaagcaaggctctccaaaatccgaagaaaaacgaaagaaaaggcttctccccttcccttttagatccgatctagacgaatgagaagagtctttcgacggtgtgaccgtgggttctccgtttcgtcttgcaggtgtcagacgcgtagaatgccgatggttggtgccccaagcggtggtggtggcgcgcgtgatggccaagggcagaggggggagtggcggctgaactttggtggctaggggtagggtggctgctgaaaaaaagtttaagatagtgggctgacttgggctttagg

SEQ ID NO: 242475 - DNA, 343 bp, Gossypium hirsutum
cccgaaggcaacagtggggttcaaaaactgaatagcatcattgaaaaggatgataagtcctgtagttcggttcttactaatggtgatgaaaccatcaccgtcgaaagaagcgatcaaaataatgtagttgttgcaattgagggattaggaataccttctagtttcgagtatcttggcgatgaggttttaattccggcggaatttttctacaatgaggggttatcgcttgatgagttattagaagtaccacaggcaactaataactctaattggattcaagatcaatctatcaccaacccagatgatgttgagttcttgaattcaagttttgttgacaatgatg

SEQ ID NO: 242476 - DNA, 379 bp, Gossypium hirsutum
caagattgttgttcagtgcatagaaagttacgctcatgcggattatttaatggcagaaaaggcgaaagaagatgtgtatgatcctttgattgcgttcttgaataagctaccatgaaatataggttaaacggattgataattttcccaagtttttgaacacctaaaatgttaaggtcgaatctgttgggaaaggcggtgttaatttgggttcttttattaagggttaggttgccattttattagttttgggtgtacttttatttcagttaggtaaaaagattagttgtttaaaaggacgtatggaatgataaattttaagaacctatcataaaaaaaaaaaaaaacacaaaaaattacatactaaaaaaaataatttaaa

SEQ ID NO: 242477 - DNA, 432 bp, Gossypium hirsutum
  unsure (1)..(432): unsure at all n locations
caaaaccaaaataccagccgaaacattttctcccttcttggtagaagacgattatttagatgaaagaacagagaaatccaaagttttaagtcctaccatggagattcaaaagaaccgtctccaaaaacaaagcataatacaacaaattttagggcctttgaagctgatccgccctatctttttcaactatcatcaaaaccgagccaagaaccccttcaacccagataccagaaaactgtcttctccttccttccatcgccaaagtgtgggccgctccatttatccagcgaggaacaaacaggcatcggaaacccattcactgagcaaaaagtaaagtcctttcacatgccctaccttcagcacgagcgcgtcaactacgtccgaaaacagattaagttctgctcctactatntctncttcagaatctctagc

SEQ ID NO: 242478 - DNA, 374 bp, Gossypium hirsutum
  unsure (1)..(374): unsure at all n locations
gacaacttcacagcgtgcatacaagcgctccaagggcgatcctttacgtggctttgaagatgaaaaattttctttcattgctttcagaagaggacaacgacctcgggaccgttggcctctggatggtatgaaatttgagactttgaaagagcagctgtgcagaccggagcatttgcagtagaagttacagtccagtaacctgcatttccacctcgatactcgttaattgacagaagcaacagagtaataatatgatgcaatttcaaagaacttccgtactgtaacaaggaataaacagaaaataccaatcacatgtaccacatcgaaagggaacaagacangatgactaanatcaatgggtaaaaaactcactc

SEQ ID NO: 242479 - DNA, 260 bp, Gossypium hirsutum
acggactgattgaagttatccttgaccaaaacatcttctaatgtctggatcactacctcggtgtgggcgattgtattagtattttctgtactttagctatctgaaaaatattgaaacaatttatctacaaggaacacctatctggagtatattataattcaaaccttgtttgactacaaagaagcatacaacttttcaagagctctaatgccgagtttcgatgtttcgcttgcttgctcttacccttgtactaaaatggc

SEQ ID NO: 242480 - DNA, 224 bp, Gossypium hirsutum
gagcgtcccgtccgcccacgcgttcaaccacacgtgccttcatcgtccgcaaatcccactaattcctggacggttgtgatgtgacagtagcctgtgctttcttatcatttgctgtgggacttgtgctgagtgtggtcagcccttgtgcgcatcatgatattgtctggctacatactgtgtagagcacatggatacaaaaagttattgacagtgcacccactcct

SEQ ID NO: 242481 - DNA, 116 bp, Gossypium hirsutum
ggaaaaagtggccggtccgatgtatttatgggcagagcagttggaagtttaccaaaggatgggctgaatttgtcttggacaataatttagatgaaggggatgtttgtgtatcagct

SEQ ID NO: 242482 - DNA, 337 bp, Gossypium hirsutum
cccacgcgtacgcttcattttccttgtccaaaacctcccggtccttcaaattttggagcctttccaatgtcgaacagccggtttattttgacgatgaagaagagagaggaggacccagcagtgagtccgttgtggaattcgaagacttggtacaaaacggcgtcgtttacagggagacgctgagattggtggagtgttccatgtttgctgctgttactggacttgtttactttctgagcaattctcttgcagtcgagaactacttcgggtgtttcttttcattgccggtcgtgatctcctctatgcgatggggtgttgcatgtgggaggaaacaagt

SEQ ID NO: 242483 - DNA, 328 bp, Gossypium hirsutum
ttatttttaaggacagcttgttggattaaataccttaaaagaaccgaaatgtaatgaatggtaatatcaatgtgtattaagttttggatgcccaaaaaaaaaaaaaaaaaaaaaaaaaaaaaaaaaaaaaaaaaaaaaaaaaaaaaaaaaaaaaaaaaaaaaaaaaaaaaaaaaaaaaaaggatgccagatctaaaaaaacccaaataaaaaataccaacaaatacaaaacaaaaacttttttaaaaaaaaaacctaaaggggcgccccttttaaaaattataaaattttaccaccgggaaaaccccggatttctcttatttaattcc

SEQ ID NO: 242484 - DNA, 306 bp, Gossypium hirsutum
  unsure (1)..(306): unsure at all n locations
ctttgatattcctctctcataaactcgttggttcggatatgcaagggctgacacaaaaggccggtggcggcattacaagaccgtcaatggctaaggtatgctttttgaaaaaatgggatatgttgtgggctatggtcgattgaatttcggtcatgcaaaattactcctgtacaaggatatgtaatggttttgaaaacagagcgtactcgataaaaaccttactcttaataaacccatttttgctctcatttatttcngaaacattttggatttgaaaattatttgggttaatgaaaacaacaacct

SEQ ID NO: 242485 - DNA, 393 bp, Gossypium hirsutum
caaagattcaagaagagagaaaaaaaatcgaaagaaagagatccgagaatcacctttgagaatttttttctttttctttttggattgatttctattcaaatgtatgcgtaaaaaaatccctttacaccgtttttaaccggctttatatagccgaaaataaaaataaaaatttacaaattttgattttttttgctctctttgctactgttattttttgctgtttgttatccttgttgtaatttgctgtcaatctatgttgccgctattctgttttgctactatgtacggcgtggagatggctgttcgtgggagagctgcggatgtggccatgacgcgctggagatccctgctgaggcaactgcggcgctagccttagggttccagtttctggag

SEQ ID NO: 242486 - DNA, 219 bp, Gossypium hirsutum
cccacgcgtccggtcgtttggcatttcttaataactgttttagagtctcccatgatttttaccgattgtaaacctagtgagatccctaattttataccctaaacatgcatatgcttctgctgcaaatggggaggagatactgttgtggatggtggactttaaggccatgaggctccccgtcagatcctgaaccaccagacccgttgcagatgtagaact

SEQ ID NO: 242487 - DNA, 322 bp, Gossypium hirsutum
  unsure (1)..(322): unsure at all n locations
cccacgcgtccgcactgctcgtgtatttgcaatccgagatttctgttagttccgagaccctcatgtggtgacttattgtatagttgcttagaagcatgtatacccaaatacttgttttgctgtaatttctctttaagttggacagtaaacatttacaaagaattatcccccaaatgtattgcatctatggccgcccttgncttgtttggtgtgtgtatctgctaaaggtaaagatcatatttattttttaccaaagcgtaacatattgtctactcaaatattaagtcgcaaaatcacatccgtttaaacttccaaaaccatc

SEQ ID NO: 242488 - DNA, 369 bp, Gossypium hirsutum
  unsure (1)..(369): unsure at all n locations
aatgctcagaagtcaactgagcagaagcaaccccagaaacctgatttcagcctagtgaaagagcagcccaagtatgatgaatggaatgcttctgatggttggaacatgcctgaaaatcctgattctactgtaccacctgtacctgtttcaagatatcaggggatgacaggcagaggaaagcgacatccattcaagggacagaagggtgggggaaacaactataattctgatcacaagaaaactaataatggggaagctgataaacttaactcacgatcttcagcccctgagatggctcaattagattcacctgctgcatcanaagagaatcgtggtggtggggaccgatcggcatctcattggcaaccc

SEQ ID NO: 242489 - DNA, 414 bp, Gossypium hirsutum
gtccagttcttaaaatcaaactcaaaccttaaattctgtgtcttccccctccccccctttgccgccatatctaacccttctgctccttggttcgtctttatatggcctgtactaatctttaaccagactattaatattgttagaggaaaaacaattcctagatacgatgttgtatttggttccattttggatagcgtttttagtaggtatattagttggctgggcttggaagccgaagtgggcagaactgttaatacagaaactgagttctgttgtatccaaatcgttggaattatcattgccgtcatcgtcttctatgtcgcctatgttctgtctgaaaaactccggttcttcttcatgtttgaactccttgaatatgcagccagaagcttgggttactgataatggagaaca

SEQ ID NO: 242490 - DNA, 153 bp, Gossypium hirsutum
gataagcgaaagatatcaactgcttttttactgtgtgaatcacctcacattaatgggttgggaaacctacatgagtgtctaagaaccacacttactcaacccagaacacttgttcttacaagaaagagaatttctacaggagctaaggcaaca

SEQ ID NO: 242491 - DNA, 425 bp, Gossypium hirsutum
agcatgtgcaccggcagggtcgtttggttttctgacactcctggcgctaatggccgggctggggcggttctctttttcggggatcctaaagcgggggttccccttgtatcatcagatgatacagtggattcgaagtgatggacaaaccaacgaccctgagtattgtcatatggtgcgacagagatcactaagtcacacaacagtaggttatacggcacgtttcgaagcaaaatcgaagagctcgaaagagagagctcgggatcattgatgatcgtcctggctgaaacgcggattcattcatagacgggtgagagaatttaaactgcaacttatcgtattacagtggttatttaaatccttttgtttttatactgaaaaattgctgtatattgctcctgctacaagagttccttttaaatgtacat

SEQ ID NO: 242492 - DNA, 205 bp, Gossypium hirsutum
  unsure (1)..(205): unsure at all n locations
cccacgcgtacggtttatataagtaattatgagaaccattaattagntagatcagataagtggtggatttatgtcgtgtattgcacttttttttcatctgtcgtgtaatatacatattatatagattattgtactaaaagttccagtacgaatgtaatactcttatctttaccatgtcctaaaaaagttttttgtacatttttcc

SEQ ID NO: 242493 - DNA, 293 bp, Gossypium hirsutum
taacgccttctgtcccgtacccaaaatagtgctttttcttcatttaaaaaaacctcaaggttagcagatttctcaacctcatactttcctttttcttttcgagttgaacccaaaccaaagaatggtattataccaccagaatttcttaaaaaaaatgttttattttaacccaaaccccccaaaattttattcccctccaactctgaacctgaatggaatcaattcaaattacaatcttaagggcaggagttccaccatcaaaaaaagaattgcccttttttttttgaattcaa

SEQ ID NO: 242494 - DNA, 220 bp, Gossypium hirsutum
aacagatacgcgaacgatgtcaactgcttcttcatcgctctccatcaactcatatcaatggcgttgcgaggcttacttgactctctcataacccatctttcttaaccattgacactttctattacacaatggataattagtactggacagaccgccacctctcaagttgataatttctcacaacacgatatcacttggttacacatctattctctatact

SEQ ID NO: 242495 - DNA, 417 bp, Gossypium hirsutum
caagcttcgagaacgagacctaaagagggacctgaaccgaatattctcctcgggaacaggaaactttcggacccgacaagaaccggttcaagcctgccgggttcaccgacagtcaagcccaaaatcaacccgaaaacacagtccaagttatcccacacggtttcgttaccggtcctagaaggcaaccaacgtgtggggaatccccggaaacatgatcgggtcaattcaaaacagcaccaacggaaaaacaatggggtggtcggaaaattcgactccgccatgggtttgtccattataatggtgactttggtaataatgttagtttggggtcgattatgtgccatcctttgtacctcggcttggttttattttcggtctcgttatcgaaccattaataatgataacgatactgaatct

SEQ ID NO: 242496 - DNA, 369 bp, Gossypium hirsutum
cacacttgtacaaccacacctaaattgggacctgacccgaatattcttctctggaacaagaaactttctgacccgacaagaaccctttcaagcctgacctcttcacctacagtcaagcctaaaatcaacccgaaaacacaggccaagttatcccacaccgtttcgttaccgatcctagaaggcaaccaacatgtggtgaatcccccctaacatgatcgggtcaattcaaaacagcaccaactgcaaaacaatcgtgtggtcggaaaattcaactacaccattggtttgaccattataatggagactttcggtataatagtagtttggggtcaattatttgccatccttagtacctaaacttggtttatt

SEQ ID NO: 242497 - DNA, 182 bp, Gossypium hirsutum
acgttcacgcgtccgaccaaagacatagcacggggccgatattttgttaaagactcatgtatgtgtcatggcccactagcagctgctcatgaccgtcggaaagaccgacagccagcctccgtctgaatcagtagacacacactcagtgatgtctcccggttacgttacctaacctgcaaagc

SEQ ID NO: 242498 - DNA, 383 bp, Gossypium hirsutum
gaggtgggacactcagatggtagaccattaacatggtcccttggttcctgacaaagtgtgggctgctgataagcagtattgtaccgtcctgggaaataccacttcggcacagaaaacagctcacggccactcacttaacccatggcatgaactgagctagccgattatatgaacttgtcttcacttgatgaaccctcagcctcaaaatttttctcatgctgaccgttctgttgtccggaggtggatcacatgattctgcgatctaaagatcaggctgcgttcactacgattaatgtgagaacagatacttattaactattcttccaaggattaatgatgagtgactaaatcctatcttttgttgggctctgcctacttatcta

SEQ ID NO: 242499 - DNA, 415 bp, Gossypium hirsutum
cccacacgttcgcgtcaatgaaatcaatttcctgaagaaaaattcctgtccttttacaggcaaacgcatgcgcgtacagacacaataaaaaccatacctctttggcatctgaactaatttctgtaatgcagatctgcttcatgccttgtcttagcagactgcaagcatatctacattacaaaatgaaaattttcactaaattgctttcatggagcatcttttcatcagaaatccaatttcaggttctgattagatgaggtaaaagaaagcttaatattgaatggcatgagacagaccctatatttatagcagattccaccttgtcccctgtcaaaacccacaacttcaagccaacttgtgcaagtttatctatacattagggtaccttgaatgaagaaagtaaaaacaggttgat

SEQ ID NO: 242500 - DNA, 194 bp, Gossypium hirsutum
cccacgcgtgcgagccaattgaaggttctctaattcgtttctttgtagcacggttcgtaatcggtaccgatgcccgagttgtttcgtggtgtttgtagaaaacaaggtgtaagtttctcgttttaattcattgtcttgtctgcatttagatgtttacacgaaatacaataacctaattaaaatgtctgacatat

SEQ ID NO: 242501 - DNA, 192 bp, Gossypium hirsutum
gaccaagttgcttagagttccgaccctatttaattaccactcattcgacccaaagccggggcttattcctcaaatgaaataatttctcatgactaaccaaatcatccaatgaagcgtcctctttgtctaaactgccctcactacaaaccaacttcacacattatcgaattaacaagtttttccttcttaaca

SEQ ID NO: 242502 - DNA, 415 bp, Gossypium hirsutum
cgccccaacctacactccatgcacacaaacattcttccgaactctatatcctattaagatagcacgcaatcgtcccaagctccaatccattcacaccaagcatgctccctacctatctttctcgtcagagcataaaaaaaactactttactgaaggaacattgtaaaaacgatccatgtaccaatcgccttaacattaaccacatccctgtcattgaatttgatgaacaactcataatataccaggcgcatccactgacacaacaaatgttctgacgcaaataccatgttccaaatattctgagaaacttcattctaaaaaagacaggctatccacacatgatgaaatcaaactcctatctcaaattactgactatttacaaagctcttcagactgttcattttgtgtattattc

SEQ ID NO: 242503 - DNA, 219 bp, Gossypium hirsutum
  unsure (1)..(219): unsure at all n locations
cggacgcgtgggcaaattctttgtactttacattccactatgaactatctctacctcttggttggtctctgtagttcgagtactatgttattcggttttaaaataaatattttgtaaaagacaaaaaaaaaattgtaaaatgaataaacttaaaattgtggnggttaaagggcggccgttttaaaggttcaagatttaataccccgacaatgcaattta

SEQ ID NO: 242504 - DNA, 414 bp, Gossypium hirsutum
cccacgcgtccgcggataatttggttgtaaatagaacaatggctttgaatttttcccatcggccggtctttcctgctaatttgactgaagataatctgctgtctcctatgagaatcgcgaatggataccttgttgaaggtgtagcagagaagaatggagatgggtgtatgaaaccttgtcattcggatcatgcaatggaagattgctttgattatggaagggataagggtggtggtgatcgatgtggttctcaagagtctgtttctaatgatattattgatcttttgccgtcggatccttttggaatggatatcactagtactttcaccgcaatttccggttggcttgaggccttggaattcgattatagtcactatgtgagggatgaggtggggactggtgataggagttatc

SEQ ID NO: 242505 - DNA, 408 bp, Gossypium hirsutum
gttcaaagaagggttcaacttgttaagtttgaagaaggaaaactatggtttttctttgtgggaagcaagaagtgaaactatgggttttgactccttcttttttttatttctttaaaatgtctttaactcattgggaaatggaaaaacttaagactaataagggttattacataagcgtaattggtgcacagttcttggctgtacgagaaattagataacagactagcatttcttggtgattttaagttggaagttgtcttacaaacaactacttaaatgccgttggaacaggtattgatcgatgcgtacggaaacaagcatatatgtgtgttgcatgagagcttgatttcacatataagagtttgatctagctttaggttgatttttggagccataaaattcaaattg

SEQ ID NO: 242506 - DNA, 125 bp, Gossypium hirsutum
tctagaggggcgaagctaacatacgcgatcatgcaaccccatccctcttgtatagtgatacctaaatacaattcactgtcctaagttatacaacgtcattacaggcataaccctgtcttgacaaa

SEQ ID NO: 242507 - DNA, 334 bp, Gossypium hirsutum
  unsure (1)..(334): unsure at all n locations
ccggggacgcgccaggcgtacggatatgacgagtcacccacaaaactattattatcactatcaattctctgggtttaccagtggcagttaccgttctagcaaggtgcagacgtttaccgactatgatttttaaccgatcagacccgtttcaaccagtcttgatgctgctggagttattaagtatcccaaaccttgtagtttatcgattctaaatctaagaattagcggtctctagattcccttgaacctgcaaaaggcattntttaccatgtaccaagcgccttcgacacattaaatttttgctgaaatcgatcgaaccattaaaaaacatacc

SEQ ID NO: 242508 - DNA, 256 bp, Gossypium hirsutum
atcggaaatgaactttagaaaagggaagtatttgtattatgcgcggggaggggactactgcaggggaatgaatcattacttgtggagtttcttgtgtggtttgggggaggctatgtatttgaatagaacatttgtgatggacttgagcgtatgttgatcggcgacttataatccaagcaataaggacgaggagggaaaagatttcctgttttattaagattctgagcatattaacgatgttacatcttttgtcgaa

SEQ ID NO: 242509 - DNA, 307 bp, Gossypium hirsutum
atcacacctccactcactccaccgcaaatatgtattataagctcggatcttgacctgcagaaggggactcaatcattgatgacaaccaaactctatatctttaatcatttcctatacatctctgaacacaccacagtgaagtcacccctccatatgaaggaacgctcctagattcgtccaacccccactctcaagatctaaagcagatacatttttcaaaccatagtgctcaccttataaacaacattaaaattgccaaagcctttaaaaacttgcaaccttatcggaaccaccacagtaaacctta

SEQ ID NO: 242510 - DNA, 413 bp, Gossypium hirsutum
cttcctttcaccatcttccttctccatcttattccttttaactattttccaactgtcttgcgccctagatgatttccactttacttcatgcgctccatttgattgtggaaacctttctaatatttcatatcctttctggaccgatcaatataatcgaccttcatattgcggttacggtaatgaagggtataagctgaagtgcaggcagaatcaaccccctgttatgacgctcagttcccaagaattctatgtgctgcatctcaatcggtctcatgatttgttgacaatcaaacgagtggaattgaacaacacttgtcctcagccgattttgataaacaatgtttttaatcatactgaaacagctgaaaacattactctgttctacgactgccgaagcaggggaggtccgaatc

SEQ ID NO: 242511 - DNA, 342 bp, Gossypium hirsutum
cccacgcgtccgcccacgcgtccgtggtattcttgctttgtattttccagcttctaaaagacattcagtcattgatgcagggaagctttatatgtttaataattttctattaatatatattagattaaaataaaaaaaaaaaaaaaaaaaaaaaaaaaaaaaaaaaaaaaagaaaaaaaaaagggaggacgctatataaaatccaagctgaaagcaaccgcccagtataagtcttaatttaaaaaaatgggaacctctagtctattaattggccgcatgattacaaaacaatcactgggaaaacataagaggttccccaattaaaaccccttgctgataatc

SEQ ID NO: 242512 - DNA, 256 bp, Gossypium hirsutum
gacccactcgggctttactgatcttaaaccgcgttgggataatttctcaaagaatcctcctgtgtttatccaaaggtgtgtcccttgtatagggagagaattgaaaaatttttgggtaagcaaatgaacgctggaatttagaggaaaacaccttgcccaataccctgtgtgtttatataaatttaaacagtagcaaagtgactgttcaaattaccatcgacaccatcaatacactagacgtcaatctcaactttat

SEQ ID NO: 242513 - DNA, 420 bp, Gossypium hirsutum
tcgaattgatgttagtatataagccagaatgattccttcaatatgtgctctatatctctgaaaaaaaaaacccgtccctttacaattaaaaatcgagggctttatagccaacatacaagcagcttctgctgtttccttgtccaactcgcacgccatgaagttgtggagaacgaggggcgtggagcacgggcgcgagcatggagcggggcacacggggatcgtgcgtggagtgccgacgtggggattgtggcgtgggtgacctaagtttccctaggttggccgattagatttagattttgggccatgggtattgggcctgtctcatgtaattgggataggctcattaagggatttgggttcgtatctacgctgcacagttttggcccattacatgtcatattcaataaaattgtgatgatt

SEQ ID NO: 242514 - DNA, 441 bp, Gossypium hirsutum
cgacccacgcgaccgggagagtataggagagagctatagggttttaaacttcactcattactcaaaccctgctaagagggtcgatatctacaacttctcaatttttcgccaatttcgcaaacaagactaaaacgaaaacgctattacacattacctcttttcttcttcttcttcgtggtcgtgcttcatcttcgtttcaatcccagctcacttcaaaaatgactaaattgccctagctcagcagccaaaatttcatgcccgaaactagctctttccacttaaatttgccgtcatgcttttttttcttttaattataagtttgaagtgtaaaggaaggatttttttttgttgtttgaagatgagagaaggaagccacggaaggggatagggttgctctggcgtgtttgatttcttggatcctttttgcaattttgggtttag

SEQ ID NO: 242515 - DNA, 429 bp, Gossypium hirsutum
cggatcggaatggccggcccacgcgacccgttttgtcaagacacgttctaagctgggtttataatgactattggggtgtgaatgccgcatggagtgaattacacactaggattgctgtttgacgtatagagcttttcattttaaaagtttctagttcttcctcgtgtgcaaacctcaaggcctaagtaactttcacaagtagcaaaggcatccatgttacgttacttgtgctcaatcatgttagatacaagaacatgtactttattgccatgttttcaatcttataaaagattatctgttgcttctatagctacactagtaagagaactatcgaatattcagcttttagttcaaggataatgtaattgttggatctcgaagatagtaactcggatcactttggttcttaaaaactcagtaattagatct

SEQ ID NO: 242516 - DNA, 405 bp, Gossypium hirsutum
cccacgcgcccgcactgagcttgtttcaaaatgactaaaggggggtgaatgccacaggtggtgaattacaacactgagagggctgataagaaataaaaagctaaatcataaaaaaaagataatagaatattactagcgtgcaagacctaaaaagaccgggggggcgtttcaaggggaacaaggtttacctccgcgggtatgcgaggtcaaagtttttttatggggaaacctagttcaatttcgcggggcgtgggttcaaacacaagtgactgggaaacccctggggctaccctattaagagaacttggggaaaatccccttttcgccaagggggaatattacaaaaaggccccccccatgggcccttccaacaatttggcccccctaaaagtgaaaggggacccc

SEQ ID NO: 242517 - DNA, 294 bp, Gossypium hirsutum
gaaggcgtccccaagcaagattttcacaaccaaacaagcaggaagtatctacaaagaagggggatgaggatgacgaatataactgggacatgccaaatgaagcccttccctattgatcgcattttgccatgccttttatttacttatcttcttcgcctttgagctctggcagttttgtctgtccattgtaagttgaattaagatgaattctgccacttgaattgcgctatgcttttctttttacataaatgaagtcaagattttcattccttagaaaaaaaaaaaaaaaacaaa

SEQ ID NO: 242518 - DNA, 292 bp, Gossypium hirsutum
  unsure (1)..(292): unsure at all n locations
cttcatattatgatgataatctttgtagaagggttnnnnnnnnnnnnnnntnnnnntggtgtgggtgttttgcacggtatttgtattttcttcttatacaaaccaagttcctgcttttttattagtggtagcctgccatggcaaaagagagactttttggggtgcaaagtttcttacaccctatcttaaggcctgtgtccggacctccattacctactcaccaatctactggctcgacagctgtagattgtaatacacgggcttggcccttggacattacgaaaagctgatt

SEQ ID NO: 242519 - DNA, 209 bp, Gossypium hirsutum
aggcatgcctcttgaagtcatcacggaattcttttccgttggatcaaagcaggctataactgctaaaaacacgggttattctaactgctaaaaacaatcgagtttggtgaattatctgttggaaagtttactgtgttttttcttttcttttttaagcattgtgtatacatttaagacataatgtgaaggtcatgatgatctctgagttt

SEQ ID NO: 242520 - DNA, 130 bp, Gossypium hirsutum
accgcatcaatgatgagaagttgtcagccaagcttataagagattactagcaatgtggactctgattggagcatactctcaaaactctctcctcctttaggtgggctagagcttggcaatatttgtctac

SEQ ID NO: 242521 - DNA, 307 bp, Gossypium hirsutum
  unsure (1)..(307): unsure at all n locations
gtgctcatcatgctttactacttcctatgtcaaatgattgctgctattctcatagatggccttcgtgtgcgattggtaactggtggaagaaaaaaagagggctaattatggcatatggatgcccacacgttattgaacattactggtttgattgttaacactttgacttggtgggtggtccttgtggcctggttgttattgtttatggcatctggtgcttttttctgtgtctgatagtgactgtgacagagaaaaaaatatgctnaattccctagaaaaaagagggtacaagcttatggctacatct

SEQ ID NO: 242522 - DNA, 410 bp, Gossypium hirsutum
atttaagtgattccaagtctcaacagttggacactggcgaaaaacgtggttactgttgttcatcttgatgacatcgagggcattgtgtgtccaccaccactttcttttgcttgaggttaacaagggaaggaataaaattccaagagattctccaaactgtcaatgtaacttttgaggggatgtataatttccatagcttcttatagaaattttttatttcggtttgtataaagtaattattaggatccatgttagactcctgtaatagtttataggcgcttctgacttagaactcaccggacagttcacctcgccatacttgaaagtcttcgtattctgtttttgccaatggaatctgcatgattttccttgcaatatccatactaaaggtattcataataacagttgtt

SEQ ID NO: 242523 - DNA, 403 bp, Gossypium hirsutum
gcccgacccacgcgttcgtttgaacattaattacactttagttcacaaaggcccatgcttatcggggggcttgccggtcacaaatagcctacctcaaacgaatatacactcctgaacttataaaaaacgctgctcacactgtaacattgaagcacatggcccggattttccccattcttggttaagcctctagccgggatgaacaatttattggagttatttgtgccatgatttctatgacattgcgaccattttcatggtttaattgggaaggactttatatatatatatatatatagctgagaacaatctatctttggatagacttggtaagccacaccaaagcatagctttgaatccgtaccattgtatttctatctttacactcatcaggaacccccaa

SEQ ID NO: 242524 - DNA, 438 bp, Gossypium hirsutum
cccacgcgtccgaaaattccagcccctttggatcaaactaatgtaaagctcggactcaaaccatcaactggtatctcagcctaggtggcggccacgccttctctggtggagggggagttgattctacccttgacacaatgacgacattgccgatcaatcattcattttcacaacgctcgaaaaactatctggtttccattttgaatattaagcaacgacgacgcttttgagtatttacagtggcaaaatgcttgaggccatcatcaagacaatatatgacaagaaatccaaccagcttctccaatcatttgaaatatatttatatgtttgtaaataaactgtctctgtgatccattaataaggtttttgtctctgatgtttagtttataatggcagcatatatatatgtgtgtgtgtgtgtgtgtgtggaagaaaaga

SEQ ID NO: 242525 - DNA, 302 bp, Gossypium hirsutum
  unsure (1)..(302): unsure at all n locations
ggttccccaaattcatctattagggttattaagatgtacaaaaatcccatgttgaatcttgaaactattacagtttgccaattttccatgttttatgaaggattatatacttgtgaaaatatatagcaagaggtacacacannanaaaaaaaaaaaaaaaaaaaaaaaaaaaaaaaaaaaaaaaaaaaaaaaaaaaaaaaaaaaaaaaaaaaaaaaaaaaaaaaaaaaaaaaaaggggnggnngaaaaaaaaagagaaaannnnaaaaaaaggggggggcgccgttaaaaaagatccaattt

SEQ ID NO: 242526 - DNA, 262 bp, Gossypium hirsutum
cgaaattgccatctgatgtatcatttcggctcaattaatattatcttaaattttgaagagttttacctactaagtatgtatgtatatatagaggtatatacggttgttataccgtataatcatgtaaggagatcgtacatggagtttctcttttgggtgaaattttggaacatgggcaagactaggcggtgtcacacaaagaaaaaaattgttatatataatataatacatgttggtagagaatagatgcaatgttcctttc

SEQ ID NO: 242527 - DNA, 258 bp, Gossypium hirsutum
tcgcacctcgcacctcggctctgtcattcatacctggtgtcgtttgaattagggcgaaaatagaagtgcatttagtcacatcggtcagtggtttaagtgaaatgtgtggcttactgctgaacatggatcacctgtgcatccatgcaagatgcgagaggtatctttacacctttatgaactggtctggaagactcctggctgttgggtctgagtcttatgtgatgagaggtctaccgagtttcactgagcactatacga

SEQ ID NO: 242528 - DNA, 315 bp, Gossypium hirsutum
  unsure (1)..(315): unsure at all n locations
agcggttaaaagccaagcttgaagaaagtcaggcattgcgtaaagaattagaagcttctcttcttgcacaaatggatgtggaggaaagtatcaagaaagagaaagaagaccttgtccgtataaccgaagaaaaagatgggagaatttcaattgttttaatcagtactttatgggctatcctttttttttttggtgtcctggacatgcaatgagtgttgtgtttgctacctaagttgacaagttagcttatgtttaaattggagtgtttcagtagatattattaaaatgatagaatttttgctgattgattggntg

SEQ ID NO: 242529 - DNA, 420 bp, Gossypium hirsutum
  unsure (1)..(420): unsure at all n locations
gacaggcatgaagttcttgtttcagtgtccttgctgttcttgtttctgcttcatgaagcctaagaaagggaaaccaaagatgaaggatgataaggctgagacaaaaaaggaagtgaaggctgaaaaagagaaggaagcgaaggctgagtgaaaatgatgatttacttacaatatattcttcactgctgctcaagtaaattgatcgaattcatttactaaggaatttctatccagcggcattgaagaattcaaacattcattagctattgcaatagaaagataaataataatctgggttgtaataagatcaagagttttcaatgaagtcaacaaatcatccagctatccagagagatgatagtgcaacagagcccttacaagggccatgaagctntccaatggttggtatcgtgacaatga

SEQ ID NO: 242530 - DNA, 289 bp, Gossypium hirsutum
gttaaactgtttggcctggagcctgggaccacttggagaaacgaggctctgtttcttgccatgatgaaaatactggaaaatacggaatgtgattgtgcaaaaacagtcgagatcctgatgcagtgtgaattaccctacaggtcttatgggtttatgcttttttggacaagaacaacttaagagcagcaactaaaatgtgggacttctattttcagacaattaagaacagacctattaccactgacagcaggtgtgacacggtttttttttttttgtagacatatgtttc

SEQ ID NO: 242531 - DNA, 295 bp, Gossypium hirsutum
gcggtggaatccggcgacccactcgtggaaaaacaattataataggcagagattgagccacttatattttggattccttctattcttgcccttgtctgtaaataagtcacgtgcaatgcctaactgctcggtatagaacattggtaacgacttaccctactgtcaatttttacacagtgctgacaaaagcccactatgccatcccctacggaccttaacgcagtaactggcatagtaactgcaagcagattgacctcaagggcgcagcaatgctgagatgagaccatgaactgaa

SEQ ID NO: 242532 - DNA, 216 bp, Gossypium hirsutum
tcggtttactcttatttgtgcttcacttgttttattggtggttgagaacaccattgaagaaggctgttccatgggttcatgaatccaccggtggctaggctttatggtgttgttcttgtgtttggtttttattttaataagaatttcctaaagcttattgttatcatatgaattgctttgcttttacatttggtttggtccctattcggtttaaaa

SEQ ID NO: 242533 - DNA, 297 bp, Gossypium hirsutum
aagctcttgtgtccggctcttcatagttgaaaagggtttagttttttgtattggagtcaaagctccatttatgtataactcataattttctgtatacagtttttggaggtggcgatttctgtttttagctagggaatttgcgacttaaaacttgttcaagagctgcaattggttactcgagcttgacagtttgctcgagggtttggatagaattattagggtgcaaaaattaaaccttattaaattagatagaaagaaatgacctggcccttgggtggctttttttgtctgccccca

SEQ ID NO: 242534 - DNA, 431 bp, Gossypium hirsutum
  unsure (1)..(431): unsure at all n locations
cggacgcgtgggtacgttctcttgaactagacatgtctaatacacctgatatggtgttcgaaggaagtgcttctgtcttggaaaaaccaagcaatgatgacgacgtgtgtgttggctattctgctgaatatggatatccccaaacaagaattgtcagataatacttctcaagggttgtaataccacttgagcattttaagataccttttgttgaagatgtcattcttttcaaaagatctgcagcttgacgagtccaccaggtgtaaaaattctagtttgtccgatagaagcacaaaatctgaactaaatgcttccattaagagccatcgttccagaataaaagtcacgtggcaatcatgtgcagacagctgtggagaactgaatatcacagatgctatacgagtagccctttcatcatncatcatggatat

SEQ ID NO: 242535 - DNA, 346 bp, Gossypium hirsutum
  unsure (1)..(346): unsure at all n locations
tttaaaaagaaagaaagacagactggagtatgcaatacataacctgcaactcttaatgcgaggcggtgtttttatctatacngctacactatagggagttaagttgctgcaggaacacaccaatgatgaccccaaaaacatggacgctattacttccattgatgcactcaaccctaccgtgttgaatggacccggtgttggcattaacgaagatcatgtcgtcctaaaaagcgctggaacaggcactattggttatgggactgacggctgtcctgatcaatgatggccttctggatggtgcggtcactgcaatgctagcggtcactttctaccattttatcaaatt

SEQ ID NO: 242536 - DNA, 364 bp, Gossypium hirsutum
  unsure (1)..(364): unsure at all n locations
cccacgcgtccgcccacgcgtccggttgctgttaacgatgagcttatacaggaaagtgacaatgaatgtgaagcaaaagtgacagtcagttcaaggaaaactaccagaaggagaaaaagtcgctcacaatgaggttcacaagtaaccatcctgaattataatattttattatcctggatttgattgttgcttgacaatttttggcaataccattgtattattgtttcataaatctgacatcgagaatggtaattaaggaatttgcttatatgcatgtaaagatccactgtatgctatttaaggaattatttagcaatnacattggatcatttgtatataaatctgacaccgagtatgctatttt

SEQ ID NO: 242537 - DNA, 296 bp, Gossypium hirsutum
ggtattgttatgccacattgcattatctactgagcaaaaaaagctggccttttggacccattaccctaaaatgtgtttaaccaatttctggtctgggggcatccatgttgattgacctaatatgagagggcactatcattaaaatctgtcataaaacctacctgtataactgtctgggttttgcaggagttggttaaggtgttgtgccagtgcttatggttaataagcaatgatatggctacagatgaaaatgaagcacaacgagaaaaatagaaaaagcgtgcagaacacattat

SEQ ID NO: 242538 - DNA, 463 bp, Gossypium hirsutum
ggtgcagtaatgcgtcgcgggtgctatgcggcggcccatgtgcaggctggcttcgctatacaagttatcagggaggtgtatcaagcgctctgggaacaagcttattggcatctcaaattgcactctgtatatgccgagtgtgttccgcataggcggacagctcgaggtgtgttcgggcacattctgaactccagatgtcgactgtatgtgacgtgcagctgcatcaacgtaattcctatgacctgataggtgaagacattcatggtgatgcgctgataatcgctgaacatcagattgcatcgtgtccagctcgttagggtcgaacgggttcttttgggctgggcttactggtatgatatcttctgggtctttgcttccaaatggttgtttcatgagagtgtgatgatagtggtagctcgtggtgatcggagtggagaggatggcataccaatgctactaaaaa

SEQ ID NO: 242539 - DNA, 189 bp, Gossypium hirsutum
  unsure (1)..(189): unsure at all n locations
tccccacctcgggattgccatatgagtttttgaagccgtcttgagcctggggtcactgggaagggagttcttacattncattgcttaatatctaaagttctgttgggatgctcgaatgccttcggtatggatggacatgtgtctactgaaataaaatgacctttaaaataaaaataaaatgaagctgaa

SEQ ID NO: 242540 - DNA, 428 bp, Gossypium hirsutum
cggaaattgacaaaacttgtgatgggttatgttgataagtatgtcaaagtataagatgccatcaaacttgttcccatgcatccaccgttaaaaggttttgattaaacacgtaagcttctttccttattttttcccacttgaggttgagggccattgaagcttttagaagtatttctatttgttgtcgtgttttgaaaaaggatctaaaacctagagccggttggtttgtgtagttttgaatggttagggggataaaggaaaagctaagcttatgagaaggtgaacaaggcaagagattatctatacatcttaacaaagttctatggaacatgaatgaacatatatgtagtactttgtttgtatattgtcattccttgtagatatccagtctttgtcattgactaatgctgtatgtgatcattatgatg

SEQ ID NO: 242541 - DNA, 304 bp, Gossypium hirsutum
ggcggaatccgggtcgacccactcgaaaaaaaaaaaaaaaaaaaccccctaatcgaagcttagatctgagtgttgattggcatcggccatcctggggtcaactttttcgcgtttgtttcccggcgaccatttctcaatcaaatggatgcacggatccaccgtgagtgcctgatgcagggggggactgtggctcatgccatccctgggaccagaccagccatttacgcagacggcatactacgcctgggaaaacattccggtccaccggcattatataactgcacctgactagcaatctactacc

SEQ ID NO: 242542 - DNA, 306 bp, Gossypium hirsutum
cccacgcgtccgggttccccatgtgctaaataacatgtaatgggcctatttagctcgggacccaataaaccaaaattgaaaccaaagataatgttaatagcccaaagtccatttacatcaaaagcccgaatagcccaaatcatttaacccattttacaaacaaaacctaaaacccattttttaatggcccgataggcccaatgcctaaaccaagtttcagccaaccgaaaccctagctagccttagcgccgcgtctaccttctgccagccacgtgcgtcctcggtgcaaacatcagctcgagggtc

SEQ ID NO: 242543 - DNA, 407 bp, Gossypium hirsutum
cttagccatgccactgctggtcttcgtcctgctgccacctatagagctgctcccgagtacctatcaggcattaataatggtggcaggacatcacttgcattcaggctcatgccgcaaggcaatgctatattagattgctctccagttgcagctgctggtcatgtcattccacaaagctatgtaccaatatctgttagccagtttatggatgaactttctgctgaagaagatgtagtgtgcaatcgttctgataatacttgtgtagctcgaaacaatttgaataagcagccttcattgagaagcgttctatcagaccccttgtctggtgcattccttgaagatgctgtggttgtttcttgtggacattcatttggtggtctcatgttgaggagagtccttgatatgtc

SEQ ID NO: 242544 - DNA, 287 bp, Gossypium hirsutum
ctgatgtctcaaccatgacatagacgactgtactaaaaatgctatgccctatcgacatcccagtcatggctcagataccgcagatacgactagctgctctatgattacacatacttaacacctaacaaactctacgtgcacttatactgctacttgtgcctgcacattcggactgagtgaggggtctgtgttgactggatgtaccttgtcaatacttgtgctgatcttgatcattccaaggtctctgtaatatgtgaacgctcttttactgaactgagcatatggat

SEQ ID NO: 242545 - DNA, 418 bp, Gossypium hirsutum
tttccagaggagaaaccagacccttttagggtttcctcgaccctcaaacgccgccgctcagcctcgcgccaaggctccgactgcgacggagatagcgccgactcgacgaatccggcgagagaggttcggtggccgtggagtgcgcccgtacgtggaggcgcaactcgcgcgaatggcggctactgttgcggagggggtagtgcgcaggctcgcggcggctggagagggtttcagcaaattgatttcgctgggctagggtttgagaattggctgttgggcctgttattaggcctgctagtgttggactggttatttttttggttgggtttattatgtgggcctgggcattattgggcttgtacaatatatatatatatgaaattagtggtaagagagaggcaatttcattttctccaac

SEQ ID NO: 242546 - DNA, 415 bp, Gossypium hirsutum
tgcagcaaaaacagtacaagtctaagaatatagaaagttccatagtttttttcctcatcagccgatagccctatacaaatcagcaaaagctgcaaacaaagggatagggaaaactcacattaaagctgagttcaaggtacattctgtgaacatgaagaatgccttgaacatcagcacaggttttctttgtttatttcatcacatgtttataggtcaaaacaccaggaaaatggactaatttgttagcaaactagtcaaaaacacctacaggtcctggttttcctgtttttgaacccagagtacttggatatgttacagcttttacatttttcattatgtatcacatcccccatgaatgtcttatttttgttaccgtaattgtctgtcattgccatatatataccctgtcaaatat

SEQ ID NO: 242547 - DNA, 256 bp, Gossypium hirsutum
cgactaatatcaattatacgacggaagggcatttaccaaacgttaaacgcaggacacagggatctgcggtgcgggtaataatccatggataccccatggacatgaataacgagttcaactccatcattgctgccggcgcatcactgagcgccgttatgggcgctaatgcacactgatagttgcgattacgatgaggttctagccgtatcgactctaccgctcgcttactaacagagtgagcggattacagcgtctg

SEQ ID NO: 242548 - DNA, 426 bp, Gossypium hirsutum
cttttattgatttttgtatataagccagaatgattctttcaaaatgggcttctaattcttaggaataaaaaacccgaccctttacataattaaaatttggcagccttcttctagaaactcaaaaagctttctttgtttctctgtccaaccccagcagcttgtcagtctgtacactgacgcaccggcacactccggcttcggacaaccgatcaaaagaaagctccaagcctcctctatctcttctccagattagagttcacaaacatagcctcgaactccatgaaatcaacacccaagtctcaaactaccttaaactcgatttatgccattggctgttagataggcttggaaattcagttatggcctccctgccttcccactgttggggttctcgaacgaagactcaaaagatttaagaacctgata

SEQ ID NO: 242549 - DNA, 355 bp, Gossypium hirsutum
  unsure (1)..(355): unsure at all n locations
gggctgnnacctaggcattttaccccaaacttgtaagcccaactacaaaaatccattttttagtttgtttttgatttgcctggcgatcaagcaaaggattgtaaaagcggctacgtaggatcatattacagttacaatcaaagatttcaatgtgttgnattttgggtgctttggcgatgtccaattgtacatacttgaaaagagaagctgactggcaatggcatctgcctctgccttcttaacattatagagagcacttgatttactaatgattgatttggttattttaaatataattcatatctaaaagtattatttttttttttttttttacctaaaatatttttatttttat

SEQ ID NO: 242550 - DNA, 134 bp, Gossypium hirsutum
taaaaagcttattaaaggtaaaaaaaacacttttccattgagttacctgaaccgtatttgggtggcgactagcatggcgatggtacaaggtcacggtaaaatccaatgtcaaaactgtaaatcaggcatcaagt

SEQ ID NO: 242551 - DNA, 134 bp, Gossypium hirsutum
tcgctgacgcgtttgctgactcatttgttatctttgttttaaaaatattccatgatttgcatggggtggtcatgaattttggtggttcattttgcataataaacgagactgctgttcgttacgtacctttgtcc

SEQ ID NO: 242552 - DNA, 240 bp, Gossypium hirsutum
cattattgtttattcttccttgtaattcattaaattcattcccttaagcttctcattcatgggaacgagttaacaaattgtacgccaggcttacctctgttcttaagacaccccatgattttttcacccttgttcaattttagttgaatagtgaaaatcttggtccactatatttttctgtacataataatttaatttctatttttataactttttttttaaaatatattaaaatttttt

SEQ ID NO: 242553 - DNA, 347 bp, Gossypium hirsutum
acgcttggttgttaaggtggccattaatgttcatcaaagggtatactctcagtgttaattctattgattcgttgatgtatgataaagctgaggatatatacttgcttactgagaagggttgtatggctggtgaatcttaagaataaaggtggtactattctctattggcttagatataaactgaagttcattatgaatgaaaaacaactttgtcttctttgtcttattttaaaaatatatattatttaattaattttatttttaatatttttttcttaattatttaaattttattataatattttaatatacttattttttattataaattgattctgttttttttt

SEQ ID NO: 242554 - DNA, 204 bp, Gossypium hirsutum
tgatctgttaaaatattctatactattgtttttgggatatctattttaaggctgatgttgctttttgatcctggggtgtcgatgaatatgtcttcaaacatactgcctttggaacctagattgtgtctgagtcacaaaaaagactacctacagaagataaaagtggcgctggcctcagatttcatgatcacaaagagggagagg

SEQ ID NO: 242555 - DNA, 330 bp, Gossypium hirsutum
cccacgcgtccgtttcgtactttcatgggttactgctattagatctttgttttaatatttgaggtttgtctttggacgctatgatgaatcgtcaacttcgatgttcaaatgccttcaacttctgtttggtacgttgaacctctgatatttggatgtcatttttggaattctttcatcttaatcctccaaagcatgtaaagatctacttatatatataaaaatatattgcattaaaaaaaaaaaaaaaaaaaaaaaaaaaaaaaaaaaaaaaaaaaaaaaaaaaaaaaaaaaaaaaaaaaaaaaaaaataaaaaaattgggtcctcgttat

SEQ ID NO: 242556 - DNA, 216 bp, Gossypium hirsutum
acgctctctcgatctataacttgtggatctcctttgactcctgaagctggtgaaattgtggagagagctaattgattaaatggcgttattcgaatcgattgctttcatgtagagttctgttcatcttgtagacattgataaccaaaataatgctgaaataatatgatcctgaaaggaatggttcagattaataatattaagttttcttatttaaat

SEQ ID NO: 242557 - DNA, 227 bp, Gossypium hirsutum
ctctctcccatcggtcgtttccaagtataagatagagaggtctccttacaaccaccgtgatgggtcgtgttattcgagctcaacgtaagggtaccgtttcgttcttaaggtcctaccaacttactatagtatttttacattttgttttcttactttttatattatactttttatatttaattttataatttttttaattttaattttttcatttattttatataatt

SEQ ID NO: 242558 - DNA, 412 bp, Gossypium hirsutum
  unsure (1)..(412): unsure at all n locations
aaaacccgggccgacccacgcgtacggaaacatgcttttatttttatccttcttaatacaatgcganntgaatctagtcaggtggtgtttatagcatacctggtggagtattaaggattggtgctgcataagatttaggtccaaacaattgccaaaaattgcttgtttaacttctttcttgtgtgtctgtattacacctttcaaacagaaagatcttgtgttgaacacattgatacgtggttcatgaatgagaatctatttaaaaaaatatatctattcttatgatgtgtagttacttgtttctgttcattgacttttaatgttataagtaacatattgctgtttgtataaaatgttggacttatgtcatatattagtacattattaaagctcttttttaaattatttttgt

SEQ ID NO: 242559 - DNA, 141 bp, Gossypium hirsutum
aataaccgggccgacccacgcgttcgtgtttctctcactgctattgacggaaactttaatccttttgctttaaatttgttcggcagtgttaattttgaagcaaatgagtgacaaagatggtgggtaagcctatttatttat

SEQ ID NO: 242560 - DNA, 435 bp, Gossypium hirsutum
gtcctgagatggagtcccctcaggtaacttttaagtaaatatcgagagggttgggtccaagaagaagaacctgcaatcaactgcgaaaaacagtggcagtcttgacacagtggttgaagtgttccatgaagctgatactgattaccagttatcaaggccgaaaaggaaaaacttagaacctgatcatgatttcttggtggaaactcaacttacaatggaaactcctgcggatgatcctcctgacatgatgactgagaacatcaagaagcatatgaaaacacattttgaaactccaggagctcctcaagtagaatctttacagaacttagcggccggattgaacaagaaaggagcagctcagctcttctatcggacatgtgtccttgcttctcaaggtttcttgaaagtgcaacaaaaggtggcgtttggagacat

SEQ ID NO: 242561 - DNA, 458 bp, Gossypium hirsutum
  unsure (1)..(458): unsure at all n locations
caaaaatattaaaaaaatacaagttttttctcctttccttcttcactctggttgtctgaaaagccgaacattctatgctctttcttccagcttaagcaccagcagatccgctatcaggttgcatacttttagtgtatggttcgcccacatatggattcagtaccgtcatagctataagagagtgctgtcaatcctcatgcttctgcaactgacacatgaccattcttgaatcctgcctttgggccttggtgtattaaaagattgtaaagattttaagaagattccacaaagtggatgggataaactgtatatatcctttgttcctgctgattctggaaaaacgactgcgaagacaaccaaagcaaatgtgagaaatggaacttgcaaatgggctgatccagtctatgagactacnaagcttctncaagacatcaaaactaagcagttcgatggaaaac

SEQ ID NO: 242562 - DNA, 318 bp, Gossypium hirsutum
aaaacccgggccagtatccgaaaacctaaagattctctttcccaaaccaatcttttcatttttcagcaagagagagagagagaacttacgtttcttttacttcgatcatcagcttagggtttcttaattcgattcccctatttccctgttccccaattttacagatcaggtctgtgtgttcttgttgttcttctgtttctatccgctaagatttatgtctgatctttgatatttagattcttactgtcttagttccgtttgctgtttcaaatgcttaagacgctatttcttgtgccaatgtatacttttacatttttt

SEQ ID NO: 242563 - DNA, 345 bp, Gossypium hirsutum
cccactcgtccgacatgatctactttgagtttcttatagtatatatactattgagtctgtgaatgctttttgtattattacttctagttacaaagagggtaaatcttgctctgttataaataatataaaataaaaataatataataaaataaattaaaaaatattatatttatttttttaaatatattatatattaattttttattatatttattttatttttaatttattattttttaattttttatatatttttatttttttttattatttatttaatttatattttttatactatgattattaaatttatttttactatatttattttatattatattttat

SEQ ID NO: 242564 - DNA, 177 bp, Gossypium hirsutum
aaatttagaatatagttttagtttgaaattttaacatcaggggtctgctttgaaagttgctggtgcttataaagaaaaaacggcagggtttttgctgattaaaagtgcataatctaatggttggtgtcggcgtaagtttgttttgattgtaagacagtaaagcttgtctacaccaaa

SEQ ID NO: 242565 - DNA, 417 bp, Gossypium hirsutum
cccacgcgtccgcccactcgtccgcccacttttccgcggacgcgtggggtaattttgctgctttttttctttatttaaaaaagaacctcgaatcttatgatattcttttaaaaaacgaaacaaactttgaagatttaaacaaaatctcgataccattcgaccctcgcccacatctatatatttttgagatgttcgggctctcatcggcgtcgattcgagtatccacttcatgtattcatgcctaaattgtaagctaatcacaagaaacgaacaaaaatacaaatttggaaatcaccttccaataactttcgtcttgatttctttagatatccagtgtgcctcccaaaaaaaaaattacaatcgattccccctggctttatagccgaatgttcaaataaaaatacaaattttcttttt

SEQ ID NO: 242566 - DNA, 452 bp, Gossypium hirsutum
  unsure (1)..(452): unsure at all n locations
gttacttatttttttatttttggggttattaatgtacgacttcttcctactggttcctcgtgggaggcaaatcctgaagcggccttcatgtttgatgctgcaaatggtcatgagaatgatggtgatcttttactccatggccacgctacaggtaataaatcaagtttttgcatttattatattggttttcatcttctttatatcttaattctcccatctgattggcaaaggatcatgtcctgctcattcttgattaattttccttgttaatttaggatttcaactttctgaaaatccttcttcagaggcagtttggaaatcttctccataaaactccacagctcaagcagagcattacttggccatttatgtcgtcttatttttatcatattatcgtgattgtgcttcccccaatgtttctattgttgctgcaactttntatgttgaacatg

SEQ ID NO: 242567 - DNA, 466 bp, Gossypium hirsutum
tcggttgtcacaacataaatttattatggactatttgatttctttgtcgcatatgcatacataaggtggggatgaatggagccctaaccatgtggacacggtgtggtgttccttcattttatggctttgttttataatatataacatgttatatcctatgcggtcatatttagcttctagctaaatgtggaatctagtttagagttgctgttcttttttttttccttttacttgtttttaatatagctaattgatttttttatctctgatttgatatttatatttttaatttattaatttttttatttatatatttttataaattaattatattatatatttaatatatttacatatattatttttttttattatttatattttattttctatatttaatatatatatatattatatcttattcattaaattttttattttttatattataattttttattatata

SEQ ID NO: 242568 - DNA, 135 bp, Gossypium hirsutum
ctcatcgacggaccggtttccaagtcctctttaaaggggcgccggtaagggtgtgagccctgtgatgctttttaccttgttctgtccaagaggcacattttacttgtcgaattgtttttaaatgcatacataatt

SEQ ID NO: 242569 - DNA, 301 bp, Gossypium hirsutum
aaaacccgggccgacccacgcgtacgggcgctacattttgtgaactccttttcttatcactccaaacttgaaaatcatcaggaggggcttcattcagcgggatactgagaatcatctaggctacattctacggaaaggtatactctatcaactcctgtatccatgttctactgttagaatcaatatattccgtaactaaactataaaattctttttcaaaaaaaaaaaaaattaaaaaattatatataaattaattactatattataaaataaatatatttaattaattaaaaacttattt

SEQ ID NO: 242570 - DNA, 175 bp, Gossypium hirsutum
atctggtttatcccaatttcttaatcacagtcatggcaagtgggttatcagtgatgtttatcaaggcagtttccccaatggggctgaggtttgttcttttagaccgtcgtcttttttaactgtaagatcctggcatgagttatccaatttgtcaaccatatttttattgagttag

SEQ ID NO: 242571 - DNA, 396 bp, Gossypium hirsutum
cgggtccgaccgcacgcgtccgcccacgccgtccgagaaatgcagtcttccgaatcttttacgactcgtaaaatagttgaattgggtcatggcttccgccgttgcttccgttgcgaagaataaaactgcattcgacttcccggaagagccaaagaaggtattgcatgaataagtagaggatctagaaacaccctaccttttgtttctgcaaattcaatttgtataattcagttagtctttagggctttacaccttaatgataggagcagagcagataacatatgatgttgtactgttttcatacaacggcccgtatgtatagacacttcttgacttaaatatataaaagtagcagttcatatctcaattattaaaaaaaaaaaaaaattaataaaa

SEQ ID NO: 242572 - DNA, 222 bp, Gossypium hirsutum
caaataataacaatcacctgcggatccccattcgccagttattaaacgcaggtctcattcagttccggtgcgtttaataatccctttatacgccatggacatgaagaaggtctccaccgccatcattgttgctgccgcctcaatgtgcgccttcaaggcctgagatgcacctgctgcttcccctaccgcaggtggtactagccctagcttctctcccgtatt

SEQ ID NO: 242573 - DNA, 173 bp, Gossypium hirsutum
cccacgcgtccgatttgaaactgctggcgtacctatcatagtctgcaaacatgtgtatgggggtagcgaatttgttaggatcatttgttgcaatgattttgatggatagactggcaaggaaggtacatctcattggtagctctacaggcagggtagtggcactgtatctacag

SEQ ID NO: 242574 - DNA, 247 bp, Gossypium hirsutum
  unsure (1)..(247): unsure at all n locations
ggaattangggccgacccacgcgtacgcccacgcatccttacctactatggtggagatcctgtaccatttgaatgaaactaaaaaaaagtgatgctttaaaatcccatcaaagtggtcggtaacttagttcacaattctctcttcatcatcgattacaataacaatgttacaacatggttcatcggtttgggtatattgtatcccgtttgaaatgtctacatttttttttgtgttgctttatttgtt

SEQ ID NO: 242575 - DNA, 411 bp, Gossypium hirsutum
tcgcccactcgtccgtaaagatctgttctttttttctgaaactcccaaggagcctgccgggggtgtatcatatgaacttgagccaaaccgaacctctactgatgaaaatagatctctacttttttatgcttattgtctatccttcttttgaaagtaatatagaaaccccttgaattttagtttttgtactacattcaatttattaattttatgtatttagtaattaatattaattatgtatttttataaatattaatttattaaatcatataccattttttaatttattatttttatttaatgataatatttaatatattcattttattaattataactttatatcttttaaattacatttttattattttgtttaatttattaatacattaattataatttattatatat

SEQ ID NO: 242576 - DNA, 382 bp, Gossypium hirsutum
ataacagttcttgaatctttatttatgtcgcattcatgaaaacccaataggattcctaaccttactgcttgttctcctgcatgtgcttccgccgcaaacggtgaggcaacattttcatgaatgaccgattttgagaccaaaatatccccttgcatgtttctaactagcaaccctgatgcggatttgatgagttgttgatcgaatgccctatttaaagatatgactaccctcgttcgtcgttcttcatgtattagccaatgcctgtagtcaaaattgtctgtacagacttgccgtcttttgtgtccttctgactttaattagttaacttgcctttattatatgaattagtctagtttaaggtaatttttatccagtgtaattt

SEQ ID NO: 242577 - DNA, 155 bp, Gossypium hirsutum
  unsure (1)..(155): unsure at all n locations
cccacgcgtncgccagattttgccatgctttgttgtttttgtatattcagcacatacttccgtattctatctgaggtctttttatttagagggtatatttatattgtttttgaaagcattaatcatctagaagtaaattggactgttttggattt

SEQ ID NO: 242578 - DNA, 355 bp, Gossypium hirsutum
ttcaaactggctatttaaatgtattttcaaccaaatagccattcgaaatggcgaattctaagacggctaattctactgtgtcattttgaaatctcatatcaaggggtgaagctaagatagtttcttaggggctaaatgaagagctaaatgaaatataatctatatatttatcaatattaaagaattaaatcatatttttataattataaagaggcaatgtgcgatgcttataactagaccctgctcgagacttaaattggcctttgcccaaatcatcatatcagatgactatttggttgacattatggatgaattcaaaaacctattcaaaggcttatattttacttaataattt

SEQ ID NO: 242579 - DNA, 285 bp, Gossypium hirsutum
cccacgcgtccgtccatttgtacattgcttatgaattgtatctaggatgcgacgatgattcggaggatctaatacaattctgatgaaaggcgatagctcttttttgctgccagactccttattatgccagaaccgaccttacgtgcgttcaaatctatgagatacttatgggttgactggaatggacaatttcttgctctaaaaccctgatgtctcaacaatagaagcacgtccaccacatgaaaaagaatctacattgatgaacaaaatctaggagatgatgtt

SEQ ID NO: 242580 - DNA, 428 bp, Gossypium hirsutum
  unsure (1)..(428): unsure at all n locations
cccacgcgtccggaagaaggtcgaaacgaaggaaatttaatggaaagcctttcatctctctattctgataatcaaaacaagcaatctaaagctaatgcttcaccaatgtccgcaactgcgcttttgcaaaaagcggctcaaatgggttcaactagaagcaatccgtccttctttggcaacagtttcggtgtaatgagctcatcttcctctcacacagcacctactttcatggcatcaagcagtgcatcaatgagtgcaacaagcaacaagcttgataagctcatgttacaaacaggaggcaaaccaagtgagcccagtctattaagcatgcatcacccttgttcaaattcattcgctcaaagcttgacgagggacttncttgngatgagcaatgatcaatcaccacgtncatttttaccccaagaact

SEQ ID NO: 242581 - DNA, 262 bp, Gossypium hirsutum
cccacgcgtccggtcgaagattcgtgcgatgaatcccgacgcgccttcccttctagatcgcatgcttcggctcctcgcttgccatggtttagttacttgtgtttcgtgaaagctcgatgccggtgcggatgatggaaaagatggtgagagagtgtatgagattactttggctggtaaagcttttgttaatgacgaacataatggatctttggctgtttttactagcgacaaggctaacattgaagtctgataagttgagttc

SEQ ID NO: 242582 - DNA, 262 bp, Gossypium hirsutum
gactggcaccatcaaaattcgtactgaattaaatcctcaagtttaacgtcgcggtgggggactgttataaagcattccaatcaatactagaacgaaagtgtctaccatgactaaggctgaggacgtcattgcttaacaaacggactgatgctcgaaaaaaagcttttctttgaaaagcagtgaagaacgaccctcgttttggtaacaatttgttaaaagctgagaagtgcttttgggcagacggagaagtaaaaatttttag

SEQ ID NO: 242583 - DNA, 395 bp, Gossypium hirsutum
aaggaaaggtggtgattgccactgacaatctcataaaactgtcaaccgacggaataacatggaaccctggctccgccggatttgattcacatgggaaccttgcattcatgatctgtgatcctatgaagctagctacctctcctaataccaagtcatctgggacttcttcttcatcctcatcgtcatggaagaaagatacacctatgcagttcggtattcccatacccgtcatttgcgattggttaaaccaacattgggaaggaagtcttgatgaagttaccaaacccaagctaccaattattagattgatgtcttcaagccagaagagtgagcattcttctgcatcctttacaatgcgccaagttttcaaagtaacaagaagacgatatgacata

SEQ ID NO: 242584 - DNA, 347 bp, Gossypium hirsutum
atataataccctgtcagatcagaagagtacttacattaaagctagaaggtgactgtcttgtcatgctatttctgcttttgcatatgcaaacttattaattgcatttattgtccatatctgatctttaatattaacttctatacatacaaggactacactgcatttagcattttccctctgctttactatctttaaaagttttggagggtgctgaagattggaagcaggttatagcacacattcaacagcttgtttttgatacaatttcggcatgctgtctgactctgttttgaggagttaatggccttggatgctgctgcattgctggttcagatactgggagctac

SEQ ID NO: 242585 - DNA, 366 bp, Gossypium hirsutum
cccacgcgtccggtttttttatattttttatttttactttttttttttttgggggttggttttttttttttttgccaaagaaatggtaatatgatttcccggataaaagtttccaggttttgaaaattaagggaaccaaagggcaataggatccgcggggaaaggaaaaaaagtagtaaaaaaaaaaaaaaatagaggggggggggggtttaaagggggccaggttttgtgcccggggcagctaagctgaaaccttttataagggggctccaaaataaaaaaccagggaggtagtttaaaagggggggatggggaaaacccggggtataccaaaaaaaaaggcttggaaaaaaaatccccttttcc

SEQ ID NO: 242586 - DNA, 394 bp, Gossypium hirsutum
cccacgcgttcgcccacgcgtttgcccgtaattacaaagagtaaaccaagagcgttacaatcgaaatgtgtgttggaaagggaacctgaataccgccatacatcagttgtacacaaaaaagggtggattcaatatcccatttgatttgaacatctctgacacgtttccaaagttgatagaaatatggaaaagaaaccctcaagaaatcttggagtcgaagaaccttagcagaatggagatttataaatgtagcagcttgaactatatttttaccccgtctatgcttttgagcctgaagcaactaagaaggatagaaagtaaagaatgcaatgcaatggaacaagtgatcaaggaaagacgaggagggagcaaccatacataatttgatattttc

SEQ ID NO: 242587 - DNA, 312 bp, Gossypium hirsutum
ggacataaacatacccatatctgatattcacttttgaatcctgaacccgggtaacatggactatatttactggcattatactcttagcttgagaagaacttgaacaagagttgatagtgtatagacatttcacactactcaccccctgtatacatgtattggtatattttctgtacaaaggtcaccaacccgttgcctatcgtataccactccatcaaaaccttcggggtcctagaaatgcaagccaataaggctttgatcacttcccctgatagtatacctacaaagtgagatcagtgttaactgattgag

SEQ ID NO: 242588 - DNA, 365 bp, Gossypium hirsutum
ggtgtattcatcatttatgtatataagaggaagaaaaagtaataaatcttaaaaacaaaaacctattttgaatcatatgaaccctaatgaatactttgagcttggttgtagctttgttagttcagagtttcatgattcttgaacttagtaaaatttactttcggctgctgagcagagtgatttgaacttgtagaacgtaaatctatacgatatatatgtacatgaaaagaagaatgtgttataccttattctctggtattgagaagtgaactcaacgagctcctcggccacatgcatcggaaacattcttctgcccctcaacatgagggctccattcattaattgtcattttgtaatacaactat

SEQ ID NO: 242589 - DNA, 350 bp, Gossypium hirsutum
cccacgcgtccgcggacgcgtgggttgcaaaccaaagtgtgtagctagcagtttgaataacatcgtttgggtttcgtagtaaaaaatggaggaaaggaaacctggttcaccatcgagaactcgtatttatctgatggttaactgtcaagtattcatacatgtgtaaaaagttcatagctatttgagctgttgttttaataaactgactttactatcggtttagcataggctgctggtcctagaagaaatgtggctgaatgaaccaactagtctaagtcccgagttggtgggatctaattcgaatcaatttatttacttacagtatgcgatcagttctgtatatatttgac

SEQ ID NO: 242590 - DNA, 332 bp, Gossypium hirsutum
cagagagaaaataaccaccatttgcaggtttaccctgttgcttaccgtgctagggtcttccatctgcgggcactctcgcgaactagccggctcaccgacgccttctccggaaaattcggggctgattgctgggactagaaggcctggatctttaccagcttctcgtgattcaaagtgcaagcagtgcgagccgaggatgccggtccaagcatcggttcgggcggtggagatcgaacagaatgactgctaccctcagtgtgagcatgcatgtgccaagagaatatatacgcaccttaattattaccaacatatatgatgtaacttgcttatat

SEQ ID NO: 242591 - DNA, 268 bp, Gossypium hirsutum
atttacttattcggaatcggagcggtgacggcccctttttggacccagggccctttgccggcgagccggcggatgacattgcaggtggagtgtttggtgggcggacattcgtaaagatgacgcagtgtgctaacatgagctaacagacagaaattctgtggaacaaggggaaagctcgatgattctgattccttacgaaacaaccgtgaagctggctataatacttagacttagattgaactagagaggagaaagtacacaggatact

SEQ ID NO: 242592 - DNA, 225 bp, Gossypium hirsutum
cccacgcgtccgataataaaaaatataatataaaaattaaaaagaaaaaaataaatgtacagacgaggctagagtgccaagacataaatgaacatacatgcaacagaatgcaaagggttttggggttatagaagacaaattcaatgaccgctggtgtacaacgtaatagggggggcttacttttgaaataactgagcttacttgcctggcatggcataccgattt

SEQ ID NO: 242593 - DNA, 257 bp, Gossypium hirsutum
gccacgcgtccgcgaagcacaaaccattccatccccaacaacacgcataggaagatgcataaagagaccattgtggtattgctttgaatgggcaaagcgagcttcttttgtttgaccaagcttttgaataactgtcaaaaagagtgtgtagttgacacttagggttatcagcatatcattctatcttacaccttagaaaggatataacagacccagcgataatgaacgataaaactatagggacagaatcgacggat

SEQ ID NO: 242594 - DNA, 228 bp, Gossypium hirsutum
cccacgcgtccgcccacgcgttcgcgaaaacggaacggcaagactgagccaggaatttgacaagttggataattctgaatcagagaatggtgattccttgatgtctctttctcaggttgaccttacatcagttgctgaactgcctgctgcagtaccctctacattccatcctgcagtatccctgcagggttcaccaggagaaagccctgcatcatggaattcatgcat

SEQ ID NO: 242595 - DNA, 339 bp, Gossypium hirsutum
  unsure (1)..(339): unsure at all n locations
cccacgcgtccggcatgtgcgaccaatctttcaggaggtctacaagagagtgcatgaaataagtagctcgccattgcttacaggtgcagaccatgcgagtatccgtgctctcatttatgtcatcaactatgttttaatgacttgtaaatgaagaaaacacatgaggattttgggagtcacagttaagtttgtacaagtttctggttgttttcatgtaaggaccctctcctctgctttgctttgcattatcaggacagttggggagagggggtcctggttttgttatccatagatattttgaaactgtacgaattaatgaagtatttctcagannaaaaa

SEQ ID NO: 242596 - DNA, 277 bp, Gossypium hirsutum
accacgcgttcggcatgtgctttcaatctttaaagacgcctacaagatagtggatgaattaagaatctcgtcattgcttacaagtgcaaaccatgcagagtatacgtgctctcatttttgtcattaactatattttgatgactcgtataagaagaaaacacatgaggatcttgggagtcacagctaagtttgtacaagttagtgggaggtataaagtaaggaccctatcgtgtgatttgctatggattatgaggacatgtgcggagagcgggtcttg

SEQ ID NO: 242597 - DNA, 306 bp, Gossypium hirsutum
agactaggctgtcttagcccatcatgatttatttttttgcccctctagcctgattccagggggggccttttagattgtagagtggttctttacgaacatgcaaaaccagcatcacttgtgacaaacacattggaagctgatcctacatgccttgtgccaaaccgccatcgtccttgtgcaaataactgtagttcttacggttattaggcgactacaaacctacgcgctaaatgtatacaaacctttgttagaaggcacacgaaccatctggcttcactattcgcaaattctttttagccttcttct

SEQ ID NO: 242598 - DNA, 378 bp, Gossypium hirsutum
aaccgtggccattttcagcatactacttttgattcaggtttcatcctgcttgtatagaaatgacagcagaggaggctaaaagacttgaccacttcttttgtgaaacttgttcttcttaaggtaagaaaaagttgcggaattcccatgctgcttgcagaccctcggatacaaaggtggatacaaaacgacgccggaggtgacaaaaaggtacataaaagctagcattttagtcaagatacccaactcgactcgttttctcactgttaaccatggagtaggcttggagcaaacacggagactaatatacgtaccatccaaatctgtaagccttgtaagtttataatccttgagttgacagtaaagtgtttgaaaacttga

SEQ ID NO: 242599 - DNA, 302 bp, Gossypium hirsutum
tttgcaaaacgagatccacaagacctccattgagagggagacattgaagctcgaaatgatgagtgctcaaactatgatcgacattctacaatcgaaaatagattttcttagcaaggaaaacgaggatctaaagaagagcaactgagtcgcgtggtacaggagcctaggttctttccggttctggttccttgatttcctttccttatttatgcatgtattattgttcaccggcacgattgtaaacttcagatgacattaacattcagtttgttgatgaacaatgttgtagctttcctccttaa

SEQ ID NO: 242600 - DNA, 383 bp, Gossypium hirsutum
gcgaccggtcaatcgtcgacccacctcgataattaaatggtacatggctatgctacttatttcttcctagcggggaagtgtgtgttttgcgtgttgtgggatctgaggattataacataaaaagaagagaaagtgtgactgtatgattacaatttcaattacatcatttctgaatgcggatggaaactgcatttacactgttacaactgccatatgattgtgctctatctttctggggagcaaagagggggggggggatccagttggctggttgttaatatcttttttcattgagcagtggggttactacgagcatggtacacacaagttactcgattgctgaaaccttgtcagttgctggaaatgctttaaagataaaagtg

SEQ ID NO: 242601 - DNA, 275 bp, Gossypium hirsutum
cccacgcgtccgggcttctgcagataatatcaaacccgaatgcagtggagggaagggcttcttccgtgccgtctgcaaccaccacggttcctaacgatttaagagccaaaatccgagctatgctgatggcgaccttgtagtaaacaacactgaacctgttttcttgtttctctttgtatcagctttggtcttttcttttttgaatattagcattatactcttatataatagtggcttaagattcatatatgatcaaattaatcaatttttaattg

SEQ ID NO: 242602 - DNA, 419 bp, Gossypium hirsutum
gatgcatttggacctgatgcaatgaaatgaacaatatttccatgaaaaaagcttctaaaaactaaatgcccgctgaagttaatttcttgatggttatcagattgagaattttattgcttgatgtacgtctatttcctgccttctgaaattgattgttctgcagctgcattgagagtgctatcatacttgccacttccctactccgctttaagtgcattcttgataattccaactccattgagggatgcagtttatgatttcattgccaagcggcgttatgactggtttgggaagagtgaagactgcctagttttgcaagagagcgagctcttggagcgatttattgatagggaagaaatgatggatcgtaatcgtaatcgatcaaatttgtaacttggattctcttaatacaattagac

SEQ ID NO: 242603 - DNA, 424 bp, Gossypium hirsutum
acaaaatgcaatgtttctctttcttttttttgctgctgttgtgttcgtccttttacaggtacggggtatgctggcgcctggcgtggggcgtacgggggttgtgcgctgggggctgctgaggcgtacagaggtagttggtgcgtcgtacggtgcgagggctggggcttggctgcggcacgagggagagggccctagggtttctgaaaccttgacattttgggcttttcgggcctgatcttgcagttgggccacaagtttttgtaattggattgtaaactggattgttatgatttgaattttttggtcttgtatttgggttagattttggttaagtttaatattggacttttatttttttgttttggtttttttttgggtttctaatgggtcgggtaaaaatggcccattacagttggttctaagc

SEQ ID NO: 242604 - DNA, 272 bp, Gossypium hirsutum
  unsure (1)..(272): unsure at all n locations
ccgattccgtcgccacgcgtcgcacgcgtcgccaccgtcgattgtacatgagcgcagcttggtgtatgggactntggttccaaaaacgtatntacacctgaacttctcttctctaaagaccaggctgcacaataaggcgatctgtatgggatcatagtccatgcagcctntctactgcacagaggaccgacggatctttatcatcaagttcgagtgagagaacttctgacaaataaaagggaagatagttcaagccatgttgggaaacttgc

SEQ ID NO: 242605 - DNA, 416 bp, Gossypium hirsutum
  unsure (1)..(416): unsure at all n locations
cccacgcgtccgccccaagtttgcaaattatttggggggatggtttccttccaatatctatttctcttttttctaaagccggatttcatgcctttggtccaagggggggtatacccctttcaaagaaggtctacccggtcattgccgataaagcctttggatattggacttattacctttaatggatgccctaatggtaaaaataggggctgatgtagtctgatagtacccattgtattttaacttacaatatgatcccttgctatcactctggattttagactttagatggtggtctgaggtgattctttgtctaaagcccanatgtgagccntgtaganttctttgtattataacagagtcaaaatctcagaagcagaaatgcagcagaggccccttttacatgcctaaaagtt

SEQ ID NO: 242606 - DNA, 384 bp, Gossypium hirsutum
ccggaaacgagtactttttaagtaaaaggaaaagcccgaaacaacaatatgaatgttgatttatagtagttaattgttggtgtgtttaaattgtgaacaggatatcaagaggtgatttaggaaacttgttcatcttgaaaatgatcgacccttcttaccgcgtccctgtctagtgaaatgcagcattagcatcatcgctctgccattgagctttactaccaatggatctactcttacaacagtggtcttgtatttgatacacagcagacagtcattttttatgttttatggctttatatatatttcatgtaaagatttgtatttgatacgcatacattatattacaacacatttttaataaataaatcatattgacttatgatt

SEQ ID NO: 242607 - DNA, 431 bp, Gossypium hirsutum
  unsure (1)..(431): unsure at all n locations
cccacgcgtccggtgacaagtggaaagttataagtaatagcttcggctatacttatctgatcaagtgacaaagtgataagtgatagcttcggctacacttatctgatcaagtgacaagtgaaaagtgataagtgatagcttcggctatacttatctgatcaagaaacaaagtgataagtggctacacttatctgatcaagaaacaaagtgataggtggctacacttatctgatcagggacaagtgataagtgatcatacgtaagaccatagttatactatggcaaagtgaaagtgaagtactcaattttccgtgaccgttccctaatttgattaaggatggtaagtgacaaatgggcccaaaagaattaaagtaaatggataagtggtagtgtatttatatcangacgatgttgttattcaaactaaagtg

SEQ ID NO: 242608 - DNA, 283 bp, Gossypium hirsutum
cggacgcgtgggttaaaaaaaaagtttaaaatttacggtccgtttttgttgtgaaagtgaatggaaggagtagacgacttagctatagctagccatgtggtgcaagttgaattttgagttggacagagattcttcattttcacattttcatggacaatggacgaatttgagcccatggaccattgttgaattcgattgtagacattattttagacctttgtttgagttttccagctccctcaggattcggaatcataagaatataaatcagttttctttcttt

SEQ ID NO: 242609 - DNA, 225 bp, Gossypium hirsutum
ctgacactatgacgattagagctatctgcttatctccttccgcgctctctgctgagacaaagtccaacccgtgactctcaatctcgatagcaatgccagcaactgctgcagaattggatctcactcagtcttgtcacaccgcctcttctatcgtgaagtatacattcgcacatgctggaagcttggaccactgtgcatagtacttgaaccagacgctcgatacct

SEQ ID NO: 242610 - DNA, 194 bp, Gossypium hirsutum
ctcttctctcctaacctttcctttcgcttggaaagtcggattggaagggttgccaaatggtggtaaaaccgaattcctttccagggggaaggggaaattttattattccaaaacctttgtagggggaaacttgaacttaaaggaaaaaccttggattgtaaaggttgtgggatccagaaggaaaaggaacctta

SEQ ID NO: 242611 - DNA, 431 bp, Gossypium hirsutum
gccaccaggaggaaaaaagcaaaagaaccctaccgacgatgttccggcaagcgtcacgcctcttggctcgaactaccaccccatggaggggaagtcgagcattttcgtcagatgtaccagccacacttgatttggatggatttgaggttgttcatgatgtgatttatttactttcggattgggctaaaggggttattccctttgatactaatactaaggttgatggagatcttggtctttttctcttcaaaattcccctcaaggcaaaagtgtcctgtgaggtgtacatggatagaaataatcagtcaattgttcgtcaagactgctatgctgagtaatgtggtggacagtgctccaatagatgtactagaagtgggaaacagattcggattctgctgtgatttggttcctctttgatgatactgtacatg

SEQ ID NO: 242612 - DNA, 431 bp, Gossypium hirsutum
gtaggatcttaagggatgtggcttgtatatgggctaaaagtaataagttcatttacacgcaagatccgataaagtctatattcatcactaatttcggtggaagggtaaagtttttacccaatttaaatgcatctgaccaaccaatcgaaggtgatatagatcagttaaaatatttgatgaactacatcgtcaatatgccattcaaatctgttattcaaaattatcagaaattcaatatgccaaatgaactatcatgttttcttacccagctcaattttcgacacttgtaagttatctttcacatttttacttttactttaaagttcgataactcatatggtctacttcattaatttcataatcttttttttacttatttgcctatgtctaaatggataggaaatacatgagtcctacatttctactggatg

SEQ ID NO: 242613 - DNA, 382 bp, Gossypium hirsutum
  unsure (1)..(382): unsure at all n locations
tcttgatgtttacaatcatgtcgatgactttcttccctgacctaaaacaaagcactatttcaaagcaaaaaataagaaacaagaaataaaatccaaaaccagatcaaagtctactgagtgacagtattgttggaatacgtgaacttgggttttcgggctctcgaaatgtttctgatttcatgactttgtgtagaactttcttcgagaaaactctactggttgtgaaagtaattgaatcaactggtctgaaagaataaatccaccttgatatggtatatttctattcttctgcaacttaaagacagtaaatggaataatggaaatgaaagcgggaccttgtaatatttntctgtatgtttagagcttatattttccttttcag

SEQ ID NO: 242614 - DNA, 410 bp, Gossypium hirsutum
tgcaataattatagtctgaaacaatagaaataatattgtattttactgtgtttttattcatttgtcttttgcccctccatcttcaataaatattgtctaacacattttccttgttagcggacataagcgtgggagatggagtccgagaaatctgccagatagatattaaaaatgtataattctatctgctctttctctttttcctcttttcatctctcaaagatttcaacttgcagtctgaatataatttctaaggaaagataaccacaccttataactccttatccttttctgggttcatttttcatcaaagccacccatgaatttatcgatcatgtattctgaatttgaagttgatgacctcttactatgttatgaatttatgaaaatttcaactacaagtgcataaa

SEQ ID NO: 242615 - DNA, 411 bp, Gossypium hirsutum
cttttggaagaatatgctatagatgaattggtggacccaagattggaggattgctattccgagcatgaagtctattgtatgctccatgccgcatcattatgcataaggcaggatcctcattctaggcctcgcatgtcacaggtgctacgcatattggaaggtgacatgcttatggactcgaattactcattgccaagatacgacattgggaaccgcagtggccgggtttgtgcagaccaaaaatattacagtggatccctggaaaatgaggcattagaagagttcaatgggaagctctaccttgacgggctaaggtcaggaaccaggaggacttcgtgcgcagatcatctgtaaaaagcctacagggggttctttacacgcatggtacgcatatcaatctatcaatctata

SEQ ID NO: 242616 - DNA, 113 bp, Gossypium hirsutum
ctaggccagacaccaaacgttgcacctttaaaaccaattttactatgcccaaactgtgacggcaaaacgtatccaataaggacgcatgctcaagtaacaacacaaatggatac

SEQ ID NO: 242617 - DNA, 347 bp, Gossypium hirsutum
atctagcccttgcagcacatgtttccaccaatccaacaaagccaattttatcagttcacatctctcactacccactgggggaagcgtggtaacttccttaaaccaccaatcttattatagcactagtatgcactcgctattatattgttcaaataactacaactaatctacctgtcgacttattctctatactgcaggaaattacatattaagcttatccatacccaaatcctttcccgtaaacaacatacccaagttgatctataatccctataataaaacgctctctctatgcagcggactataacgttctatccacgacaacacctagattaccaaacttactt

SEQ ID NO: 242618 - DNA, 268 bp, Gossypium hirsutum
cgcctacgtaaacttttattctttaaattctacccactccttttataatcacttccttcaacataaaaaccggccgatttaacttcttcacatattcttaaactatttttacttacactttatctaatctaacacaaccccttattttaaacctctttaatttctttcttaccttttttattttttaaaaaaccaaccatacatctttacataaactcacccttcaatttttctttctttcctcataaaaaaatatattataacttct

SEQ ID NO: 242619 - DNA, 197 bp, Gossypium hirsutum
ccagggagttatccctaccagaattaaattgtacactcctcatccctttctaattcatacctatttaagaaatccttgcgctgtttaatttatcatttgatctttattcttacccttgtaccacttctattttataatcttttaatttaatcccacttaattcacaacgcttttctatatttatcatttcctctatc

SEQ ID NO: 242620 - DNA, 315 bp, Gossypium hirsutum
gctctacccggatgcactgatcaaagtaccctatgacctcctaaattctttcacaaccattacttactccttgggtgagatataatcacttcctaactatcatatctcttttccagtattccataaaattctttgctaatattatatatcaatctacctactattattcaatatacaatcctttaaattttttatctttataacctaatcttttcccatcaccaacatattttatcttatttcttattcctattataaaaagtttattttataaaccttactatcattttcttatacatctcccttatctatatt

SEQ ID NO: 242621 - DNA, 188 bp, Gossypium hirsutum
tcgatggacttactatctacactcgcaccatactctatcgccacttttacgctaattcatcttaaaccggttccggctaattcaatcgactaataattccttccacactcctaactttctcatcctatatcaaaaccttatctatctattctatctctcgcctcatgaggggttcggactacagcaaa

SEQ ID NO: 242622 - DNA, 240 bp, Gossypium hirsutum
ctagcccgggcagcactcattaaaagtacctacctttgctcttaaattgattttccaaactatacatccttaaccggtcagtggggtgtcacatgaatacatattccatgcttttactaactgtattaaataatgctatattgctcaatagtatactcacgatctgcactactattcatacaagggcggatccacttatctgcagtaaaccttatatcaatcttatcgataccctccacc

SEQ ID NO: 242623 - DNA, 234 bp, Gossypium hirsutum
gcggccgctctagcccttgtaggcatcatcaaacatacccaacaaattctcttgtttcattttaaatcccccacttcctaatggggggagggtgggaacattttcaaagcaccacatgttcatataggaccagtatttactggttattatattgttcgataaactaatactagtctatttgctcctataataataataagctgataccccggactgaagtaatttcatatcaaa

SEQ ID NO: 242624 - DNA, 171 bp, Gossypium hirsutum
agggccgacccacgcgttccaaggcatcatttcacctaagggcttccctacccaagtccctcaaacgcctgaactaagcgtggtgtgccaatttagtccatgactagatctttacctagttttcaccatattattttgttcctttagatcatctatttaatatatcttgtc

SEQ ID NO: 242625 - DNA, 326 bp, Gossypium hirsutum
taagctttgattctttataatctacccactccttctctcatatacccctccaaaacacggtttgatggattataaacaatttggcttccaacgtcacaaataaaattttttctctggtcatcacacaccattattgcataaaacaggaaggtggcatttgtgagaatcattgttctgatcctggtgcaaaagaagaaccaacatcttacggaacaaatacacctatatggaatgcaccacatggtcccttttctacagatgagaacttccctgtgaaattaacgaacccaaacactgattaattataaagaaaagtaggtcttcac

SEQ ID NO: 242626 - DNA, 156 bp, Gossypium hirsutum
tctagccccgaagcactcatcaaatgtaccctatataatcacaatattctctttacataccactttcacttactcgataactgggatatcactaccaccccattcattatcaaatcactcatcaatatataccaaattcaatatctcattaataaa

SEQ ID NO: 242627 - DNA, 348 bp, Gossypium hirsutum
ggttaatccgacaaaactgaggtgggaaatgttagcttacaattgtcagaatgtggaacgggtagctctatgtggtaatgatacagacggtgatgccgagatttgttgaattgctttgaagtgtatatctccaaagaagctttgtatttagagatgccccatatcatatcatgggatggaagccctcgctagtggttgccctgatttggttaaagggaaagtgacagaacgtggaggcgtcactccggaacgggcttattggtctagagtactttatggggtactatccggtaattgggctatgggggtacatttacatgtgacggccgatcatggtgtattacagga

SEQ ID NO: 242628 - DNA, 325 bp, Gossypium hirsutum
gtcacgcgtccgaccacgcgtgcggggaagggcataacactgtgagtaaaaactgaaaaggagaagaacgaaaagacaagctctaaaggatgcaaggcaatgaatcaacaaggttagtatgttcaattttaacaatggatcagtcttgtttctcttacaaagcttgtcgtttttgcgaaacacctgtccctgatgacacgcctgccgtatttatctgcaagaatcacagatgcgccggtcgcctgtgcagttctaaacgactatttcgcttactcttttcaaatggaacaaagacaaggggtataaatgttggaacttttgataa

SEQ ID NO: 242629 - DNA, 219 bp, Gossypium hirsutum
gttcgaggaaaaaggccagctcagacgagggtgagttctccttcacagatctgggatgcgctggccttgcattctttctattagtgtaaagaattatttctaagatattgattataggagaggatgagctcgctaacatgtcacgatagcgagtgaggtgcacgcgccgcttagatacagcggaaactgacgatgctctggcgctttacactgtagatc

SEQ ID NO: 242630 - DNA, 444 bp, Gossypium hirsutum
  unsure (1)..(444): unsure at all n locations
cgataataattaagaatcatagaatatctttagagcatatagtttctttccttcctcctcaggcaccagtgctttttccaatcctcttctcctccaccagccgntgaagctagcatccaagaggtaatattattagcatggtagaagataagaggagccgaaagatcgtagataatgaggtattagtgtagccgaaaccccgaatgccagtagatagctgcattagcaaatagaaccctatgattagggcatagcgagtcaagaggcatcgattagtagtccagattcaacccaggtggatatttgcggtgatcccagccactgtgagagtttcgtgcacatatttgccatagaattcttactatccggaaggaaaagtgagcattgataagtgcttagtgaattttaagtggcacctgctcaaaatcatcccatagtcgatcc

SEQ ID NO: 242631 - DNA, 289 bp, Gossypium hirsutum
gcactggcctggttcgtgacttagcgaactcggaaatatccttttatgtgctgtcctccttacatttatcaagtttatataatctgtctatatttacttgggttatttagatcattgaacaatatgttggccctatctatcaacagtatctttcctatgtgaatgctaattgcttgagaagatttttaaccatttgcttatttagtttgactcctttgttagaaacacccgggatatgtttaatcttgtaaactaagacctgttctttattcaagccgtctggcctttc

SEQ ID NO: 242632 - DNA, 232 bp, Gossypium hirsutum
gctgcttaaaaatttattgcatgagttttcagctttcatatcagaatgccgccctgagtttttgcctttcacatttccagaacatttaaaattgtgttagcattgaacttttaatctggatccctgagagatatttattctgtattggaactaagagaatgcttaaagcttgataagactaataaccatttgcttatttagattgactcctttgttggaaacaccccggata

SEQ ID NO: 242633 - DNA, 181 bp, Gossypium hirsutum
ctaaatatataccgggtgcctgctgtatacaggatgcaagctcacacacacacgcctgctgggttctcaccgccttataacgtcgcctatgagtgaggatattcagccgcgtgttaccacactgggacctggaatgccgtgggccggcccagccgaatacgatggtccgacagccccgttt

SEQ ID NO: 242634 - DNA, 377 bp, Gossypium hirsutum
aaaaacatgaatcccacaaggcttagcacagctttaacttgcacatattcgtatattcgacggagaaatatggcgactgaaaagagaattggggcggctctacattcctcatctaattgccagagtagcaggaaaacgggctatggaaaacgttatccgcaaagagaatcatcttatccttattaccattcatcccgaaaggaattattagaaaggcgagacgcatctctgggaaagcatcggtccacgcttaaagcctcatgaaaaaggatcgaggtgatccacatgaaaagaaatttgaggctatagatagtatccttcttagctgcataatggtaggaaataagaggctcctctagcttaaaaagtcaaacatc

SEQ ID NO: 242635 - DNA, 415 bp, Gossypium hirsutum
ccgaaacgatgtctggacccatctgctttatcttgtcaaacttatagcgaacttgctccgaaatgccattctccagccctgaggcagatctaaaaaatttttggtcaaaagtcacatcaaagtggatagttacacgcgtcctttgttcatcctgattgcggagtctgccttcttcacagatacgtagtttttcctctaacccttgcagctttaaattataacttgttatctgtcttgaaatatctctgctatttgtgattttattttcataaagtaattggtttctatttgaccagatgagccaaagcccgcaacaaaataagcaacactgctcatttattccttgattaaagacccaagcactgtcgaaaaacgtggatactgtcttattctgtttgtctacatctgggacacc

SEQ ID NO: 242636 - DNA, 142 bp, Gossypium hirsutum
cccacgcgtacgggtatcaagtgaggttatctttcgctgtccagtcaaagatacccaagttttagtactggatgcggtctcgctggaagtaacctgctatatcgacggctggttcaatttatacgggtcttgacggagataa

SEQ ID NO: 242637 - DNA, 439 bp, Gossypium hirsutum
ggcttccaatgattgtggggatggatggtagatcctcctcacccttgacaatggagtagagatatccaaacgcaggtctggctctcttcacattttccgtagtcgctgcctgctcagatctgtctcaccccagcaattcatcaccgttgccaatgctatagatggtgccaagcaatgggaccctgacctggtagaagccagatatataaaagacgttgaagataacttgagcattattcgtctcaagtttggagaaaactccaaagctttgttcagaaaaagagaattcataagttacgagcgacgtgaaaacatggaggatggcactgtggttgtagcagtggcgtcactgccaaaggaaatagcagctggattgcttccaaagccaaataatgcaattagagggttattggtgcagtcagggtgggttgtggagaac

SEQ ID NO: 242638 - DNA, 301 bp, Gossypium hirsutum
catgaattaattattaatgttttatcttacctggagtgtttcattattagctcgaaaaaaaaaaaaaaaaaaagaaaaaaaataaaaaaaaaaagaaaaaaaaaaaagaaaaaataaagaaggtacttgaccgaggagagaagattgaggtgcttgcggatgaaactgaaaaccttcgtgcacaggtaactcttataaaaaactgaatttaataggttgaatatatgggaaaaagggggcttaccaaaatagaaaaaatttttgcattgttcaaaaagagaaaattaatctctatgtggaa

SEQ ID NO: 242639 - DNA, 279 bp, Gossypium hirsutum
accacgcacacgatgaagaatcttttactttcacaccaggtacatgatgaatggctgatgagtgccctaattctgggcctgctgtgggcgatccaatagcgcccactttacagtaccggtgaacaagcctacccaaaccgtaaatcaaggaggagaaaacactcagagagatgccaacataggtactgccgggatcataacctgctgtgctcttctgtacaccagtgaccatgttattgaaagcacagacacggatgcttctctttcgcaaagcatgtt

SEQ ID NO: 242640 - DNA, 229 bp, Gossypium hirsutum
tgcttgatgtggcttctcttacgcggtctcttgagacggcccggggggtcaggacggatgcctttggcgtgcctgccttcccttctgtgtgccatatcaatgcattcatcaatctctcgctacagtcttctactgttgactttaagtatctgtttggtgattagattacttcaactgattgtatgtaagcttgggtaatccttgtgggattgaagattttttggatcac

SEQ ID NO: 242641 - DNA, 353 bp, Gossypium hirsutum
cccagttcagttttctctttccttttccctttgcctttgcaggggcaggggtcagattaatttcctgttcagatttcaattcatattttttgtttcttggtttctgttcaaagctagttttgggagccaatactgtgatattaccgcgactgacttcatggttacatgaaatgaaataatcccttcatgatgattaccacttcactttttactttccccctccttcacacctctaccttacttattatttccctttgctttcttcttctttctcccggctcttcccttcggcacctgcaatcttcaacctccccttatccgggactcttttttgttgagaaaatcaagcttgg

SEQ ID NO: 242642 - DNA, 145 bp, Gossypium hirsutum
cccaggcaacatttctcttgtcttttacatttgccttggctggatccggtgtctgagaaatttactgtctccgattgccattcatatttcttgtctctagggaccggttcagagctagttggggacgcctatgctgcaatgttac

SEQ ID NO: 242643 - DNA, 272 bp, Gossypium hirsutum
cggacgcgtgggcggacgcgtgggcaagtatcaaaacataataatctcactgatttggagattaacactgctaggcctgttgaaacttctcagggtgttgatgaaactgttggagagccatcttctagaagtcaaggtatattaccggctggtgaagggggcaatgctgatcaacaagaagctcctcgtgagttggagaaagtgactgaatcagatggcaatgtttcatctgataccaacttgaaaagtgatcagtccaatcatgaaatgca

SEQ ID NO: 242644 - DNA, 327 bp, Gossypium hirsutum
gagagagtggggggtaatcgaactatactgaggggcaatgatacatgtttttcggaggcaaatagcttttaacctttgatatagtgatcagacggttgtcaatgaatcagagttttaaaaaaaaaataaaaaataaaaaaaaaaaaagaaaaaaaaaaaaaaaaaaataaaaaaaaaaaaaaaaaaataaaagaaataataaaaaaaaaaaaagaaatggaaagaattacacataaaaagatagataaaactaaagggggggcctttatagaatatcaattttaaccatcccgatggctaacatttataacatttttaaggtgtccc

SEQ ID NO: 242645 - DNA, 429 bp, Gossypium hirsutum
cgagcttgtcacctgagtggggggctcgttgtggagattaacatctgacatcttaaatttctatcaagagtgaaagtattcattctagagtgccttgggcggcacgaaaagtgttatttggtgttacacgaaacgaggatgttgggtttggtgtggtatgctatctggtttgaagtgccttgggtgagactgtggttgaaaatggctatgttggaagtttgaacagctttcagtagttggtggcatttccttttacagggaatcctgcaactttgtctcaaaaattatgatgacagagcaagaagatgcatgcatgcctatagtctgctttagatgcatgcgtgtttggattgcctcctcatcgcctaaatttgatgaattgtaattacttttaatgaactactttgttctatctttttaactgacttg

SEQ ID NO: 242646 - DNA, 337 bp, Gossypium hirsutum
tcactataacaataaatatgcctttgttttgcctttcaaaaaaaaaaaaaaaaaaggggaaaaaaaaaaaaaaaaaaaaaaaaaaaaaaaaaaaaaaaaaaaaaaaagggaaaaaaaaaaaaaaaaaaaaaaaaaaaaaaaaaaaaaaaaaataaaataaaaaaaaaaaaaaaaaaaaaaaaaaaaaaaaaaaaaaaaaaaaaaaaatgtggggggcccctttaaaagaatcaaagtttatacccccgggggggaaaagttatactttttttttgggcccccctaaataaatttactgggccgctgtttaacaacgttgggtggggaaaaacccggg

SEQ ID NO: 242647 - DNA, 294 bp, Gossypium hirsutum
tccaagtgtccttctagctgattggatttggaggacttggttatttattataacaagcaatgggttatattttggattatacgcttacacttaaccccataatccaatgtcatattcgcttcttcttttttgtagcaaatcgaaaaaggatgctccatttcctactattgaacagtttgatgagccgaatcataagccctaagataagaacaaagaagaatgtgtttgaaagttgtaagaagggggcaggtgaatctgcattgaaatcctcaacaattcctctaattagaacct

SEQ ID NO: 242648 - DNA, 389 bp, Gossypium hirsutum
ctacctcaacgctggtgctcagtttagctgggcacaaacgcttgttcaagagaggtggcccagggaattacatggctctaggaaatgctgcatgggttgtaaatccttatgatctaagtgtggaaacaggtattgatgactgtgatgcaacgcgcatggcaaatggtgaggtggcattatcagattcagagccaaactcgaagccttggattgatcctggagccttccctctaacggtgcggatgctttcaacaattcctgtggcactgtatgcaattggtggtggtgatggacccctcgagatttgggtacgattatacatgagttcatatttgaagtaactcgtgttttgaagaaggggcaatggagtatggaccgacctggggggg

SEQ ID NO: 242649 - DNA, 381 bp, Gossypium hirsutum
aaaatattcgggagacccacgcgtccggcttcatcttttttagttgatcttctctctcttcttctgaaattgaaaaacttcagaaatgccttgctaacagatccgctccaatgctgtccaatttgcttggaagcaaggttgacagaatcccatgaaaaggaaattgaagggttatatttcctagtgaggatctgttttgggctatcggtggagagaagctttgtggtcattgtttcatggaagatcaagttggttcatgttccagagaaagttatattatttaacgagcctttcactgttggaatctccattcttcgctcattgtttgtgcttcctttttacttttattcttcagctcttttaatcatttttcaattgaaa

SEQ ID NO: 242650 - DNA, 201 bp, Gossypium hirsutum
tctcctccactgctacttgatcttcttctgcctatgccctgcctgaagaggctgtgttctgccctgccatcatcacttctgcttcctctcaactttttttatgttcagagcaaatgcgattagaattggaaaagatcatcaagacagaatagagagtgaaagagtaaagtgtcgtgcatccgggagtgggattggaagatg

SEQ ID NO: 242651 - DNA, 302 bp, Gossypium hirsutum
cccacgcgtccgcccacgcgtccgcaagttttagttttataagctttgtttgacctgtgtttgaacatctgaaatgtcattaattaccatgaagatattgatgattcacaaaaaaaaaaaaaaaaaaaaaaaaaaaaaaaaaaaaaaaaaaaaaaaaaaaaaaaaaaaaaaaaaaaaaaaaaaaaaaataaataaaaaaaaaaaaaaaaatataatatataataaaaaaaataaaaaaatggggggggcctctttaaaagatcaaagtttattttccggtgtatgcaaataaaaattttttt

SEQ ID NO: 242652 - DNA, 350 bp, Gossypium hirsutum
cccctctatgcttcgatttcgacgcagcaaaagggaatccacagcatttggtaaggtgtacctttaaattttattttcaaatgctttaaaaagggaaatagaatcaaaagaaaagtatggaaccgggaaaagatgaatctaaaatcaccttttttaagaactgactttggattgctctctatttttacaatatgcgtgtgtgcgtttgcctagtatgcgttcgtaggttctttttttttattacaatgaacatagggcttttatatagctgaaaataaaagaaaaatacaaagaatttttttcttggtttttctctttgctgctgttttgctgtgcttgtttttgtcttc

SEQ ID NO: 242653 - DNA, 186 bp, Gossypium hirsutum
acaggatatgcttggatttctgcgcttctttttggcagccacaacataagggggggagtgcctttcaagttaagaaaccaacgctactgaatgcgagagtttcttgatcgaaaagtccctgctcatgctaacccgaatgttggggcactctttttaagagctgtcactgatcagcgctctagccta

SEQ ID NO: 242654 - DNA, 284 bp, Gossypium hirsutum
cccacgcgtccgcccacgcgtccggaagttttagttttataagctctgtgtgaccttttttgaacatctgaaatgtgattaattaccatgaagatattgatgattcacagaaaaaaactcaaaacagatatagagattatctaaagccatcagcgatcatgaccttaataaatacagaagcagcactgaaagatcatgaaggtcttcaacaaagggctgaaaaacaacaaaagagatcggggggctgaaggctaaaggttgaaaatgttgcacccttatatgac

SEQ ID NO: 242655 - DNA, 338 bp, Gossypium hirsutum
ctcaagtgtgagtgacggatacgagtatgtatccgacatggatatgttcagttttatctaaattatatttggaggatcccttcaagttcataactgggaacctggggcggcttttggtgataactgccttatttttggtcgctctaactcacctcatgacatagtgttctccatcacgaagggtctcacgaaggcgagaccggtaaagtttacagggcaatatttcatgatcatcattgaaggaccgtacttataatgaggcctggaatgcatgttttgaactcatgtatcctttccctctgtgcgtaaccaaacttaaatgaatttgcttttttaac

SEQ ID NO: 242656 - DNA, 191 bp, Gossypium hirsutum
ggttgattcgacaaaactgaggctggaaatgttagctcccaattgccagaattgggaacgggtgagctctatgtggtagtgatacaggtggtgatacctagatctgttgtattgctttgggatgtatagctcccaaggactttgtgtttagagttggccatatgagatgatggaaatggaaggccttgcta

SEQ ID NO: 242657 - DNA, 376 bp, Gossypium hirsutum
  unsure (1)..(376): unsure at all n locations
tgaaatattcaatgtgatattgtattgtactgatgaatttcaattgtttcaattccgtagctaatgttgtgccggaaacttcggctaagaaggaaatagaaaaagtcaacgaagagtagctcgaaaattacgattaggtgttaaatttgaacgtcaattcaacatccacaacaatctcgatcttataacgtggtgatgtttatttctttttggtagtggcatgtatctaaaatgttttaattgtcattttgaaaagtgaatgtatataatattataagatgatattggttactcatggtaaatgataatgtatggtatttgaaggctaaactatggcatccttaagtaggtnaaaaaaaaaaaaaaaaactttaaa

SEQ ID NO: 242658 - DNA, 285 bp, Gossypium hirsutum
agcctcttctccatctatctgtctctctcttttcctctgttctttcacaaatccgactttttcttttgtctgattccaatcttctaaaaccttcaacttcccatggatttaagctttcattctctctagttggggcatttttctttttctcttgtcaacttagtattgttttggagcttgggttttgcagttcttaaaacagagctattcctttttggttgcttcttcttcaagatcttatctaactctgcttataaactaaagctgaagtgttttttttttcat

SEQ ID NO: 242659 - DNA, 408 bp, Gossypium hirsutum
cccacgcgtccgaaagagaaaaattcctttgagtgttcttgcctttctcatggcttgttaacactcgaattccacaaataaggtaatcacttgctgaaatgagagcagttaagaggatgacttgaatatgtttagatgattttaacataaagacaaggaggaaagccaccatgagaagccgcaaggagcagacgcagatagccccttgcattcaactgtttacttttcatattgtgaaatggtcatggatagcccccctcgctactctttctacccttatctttattgttaaatttttttaatgtcaaaagacaagattgcatctcatctttatattttcagtttaatatgacatgactaattttgtttattaaaaatggatttgaatcttggcttgagttaatgggt

SEQ ID NO: 242660 - DNA, 364 bp, Gossypium hirsutum
caccatatgaatcttctggtgcaaaagctgagagtcatcaagacttggttggagaacctggtttcaatcaatctactagctttgaaaattattactacccaggttatgatgggtcattcactcaatctgatgatagggttattttcttaccgtggttcacttacaggtgtgcaatcggaaaatgggtccttggtctactatttgcctggctataacccatatgctactggggctctaatgggtgttgatgcgcaatgccttggtcaacaaccatattattcatctggatattttcagcctcctgtttcctatgcatcagaagccatgccttgttactcatgggattcaacatatgcttgagatg

SEQ ID NO: 242661 - DNA, 123 bp, Gossypium hirsutum
cccacgcgtacggttgtaatacgtgaacgaactagtgtagatactacctatggggcatcggctacaaagaagccagaatttcttgatctaggtgttgaaaaatttgtccttcatggtggggga

SEQ ID NO: 242662 - DNA, 421 bp, Gossypium hirsutum
ctgccacaatttgttgtggcaaattaagcttttctcaacgcttaataaatttgtattcaagtaatttaatatctttttagttagtttatctttaaattcaataaaaatagacattttcgtgtgccttataacctgtagaccaatatgggctaaggaacgattaatgtgttcgttgagtgttcaaacgatgttttgggctaacgagttagtagactgccctagatgtcaaaaaatttaaggaggatgtcgcgacaaccaacttcgaacttcaaagggagcattctgcaacgatatcgtgacaacaaccctataatatcgcgagattcaacttcaaattaacttagagggggaatatctagctttcaatgtcgtgacaacaactgacttcaaaccaaaaagggagggatattcaatgtttcat

SEQ ID NO: 242663 - DNA, 324 bp, Gossypium hirsutum
  unsure (1)..(324): unsure at all n locations
agcagcaaaacaagttcttaacaccccccccccttttttccctttgctagggttttggcctcaaccttggagcgccgtcgcaccaccatcggacttggtggccaatcacgcgcagaaaggacgtgagagaggtcggaggtctctaggagtcaacgggggcaggtttttgttttggtgcaaggagcgggtggaagccgaccctcgagcggagtgcacgccggggacgcacatggagactgcggcacctatgggtttcttcttcctcttttgctgaattttttttttagaatttgggctacttgggcttangtattgggttaattt

SEQ ID NO: 242664 - DNA, 132 bp, Gossypium hirsutum
ctaaatatagaccgggagcggccgttatacaggatccaagagcccttaaacacgcctgctacgtcctaacggttgtatagggtggccgaaggtgaggatattcaccgacttgttacaaccaagggaccggga

SEQ ID NO: 242665 - DNA, 159 bp, Gossypium hirsutum
cccacgcgttcgtccactcgttcattcactcgtccgatagagcaattaacgaatcttgctactggctggtgcgtgtgatgcacaaaaagaagaatcaaagggctggatgaatatcatacggaaaatgctcgtccttgggcttgtatgatgaggacaacc

SEQ ID NO: 242666 - DNA, 356 bp, Gossypium hirsutum
  unsure (1)..(356): unsure at all n locations
acgacgaaaacggatttggatcgggaaaaatgaaagtagttgaatagtcgatcgtgtccgttgatatccgaggtaagtttattagctatttaattttattaaatcagtttatattacatgtatgaatatcaatgtatttatgttgattaaaattaaaagtatataaatcgaatgagaagtatgaaaattatgtatatatatgtgttaggttcgaatgagtatgatatacaatatatatacctcatgttttgtaataattangtatggactatggcatgtgatgtatcgacatagttgtttatgtcataagtttattagtatgtaatgttattgttactgatgtcgatgattattta

SEQ ID NO: 242667 - DNA, 171 bp, Gossypium hirsutum
gaccggaatggaatggtcgacccgacccacccgtccggtgagcctattcacatgataaggaacgtgttcaattcgcaatcccgagaaccctttcatcagggttggtcacaagacatgtctgtgcacaacgagcttattgacgtgggtggtataatagcagcatgctaatgg

SEQ ID NO: 242668 - DNA, 120 bp, Gossypium hirsutum
cccacgcgtacgggtatcaagtgaggttatcatgcgctgacgagtcaaagatatccaagttttagtagtggatggggtcacgctgaaagtaatatgctatatcgacggctggatcaattt

SEQ ID NO: 242669 - DNA, 219 bp, Gossypium hirsutum
ggagataatacgtatcgctgtgtcttcatcaactaaattatgtatcagctcattattcaaagcaggtgtctcaacttcaatcaatacaaaaaaaaatacaaaaatacattcataaacaaacaactctctcaagttttaagaagaaaaggtaacctcgcttccaagggttttaaagaagggcaaaaaaaaaattcctgtatgcaaacccatttttttttt

SEQ ID NO: 242670 - DNA, 304 bp, Gossypium hirsutum
tccacgcgtccgtgatgatcatgccttttggtcttgggcttactgagttcctgtatttataatctctcttgtttaagtctgttctgtagtagcaattataagtaagcaataaaaacccaatgaatggcattgaatgcaaatgtgttggtgtggtttgtggttcgaaatggttgttttttgtccccttgtgtaatcttagtttgctttggggggattcttacttcttagagttggataagcttcaattccccaggaatgtaattaaataacaacttttctgataaggttcttagaaatgttacac

SEQ ID NO: 242671 - DNA, 112 bp, Gossypium hirsutum
atcaggcgtccgatgaagaacaaaaaactttaacaccaggcacatgataactagctccggagagcttgcgctccaggcctggtagaggcaatccaaaacacgcccacctcaa

SEQ ID NO: 242672 - DNA, 235 bp, Gossypium hirsutum
tagaaatccaaaagcttccagaaggaaaggaaaaagacggtcttcagtggttgtttgtgaagaaaagcagctagagaattatggtgattggcaaggccccccaccatgggatatttccttggggggtgatggatgccctaagtttttgtgtgacgtgatggttgaaggcttggcaaaacatcttcgttgtgttggtgtagatgctgcagttccacattccagaaaaccagaaccc

SEQ ID NO: 242673 - DNA, 177 bp, Gossypium hirsutum
tccaactgtagctcaacacccaacgactttactcagccagcctcttattttaccaaaagaacaggtgtagtggctcaaagcttacaacacatatcccatgttcgtgtgcatattaatggatatcttgcccgaatgatcgaccatccagaatccacggctttgcttgtgcgctcatta

SEQ ID NO: 242674 - DNA, 284 bp, Gossypium hirsutum
cccacgcgtccgctccagaagagaaacgtacaatcaacatggtctcaatagaagaactggaatcacagcttgacaatctcttgtaaggagctaacaaaaggtcaatcaaattctttcaactcgactcggatttcttattaaattttggctaatacacaccctggttcagtctgttcataaggttatactgatagataagtcgaaaaaagtagtcatacaaaattgtgcgctcatcagaattttcatttctcacgctcatatattggctaccattgttgatcata

SEQ ID NO: 242675 - DNA, 288 bp, Gossypium hirsutum
tccacacatccggtcaaaaatacaaacctttaatatagcactgactcaatagaagaacggggatgaccgctatgacaagtctatctgaaggaggtaacaaaacggcaataacattcaatgaactaaactgggatgtctgaatacattttggctggcacaccctgactcagtgtgtacataatgttatactgatggatgaggaaaaaaaagatgtcttgcagaattgttcaatattgacaattttcatttctgacgttcatatatatgctaacatagttgatcatatat

SEQ ID NO: 242676 - DNA, 115 bp, Gossypium hirsutum
gtgtgcagttaggactaagaggtggtagtttaaccgcgattgctaaccgaattgggagattgtacaaacctcagagtggattgggatgcctaaatggccgtcctgtagtagaaaa

SEQ ID NO: 242677 - DNA, 235 bp, Gossypium hirsutum
cgtatgcggggctgcagtcaatcggtgcatgtgattatagcactaattcagtgctttagacatgtgtgctttgacagcgataagcagaatgagcgcgatatgtatacaagccagagctacaaagctctatcaaggaagtgtagagaggtccggttcgggctaaatattgcgcaagagattcttgcatcctcggttgaaagaccaagttctcattaaatactcttacatgaaccca

SEQ ID NO: 242678 - DNA, 301 bp, Gossypium hirsutum
  unsure (1)..(301): unsure at all n locations
gctgatttccatcctcaaggggcaaatgttatttttggacgaatggctcttcttgaccatgattatttcagttcaatatctggggctactgaaactcttaaagctaacacgttccgccttccggttgtttctgggccaagggctgttgccaaaaattgaaggatgctatttgttcaacagttgatgtaatgcacgctatggcatcctcaatactctctgttatataaaaggtggcaaaacanatctctcctctctctgcacttgaaaataacactgcacacgagttttctacactaaacca

SEQ ID NO: 242679 - DNA, 243 bp, Gossypium hirsutum
aaagaaagttgtagatacttgtacatcaacatgggatgttacagagacaggaaagagcatttccgagtatgtctacttcactactacattgcctctatttatttttttaaagtacagatcaacaactttgggagtgacaatatgccttaaggactggagtaaacatcctctgggttcatttctataatcaagcactaaaagataccttcagtagcatgctaaaagtttccaatcaaacatttt

SEQ ID NO: 242680 - DNA, 194 bp, Gossypium hirsutum
ggctaacaagagcttagaggatgattatgtttaagccattgaggaggaaattgagaacgtgtggggcctttaagaagagcgttgcatttatggacgtggttcatggatagcctgccagaaatgacaatcgttggtatttggtgagcgctgatcgggtttgctttcactgataacagatgggtgcgatattatgg

SEQ ID NO: 242681 - DNA, 364 bp, Gossypium hirsutum
accactcttccggatttatggatcataaaactgttaaaaaactaagcataatatattctctaagggtgtcgtaactaaatgcaaggtcacttattgtcttattttatatatagcttgcttctcctatataaatatacactcttttgatatttaatttatgtttgttttttattattttacttgttctttttaattgttttctaatttttatttttatgtttattttatgttaattttcttttcttattatttttttttttatttttaattcttttataatttctttatactttctttttttgtaatattttattttattttagtatatttatttcttttttttttcttgtctatatcttttttt

SEQ ID NO: 242682 - DNA, 293 bp, Gossypium hirsutum
cccacgcgttcgcggacgcgtgggcggacgcgtggggttgtttaacgatcatgggcaaggtggtttatggcactccatatcatccatgcagcacagcaaaaaaggcgacattgatgactgttacctatgtaaaaacccaaggcacttctaaacacatggttgctatgttcttttgcattgcgacaccgggggcatgagctatctgaagccactcttcttagtcttaaattctttagggtaaggataaacgttcatgaaagacgccaaattatgatggcaattttttatgggtg

SEQ ID NO: 242683 - DNA, 258 bp, Gossypium hirsutum
acgcttagctgctggtacacaacaaatatctatggtggagccacacgggaaaatggtcgaaggagaggttattggtgattaaataacaaccgtgactagacctgatgaagcccagcgagcacgagctgggcgatgagtacttgtaactaaaggttctatggaggttattaagactgagaaacatgggttcatgaaatgctggtcaaggatacacatttgacgaggctaagggtctttcccttatacttatagatctct

SEQ ID NO: 242684 - DNA, 261 bp, Gossypium hirsutum
cccacgcgtccgcccacgcgtccgttcttttgctaattatttttcttttaataagataatttttagtgctttgattttgtatgtaagagtgcggcatggaattatatatatatacatgttctcccagatagattcatacactgttttgaattagaatttaggtttggtaattatattgattttgttcttttaaattgttttctaagtttcatttcacgtctgattaaaggaaaatgacttattttaatacaattttttttg

SEQ ID NO: 242685 - DNA, 367 bp, Gossypium hirsutum
tggcgattctgcatctagcacatcattcttttgaaacatataatgtaaaatcatttggggcttgtatgttttggagatggatcatgtttatgcgaccccaagaaaagaaaaataggtaaggaaaagtaaagtaactctgtatgaagttgttgatgttttgtacattaacacccacatattctttctacttgtcgatagcttaaagaagaaaaaaaggaaattcctcgaggttggttgatttttgttctccgattctacttgaatcaagaccattttgaagcatatctctaagttcttatcagcttatgtcagaaattgtatttccgatacattatttgtttgcctgcacattatacaccttatgtta

SEQ ID NO: 242686 - DNA, 201 bp, Gossypium hirsutum
gaaactgcttcttttggggttttcttaaccctttggccgccgatcagcccatgccccgatttcgtcgaaggggacaccagctcgacgactccggcgaaaggtgatcgtggcgattacagcatgcgttaggtggtcgactcctattgtgcagtgactggagttgctgtgagcgaaatcgagcaaaaaagataagggtgacag

SEQ ID NO: 242687 - DNA, 423 bp, Gossypium hirsutum
gttcatttatcgttaatcaaattttattgaacaataaatggcacgacaaatttttgttttagttttggtcttaattgccattgtcaagatggtttccgctgacatcatggcgaccgccgcacccggctatactgatgccattggaaaaaatgttggtgcacccaataatggtgaaggtggtcaggatatcgttgaaggccgtcttgacaatgcggttaatgctatcagtggtgctgcaactggtctgccgcctagcagtagcagtgcaaccataattgggttatccgctatcgccaaagctgttgccattgccggttatttcctcttctaagtttgagatttgcgggtagaatgctagttgaatttgtttatgaataaattaaatgtcacatatttctaatttgcttttaatttgatcatgtc

SEQ ID NO: 242688 - DNA, 317 bp, Gossypium hirsutum
gtctttttcaatgcatatgatcatctatctttctgatctcgatcctagagctcatttttcttgattggactttacgatttttttttggggggaccaggggggggggcggggcttggtttcttcatgtacgggagctaaattcatgggtgtgtcgaattcagagatgtttctcactgagaaagatctaaccagtagcatggaaatcagtttcttggttagacgacgccctcctttagtgttacaacaaggagatgaatgtcaaattacgactttccaagacgattatgatgagcctcagcagcaaaaagaagaaagac

SEQ ID NO: 242689 - DNA, 285 bp, Gossypium hirsutum
ccggggcggaactcacccggtccaccgacgcgtgcgttaggaacaaacaacagcattgggctacaaaacagtaccatccaggccgcctaaaaatacattcaatccaatgatacaaacatggccaatgtgcggagaccaaaataacacaaagataggcctatcataagtgcagtctaaaaatgatacatgagcaaaccagaggaggttggataaaagccacgggccagcggagaaagatataatctaacctgagatggcggaaaaaaagcatacaaaaatggtgcc

SEQ ID NO: 242690 - DNA, 414 bp, Gossypium hirsutum
cgattaaatagatgggaaaggagtgagttgagtgggtgtgttgctagttttaattagtgaatatcggaataagaagtgatcattataatctaactatatatattagagtttatgtttcacgaaaaatctaactataaattaaaatttacttttcacagaaaattgattggacgagacaaggaatttaaattaatgggcgagaagttaacacctttacttatggtgcctcattgtgatgaaacactaatggggtactatatcgatgattcggtcgttaatgctttttttaaattgcttaagaagagatccgacaaatatccaaatgtatacatcaaacattattcgtttgatcctcaaatagctacttgcttaataaaaggatccaaattagaaggtgaagtattagcttggttt

SEQ ID NO: 242691 - DNA, 374 bp, Gossypium hirsutum
gctggaagcaatttggagttctgagaacgaagaccagaaacgcttggaccctctaattatctttcaaacttcttctttagctcgtctgccattgcaatcatcctatgtagaccaggtcattttcttcactaggtcagttgaattcccggttgatgagttgtatgccgaaatctttagagttatgactcctggtgggaaactggtggtttatcgaagttttcagattgagataagtgaagtagagacggcattgtctgctttggagcgcaagttgctattggcaggatttctagaaggggaacgttttcaacttaaaaaaattgctcacactgtagggattaaaggctaaaaaccatcttggaagattgggatct

SEQ ID NO: 242692 - DNA, 361 bp, Gossypium hirsutum
accggagagatatatgattgacttgaaattccaaagtactttccttgttggtttattacatttatcagtttttatgcaaaaaaaaaaaaaaaaaaaaaaaaaaaaaaaaaaaaaaaaaaaaaaaaaaaaaaaaaaaaaaaaaaaaaaaaaaaaaaaaaaaaaaaaaaaaaaaaaaaaaaaaaaaaaaaaaaaaaaaaaaaaaaaaaaaaaaaaaaaaaaaaaaaaaaaaaagggggtgctcctttttaaaaaaaaaacatttacaaacgaggcctgataactgattgctttttttattggaccccgaatataaaataaggagcgctgattataaaaacgtggtattataaaaaaattggtg

SEQ ID NO: 242693 - DNA, 448 bp, Gossypium hirsutum
cacgcgatgcgtttctgagagcatattggactttactctaattttctatcatcgggcccgggcaaacatcagggtcgattggcaatattcttctacaagaagaccaactctcgtccattatctgttaccgaaactgatgcctcgcctctgactatgagatatcactgtctatacacagattgagcatgtggggaacccaaaaggcagaccacacacccttgcatgtgtggatcacactcattcaaaggtactgcctaattgctggccgatcccaagctgcatactaccccctctccaatgtttagagcgattgttgtcacccatgctacatcggaggctgatatgagaatacctcccaaacataaagctctatgcaggaagctacagcccacactgcactgatctactcggaaagacaataaaaggaattgtccaggtcgaaaattaa

SEQ ID NO: 242694 - DNA, 308 bp, Gossypium hirsutum
atctgcttgtcattatctagagacttaaatggattatgcaagacctttttatacttctgatattcttgattaatgcatctgcagttttatgtggtacttattggggtccgaatatttgactttgtagaaaaatgtaatgcactgattagatatctctgtacaggctattgtagcaatgatgcgtgctcaggaggccgatcctaccaacctggaagaatgttatgagccttgacataggatctagtcataggtctagacgtgagagaattcttgctctgacttatagttaatgaaagaagcagatttgt

SEQ ID NO: 242695 - DNA, 384 bp, Gossypium hirsutum
  unsure (1)..(384): unsure at all n locations
gtaaaattggggatgaaggccttgctaatttaacaggcctttcactcctcaaaagtctagagttgtctgatactgaagtcggaagcagtggactgcgacacctgtctggattgactcatctggagaccttgaatctgtcattcactttagtgactgatagtggtctaaaaaagttgtctggattgactgctcttaagtcacttaatctggatgctcgccaaattacagatgctgggctgtcggctttgacaagtttgactggactggtgcatctagatctttttggggctaggatttcagacactggaacaaattatttgcgatgctttaagaacctccagtcccttgaaatatgntgaggggggtttgactgatgcntgtgtg

SEQ ID NO: 242696 - DNA, 298 bp, Gossypium hirsutum
tgtttttagaattaaaaactgaaagaggacttaaatttttcctgaggcaaggaggtgtatcagctgcatgactgtatattccgagtggggaactagtaagctcaggggtgatctcggagttggttatattttaacataggctttttagttacccttgggtttacagttatgtggtttctgggtcttatagatagtaaacggcaaattctggttgcctcatcatgacaactatggaagacggagagctaccccttgacaaatatctatcaccgaagcatgtaaggatgtagttgatggc

SEQ ID NO: 242697 - DNA, 347 bp, Gossypium hirsutum
agttggggaaaaaaattaagaacattggctttcttttggcttattttgttatatgcattagtgtcttctattctagaggatatttaatatgaacttctcccctcctctattatcataatataattagaatttcttaaaaaaaaaaaaaaaaaaaaaaaaaaaaaaaaaaaaaaaaaaaaaataaaaaaaaaaaaaaaaaaaaaaaaaaaaaaaaacaaaaaaaaaaacaaacaaaaaaaaaaaaagtaaaaaactaaaaataaaaaaatggggggggccgctttaaagaatcaaattttcagcccccggcattgcaaagaaaaaacttttttttttgggcccccaaa

SEQ ID NO: 242698 - DNA, 343 bp, Gossypium hirsutum
cctaggccatcacatgattcgggaaaaaatgttatactaagatcaatttattgacaatgattcttactagccaccatgcctagagaagtaatcattatccaatgaaatagcaagagcaacagcaattgctcgctctgatagagtcagtgaacggcttacatccaactcttggatcatgctagcgggaccagtctttaagacgggatcagcctttccaaagtggatgacatactgtctggcatctgtaaatatctgcatgcaaatcattttgcctattagatacccataacaaaaagctaagaattttaattcatgtaataaaatggataaaagcaaaagcaca

SEQ ID NO: 242699 - DNA, 333 bp, Gossypium hirsutum
gttttggtgactatctgcatgtaaagagcacccactctcctcgttgaaggcagttgaacaagttttttaaaaaagatttagtaagtatctttctcttctccttctttactttctttccaaaatttaaataaaaaacaaaaaatcctattccgtgaaggccctttcatcgcgcagccactaaccttcatcagtttgatggctaatagtgctgatgatgatcggattttatcaacggagatcccaattttagaaatccggtaatatggcttcctttcactcttccttttttttaaaaaaaaacgaattcttatgtttttttttcaaaaaaatgaa

SEQ ID NO: 242700 - DNA, 357 bp, Gossypium hirsutum
ctttaagttttgaactcccagtcctggctaggttttggtggtgcctgccatctgggaatccatttaattttgttacatcaatatgtttgctggggcctttcctactagtttctgcttgtttcatttgtggctgcttcttttgcaaattggtggcacctgacattggtttggagaatagttcatttcccttttgtttcttcctccgcaatatctgttcagtactttgttcttccttcagttctgactgttgctttttgccacgaagctctgatttttggagcatttgcacctcttgaaatccatgattactttgcagcttttgttgattgcctaggagaagcttgtagcatgtttgct

SEQ ID NO: 242701 - DNA, 328 bp, Gossypium hirsutum
  unsure (1)..(328): unsure at all n locations
gggatcctgatgcttttgttgcattttttgaagatatatactttcgcttcattgactcgtaggcaggtcaggttttatgggactgactaagggtcaggattactgctactaaattaagtccagatttagtctctgcactctttctaacataaaccacaacccttgatttgcaacatcaatatcaatgtttgaattagtccctaagctgcagttaagataaatacttggtgcttgaatgtatatgtacatgtaaaaatttgtggtagtgtggtgttgggatgttgcangcggggcggtcaagctatgtgtctgcatcaatacttgcaac

SEQ ID NO: 242702 - DNA, 274 bp, Gossypium hirsutum
gtgagagggcgtatgtaggaaaatctgcactattaattaggtcggcgtttgcattggaaggcttcaattcgggtgttaacgacgatatatcgacagccgattaagcacgaaaaaaacatgcacggctttaatgccattggtacagtcaactatacgtagtataattgagcctctgatggcgttcactaaaatcatgttgtcacaaaatgtgcttaaattggtaatctaggtattgacttgaatgcggtactgatacatgaagaaaccttagatg

SEQ ID NO: 242703 - DNA, 361 bp, Gossypium hirsutum
gaaaataggaattagggttttcattccaaaatcaaaaacacagaacaaattaaaattttctgcaattcttggtgttggactcttttcttttttcggcaatgaagaatcggaatcccaaaggaaatggaaacggcgaaggaagcacaatggatggcccaaagccgatgactatgaagaagaaaaagaacatgaatcgattgggaggaagtggaactggtctttcgcttcaagcatttgccaatgccaaatccactagcaatcactacaatcccgccttaattaagaaaaaaaaagagttctataaaaatgctaagtatgttaacaagtttaagaagtcataaagcacaaaatcaggggaaaa

SEQ ID NO: 242704 - DNA, 403 bp, Gossypium hirsutum
  unsure (1)..(403): unsure at all n locations
gctttttggttacaagatagtaatggatgagcaccagcgtcctaatggaatccctgtgacccattttaccctccaatcaatttatgcacaaaatgatgatgagaagcttgaatttgagtatgaatctggaaataccaatatattggcaaatgattatactgctcagcctgagatatcccatcaggttgatatctttgttcggaagttgaactcaattccagctttcactgctaatctaacagttgaatcttttaacaggcgaaccctttcgtaagataaatctatatccagaaaagatagaatatgccttagcatttatcattgtcaacacatgattacttatgtggattggggatttaataanttctcatgcatggaatgaatgttttgacaatgaaaacaa

SEQ ID NO: 242705 - DNA, 200 bp, Gossypium hirsutum
tagcttttggccatatcagttgcagccagttgctgtacaaattaattgttctacgcgaggacttgttatcttgagacaaattgtatcttactataggctttgtattcaaatggaagactatgttcgttggtgattacatgtttcatggccttgagagatgaaaatgtgatatccggtgttatggtatccagttcattgct

SEQ ID NO: 242706 - DNA, 239 bp, Gossypium hirsutum
aaaaaaagttttgggtgtggctttcagaggctgaaagggcattgtttgggaagggattgccaaacttttggtcttcgatgaggcttccaaaaagtttcccccttttttgtgccctttccatgaaattaacttccctttgccaaccaagttcatccaggaacctggcccttttcattgggaatttttttaaaaaggaattgccttcccattgggggatttttccaaaaaggttttttaaa

SEQ ID NO: 242707 - DNA, 374 bp, Gossypium hirsutum
  unsure (1)..(374): unsure at all n locations
cccacgcgtccgcccacgcgtccgancctccttcaagtaactcccttaagcccttgctttgtttctttatttccttccattttgaactttctctaacttttctttgtgatttgcagatattgcttctacttgcagctttccctctaggtatgcttattaagatcaaactttatgccgaaggactgaaagtatacttacaaatcatctataaaatgaaattattgctaatgctagccagggtgttaacaagtacttgaacaactacttggacccacccaagttagcattaagaataaacccttcagcttattggaatacatttaccttcatgggaagttcctttctaatataattcaatgaaaccttttttaacc

SEQ ID NO: 242708 - DNA, 362 bp, Gossypium hirsutum
caagttcaagcatgtggaacttgatctgttttttgtccgtgagagggttgccgctggtactattattgttggtgaagtacctgcctgtgatgaaatagctgatattctcaccaagcctctttcgcatacagtttttactcggtttcgccagttccttcgggtcttaccgattgagacgatggatgcatgttagagtagttagtttggtatgagttggtataagttggtagtctggtgcaaataagtagttacgctaatgagagtggtcaggagtacagtcagtagtgatcttctataaatacttttgtattccttaaagagaggaagcttttgagaattcaatatatgagtttattctttat

SEQ ID NO: 242709 - DNA, 260 bp, Gossypium hirsutum
aaacgcggacccaagaggggaaaggacggcttttgtgaagaaatgcatcgatactaaactgggggccatttaatacctgtgagccaactcaatgacttatacctatcatcaaagggcactcctctggaattagctcacagaggcaaggcttctgggcatatctggacaaaaaaaaactctagaaggaattcacgacatacaaaggcaggaacgtcatccagatgaggcaccgtaaaaggacctgccggaaccttcaaaac

SEQ ID NO: 242710 - DNA, 222 bp, Gossypium hirsutum
ttgtatctttaggtttttcattttcaatgttagtcatatttgggtgagatcctctactttccagcgaatagttttgttggagttgtatgctttttattgtggtttttaccctcatgtccctttgtttttaccctcaacccttgcttcaacggggttttccacgtaaaagatcacatgttttgtttaattggttccttgcgattattgagttttattttgtgc

SEQ ID NO: 242711 - DNA, 426 bp, Gossypium hirsutum
  unsure (1)..(426): unsure at all n locations
aattcatatggtttatggcttggaacctgcaatagccacttgggaagttaggctaggtgcggcagcaacagctttccttcataaacttcagaaaggtatacctccctgggttccccttaaagggcacgaggagaaaacttataaacagcttcaagaagaagcgatagagagcaaaagacgtgatttggctgtcctaaaagctaatgatggcatatggcccggagttagaattcctagccatgctctatttctttgggctagcggctctgaaatgacaactcttttggaatctgatcatatgccaaacaaatacatttcaaaagatcttcggcgcaaattggccaaagttatccccggattaaggccgtgggaggttntaagtgttgagcaagcaatggatgatatcacatatagcggagagtggta

SEQ ID NO: 242712 - DNA, 414 bp, Gossypium hirsutum
gttttctagtttatatcttttgatggttggccatttcttttttggatctgaataaaaagaattagatctataagatatatgctttgaaataaaaattcaaaaatggacaatgatgagaccaccacttccgcctggtccaccacccgccgcgctggatgattataatcttgcaaaccgaccacccttaccacagaaaccatcatatgttaaatctgctgcatctactgttgttaagcggccactggctcagcaccagccggagcttacggctatggtgcctgcatctgttcgagtaaggagggagattactgccccaaaagcaagaccaaagccttcacacttaatcatgacatcgaccaccaagcctgtagctactaccattgtgaagcctgaatcagctagcacatcatcagc

SEQ ID NO: 242713 - DNA, 406 bp, Gossypium hirsutum
  unsure (1)..(406): unsure at all n locations
gagaggccatccgaccaccccatttttgagcctaatcccgacgacggagaaggactctccagtgccatgaccgcgagttcaggttgtgggtggcgttgtggacgtgggcactgatgtggtacgtgggtgcgaacgtggaggagcgggatgtagggcggccgacgaacatgcggcgctggtcaaaggggcgtgctgcttccttattttctgtttcgggttttagtttgggctagggttttgttttgggcctgttgggctactttgtatattttgggttttaagtttggttgtaactgggctttgtaattctagacttgttgttattgggccccgtgctaaaattgngccttacatntatcattgnattaatatttattattttgtaaaataataagttttttttatt

SEQ ID NO: 242714 - DNA, 347 bp, Gossypium hirsutum
gcgagcctcaattagccccctgagaatggagtcggtttctccagatattattacaagcaagtctgttggaacatctcataatagcaatggtcaagcagttaaagtagagcatcgaggaactgtggatcttgatagcttacgagggcagacttctttagacatagatgattcatcagtagttagaagtgtagagttagctgagcagataggcttaccgtttaggcaggagttgctttctccatgtgaagtttctgattttgaaacaagagaaacatgcaaggcttgcttgaatcaagaaaaaactgcagattcgacatcagctttcatcaatgatccttaaaatggat

SEQ ID NO: 242715 - DNA, 425 bp, Gossypium hirsutum
caaaaattctatctgttcttttataattcatcaaaatattgctgttgttaggccccttgtttgtttattactagaagtgtatgattttctttctgggaaacttagttttttgaagtgagtgctttaccatgatttattttgctagttttttgaagtgagtgctttaccatgatttgttttgctatctctaaacaataatgatggtggcagttgtgacactgtgatttgggggtaattgcaatcgctttactgaatttgttatttgctgcattgagtattgtgctttgttggtatttcctttgaaaatatacttgtcaatcagaattataacttgttaagaaccttagcatcatttctctttccagctactgaatcaaatatcaatgccatccctatttccacttacaatttgcacttgtatactt

SEQ ID NO: 242716 - DNA, 120 bp, Gossypium hirsutum
tatctcctctatagtgctacagcaaaagttttgagagctaggatttttcaagatgggaaatgctcttaagctcctatatgggaaatgtttggaagccggcgtcattacgggaggggggtc

SEQ ID NO: 242717 - DNA, 377 bp, Gossypium hirsutum
cccacgcgtccgtttctttcttctctctggttttttaaaagctctattcatgccatgttcatcaagcattcattaagagtgtgggttaatgaattcttaatatgcttgtaactaaaagttgtttaaatgaagaatataagtgtttcactacagaaatttcatctttacaaattgacagagcaaggaggctagctcgaaacttaggatagcctttagccactgagccgaccttgtcttgttgattgtctgcatttaaaagagggtacttggtccactagaaaggaagattgagaacaatgattcatgtgcctagctttatggactgattttttacaactttttgacttcctacgtgtatgctattatgtttctttata

SEQ ID NO: 242718 - DNA, 217 bp, Gossypium hirsutum
atctgcatctgctatagaagaaaagttgaaaatttttttactggattatagagatcttatatttcttttttattcatggagtgaaggacttggttattttaataaatccttcaaactcatggaccattgcatttgtgaacattgaatatgccttgaatattttgatatccaatcgaatgcactctacatttaccaagaaaaaaaataaataacaaaa

SEQ ID NO: 242719 - DNA, 377 bp, Gossypium hirsutum
gtggaccggaactgaattttgaccccttagatagttttttgtagggattggaatataaaagttgaatatggtaaataagaagtaccaaagatggggctacttgtccggtctggtaagtcgaccttaaaaaaaaaaaaaaaaaaaaaaaaaaaaaaaaaaaaaaaaaaaaaaaaaaaaaaaaaaaaaaaaaaaaaaaaaaaaaaaaaaaaaaaaaaaaaaaaaaaaaaaaaaaaaaaaaaaaaaaaaaaaaaaaaaaaaaaaaaaaaaaaaaaaaaaaaaaaagaataaaaataaatgggggggcctctttaaaagaacaaaattttagtggcccttatgtgaaatttaaaatttttttttatgggacaaaaaattta

SEQ ID NO: 242720 - DNA, 226 bp, Gossypium hirsutum
  unsure (1)..(226): unsure at all n locations
cttgaagaacaatcacatctatgttactctgactctttataggtatgaagatatgaccttctagagatcctcctaatacaagaagaaaatacagaaaattgagcatactcatatgtgaagataaaccagagtcccagtaacatagctatgtaggtattaaaagttatttatttatttattttattttttggtttgttgatgatgctatagtaagtgtttttcctna

SEQ ID NO: 242721 - DNA, 222 bp, Gossypium hirsutum
acggccccacacactgtcgaccttcttcatccatactatctcatcactgtactcatgctcaacggcctcaaagcagtcactcgttgatcaatgactgacgaagctgcacgtgtacaggccactggagctgcatggcatatatgccatgctgtcatacccatggttgctcgcagagtcatgaaccgtgctcaccaccccgtgatgcttcacaatcgtgagatc

SEQ ID NO: 242722 - DNA, 346 bp, Gossypium hirsutum
acgcaacgcgtctgtaaataaataccaagtttcttcgaagagtcgttttctgcgatcttcatcttgggcttttttcttttcttatgcaggtgtcatctatttttgacttctttggatcggtcgattgccatatcgatcggtccttgtatctcttcaatatctctttgaaggaatcggagtttcggatgtctaggaaaagaaatggcgagtgggtttggggaatcagcaagccattctccccacaattcatcttgctccaccaataatgctaatggcgatgctggtaattttgagcgcaatatttgctttgacttaactcaagaccctattgtcactttatgtgggc

SEQ ID NO: 242723 - DNA, 425 bp, Gossypium hirsutum
cccacgcgtccgcccacgcgtccggtgattttctcagcctcatcgttgctgtctggtatactaattgcgactctgcttccggtgacggaatctttagcggtggtgttgtaccatgaaaagttccaagttgaaaaagccatatcccttgttttatcactttggggatctttgaattacttctatggtgagttccatgagattaataagatgaagcagaagcaagatgcaaaaacagatgtagcctaaaaccctttgccttatcttatattggatcatattaaacaaggtggctatatataatatgggggtatacccatattatcttggttcatggtttcccttaaaatatggtaaccagcatgtttaaagggcgcatatatattggtggaattaaggatatatgaaaaggaagctttgatatattt

SEQ ID NO: 242724 - DNA, 279 bp, Gossypium hirsutum
gcatcagcctacatatgtgatgctggggaagggttactggccctgcaaaagaagcttgctgcaattgaatctcatcaacagttggaaacttcaagttcttctgatgaattaagccttgtataaatagttcatttatatacacactcgtatacatttattgtaacatttatgtaaccaaagctactagaaaaatatagaaaaaaatgactcctatctcatatattggttatctgtgacactgactgcaatgattttagagttgaaattagtttaattttc

SEQ ID NO: 242725 - DNA, 151 bp, Gossypium hirsutum
tcccaaccccatgtcctatatcaaaatcggcatcaatggtgttcggcaggatcgtaatgcttttttccagggtggccctgcacagtgactattcctactcgtcgtctggatctaccccttcatcagcacccacttctttacctacatgttc

SEQ ID NO: 242726 - DNA, 216 bp, Gossypium hirsutum
agaagattataatgcggatgataggacctcgcattcgacaagaggagttcactctagagggtgcgatttgcgtcaagctcgtcactcttgtgtcctactaaaaccctaaccctcgctccagggttactatctattgtaggatccccaataccatttagcgagctggcaaggagagatggcattgagaccacatggtatagatgaattcttatgggc

SEQ ID NO: 242727 - DNA, 303 bp, Gossypium hirsutum
accacgtcgacacgacgcgcgccgtgagcttgcatcctatagagaggaccgacgcgttcgctcgctagtgacgactgggcgagcgccgggcttcaatgcctcagtccgtccgtgagctcctctcccgcggaacacgccagcgtgcgtagagacggcctatgcgctgacacaggctcaccagatccaatgaaagctgccaactcgacacagggtgtgcaagaaatataaaccatgcactcttcatcgtcagttcaaggcaatatctagtgttaatcttggaggccttcagtaggaagctagaga

SEQ ID NO: 242728 - DNA, 419 bp, Gossypium hirsutum
cgaagagagagtggcatacgtgagtcctgctgttcatctctatccaagacaagataatccatcgtgcaggctaacgaatgccctaaaatggatagggactggaatacaaaattgattgtgaactggagatctgaaggatcatctggaagcagtagaaaaaattctttcaatttcgtggagatgtcccagctaagctgcaaagcagatccagcattagtatattttagaaatttagttttgggcttgattttgttcgtagttttagttagagaagttatgtttcttagatagttcagacgtgtgtgtttccagcattccattatagtaagacatgcatggtattgctattcttgtgtcccatctgtgatggaaattggaataatggccgtataaagaggtttctttacagttaagctgat

SEQ ID NO: 242729 - DNA, 206 bp, Gossypium hirsutum
acgtacgcccacgcgtgcggtcatcgattactgtcgtcatttgggtgccaagctttatactcgaggcttagtcttaagcattgaagccatctcgggttcacgcaaatatgccatacgtggatgactcggcctgctcggtggctcattatagcatgcttggctgtggctcatataacaagatatgcagagctagagcgagccatgac

SEQ ID NO: 242730 - DNA, 386 bp, Gossypium hirsutum
  unsure (1)..(386): unsure at all n locations
caaaaggaaaatggagattgtttggcaaactcctgctcatcctgctcagaaacaagattatgtttttcacaacgggaagcaccccgtattccattcagttggatctttgatagagaagtgaagctctaaaggtcttgaaatgcactcgaggaaaccaacttgaagaagctgaattcaacttgtctttgtattctgatgaaatggtgctggtgtgtgtgtaagaggaatagtgcctggctttagtagttttagatgttttgttgtattagatgtagcgtctgtctgtcatatcatgtacgagtagcatgtgctgtgtcgtntangtnttcttgtagaagcaaacattgttggtatcattgatgataaagatgacataatactgcana

SEQ ID NO: 242731 - DNA, 194 bp, Gossypium hirsutum
  unsure (1)..(194): unsure at all n locations
gggccgacccacgcgaacgtctatacctacnttaaacaacacttttattctttatctaacctcaatattcccaccgccggccttatttcacacccccattcattaccaacacctccacatctttgtgattccaaccaaaattactttctgtccttacgtctcaacataattgccaacaatgttcgccctaacct

SEQ ID NO: 242732 - DNA, 375 bp, Gossypium hirsutum
acccacgcgtccgcccacgcgtccggaaaatggatatgattcttttgcagctatacacactggtgagtgggtgggtggcgctcaaaatgcctatgaaactggatacggtaagattgatgtagcagatgaggctcaagttgagggttctttcttggataatgaacacaaagacaatatcttcaagggtagcgaagaaagtaaactggattctacatattcagagaaagttgatatggctctgaaaaatgcttcgttaattgacggagaaacttcaatctttctggaagttgatgcagtcaatgaagaaaagatctctcttgcagataatcctactgcatacgaggatgttgctgttgcaaatgacacaaaattttt

SEQ ID NO: 242733 - DNA, 383 bp, Gossypium hirsutum
  unsure (1)..(383): unsure at all n locations
cagccttgctatcttgaaggctgatctgaaaagccaaagaaagcaagtaagaaatttaaagaaaaagtcactttggtccagaagtttggaagaggtcatggagaaacttgttgatattgtccattacttaatcttggagatccattgtgcctttggtagtaatgaccacaggtaaaaagaaaacaagcactaagcgttagagagatacaaacatgcatgtgcatgtttacatacacatgcatgtgtgagcatgcttgcctgctattgtacgaggataaataagtatgcatgggaaatgtgtcttatcctaatngacttatagaaatggtgcctttttctaatagtttagtaatacaacnaacatcaatttcataaaataatga

SEQ ID NO: 242734 - DNA, 148 bp, Gossypium hirsutum
ttcaagccgtccgccaagccttccggaattccttacttaacctttcttcttcaattttaaagcttgccaaaaccgccttcctggttaaacactggtggccggttttggaaggaaaccatcttgtggggatttgccggtttttcctgga

SEQ ID NO: 242735 - DNA, 280 bp, Gossypium hirsutum
tttttttccagatttactagccttcttatgcactccagcgttcctgtctccccaaatgacgcataaaacatagcaaaaaagcctacactgagatggcgacctctgcgaaaatacccaggctaggtaaagttgaagtttggtacagcatctgagtcaatcctaacctcagcttaatttctggtgaagaatctatcttttggaaatgtggcatgtattaggttttgttttagtcacttaaatatatttatgttttgggtgtaagtaatttgtaatttttaag

SEQ ID NO: 242736 - DNA, 152 bp, Gossypium hirsutum
cgtgtacccataggaagcctgaaagtggctgtgacatacgtaagggtgcttcgagtcctctgtaaaaccccaaggcccaagagttcatacttggggagctcgcaaagactggccaaaagaaaaagcttgaagggtttgaaatcataaaagct

SEQ ID NO: 242737 - DNA, 225 bp, Gossypium hirsutum
acgcataagtcttcacagctttaaaagattaactaacatcactcaacccaccattttgggctgggttaattccagcgacagcgtcctaatttatttcaaccttacacactaattaactaattatttcaaccattcttgtagtatacaaacaaaaccaaatcatgttttattttatggattttctggattatatacttcgtcaaatgctaaatgtaccaacacaat

SEQ ID NO: 242738 - DNA, 275 bp, Gossypium hirsutum
attttgagtgtggcaaatttgcatgtttatgaaaatatggagaaattgatgtcgaaagcagagctttgcaaagaaatgagcacatcttccaccgtgcagcccagcgattgtggaaacggcgaggctccgatcaattattagctattgttttagtcttcttcccttcgctggctattttcttattctttcccctaaattgtcatctgtattttacccgttccaatgaacatgcaaatatcatatggagaaaggattaggttatgctttttctgatg

SEQ ID NO: 242739 - DNA, 330 bp, Gossypium hirsutum
ctcaaatttcaacgaagaaacaaaataaaggaaaaaggaagggaaaacccacatagcccccaaccatcgtcccttttcctctactttcaatactttgttggaaagaggctcatgacttgtcgcctacccttccccgactcgctattactcaagtaaaagggagagtaaaagggagagatgtatatggtgccgccaccccagcgatcggatccgggttccatcggcggcgggtcgggtgatttacgggtttaccaagcttggaaaggcagcaatatatttttatttcaagggaagtttatatttggaccggatgtaagatcattaaggctg

SEQ ID NO: 242740 - DNA, 252 bp, Gossypium hirsutum
ggggcgacccacgcgttcgaaagaattcccttaatatatcatatcttaatgctgcgttgggtgatttgccatccgcgagggcacttatgggcgggggacattattatcttgattacatatgatgcacttatgtgcaaatcgatcgtgtatcccacttgcattctgatgtgttcaacgggtgaaatttctagtgaaatggaagaaaacttttcatgcatgcgacctttttgtaattgttgtgaaatggacact

SEQ ID NO: 242741 - DNA, 343 bp, Gossypium hirsutum
aaataatctaccacctataggaagcttatttaaggcgaaggtggttataaataggggtgtgcgcacattccgaatgcggattctcattgctgcggtgaacgttcctctatacatgatgttgttgttcaaagattggattgacaaataatcgtatcaaacatggtgatattttgcaaaactgagtttctcctttatacaggtaggcatattaggctagtagtaaagcttcaatttgaattgcaagttgatcttttgttatttctctaatattctaactaatagctagaagcgagtcctcttttttgcattatgcggtttataatttaaagccttgagaatggtg

SEQ ID NO: 242742 - DNA, 218 bp, Gossypium hirsutum
  unsure (1)..(218): unsure at all n locations
cccacgcgttcgcggacctgcaggcccaaataactctcagtttaactggatcacagctcaatgcaactgcatctggtacaaccacactnctggggaagttcaagccaaggaactgaagcgaccaatcaactttttcggaaaaagaaagatacaagatctagtttcacaggtttgattcgcaaggaaaagctggaaaccaagaagttgaaagatcttac

SEQ ID NO: 242743 - DNA, 253 bp, Gossypium hirsutum
  unsure (1)..(253): unsure at all n locations
cccacgcgtncggcttgtttgggcttcgtaggctacctgggtacgtggcaacttgcacagattctaatttttctttttctgggaataagtagatcgttttacattaatcaattatggttgcccctgggtagttttaccttaatggatttgtttatttgtaagccattgcttgaaatcagtttttgagctagttttcttattttcaagtcagcaacatggatctttgagaaaaaaaaagaaagctaagatcaat

SEQ ID NO: 242744 - DNA, 334 bp, Gossypium hirsutum
ccacgcgttcgcccactctttcgtgaagtaatggggtcaataatttaggtgggcgtggtatggataattcagaacttgtgaacacttaaattgtgttcaaactccaaattgcatccggcagaccgtttttgatgccgtagcacataattaccaaccagttaccgttattgtcgatgccacagctgctgcaacagccgacatacatgatgccaatatctatgacatgagaaatattggagttgcaacaccaacacttgaggagtggtattgaactcaagctttgatgaatcaaatgattgaactggtatgtattctttgggaggccttacttttt

SEQ ID NO: 242745 - DNA, 189 bp, Gossypium hirsutum
  unsure (1)..(189): unsure at all n locations
tcggccagtttttagtgttttgttttttttccaaataaaatgggttttagtgactactgggttggagtattagtgataataaatgtttttcttcatttggtatatgtcaatggatgatatgaatatcaatgaattaggtgtttgtaagtnttcataactaaatcataatcttaaaaaatctaaataatt

SEQ ID NO: 242746 - DNA, 337 bp, Gossypium hirsutum
tcccggcgtccgcccacgcgttcgatcctcgtccccctcctctccattcaccttagcactctcttatcttggagtcgtgtcggtcttagcatgtgtgaattggtcctcttcccactaccatcttcttctttctagttgatattgtgtatcaacaattatttatttgtatttataaattttattttatttttaaatggtagaattcatagttagagatccaaattacggaaagtgtataaataggtaggtaggtaaggtacctgaaagctaaagtcctcctactttacttatcttatacccatgatcatatgcactttccttttttaagttataaaac

SEQ ID NO: 242747 - DNA, 282 bp, Gossypium hirsutum
tccactcgttcgtctgcctaatactctgtcttaatctctccctttcatgcgccgctgcaggtttgacagatgcgatcctgcacgcctagccgaatttcatcccgcaatcccttcttcacttggattgggaggaagataggaggatagatccaccggttgcgctcacgggaaggcgcctctgtcaccgtttttttgaaaactaatttgaaaacaaacctcatgaatgacccaaactgggcacttaacgctgcatagaatacttaaaggattccatgaacaaag

SEQ ID NO: 242748 - DNA, 287 bp, Gossypium hirsutum
  unsure (1)..(287): unsure at all n locations
aattnggggggcgacggacgcgttcgttcatatacctttaatcattcaccattcattccatactcacttcaccttctatgggcgtggccattattaactcaaacatatcccattctatcttccctatattggaaacttgattgtagcattcaattatatttgttaaacaatctcatgtagtcattctttcttcttgtttcattaacaccctctacctcataactctaattccaacctcatttcaactatttataactcaaacattctttattatgataatttacctt

SEQ ID NO: 242749 - DNA, 393 bp, Gossypium hirsutum
atggatcacaaatctcctcttctcgttaaagatgacgttgatgatgagcttgagccaactgatagaagccctgttacagaaaaggactttgagcttgagccagctgatagaagccctgttacataactcgacaaagtaccgctactgagtattcttacaacctatagttgatcagaatgtagaatgtgtgtcgtttgcaatgcttggttgcatgaatgtgtaggataatccaatttgagatgaaactttgaaatatatattttatgtgctattctgatgcttttttacagtatagcaccttagtttggagtaactttctttacagtttgataaggaacaagtgttttaatttaactatataaaaatataaatgatatgatagtctgttgattc

SEQ ID NO: 242750 - DNA, 105 bp, Gossypium hirsutum
tggtaaacaaatcttgacatatggtgagaggaaacccgtggagcatttcttgaagggcggggataaaattacaccaaaggatttttcttcggtagccgaaaagct

SEQ ID NO: 242751 - DNA, 240 bp, Gossypium hirsutum
tcgtctctctactctccactcaaatggctctatccttaaccatcatcagtggcaccaggggcggtggctatgcatatgggggcccaatccttcccaacatccatcttcccttctgccttcctcatcgccgcaacgtcctcttcccaatctcccccaaaaccttccacttgacctccgctgccaaaaatgtctctttcataacctgacgctttgatagcaagaaccggaagatcaatctca

SEQ ID NO: 242752 - DNA, 327 bp, Gossypium hirsutum
ctctaatcttaaaacttgtaagttatctttcatatatttattttaaagttcgatgcctggtgtgttctacttcattaattttataatttttttgtttacttatttgcctatgtccaaatggaagttggtttactctttaaatatatttagaaattgtcacaccttatagtttggactttaagttggaaaaagatatgtatattataaaattacgtgatttagaggaagaaaagataattcgagcttatataattcaggtatgataaattctggttagtgagttatatcttgaactttggattatcttaggtgttattagaattgaat

SEQ ID NO: 242753 - DNA, 243 bp, Gossypium hirsutum
gatgactacaagactagttcatcagccccaaaggcaatttctggtactagcgggggtggtgggaagagcattcgtagcaatgctgtatattacgaatatagtgatgatgatagagatttcaaaaggaggccgtcgaggtattcacggtcaccatcagctgagtggatagaaccacggcactccatatgatccaaggaacgcgagcgtagcagctattataagcatagattaaagagtaaataa

SEQ ID NO: 242754 - DNA, 370 bp, Gossypium hirsutum
tcggcgcatgtgatatagtgggaaggggttttactttcaccggttactatgtttaaagggagtgggtgtgttttttcgccattgcacgattgaattactgccacactggatgtgcatttttgttgtttttagagatttttgaagctgaaaaatcagtgaattaacactcggtatagcctgaataagttgttataagtgaaagttgaaacggcttaagttgataataatcccctgctattgtttcattttctttacagaatttaatgcaccccgaaaagttgataactggtgcaaaattactcaatttaataataatatatatttatatctaattttttttacctataaattattttttatactatatttt

SEQ ID NO: 242755 - DNA, 304 bp, Gossypium hirsutum
cccacgcgttctcccacgcgttcgcccactcgttcttccactcgttcgtccactcgttcgaggagacatattttaaaatatggcaaaagcttcacagagggccctggtttcaatggcaatctgcttattgtcttccctcgttggcttctcctatgccatcagtctcgtcaacatgttcttcttactcagcaaattttattgcgacacttgccgcgtatagttcgaaaccaaacttatcgaacccattccatgtgccaatgttgaatttggattgcatgaaaatatgtgactaaactgttactta

SEQ ID NO: 242756 - DNA, 189 bp, Gossypium hirsutum
tgaattccaggcccgacccacgcatactctttctcattctctaatcactaatcttaattctcaatcccatcaactatataaagcagagttgtattttcaacatctattaacatcttccctattttttttttcttccacaaatatacttattaattttcatttcttaatcttaatccttcattttacaac

SEQ ID NO: 242757 - DNA, 152 bp, Gossypium hirsutum
aattctccacactttctctcataaagaatttccacaatagctattagatcaactttaagcgatagttcatcataatatgactgttgcaccataactcaaacattcttccatttctaatcctcataacaactttcttaaatcattaacttttc

SEQ ID NO: 242758 - DNA, 414 bp, Gossypium hirsutum
caaaacttggtcgtgaatatgctatccaatactcactccaataccatgcaaatgaacagccatgccaagatgtgggaagaaatgcaacccaagattcatgttgatatttcattacccgcatcatctaataataatgcttcgggtaggtatggatatgggcatggaggagtagtgtttattggtggggatgtagtgttgcttagtaacgggaacaagttttattcttatgacatgaagaagagggcctctaaagatttgggtgaacttgatattgataccaaggcaggaattgttgggtatgtgaatagccttgttgagctctaagaccaggcgctgctgtttgtatggaccggccttgacaagaacaccctacacaatctccctctcttattctcattatcaggcaaaatattt

SEQ ID NO: 242759 - DNA, 280 bp, Gossypium hirsutum
cgaccacgcgtccgaaaaaaatctgtgcatgatctgatgtctaatcattttctttgaaagatattcctttttgaggtgcggacacaaaaaaattggaatgtatacattacactacacagttcttactctttggttgttttttcctgcatctgtaaccttttcgtttatccgttttgagttatcgctttttgtataggccattattgtataaatatgttatcttgaattcaacacctttttatcccgtattcttctcctttttatgtttttagttacccta

SEQ ID NO: 242760 - DNA, 303 bp, Gossypium hirsutum
cccacgcgtccgtttcttttggtttttagacttgcagggtgaagagagcaagcggggaggggagaatcaatggcatccacttcagctgcttcaatggctctgcccttagctggagctacccaaaacagggtgccaagctctgaggcattctttaagccacttccggtgaagccatggagggcaatgggcggtgttaaaagacccaacggaaggcttcaagtcaaggctggtgtttcttcgttcaatgaaaaggctgtgacagggttgacagctgcaacactgactacatctattattattcca

SEQ ID NO: 242761 - DNA, 230 bp, Gossypium hirsutum
gaaaaaaggaaaattccccatcgtctctttctggctcatgtacataaactatccaccatgtgcggatatgctctcagctacagttgtgactgttttatacttaattatttgctttagtaacaaatattgttgctaattgcaacttaatcgctgtaattatcgttgctctactttgtatctcttggaagttgaacttcagttttattccaataaaaatatttctagccgtg

SEQ ID NO: 242762 - DNA, 352 bp, Gossypium hirsutum
cggggcgacccgcgcgtccgctcctttattacatgtatatttgctcttgcttattcaaacctgagattttgatagagaaggaggtgttacatttaaacccaaaaagaatcaaattgtataatggttgttgattgaaagttgttcactttggctcaagtctcttagcacaacacccccaaagattgtttgctcatcatcaactgctaggttttctttttggcaaaaattttttaagaccattcttgtttgccactattttttttttttatctacaaggaattgattccacatattttttttatgatttatttacacaatcatttttgcacttttacattttttgattaaatac

SEQ ID NO: 242763 - DNA, 310 bp, Gossypium hirsutum
tggaggggcgacccaagcgtccgacgaaaccatatcggaaataccctatcgttctctctcaaatagtctccaatttctcctgggcaggatcgactctagactatccatctccaccgtttcatcatcgtctcatccgcctctcttaaaaccagtgattataaaagatgtgtagctttcatatctaatttctggatcatgttatttcccgcaaatgattataagattgtggtggttggtataaataatgctgtctaaacaaccacgcttttcaaagcttcacctttttaggttgtaactacccatcctactt

SEQ ID NO: 242764 - DNA, 260 bp, Gossypium hirsutum
cagcttttgtcccatatatgggaactgaggtgaatggaaatggattacagtctaggttaatttctcatgctgaaggaaaattcaatctgtcatctcttcccaacattcgggatgtaactactgattacactctttatgaccaacttcaacaagtaatggcagaagaaacaaactcgtaaagagaagcatttttagaagcaatgaaacgttcaaaagcttagaaaaaagctctttgtgctatacgtatggtgaaagcatca

SEQ ID NO: 242765 - DNA, 122 bp, Gossypium hirsutum
tcggccacgccttcggccacgccgtccgattttttaaggggaaccaacccctccagggttccggggtttttggcccaaataagccttaattttaacctcgaaaagaacctttgattggggtt

SEQ ID NO: 242766 - DNA, 176 bp, Gossypium hirsutum
acgcggacgcgtgggaaacccagttcactcgttcaccccactcgcctgttatagaatctgcgtgagtagcggaagcccatttcgaggatgttgctttgcctgttgtggatatgagtgataaatagctggtaacccgaatcaaggagtactcataagggaatctagaggcaatcctt

SEQ ID NO: 242767 - DNA, 409 bp, Gossypium hirsutum
  unsure (1)..(409): unsure at all n locations
gagaaaaatggttaagccaaatttgtattttagtaggtgaaagcgttggaaaaaacatgaaatggccggcaagcttcttctcatgcggaacaaactgcagtagctggcctgcgatgggaggaaagcttccagggccagcgtcaggaacggcaccggccaatgcctatacgacggagagtaaccccattgtggtgatcggtgaacagtacattgccccataccctgtggatcttaaaatacaacacacggtatttacggttgctgaaaataacttcgatatcaccgacgttaatgataaccctattttcaaggttaaaaataagttgttcagctttcctgatcgccgcgttttgcttgacgctgctggaaatcctctcgtttccctaaacaaaangtgaagtgtgaggaa

SEQ ID NO: 242768 - DNA, 317 bp, Gossypium hirsutum
ggaaaacccggcccgaccgacgcatacgcccacaccaccgcccacccctccgttcatttttaaccagcaatatgaaattcacgaggcgtttttttattttaatcggcaccttccattttaccaattttgaaataccataatagtttttataataaaacttttttctctacttttctaaatctcactaaatatcttttcttcataaagaaatatctgaagttaagttcttttccaaatcctcaattctaataaattaataattttatcaaaatttccatattaccatcttccaactataattaactccttttatcatt

SEQ ID NO: 242769 - DNA, 275 bp, Gossypium hirsutum
ggaaaacccgggccgacccacgcgtacgcccacccgtactcaatcacaaactcttctttcacccacccactaacttctcttgtgggggtcttcttaaactccagagccctcatcccaccattctcaacttaaccttcattcctgtaatgctcttccacatcgaccacaagtttcatctcatgtctaccaatctttcctttattcactgatacgtgttttacactttataataaagaaaattctttctatctcaacaacacctatctccactttaa

SEQ ID NO: 242770 - DNA, 410 bp, Gossypium hirsutum
cccacgcgtccgcccacgcgtccgcttctctcactcagttttgttggttcttccacaacagaagaggacttaattttcagtccattggctcaagaaggtaacttttttcaaaaccgttcaatagttgttgaattaactcttttgtttttgtcagttatgttacatgcatgtttcattcaggttatttttatatacgtgaacatcacgaagatgagtcgcagaaatggtcccaagcttgagttgaagctcaacctatcaccaccaaggtttaacccaagagtggaatcaccaagccgatcggctaccgtgtcaccgacatcgcctccaagctcatgcgtgtcatcggagatggaggatgacactggcagttgtagtgaggcaacaacaacatccatggttctttgtgggtg

SEQ ID NO: 242771 - DNA, 392 bp, Gossypium hirsutum
  unsure (1)..(392): unsure at all n locations
acatcanataactccncttccaatttttttttatacttcaaaacctctcaccacaggtccgcttataccctaagcctaatcccctcaaattctttaaatccatcacttatactcgctctctcctcccttttctcctcaaacacctttccctgccccttcctaataactccctcttctcatttcgctaaggtaatatacccatcacgccagaccaccttcccttcaccttctcacccattactgctctttccatattcctcatcaatgaaaccctattactccacgttccacaacttataccttaaagagaaaaaaaaagtttttcttttaaaaaaaattcaataaattattaactataaaactttttattatgtccaaaataaaataattta

SEQ ID NO: 242772 - DNA, 286 bp, Gossypium hirsutum
  unsure (1)..(286): unsure at all n locations
gaagtnntgtaagttacctaattanntttttnnctttgcttttgccattantnncccagcnnccttgcaagggtcaacaaatcgngagnaaatatgaatgangnntattggaaaacannacgtgaatnnntggaagccttaaaagaaaacaaaccgaagcaggccattattaaaaacccaatcctnnngaggaagtnntacccagnnnatgtcaaccaaaccttgtttccaaaggtcgcttgatgaagggctaananntagcacaagaacgaacatnnttgagggc

SEQ ID NO: 242773 - DNA, 380 bp, Gossypium hirsutum
  unsure (1)..(380): unsure at all n locations
gcgtacgcccacccctccgcccacccctccgcttacacatcagatacatctccggcaccatccatgatctgttaatacgaaaggtcctcnctgtgtggtgaaatctcaagcttgactatggatgatgccgcctcggacattacagtctcatcatctcaatgtgagaatgaatatactgaaattgcaacagcggaatcccatgcatgatcacatggcagagtgaatatggttgcagttaggcagaagaggtcataaactcatacaattagaccctcaaaagaggaattcctccttttctttcttttttgtttgttatcagtcaattgtattctaggtagtattctttagcaataagtacagcataaatctcaatacccact

SEQ ID NO: 242774 - DNA, 479 bp, Gossypium hirsutum
  unsure (1)..(479): unsure at all n locations
cggaatnncccgggntcgagcccgacgccgtccgnngttccaatcgacgccctgctgatacanncttccagtattctaacgaaccgtggattggttcggaatacatggacgatttggtgtgaatcantttaataccataccccgagaggcatantgatgtgtcttcatgcacgatcactctcttctccacgtattcagaacacggtgcacagttggttaccgggtaattgcaagaagtttgatcgaatctctgagggccagaaagggaaagcttgatttgtacgaagaacaaaacnccgaaacgataaagtgcgggtggaagagcattggctataatctctacaatgtggagatccgaatgatttattcgaaagacggtgaaggattgctttgtgttcgcaagaaattctggcgtcccaccgtggaagaacctataaaggctgccattgtttgaacacgatgctaaacagtactcgtgt

SEQ ID NO: 242775 - DNA, 358 bp, Gossypium hirsutum
gaaccttttctaaatcttttaacacccgagtgccatgctgttcaagtagtacactgggtggcatatgggattaagtatcaaagatgattgtatgtaaatacttgtgtaaaacatgatctgtgatttaatccggattgtattgtattatggcattttgactaagaaaggatttccggcatccgttcctctctttacctataatagcataatgatgcaattggttttattagcagttgttagagagctaaagatgatttcgggggctatgaaaactaggaatgccggacattatttttttaaggggaggagttaaatctcaaagcgtgatattgcttgaaaaaaaaaaaaataaaataaa

SEQ ID NO: 242776 - DNA, 406 bp, Gossypium hirsutum
  unsure (1)..(406): unsure at all n locations
cggcccgacccacgcgaacagttttaatctaangttttatgatttttacttttatgtccaagtgaaactttctgtctgtctcttttatttttgtttaactctcatttcaagacgttctctacattattctgttacaaggttatatgctcttacaaacaatattttatcttgagtgcctttgcatttttgttctctaagctaatttagtacaatcaaactctggttgacaacattgctgaattataaagaagtaaatgtctcttctattgtcaatgaatctaatatcttttattgaaaatgtatcattctatattatgcatgatattgaaagttttttataagattcaatctcttcaatctttaaaaaccaatgtttaacacttcttctaatttaattttatttaat

SEQ ID NO: 242777 - DNA, 353 bp, Gossypium hirsutum
agacgcaggacaggaaaatcgatgaaccattactaaggaagcttccattgccctctaagagagagaagatcatgccgcttggtattcaggttaaatgtgaccaagggcctacaatttggttaccaagatgacaagctatcgattcaactatttgagtcaccaaatcattccgagcatggatgaccctgataagtcattttactttcacgagaagattcaaccatatcttacttttccccttgtggggatctctatatacgtgattcagactaaggcctgcagtctatacatttatgatattgttactatatgagctttttatcatccctgtctgaaatgacatgtatagtgct

SEQ ID NO: 242778 - DNA, 409 bp, Gossypium hirsutum
  unsure (1)..(409): unsure at all n locations
ccggncgggcggacgcgtccggaagaagtctgcaataattacttaactcctgagaactcgcttttaagctatgattcctcggcagactcagtgtcgttgcactcgaatcaattgaaaatggagctatgaagtccgaaagaagctcgaaatggttagatttatcaaaaaaaaaaaaaaagttctaatgatagctagtattgtatatatattatatatatcagaaattagcagggaagtagaagagaggcctcaccatatatatatatcatttggtttccatgtgttctatttagccgacttcagatggaaaccttcgatttgtaaggactggagcatgaaatctcagtatgttgttattatatatatatgttatatactaactcggagtcattcaatcaaaatactcggt

SEQ ID NO: 242779 - DNA, 373 bp, Gossypium hirsutum
atcctaataacaatatcactttttttccttctgaagaatattaaatattggcgccgttttttaatgtggaagggccatcttttatttctaccacaaagtaatcctttgctttctccttctaaatctatgtatccattgaattataagaacttcaaattcatatcatattgatcattctccatattaaattacttttatagttttaaattaaaataataaaaaaaactgttttgtttattataaatggtacttactttcttgataaatattctttatgttaaaactagcttttattctcttttatcttccttattactatcattaatttctaactataactttcaaattcttaataaaaaccttttttcatctt

SEQ ID NO: 242780 - DNA, 343 bp, Gossypium hirsutum
  unsure (1)..(343): unsure at all n locations
aaacataatcggagagatatagattctcattcccttatatgaacacagaactacaatgcaagagagagagattacaagcaagcccacattttatgcattcaacaacaacatttatcaatactacaatctatgctctgactatttgatccaaacccaactaatgtgtaagccaaagtttcaccccaaaaaaaaggaaaaagatttaaatcctacaaacattaacctttatttagcactaattatttagaaaatgaacgcgtaagtcgtcatggtgatagttntaattcacaggattgcaggggttgtgttgggcaatgttcgtggagcagggaacgaagggaaa

SEQ ID NO: 242781 - DNA, 377 bp, Gossypium hirsutum
aaggaatctcttttaatattcataaactttttttttttcccatttcctatttaaactacggtgcattattttatagctttagcatcaatatcctattaaaatatataatacatctcttaacatgataatattatattttctttctaatctttattcacaatacccaaaacctacctattctggcttttatcataagcaccatcaaattttatcttgattaaatttttctttttttactaccatctttttttttcttctttcacaacataatattttacctttataaacgctaaacttatctactacccaaatccttcttcacatctaagacagcttatattgactactaactttcagttctatatattcaccctttt

SEQ ID NO: 242782 - DNA, 374 bp, Gossypium hirsutum
  unsure (1)..(374): unsure at all n locations
cggacgcgtgggggaatttgcagaattttttgtactatgtccgctcgaaagttccaccggtatcaactcccggtacccaccgatcgctccagatagaaatttagtctctcctaccaacacgccagcataagccatctttcagtaacccttttgctgcccaaatgctcttccaggccaatgaaaaagccccgtagtacgtactatcctagaaagtgaagagatatttggtagactgtcgccgtataacagcctaattttcagtggtgtcgggaatagagatttgagatcactaaatccgacgagtgagtcaaaaatttaataaattaatacctatgagtcaaatgtgaatatagaagtatttttgaaaaanaaaa

SEQ ID NO: 242783 - DNA, 395 bp, Gossypium hirsutum
aaaaataaaaattaggagtatattgggcttagtaaccggggtggggtgcttggctggcagctctcttcgcgtcaaaaggttcaatatattcctaagtaaaaataaatataaaaattaaaattctattaaaaaaagaaaaaaaaagacatattaataaagtgtgaggactaaaggtagaaacgaatagggtgtcttgataggtttggtaaattacctaattttcatgaaataatccaagttgatcttaatttttgtgtgtgttaattggaatacttttttttcaattttacttaaagcaagctaagggttctctttatttttcacatgcattttgactagtttttataaaactttggagtagtatttctttcatggtagaatttaattttcgcagt

SEQ ID NO: 242784 - DNA, 393 bp, Gossypium hirsutum
  unsure (1)..(393): unsure at all n locations
gcgtccgcaaaccagggcttaatctgtccctactttccccaaattcgcgaaattttctcggctttggctgcaatcctcatctaggcttcgattaccacgaagcaaacaaggatttcgaagcttcaaaaaaaggataagtctcttccctttactcactttttttttatatttggtttcatacgcagtagcaaagctttaagaaacaggagatgaatcgaaaagaaaataaaatcatcttgtggaaaactgctctcgagatgatttcttattcaaactctttttttttgtatagatttgtatccgtaatttttctgggctcacccccttttacattcgatttcacaggctttctattattttctgtcaatctatacaaaanattcccttagatct

SEQ ID NO: 242785 - DNA, 395 bp, Gossypium hirsutum
  unsure (1)..(395): unsure at all n locations
tccgtcatcttctaatcctgttctcaggctgatgggaaagaacttaatggtggttaacaaggaggaagacaaatctgtgccacttggtcaggcccagtcatttgcccagagtgatcatcctactcctaagtttccaactccttctggaatctctcctagcaatatggggaatcaagctgggatgccattccatcacgcaatgtcttaaagttcggtaatctttgatcagcattcaaaagatttggtggggcaatcttttgatgtcaatttacaaatggctatagaaaccatgcaaaattttgaacaccaccacaattttcaactgggatgtttttgatgagcgtgtggaccgtgttttgacaccctnnncatgagtctacanatatgaatgtgac

SEQ ID NO: 242786 - DNA, 306 bp, Gossypium hirsutum
aagcataagtgtatcattaaagtgggtgggcatattaccttaggagttgcattctggtccatcatgtgttgaggggggttgcactggtgctgacactgcctgcaagcaagcaacatcttttctccggtttgttaattatgcatcttaaatcttactatgttcaattttgggtttaattctcatatgtaactgatatatttgaattacatgatattacaattcatgaaatgtaactcatgctggaactttgatctttctaaaacaaataacacctccccaaattttttaacttgcctgcctttctat

SEQ ID NO: 242787 - DNA, 267 bp, Gossypium hirsutum
aacaccttcaagggcggatcatatttttcttacaaatgcccatctttcatcaaccgtagggtatctttcttgacgatggttctatcatgagtcttttttatgtgaattctggcattgttggactgctaactttctagtaagtgatgtagtgaatttagattttagttaatgtgacgttttaatttatgaaatctttatttttactttttatatttaagttgttaactttctgttttatttgattataaaatatgattattattatca

SEQ ID NO: 242788 - DNA, 390 bp, Gossypium hirsutum
cttgggtaaactcacgcttacaactgaactttgtggccaacaacttcacacttaacaggggaagagataagggttttaccaggattagaatgcctacaaagaagcttcccatgctttagaaatgcttcacgatatgcaaacttctcgctcaattgtggtggaccagcaataatagctgatgggatacagtttgaggctgagaatagaacactcggcccagcaaaatttaatgtaaccagtacacagaaatgggcagttagcaatgctggcttgtttgcagacagacaaaatcaacagtttgtggaaaacaatggaggacaagtgagaagtacaaacactccagagctgtatgagacttcaaggctatcccctggatcactcagatactat

SEQ ID NO: 242789 - DNA, 359 bp, Gossypium hirsutum
  unsure (1)..(359): unsure at all n locations
cgggccgacccacacaaacgcacncaattaccaaccctaaccctattttttcaaccagaattcaacattaattgggggtgttcctttttatatgctaatactaccaatctatcctttaaatccaaagctgtaaataaatcttttaattctgccaattatccaaacaatccaaaaattcctactatttccttctttctttatatattataattccattagcaatacattaatgatcaccctaaaaacaaattctttacttttttcttctaatctttttacattaattaaatatctttatttaaacttaaaaaacactttatttttctaaagcataaaattttaatgatttatattaaaat

SEQ ID NO: 242790 - DNA, 392 bp, Gossypium hirsutum
ttttgcaggaagtacaggttcggattgctggttttggaccagaggaggatgagtgggtagacattcgcaagcatgtcaggcaacggtccctcccgtgtgaagcttctgagtgtgttgcagttcttcctggggaccttgtactgtgttttcaggaaggtaaagatcaggctctctactttgatgcccatgtcctcgatgcgcaaaggcggaggcatgacatacgaggttgtcgttgtagatttctggtgcgctacgatcatgaccagtctgaggaaattgtacctctgaagaaggtttgccgtcggcctgaaactgattacaggttgcagcaactgcatgccgcaagtaacttatccaatgatcaacacaaaactagcaccgatcaatctact

SEQ ID NO: 242791 - DNA, 359 bp, Gossypium hirsutum
ctattcttcaaatgactaaaccggtacgtttatttaaacccacacccactacataacaccacaagaccacaacaggtgatcagaatccttcatctctgtcttacacagtggacaagatactttcacactcaaagtcctactctccaaattatcaaagtgaggcaccagattattcaccattctccaaatatttattttaattttccctaaaatgttcaactaccataatactctgtaaaaatctttgtaatcctcatcaataaaggacatgtatatattgtcctgtaaatattttttatttatgacccgatacccactcttaacaatttattccccataacctttatttttccaaacca

SEQ ID NO: 242792 - DNA, 252 bp, Gossypium hirsutum
ataaacaacaatccgaaaatggtgaagctcctgggtcatatattgttgggggatcagcaggggggtggaactttatcacctttacaggtaacaaatcagtctattatggagtaaccaaggaattatttcgtagtgctcaagcaagtttaggtgagtgacgtgtttctgatatgtattgttggctaaataatgactttaacagtaaatgcttttggagctctaccttaatattaacatcaaatgattgtactg

SEQ ID NO: 242793 - DNA, 393 bp, Gossypium hirsutum
cccacgcgtccggcttcctgttttctctttcgctttgttcctctccacttttttcgagtggataaatacgtaaacaaaggcttttctctttacaattttgattccattgttgatataattaccatatacgatattttgtaaaactgctttcatggggtttccagttggttacaccgaagttttcttgccgaaactcttcgttcacacgctttcctttctgggtttcatccggaatctgatctccgcacttttaaatttcatgggactcaccaatttcctcgaaacagacgcagtctggcccgaaaacccgacccgaacgacacccgagcatccgcccgtatcagctctcctgatccgggagatacttcccgtcataaagtacgaggagctcgt

SEQ ID NO: 242794 - DNA, 225 bp, Gossypium hirsutum
acgcggcggaaaaggtttcgctagtgcatcttcagccgcagctaaaccccgacattgcgaggggggtggcgggtctttatcaatgagccaaattgtcttatacatctcgatctaaaaccaaggaatgtgcttttggtcaactccagagctggtcatttgaaagttgttgacttttgtccgagcataactcttatggtatataattgtcttgtagttatctaatat

SEQ ID NO: 242795 - DNA, 315 bp, Gossypium hirsutum
ggaagacccacgcgtccgcacagctgcattaaggcaatccctttgaacctgcactttctgctacgactgtacataatcaggcaatgcacatttcaaagtccgaagcacaagaagagagggtttggccaaatgtacctgagcatccatcggaccacaccagaatttggtctgacctctcaggaagtgcagcaaaaagcagttatgagagtgaagaaaggcatagtgaaaggacagcagaacttggatgcttgttatcagagggttttacaaaggattagcatgttgcatattacaaatgatgcaccgttttatgaa

SEQ ID NO: 242796 - DNA, 440 bp, Gossypium hirsutum
ataaagggaaacccccctttctctgctagggttccaagattgaaaccccgccgccgctatgcctccgtcgtccgatgatcggagccgtgcgaggacgccccccaacggcgccttgaagtgcgctcataagtcgaggccgcgaacaccgagacgagggggaagagaagagcttcggcccctccttgaacccacatccggcgacgatgaagttccatcggcggtgggcctaagggccgactcaggtagtcttcttcttccctttaatcatattttgattattttttaaatcaatttgtagaaaagaaaaaaaaagaaaaagaaaagtaaataaaatagataaatatgcaaaagaaaaatccagagaaagcaattcaaatccacccttttttttaaatctgggttttctgcttttttaattctaatctctgggggtgtcgtac

SEQ ID NO: 242797 - DNA, 329 bp, Gossypium hirsutum
tccactcttacgatttctccatcaaaaaagtgcttatctctagacggagaagctgagaggtggcaccatctaaaacgctggaagtgctgctggctgatcaaagaccaaattaacctatatctccacctagaaaaaacgttcgttactatgctgtgaaagctgtatacccagctttatatcacattttcactgagaaagctactgtgtgagctttgttccgctctcggaggcagaatatgatgttctaagatgctagcataggaggtaggagaagtatgtgacctatgatggaaagtgtgaggctctgcgctgagcaaatagatgcacgc

SEQ ID NO: 242798 - DNA, 421 bp, Gossypium hirsutum
ctcttttttaccttactaactcatactacaatattaaatattattattattccctgtgtataatatgaacgatggagagggcgctcaaagactgctcatttctcatcaccttcttccgattatctgatcccttctttcacttccattcaaaagcttgaaatttttatggttttgaaagagcttctgaagttgacacacacacacacacatatatagagatagagagagagaaaaggatgggattgagttgtaaacaggtttccagtgatgaggttgagtggatccagggccagtctttgttgcaggctccaactatggagcgtccaaaagcttcatcaatgaaaaggcgacatcatcaagaaaaccagctgcagcaatcggaaccgccattgaagtgtccaaggtgtgattctttcaacac

SEQ ID NO: 242799 - DNA, 434 bp, Gossypium hirsutum
  unsure (1)..(434): unsure at all n locations
gcgtccgcccacgcgtccttccacgcgtcctgtaaacccgcnnttttaaaagatcgagaaaagatgggagctagagccatgttttaaaccatatagtcatttaaaatttcgatggtatttagaatttccatagtttcctgtaaaagattatagtttctgtttataaaaataactcattaggatccaaagtcaactcatgtaatagtttataggcgctcctaactgaaaatactccggtcgactccccttaccaaactagaagatcttcatgttcagactccaacaatgttatcctcaatattatcttcactacagctttatttgaagatcatcacagatagaaatcctatcacctcgacccagtcttcagcatatacctttttcaagcatacctttttcttaccaaacactacaacaagattttttcctcttta

SEQ ID NO: 242800 - DNA, 184 bp, Gossypium hirsutum
gtgttctgtatcaacatagtgtttttaaatgttagcttacaccatatcccgttatctctcgtgcagagctttatttcattcactccagcgaccaccaattttctgcttgtgtcaagtaaggagaaagtactttgtcaggcaaataatagcctttctggttcctaattgcagaagaattttagtt

SEQ ID NO: 242801 - DNA, 245 bp, Gossypium hirsutum
cccacgcgtccgcccacttgtccgtccactttttctttgacgcgtgggcggacgcatgggcgtacacgtgttttttcatcagggtcagcttaacaaattagtacatgtattatgtatcctaaataatgatagataaaatcctacaaatacatccatataattggatcctgaattcaaaaaagttgttaaaattttaatgtagattgaaatcaattttcaagcattattgagattgattgaattaa

SEQ ID NO: 242802 - DNA, 411 bp, Gossypium hirsutum
  unsure (1)..(411): unsure at all n locations
cgacccacgcgtccggcgatggatcattcaaattcaaatttgaagtatccttattctataacatagctaanaatatgttctggctcttatagatggagtgagctacaactgcanaaatgttagaaattaagggacccaactctttttcctcacttacattcaaataagttaaaatcttttcggctgataatctgtaaacaactcaatgatcccttaatttcttttttcttatagtgtattttcattttgctggctattgaattttttaatctaatttttgtttataatttgaatatcactgtttaaaatcaagnctcataatttaaatatctataatatattaaatttttttactttttatatttatcatcttataatatataataaaagggcggcccctttaaagaacca

SEQ ID NO: 242803 - DNA, 329 bp, Gossypium hirsutum
aaaaaaaaaaaaaaaaaataaaaataaaaaattaaattaaaaaaaaaaaaaaaaaaaaaaagagaaaaatataaataaaaaaaaaaaaaaaacaaaaaaaaaaaaaaaaaaaaaataaaaaaaaaaaaaaatggggcgccccttttaaaaaaccaaattttacttccccttccttccaacttaatactttttttatggggcacccaaaattaaattaattgcccgtggttttaaaacatcttaactggaaaacccttggcgtccccaaatttaattcctttaaaacaaatccccttttcccaaattggattaattcaaaaaaggccccc

SEQ ID NO: 242804 - DNA, 414 bp, Gossypium hirsutum
aaaaacctaatcttcctatctctcatattctgccgaatctgacggttcttcgcccccaactgccatttcaccaccgtggttggcggatggcgtcacacgagggcctaacccgattccctttgaagccacatcctcctaatccccatctaaacttcgatttcaacgaagcaaacaaggattcgaaggccattataaagataagtccctcccctttatttgttttacatgcagtagataaatcaaagaaatagaagcaaaatcgaaagaaaaacgagattccaaaatcacctttctcaaactgatttttaatggttcttgtatttgtatccagtatgcgtaaatgtgaaaaaaggaaaggaaaggaaaaaagagtcccctcttagaatacaatcggtttccttttataaccgaatc

SEQ ID NO: 242805 - DNA, 213 bp, Gossypium hirsutum
  unsure (1)..(213): unsure at all n locations
acccacgcgtgcgcccacgcgtcctcacaaatacacttctcttatttnatctttaaacagctctacatctttggacatatggcaagttggagtccacaactactctgtgggcacgaccagaccaatcgttaataatgaattctccactgataccataccatgccagattgctattataattattaggaatgttgcaatagcccacaatatgtt

SEQ ID NO: 242806 - DNA, 296 bp, Gossypium hirsutum
ggcccacgcgtacgcccattcaaacatcttatttaccattaccttttcaacctcacaaaagcattaccagggagggaaattaagacccagctgtggggcacaaaatcataaactgcactactactaatactacatatggaccttgcatcaaaactttgtcattgctaacataaagagccattatcaataatacacatcgatgatattaccaccaataatatccatttccatatactcatttacaaacaatagaccccatggactaaatccaatagataagaaaaaaactacttaaa

SEQ ID NO: 242807 - DNA, 178 bp, Gossypium hirsutum
cccacgcgtccgcggacttgtaaaagctttttaattgcaaatgggattctctcttggcgaccatcttttttcttaactttggagcccaacccttcattggttggtcccgtaggcgacccgaccggccaaggttttttttgttaagggggggtttttggtcaaatcttcccggggtttc

SEQ ID NO: 242808 - DNA, 436 bp, Gossypium hirsutum
cggacgcgtggggaaaatcacctttctttttttgctttctattgcttgtgttcttgtccgggcgtaaaaaaaaggaacctctttacaattgaagatagtaggctttatagccgaaaataaaaaataaaaaaacaattttcattcctttctatttgctgttctgttgtcgttttttgtttgtatttgctgccgtgttcatcctttttacaggtacgagatgtgctggcgcgcgttggccctcgacgtgtggcgtacggaggcgcggacgtggtcgttcggggctgaaggctcatggaagctgggactgctgcggcgtaagcagacggctagagttctgaagtcttttgggccatttgggcctcgtaactttggactattttgtaaatgggctagggtattagttataaggtcatgtaattgggattgggtattgggc

SEQ ID NO: 242809 - DNA, 310 bp, Gossypium hirsutum
ggaagcccacgcgagcgcccacttcgtcttgctgaattccattaaccttctcctttacatggctccgatagctgtcgtagttctagttccatcaacactcattatgtaggaaaatgtggtgggtataacccttgcccttgcccgagatgatgtcaagatcatattgtttctactattcaattcatcactagcatactttgtgaatttgacctaacttttggtcacgaaacacaccatcgccctaacttttctgtttcttggtaacgcaaatggtgctcgagcttgtagtggtttcgatttttaatttttt

SEQ ID NO: 242810 - DNA, 158 bp, Gossypium hirsutum
aaccgaagactctggatacgcatgtgttagttttagcaatcagttggagtttcctaaagattgatcatagtgttgtcagattatagtacagaggagttattgagcttgttatcagatgtgcagctagttttaaaatgtgccatgcaattttacggttt

SEQ ID NO: 242811 - DNA, 138 bp, Gossypium hirsutum
cgcgggcggctcctgcttatagtatttatccttcccattcccctataaacaccactactattagatcatcaggtcacctgtagatctaagaattgcttttaagctcaagtctagaaccaagcagccaacataggcctt

SEQ ID NO: 242812 - DNA, 235 bp, Gossypium hirsutum
cccacgcgtgcgtgcagatctcttttctttcacgatttgcagttcactttttattccccctatctctttcacgcgtaacagtcgtctttaaaaaacgtataggccaactaccaattgttcaagaggccaagtttataaagtggttttgtatgcccaaggtaggaacaaggcgtttttacacgccaaattagcatgctacataagaaggagaagcgcctaaattcttccctaatca

SEQ ID NO: 242813 - DNA, 538 bp, Gossypium hirsutum
gacccacgcgtccgtccacgcgttcggttttattgtattgttcatttaatttttcatatctgctctataactcaggatatagtttgttactatgtaggagctgtgggatctttgtttgttggatcgtttttaaccttagtttccctatatattgtatcctattctagctgagaagtttattaataaaaaaaaaaaaaaatatttattttatattataaaaaaaataatatttttttttttttttaaaaatatttatttttatttcatttcaaaaaaaatataataatttttttttttttctttctatattaatcaaatatattttttttttttatatttataacataaaatatattttttttatataatatcttttataaaattattttattttattttatctatttttatgtaatattaaaaatttattttaattttttaaacatatatataatatttatttttttttatatactaatttttatatattttattataatttattttaattattttttttatatatatattatttttt

SEQ ID NO: 242814 - DNA, 303 bp, Gossypium hirsutum
  unsure (1)..(303): unsure at all n locations
cttttgttaaatgattgtaggattttgtttggtcagctcttggcctgcacaattgttatgaaaaattgatgtttttagttatccttacatatggtatactgatcagaactcagaattatcagttgacaaacaacggttgggttttagttttacaataaaattgttgaattgagatattgtaagcgagtttgatttgaatacaccgacgaaggtgatggtggcatcaaaatgttgccatccagctcttttatcaaaaaaaaaaaaaaaaaaaaaaaaaaaaaaaaaaaaaaaaaaaaaanaaaa

SEQ ID NO: 242815 - DNA, 433 bp, Gossypium hirsutum
  unsure (1)..(433): unsure at all n locations
gttccttccattttcctctcttctaattttcctgcacttttttttgctttctttttctttcggttaataaagtttttcttttcctctctttcgtttttttcttatctataaaattccatcgattgttggaaagagcaagagaggaaaattaaatcaaagataaaatgattattagcaataaaggacaacaatgaagaactgtgaaaaactcgccaatttagctttagcaaaccaaaatggccttccttctttatttgtttcacctgatggattgattacagccatggcctaccgcttgcctcatgttgcttcttttgcaaaacctcaagactctgctgctagagccaacagtggatcacaggcatctaatgctccacaattgngatcccaaaactgttccagaggtttaaattcatcactgaagcttctaatg

SEQ ID NO: 242816 - DNA, 198 bp, Gossypium hirsutum
cccacgcgggcgatatgtgtgtattaagtttagaaatccacctcaaatttagacatgcatatccggccaaggggaaaaagaacagcttaaaagaagtgttagggcatgatttttgcatgtttgagactttaatgtcaaatgtttaaattagaacaaaagagccttgtgttcatcaatcagctgcctaaatgattaaat

SEQ ID NO: 242817 - DNA, 369 bp, Gossypium hirsutum
gggccgacccacgcgtagcaatgaatctttttacttttacattttaattttaatctattgtccctcaacctgtggtgcgggaaacatctaattcgtccgagtacatattaccactatttttaattcaaaatgtgcaattcgaatgaatgcaatacatacacctctcttaacccatccaaaagttctaaattatacttgtctcaaagttctccttgtcggtttcaatttttatttttctcctgaggattaataactttcaattggttttccacagctagatcctataatttaaaacttacatcaggctgaaaaccttctatcttattccttatattcccccttatatatatatcaggcccttacatcaac

SEQ ID NO: 242818 - DNA, 339 bp, Gossypium hirsutum
  unsure (1)..(339): unsure at all n locations
cgcgtgcgtgatgatgctgtttcacctggacttttgcttccacttccaatacctgaattagctngggaagatatgattcatttattttgtggaaggcctgccacgctcgcaagggaagtcaacagtccttgtggtggttgatattctaaccaaatatgaccattttttggaattggttcacccttacactgctctcactgtggttcaagagtaccacactcatgtttattagctccatggcattcatgaatctattgttaccgatcgagacaaaatatttttagtgccaatttaaaaagattattttatatctcatgtgcacttaaaatgaaattaatt

SEQ ID NO: 242819 - DNA, 403 bp, Gossypium hirsutum
aggaattgaaacgaaatgaaaaaaaaacagataagataaactcgaatatcaaccttgggggtatattttttgattgctggtgggcgttttttttttacaaaatttctcccttcggttttataaccgattacaataacaataaaaaaaagtgcttccattcctctgttgcggctgctgtttttgttgtttgtgtttgcagggtatgggtgtgtcagacgcatggagggagcatatgccggtggtggtgcgcgaggcggccgttggtttgccgagtgtgctgctgaagcttgagggctgctgctgttttctcttctctgcacggggctaagatttgggctttaaggtttgtatttaattgggtttggtcttttagtttgggccgggcataattgggcttgtacat

SEQ ID NO: 242820 - DNA, 416 bp, Gossypium hirsutum
gatcgatctcctgcaaggacattacattgtttctgtcagccgggatatgatacctccatcacaaaaaggaggccttgaggctgtagctcacttaccaacagctttttgtttggtctcactagggttattcttcacaatattgtcactgagtcaagctcgatacgatcttcgacacttatttttctcagctttgtgggctaccataagcattggtattgctacagttgtgaaggctaatggcaggattttctgcaaccgtcctcgtttgcataaaccacgacgttgattatatacatagcatattctgaaatgctatgacaaataaaaaaacttccatcttgcttgaatcatagttattctttcatacatattttttgtagtccatttaggtttcaatacctcgattatatttttat

SEQ ID NO: 242821 - DNA, 415 bp, Gossypium hirsutum
aacccacaccatgaatggtggagtgtgaaatctatattgacgatgttctttcttactgcagcgtatatctgttctacttcagagtggcaccaacaaggtggttcattaacagctccaatgacaacctcaacaacatggacgctatttctcccattgatgcactgaaccataccaagttgaaccaaccctgtgataccatttactaaaattttgtagcaccaaaacgtgctgaaatttgtactatagcttaatgttacgactgcagtccagataaatgttgttcttgtggacagtccagtattcgttatcctattggtttcattctaccatttcctcaaattccagacatcccaagaattccagaaatcccacaaatcccacagatcccacaaatcccacaaattccactaatccc

SEQ ID NO: 242822 - DNA, 394 bp, Gossypium hirsutum
gtcccagaccattcatggtgatttgtgaagctctattgacgagtactttcttaatgcaacgaatcgttttatactggtggggcaccaacatgtttggtctttgcagttaggtgacatgatgaccaacatgtttggtcttttgcaattagttgacatgatcagttgtatcttgaaccaactttgtgagaccaggtgttgcacattagaaccaaaagatcattggttttgatgtaggagagcttaatgttagtattccataaaatttccctggtttcttgtagttaagtctaatatactttgtcttattgatattaaaaaaaaaaaggagtattggtttataataataaataaacttatgcattattgatgtaaaatgaggacttttcttaatcaa

SEQ ID NO: 242823 - DNA, 437 bp, Gossypium hirsutum
  unsure (1)..(437): unsure at all n locations
accgaanaaaaaacccgacccgacccacccgtacgatcacctataaatttcttacacaatttcattagagctcttttcttattatttttcggatcattcttctttcatggggctcgactaaaagcactatatttatcattatataacatgaattagccccttactttatttttacaacctattctaaatcatcctacctataagatctatctttgtcattcaaatcatttcctctctaccacattaactttaattcacttctttacaatcaaatatcctcaatatactcgttaattttacttgggacttctcttgctctccatcattatctaattttttatcacaaaaaaagtaggaaaggaaaaaagctaagtacttatttctcaccttttaaactttttaaggtaaacaatttctttttcaaatgaaaaaccttt

SEQ ID NO: 242824 - DNA, 361 bp, Gossypium hirsutum
aaaaaaaaaaaaccctccgaatgttgagttgacatgattgatgatcagccattcccaaccaaatggacccaaaaacaaagttgtgaacacatcgggaacgggcaaccaatccgctggtgtggtgtgctgctatcatctgcaccatcttgaccgtagcagtcatcatcgcaggcattgttaccttcataggatacttagttatacatcccagggtgccttacgtcagtgtcatggatgctcacctagaccatatccagattgattatgcgggtattctggaaattcaggtaaccatactaattcgagcccagaatgggaacgaaaaggcacatgcaagcttctcggattcgagttacagctt

SEQ ID NO: 242825 - DNA, 415 bp, Gossypium hirsutum
  unsure (1)..(415): unsure at all n locations
ggaaaagaagccaagaactctcaacacctaatctcccttccccttccccttacccttcccgttcggccatccttgacacctcgatcttctgcttgccgtcaaccaacaatgattctcaacatcagacgccagcgctcatctttaattttcctcatcttcgcctttcgttgtcaaaatggttactccaccaccagtcggcatatagacttggagtcaccctccccatctgcatccatcttttccattacactgaaaattgaaccctagaattttgatttgaatcgctccgagacagccaaggggcagattgatggtcttgagcttatagcctttgagaattttacatcccgtgctgtgatggaggcagtcgggtcatgcgtcacanacaagtattctgaaagactacttggtgcta

SEQ ID NO: 242826 - DNA, 406 bp, Gossypium hirsutum
cataaaagcctgaagtatttgatgacttaaaatgagttgaatctgaaacaatgatggtggcttgagctattgaaagaggatgatttactaattgattatcaacctgaaaaaagctaatgttggtgtagattcattaagtcaaaaatcattgtttgctttgagagcgttgaatgctcacttgattctgaatcatgattgttctattttagctgaattgaaagctagaccagtgtttcttcaaaggattgaggagtttcaaaatgttgacccgaagttagtagctaaacgagatcagattcagagtgattcatctacagaatttagtgttggtattgatagtatattgtaatttcacaatagattgtgtgttctgaataatttggaattgaaacaaaacattttgact

SEQ ID NO: 242827 - DNA, 320 bp, Gossypium hirsutum
  unsure (1)..(320): unsure at all n locations
agcaagtgcagttccaacagcatgattagattaaaaagaaatcgaacgcgttaactggctggttgaagttagatgtgtgtgtgtgtgtaacatangtatgatgttctcaggacttggcaacttaatagcatagcttgtaaatacactgatgtcatctcttatgtaccgtgtgtatatcatacaaaagtcaacctgttagaggctaccgtgtgtatagggttttgagtgctgcttttctgagttttggttgtatattttttttttcaaaattccttcttggggttttgatactgtaataaagtttgagttttgggtgtcaa

SEQ ID NO: 242828 - DNA, 375 bp, Gossypium hirsutum
  unsure (1)..(375): unsure at all n locations
aaaaaaaacccgggccgacccacacgtccggttaaaacaaaaacttgattatcctttttctttcatacacttttcccaactaaaccgcccgcttacataaaaaagaagggctgtctcaaanaattaaaacttttcccacttcaattttattttcattttcttcataaacaacttatttaccttnaactttttatttttatcaacnacatcaccaaaaaaatcctttttttacacttttccactacttacttaaaacttcatattataaacaaatttattttcaacatccaaaacccatctttctatatacttttcaaattacacaaccatattatttttccccttcactactttcaatccaaatccttcttatat

SEQ ID NO: 242829 - DNA, 402 bp, Gossypium hirsutum
  unsure (1)..(402): unsure at all n locations
gctaaactctgtgtctcctgaactccagtactcaatgctggtcatcccctgattccagaagctcgtactgagagttcaactgcagtcatatttacatccaaattgctcccccaaggcttcttcactttgtgccttgtttcttgttctacgttgttgaaaatgtcttctttcaggtttacagctcttatgattgctttacttgttaccatgtcagcggttgtatctgaaagccgggttgcgagaaaagacctcggcctggatcttggtggcatangacttggggttggagcaaggataggccttggcttgggaggtggtagtggttcaagatcaagagctggggctggttccggttctggttcaaggggttctagttcaagctcttcatctagttcagcatca

SEQ ID NO: 242830 - DNA, 413 bp, Gossypium hirsutum
ctcgttactccctcttcttctcatctatgtcgctcgccctaaattccccaaataaaatttggctgctcttcttgtacactgggctgtaacttcatccatctctctttcccttctccattatagacccttcttttgacttttctgtgctttctttcgaggtaaaaacaaggggaaggtaatactgctgtgaagttcagctttgggttttcttttttggtttaggtaatggcgctaaggctcgatggcacagatgtttcggggtttaaattcctcttctcattggcggtcatgtatggtctcatgtatggtttacgtaatgtacaccaagttcatcacgcctttggggatcgatgcgcctctcgatcggttctctgaagccagagctatcgagcatgttcgagtcttagcacatg

SEQ ID NO: 242831 - DNA, 399 bp, Gossypium hirsutum
  unsure (1)..(399): unsure at all n locations
atcacatttttttctctctttaatttttttaaaaaattattgcttaaaagatacagggacggcatttgaaaacaaaaatgacgcgcggacttgttgttcttgctttggttttgattgcccttgctggtctggtttctgtcgacgcttcatccgccagtggcagccctgcaagtgcaccaactgaagcttctatagatggtagtactgctagttcctcccctccttctcaagctaccgctccaagtcgtagcagtggtgtcacttttgaccttgatagatagatcaaaaatagaacgatcaagttaaatataataagtaaataattctatcatttggactggtgagttggttgtttcgctgtanagccatattcataaggttcatccatagaatgattct

SEQ ID NO: 242832 - DNA, 442 bp, Gossypium hirsutum
  unsure (1)..(442): unsure at all n locations
cccacgccgtccggtgtgagtttaacggttttcctttgatttggaaagtgcnttgatgtggtgcgagggacgtcgtanacttcagcgaatgggtgtgtgtgctatanncaaatatatgtgtggtaataagaggaaggcgcctttgtgctgtcttcaatgtantttgcgctctgcaaaacacttacttgcggcgtttaataagctggtgttacattcagggtgaagaattctancttgggagggtgaagccttaacttttaacccatacattggtgcctacaatcatactttgcagggttggagtgacattgaatatagcttgcaaaatatgtgaaacttgcagggtagtaggagcagaattgataatagctggattgtatctggttatcctacgaaaaagtgaagagagcaagtatctgtctgaaaatgaaccaatttattc

SEQ ID NO: 242833 - DNA, 135 bp, Gossypium hirsutum
aaaaacccgagccggcccacacatacactcttataaaaatttacctcaacatctttttgtctttcatcaatacaaaactaaaccgcctcttaaacaacaataatcgcccgcgctaaaaccacttacaatcatata

SEQ ID NO: 242834 - DNA, 277 bp, Gossypium hirsutum
  unsure (1)..(277): unsure at all n locations
gaaaacaggggggagggacgcgtacgcttactgaaacaaccattggtggagttccttgattttgacatgcaagtattgatatttcggtggcattgatctgtgggttcggttttgataccatgagataaagttgttgaagttgtagatgggctatatattatatatagctaaacatttatttgcccaacctatgtaatcagcacctctcccagtgttttatttactcttttccagattnaaanagnaaaaaaaaaaaaaaaaaaaaaaaaaaaaagaa

SEQ ID NO: 242835 - DNA, 387 bp, Gossypium hirsutum
attaatttcatccggtactcaacagctctgtacaactaggcatgccgtttctttaagaatggtcaggtatcggctatgaacagttgttggttcctcttttagtgggacttttattgccttggccatccttattgtgattgtttcataactttttgatagttggtgccactctacgtggtcgcatttgtttcgccagatttgattctctgcatggccatttatgacttttcgaaacgtgggttattgtggacaaggctgcttgaaagctgtttcaacaaggttagccaggttactctgtcaccatccttcggaaacgccttgccaaacgttcaagctcaaaatgctggtcctccaagcgcaggttcagctaatgttggtcgatctgag

SEQ ID NO: 242836 - DNA, 409 bp, Gossypium hirsutum
ttcgaacctctcaatctgaattgaagcaagaacttagccgtgtgatgaaagaaaaactaggattggagagggtggtggaggaggaaaagaaaaggatggagcatgccaatgctgccaatgctaaactgcttcacgagtgcaatcttctttgggatcggctccaagaatgcagtgttaatttcctcagtgaggaagaggataagttgaatgttgatacttcatctccatctgatgctctggatctcttaacaacttctgataatcgaattggtctccttcttgctgaagcacagctccttgcacaagatgtagaaaattcggtggttagatcggaagagagccataagatgaaagacggtgataaaagaattgatgacgagctgaggaagatgctaacaaatatgtttgt

SEQ ID NO: 242837 - DNA, 402 bp, Gossypium hirsutum
cggacgcgtgggcggacgcgtgggatgttttcaggctggtgttggatgctctcccagggggggatgtgaaggtggtggggggagttttggtcggaaggatggatgtgatgaatctggatctgatggggagggcttagaggcctgtgaaaagaatgcatcagataaaaattcccacgacattgtaacccataaaaatgctgaggagcatcgagatcttccagtaccatctaatatttccaggctgccgttagcttatagtgggaagttcactggatcttttcctcattctatcaggtcatcttctcagttgtgcaacaccccagaacgttgctcatcagaatcttccttgggtcagtccaagttcaattcaaatcttcaggcaattccagaagatgaaactcc

SEQ ID NO: 242838 - DNA, 268 bp, Gossypium hirsutum
aaaaacgggggccgaacgtacggaaaaaacatttattatactttatttttataaaacaaaaaaaaaaatgggcggtaaaacggaagggtgccgcgccaaaacaatcaaaacatttatctttatatccccataatatcttcctccactaatatgctcatcacctctaatcatcattcttctttccacattacatcactacatatccatcaactttttacatacactacaactttctccacttttactctttatgtctttttcctttccc

SEQ ID NO: 242839 - DNA, 347 bp, Gossypium hirsutum
  unsure (1)..(347): unsure at all n locations
aaaaaaccgggccgacccacacgtacgacctttanacatttcaatttcacttttttttttatacacccaaaccaaaaaactgtgcaagataaaataaacattgggctggcccacaaaaaaaccaaaacacataccctattatcaacaaattcaatttctaccttcttttattgcacatctccaaataacatttttctatttcagaaactaatttattactaaaataactttaaaattccacattacactaacatattatttaactcctattcaatttttttttacttttaatcatatattaaatcaatttaataaattttttaataatctaattatttttacttcta

SEQ ID NO: 242840 - DNA, 385 bp, Gossypium hirsutum
tcacaagttcacaagttaaagacccgagttgacaatgtggttaatgaaagtcctcgaaagggcacttccgttaatgtattgagttcagttacaccatgcaacacattaactggttctagaagttactcttctccacctggtagcggagagagaacccctgttacatctcaacgtcgttctgggggtaacatgggagatcttcttatgcctggaagtagtgcagtttctagtcatggagaggttacaccttttcccgatgcgattgatggaaccggtcagcatcttcctgtggtttcttacgacaataccgaggatgatattttgatacacaatcacgctgccaaggaagagttgcgtaattttcaaagtggtttaactcaacaat

SEQ ID NO: 242841 - DNA, 239 bp, Gossypium hirsutum
cccacgcatccgctatctttatacttttttttttcgctattacaactaaattcgctggctagcgataaagaagagagtgtttgaccaaacattcaccagaatttaatctcccctattcttattgataatcacctccatatactctgaatctcataataccataacttacctaaaagtttaattcactatattaacgcctttacctctttatacttcccttctaatatccacttcttccc

SEQ ID NO: 242842 - DNA, 215 bp, Gossypium hirsutum
ctcaatctaataccaaatgtcctactgttgttttttaatgcattgcttgggcctttgaaggcgatgagctttgctcttggatgtggggctgctcgcataacatgtgcccatattaactcaactcggacctttcgaatgttactggcaacgaagctggaccttacaagggccacattctacatgatcatgcaatgccttgttgctatctactgagc

SEQ ID NO: 242843 - DNA, 348 bp, Gossypium hirsutum
caataaacagaccttgatgtaaggactcttttttaattattacttctcatttgatcgggagactcaaatctgtctaaggttggtatagattttattggatcttatctcagaataaagcaactatctacagctttagttccttcacaatgagcaattgcaacatgactagatttcgtgctgttcactgcaaagctattgctccctgctccatgaacaaaaagtggataaatggatgtcaaataaccctttccaacagcactacacatttatctcaaaacacttcacttactgtccatgccccaacatctatagttcttgctttgaaccttaccacatttgatgcaacct

SEQ ID NO: 242844 - DNA, 383 bp, Gossypium hirsutum
ataccctgaaatgtcaaaatgccccatctctctctccctctctctctttcttggtgccatcaccatgattacagccgcaaaagctttgaatctgaatatctttaattcaaatccccattctccatacatactctcatctagatctagggttcccttcattatctcaaaaacccctatatatctacaaaccttacagaaaaacactccccaaaatcaaaatccctctccaaatgattccccaatggctaagatcaccaagcagggcagcagcaacaaaccccacaaaatcaccctcccatttctctttctcttcattcaaagacattgatgctatcctcaaagaagaagaagaagaacaagtcctctatcctcaatcccctaaa

SEQ ID NO: 242845 - DNA, 439 bp, Gossypium hirsutum
  unsure (1)..(439): unsure at all n locations
taccggaactgcattcccgacccaacccacccgttgtttcataagcttttggtggctaaaatggtggttggcttggccaggatagaggcagggctttgtttgtattgaggattattgcttttattttatgaatgagaaccttacttgttctgttttctaaaataaactacaaaaaaaaaaaaaaaaaaaaaaaaaaaaaaaaaacaaagatataaaatgatggnctttccttaaaaaaaaaacaaaaaaaaatattaaataaaaaaaaaaaaaaaaaaaaaaaaaaaaggggggggcccctttaaaagaacaaaattttttttccccccttttcaaagcttaaaatttttttttgggcacacataaattctttttcgggccctggatttaataagggggaacgggaaaaacccgggggttacccattttaatcccgttg

SEQ ID NO: 242846 - DNA, 219 bp, Gossypium hirsutum
  unsure (1)..(219): unsure at all n locations
cggaannccnnngggggggggggccacgcgtccgggcatccttgtgtttgcttcttgttagtcaacttttttatgaactttttactgaattacctctagttactatgtaagatgtttgtttgatgccattatttttgttcactaaattaatcaagttctgaaacctccagcaactgggtattttggtttgtattaatacaatttcggttggatttgcct

SEQ ID NO: 242847 - DNA, 346 bp, Gossypium hirsutum
gctacacgttcagtagacttttccattggtcagatgacactttatggatgactgggtggatttgcatatgggggcaagaacagataactttcatttattatgaccaggttctgggcaaggcttactcacatatgagctacaaccaccatacctaacatggaaatgaaatacctattgctaaatgcaccactgaaagaactcaatattcaaaaactggtatcaatctgaatgggcctgccacatggatactctgagcatgataatggacccctacaggacccatataccacaatgaatcgatcgaccacaatgatgattgctatgttcgagattacttacagtgcat

SEQ ID NO: 242848 - DNA, 392 bp, Gossypium hirsutum
ctcgggcacagcagagcagtcaaaacctcctgttaacgagccaactaaattggcaggagctctacagccgagggaagctcctgctgtggtagctactgagtcgtcgacattagaagatattatcatgttagaagataattcaaaaaaggatgaacaagttgatggtagtggtagtccggaagtcaatgatacacctgggaaggagagttatggcaccttcctctgaaacggaaaaagaagatgagactatgtctttatcctatttatctaccaactttccaacagtgcttcgagtctatgaatcaaaacagaaaagcagttaaagtgaagaaatcaaaagaagatagtggtgttttgcaaataaagccatttgattatgaagcaacccggaa

SEQ ID NO: 242849 - DNA, 329 bp, Gossypium hirsutum
cccacgcgtccgcatcaacattgaaatttacaaagatcggtgaagagaagaaattggaagtgaggttaagaccgagtagtaaaaaagtggatgcggagggaggtgtagggtatgtatttggggtattgagatggtgtgatgggtatcattacgttggaagtccattggtagtgaaacgtaagtagaaattttttgttgtaatttttaattgggggtttgattttatcgttattattattagcattccattcttttgggggggaaaaatttagaacaaaatgccaaatgtaataacgttgcaaataagaaactacatacaagcatgattc

SEQ ID NO: 242850 - DNA, 399 bp, Gossypium hirsutum
tgttaacatactgaatattatttttaagttttgattaataaaatttgcattaccattaggtttttacattgtggctgtgttgctgcttgagttaaaactattgaaagttcggttgaactctgtttagatgagttttgtttaattcttactcaaaaagaaggaaaaaatgctcaatgaggtagtggtggaggtatcaaattgtcattgtttttgaatgtatggtctcatttgcaagggcttttttgaagaaattaggattttattaggcttatttaataatggtgtttagataaaaactagtgtatggttgtttagttcttactcaaattgtcattgcattgaaactatgctttcattgtttgaagaattagaattttagtatgtttctttgctaagtgg

SEQ ID NO: 242851 - DNA, 202 bp, Gossypium hirsutum
cccacgcgtccgcccacgcgtccgatttctaccgccggccaacgagctcatattgagcgtcgcttgttgtgctcctgcgcctttggaacttgaacttgttaacctttaacaataaagctggggaggggacatgctaacgatcccacaggtgcgtttcttgaactccctgatcctaagcaaaatgctaactttttggaccact

SEQ ID NO: 242852 - DNA, 401 bp, Gossypium hirsutum
tgctagacaaacttcggagtatccaatttctagcaatccagttctagagaaagagcgggccgttggctttctctctgttgcttttgagagtaaagcttacgagaccacccgcaatcttccaccgtttcagtcacttctagacgttgataaaacaaaagcatctgaggttgatgtagaagagatttctttaaaagaggaacgtgaccttgaagttgaattttcagcgcatgctgcagaagcagctgatgcccttcataaggccaaagaattatcatctcaaggagtcaatcaagatggaacaagatggtggattgaaacgggaatcgagcaaagacctgatggtgtgatttgcaggtggacaatgatcaggggtgttagtgctgaccaagctgttgaatggc

SEQ ID NO: 242853 - DNA, 159 bp, Gossypium hirsutum
cgggccaagcctttcgtcccacctcgcgtttggaactctttccacttttctacgataaattcccggtttgaccgggggaaaaaaagggccttggggctctggaaagaatattaaattctttttttgtatggaattatgggttgcttggttacttggtta

SEQ ID NO: 242854 - DNA, 294 bp, Gossypium hirsutum
gtcttatctccctctgctaaaaatggatcgaaagcattgcgggcttgatgttggggaccgtgcgtgtaatctcgcgctacctactaaagctcgcggcgggtctctgtctgtccgtctgccctgtgcaaacctatacggctcaactgtgccctacatcccacacttctaccacgctgcgctcgaaattgcgggtcagcccattaattgtacgtttttctcggtgtgctcgggtctcactgtcagaccggacttctcaccaatcgctccgtgcacgcactcacagagagtggcttc

SEQ ID NO: 242855 - DNA, 302 bp, Gossypium hirsutum
  unsure (1)..(302): unsure at all n locations
acgaaattatcttgtatttttttcataatcccataaaattgtctaanttataggggggtttttaaagaagcagggtgaanctaaaaccaccccttctccaccaccttcattatattttccaaaagcttaatcttattaaaaaactttatctccaccttttcatattacaaaccttaaaaatccaaatctcttcttttatttaataaagctccatatccttaaccaaataaaatcttatgatgatcacatcatataaatattttcctttcataagtttaaaaatcaaaaacgttctcattcat

SEQ ID NO: 242856 - DNA, 400 bp, Gossypium hirsutum
cccacgcgtccgcccacgcgtccgtgtaaaatttaacgtttgttaactttggtggcgtggcatacacatggatgatgatgtgagtggcatgtcaacatttaattaatttttaataatttaaaagtattataatttttacacctttttaataatttttatgattttaaaataatttttataatttttaaattaaaaaaattaattaaatgctgatgtgttatccatgtggcaattcatgcaaagttaaaaaatgttaattttttcattcattttgaggtgatttaacaaaaaacacaagtttaaaaattaaaagagatgaaaaattaaaaagaaagttaaaataaattttttataatattggaggaccaactaagtcattatgccaatatcagtaatttcg

SEQ ID NO: 242857 - DNA, 397 bp, Gossypium hirsutum
cttggattagggaaggcaggaaagctctaacacagcgtgctagtgaattccttcgaaatatggaacaagaacgggatgcattagctacggagtataaatcattgcttgagggtttcttaactcagttgcctgttcagcaacatgtagatttgaaattcctccttttccggttagatttcactgaattttatactcgacagcatgctaccatgtaaagctatcaacacgtatgggtttaaggagttgctgctcatatttgagacataaatgtagttcttcaattcactaatgtcattttcacaatgctcccacttgaatgaacaatctcttgtacacctggtgaacatttagactgaccaatttgtacaacatctcttcgttttagatgtcttttgat

SEQ ID NO: 242858 - DNA, 226 bp, Gossypium hirsutum
attgagaaccagagaaaacgcttcacatctaccaattgatagaatgaagatgtccgtgaaacgacgtagaaaatcgggcaagaaaaaaaagaaaacacccaaaaacaaacaaaaccctaaaactcgtgccagcggcggcagacagaactgtgctaagatagtagacctatttcttattaattcttaaagcttaaggtttgatattaaaaaaaaaaaaaaaaaataa

SEQ ID NO: 242859 - DNA, 390 bp, Gossypium hirsutum
gccgccccacccttccgaaaagctaaagcctcccctctgtgttttttccccccctttcttcaaagaaaaacgacacatttttaagctcgctgtgagccatcaccaccacacactctagattctacacaaaatttttatattatattttgggggttaaaattaatacccgccaaaataaaaatttaaagggcactttgattgtggccatcatattttgctgctgtggaaaatgggatctcatttaaatttcaagaacttcggtggtgatgggaacaacaggtcgaagccggttgtgatattcccgtttgttaggcagtcatctatatattcattgacctttgatgagttgcagagcactttttgtggacttgggaaggattttgggtcaat

SEQ ID NO: 242860 - DNA, 387 bp, Gossypium hirsutum
gctcttgattctgcttccatctgttgtaagtagatacagatatttgagaagaaagggtgcacccttggaattatgcgcttcttggttcaatccgcccacgacaagttttttaaatcccatgtcgagagtgcccttaaatctgctcttcggaagcccaagacgaccactgttaaactaccatttggactttgtggatgtcaggaggagagtactaaagggagagactttggggaaattgaggaagaaccaagtgagcaaactcacagaaatgggattgaaaatccaaataccaggattcagcttccaatgcctctgccctcttcatcgttggtcgtattggttgatgaatggcaaaccattcaatcaggggcagatgagattgggaaa

SEQ ID NO: 242861 - DNA, 355 bp, Gossypium hirsutum
cggacgcgtgggcaggttttgtcaatgaactgcccttcgtttacgcggaatgtttgtgaacgtgactggttaaaaaggtctgccaagatatgggaattggtgaagagctcacctattattgccgagtatagcagaacattactaagctctggtatgtttaggagataatcgttgtcaccatctgtatttggtctgttttagttgctattttcgacaatatttcaccattgtcatgtcaagctttcaaataccatattgcagttagggttgctgaaagatttgatttagtgggatatcaacattattgtcatctggtattcctggttggaagaataaagcatgagtgttgtagttg

SEQ ID NO: 242862 - DNA, 401 bp, Gossypium hirsutum
  unsure (1)..(401): unsure at all n locations
cccacgcgtccgcccacgcgtccgtctacgcgtccgtaaacataaaaaaaaaaagagaaatagaacgaaggaaaagagaaagaaaaaagaacgtancaaaaccttttgaaacttcagtttttatttctattctgatttgctaatgtgcgtaaccattacaaaaggatttctttcggtttttatagccgagttacaaactatttacttttctatttttgtccttttctatttgtttctacttcttgtcgtttcttttttttgtttttactgcttgcgtgtgattctttctttgcaggtgacagaagcatgcgatggcaagtgacaaacgagccgagcggtattggcaaatgcgagggtggcgcgcgttgggtgagcggcggctaaagagggtaggctgaggg

SEQ ID NO: 242863 - DNA, 397 bp, Gossypium hirsutum
tcgcctggggctgataacgacttgcctgatgcctcgttgctgaaatctaatgcgtgaagtatggacaatgctgaggtcccagagaataattccagccaaaatcctgcaagcatgcaaagagatatcgaagcttctggccattctgtaagatccaataatgctgaacatcagaaccattcattgttgcatcaagtgcaggctgttagaaacatagaggttgatccaagtaataggagtattaaaagattcaaaggtccacctgcagactctagtttcgattctcagcaggtaagttccccaggtgcggaacaattatcttatggatcaaatagtctgatgagagatggccttggtaataatcctttagttccttctggagactctaaaatgctaagct

SEQ ID NO: 242864 - DNA, 245 bp, Gossypium hirsutum
aatcctctcatctattgtgacccaaatttattttatgatcattataatgacattctacttcacccacccagccaaggaacgcttggcaaatcacgggaagaagaccctttagcttgactctacccgacttgtaaatgactgaaagggtggttaatggagctcttggcaaattgaaatccactctttaacgttttttcttattctgaatcggagcgtgcaggcccctcttttgacccaagccgctt

SEQ ID NO: 242865 - DNA, 403 bp, Gossypium hirsutum
ctcgatttgggctttttatagccactgtttacaacatattttagtaaggaatcttggattttcttcccattttgttgggtcgctgctgttcttttttccttttttgcaggtattcgcgaggaaatttcggcgtttgatcacgctggtaacgtagatctgtcagtggcggtgatcacggcgtgacttggagcccggaatcgtggctgtgatgagtagctggaacgacaggcattgaggagacacgttgattgcggcgcctcgggtttctgaaaccctaggcttctctgtcttctgtttagcaacttaggccatttgggccccgtttattgttgggttaaaatgtaatggggtaataggttaattggatcttgtacgggttattgggtagttttagctgggttac

SEQ ID NO: 242866 - DNA, 265 bp, Gossypium hirsutum
  unsure (1)..(265): unsure at all n locations
cccacgcgtccgcggacgcgtccgcccacgcgtccgggaacagccaaagaaggcagagaggctcttcttttgtacaaattgatggcttctcttcagtattactattattattttttaaattaaaatttatttttatgatcattatgatgtaaatatcaaatcaaaaacccatcattaagtcaagtcagtcaaactaataaaccaggtgctaattgtttcagcactggaactctcattcccttataaatgaaatgcgaatcanntt

SEQ ID NO: 242867 - DNA, 485 bp, Gossypium hirsutum
  unsure (1)..(485): unsure at all n locations
cgnntccgtggaaataatgggtctcttccttgaaagaaagggaaatggttctcgatctggtggtgcggaccaannaataccaagggatcaatngaattgcgattgaatagacggaagaaatggccaannngatagggannaaaaattggttgatccnatatcnngaacacggtgattggtggtgttgaagaaagncctgtagagaacccacgaacaagggcgtttttactattaaggtcgcgcgaattaccagtgcataatgtaagaatgctgaacaattaaagatgggatcgcgtannatatgaaatttcaacgtttgatttcaacgtggtttagaaggttgtcatannttcgatcgagcancgtcatcgaaaagcnttaaagccctagtttgctaggtttttgctcggctatttttgcagcgaaaaatatatagcagtaatgctttgtacatgtaaagtacaaattcctctgcggattttaca

SEQ ID NO: 242868 - DNA, 320 bp, Gossypium hirsutum
gcgaatatctttcgaagatgattgactgccattccttttcgactcctatttgaacggcttggcaacaggctattgcttcaggtgcaaatgcaaagggtatatcattatggatctctgagcacgataaaagaactttttctttcgcatctctaaccacaatacctcaagacggacgattttgactctctttgtatgcactggcgcaagtgaaaatgttaaattttaataaaatcaccaaattgcgctccagaaaacgcgacattgacaaggggtgaactactcatacacccccctaaaccactgtacgaagactatgtttt

SEQ ID NO: 242869 - DNA, 400 bp, Gossypium hirsutum
cccacgcgtccgattttttctggtctccataatggtgaacattttcttagtgttttttaaagttgtgtgcaatcatttcaccagaccatcgttgtttcttcttttttatatgcttgcagagtcttacaaaccattccttcaaatgaagcaattcatactgttgaggtaagtcttgcctgattttaatattcgttaaaattttgctacatctgtcttttgcactagattgtggccacttcaatatggttagaattcgagtatattttctaatcttgatgtttagatgaacttaattttaatattcctgttcagtgagttatgttgctctggacataacaattggtgcaaaaggaatatgtagggtcgaaagacatttagatttaactctttgtattgtaac

SEQ ID NO: 242870 - DNA, 396 bp, Gossypium hirsutum
cccacgcgtacgatttcgagactcgattggtaggttaatcccttacccattttagattgcgttacaatctagttagtatgctagcacatatacattctaaaattcgtcatgtcacaccctacatggacaccggtgtatttcttttctagtatggccacatcaatgcaggagggaatggttgaaagcatcgaatatcaacttgaatacacttttatcatgtaaattaaaatgattggcacttgaagttttgggtcaagtaacctggttttgcctttcatttgggaaaaagtatggacctctttctcatcaatgaagctatttgtcaatttagcttttccacattattgaggttgctggactttgattgtttgtttgattgtttgtttgtttgtgtgg

SEQ ID NO: 242871 - DNA, 417 bp, Gossypium hirsutum
cccacgcgtccgcaggtgttccagaatcaattgctcaagcttctcgaggaagcaaaagaaaatgggttcccgaggaagatgcagcattagtttccagcatggtggacctgcacaatgttggaacatttaatgctgataccgggttcaaagccgggtatttgaacgagtttgaaagaaagctacaaacggttttaccaaatgcaatgttgaaggcgaaacctaatattgaatcaatgattaggttacttaaaagggagtggtcaatcgtctacgacatgcttaatggccaaaacaatatcggttttggttgggacgagcatatgcagctcgttgttgctgaagatgctgtttgggagtcctatttaaagagtcacaaagaagccgcccaatttaaatttcggacttttccttactatg

SEQ ID NO: 242872 - DNA, 215 bp, Gossypium hirsutum
  unsure (1)..(215): unsure at all n locations
tgagatgaaagcgtcnnaatttcactttttatagttgttttttctnnccggagttttccaattccaaagctgtgccactaacttggtcctggcgttaaaaaaacccccaattgtggttaatttttgtgccatataacttttaccaaacccactaccttaaaagcttggtcaccaacttccttattgtaaatcttattaccggtataccatataac

SEQ ID NO: 242873 - DNA, 393 bp, Gossypium hirsutum
caggttaggccgcaaactattggtcaagcgagcagagtaggtggggttagtcctgcagacatcactgctcttatgattatacttgaaaccaaacgaagaaaagctcaagaactgagaagacaccagatacgtgcttctgtcatggtagatactgttgaaaacttgtctgatacattaacagaggcagttggtaagtagcagcagaatgtaagcccgtcatctaatttgaacttatgcatgtctcatcatcagtgcaatttatgaagaacaattcacgaacacatatatgcggatgagatcttgagtctttaataattagaaccttgaggaacaagtactttgaagatttttccggaggctgcaatctctcatagcatctggaccaggaatttg

SEQ ID NO: 242874 - DNA, 264 bp, Gossypium hirsutum
cggaaccggcgacccacgcgtcggtggataataatttagatgaggtttggaccatatttatgtgctggtgaaagggtaactctgtgatcactgtaaatactgtgatctttaagtgtttctggcttaatgccatgggctatgcggttatacggatttaaaggaagctgtgcgtaaaataagtccgtgagctgcaggaatggtgtcgtgaaacagtaatagaaggtctttttatcgcttcctggactttaagttgacacatgcaaa

SEQ ID NO: 242875 - DNA, 354 bp, Gossypium hirsutum
cccacgcgtccgcccacgcgtccgtgatgattaggtccaagggctgttcaatctatttgagacggacaacgatgggagaattagcagagatgatttcttttactgccttaggaagaacccattggtgatagcaattttctcacccaggttgctgcgtaaaaacttgtcaaaagctggcgataagatgttggatgatattgtttgatggggtggatgagccatgctgatgcagttgacttgataagatttttgtgtactagtatgttgtttaacttgttctgtacgttgcttacatggtcctaatacatgctatcttttaaataaatgcggttggtacttaattgtccttccttt

SEQ ID NO: 242876 - DNA, 416 bp, Gossypium hirsutum
cacccctgtttgaactgctttccaacatgctattgcttcagcagcaaaagctgaggtaagcccgtgatgaagctctgagcgtgatactaggactcttccttcctgattcctggctactatacgtgatgccgacttgttctgcctctcattgaacgcaccgtcgaagttaatcttgacaaaattatgagcgccccatatggcccaaagcgcgcaacagaaaagatgacatttgcaaggattgaactgctcaaaaacccatggcattctcggaataaatggtcaatagtctcaacccctttcccacatcgaggacaatttgtgcaatttgcaaggtttctgcttcgcatatttgtctttgtaggcagatagttccttgaaaatttccaaactgtaatctttattctctctggtatatg

SEQ ID NO: 242877 - DNA, 404 bp, Gossypium hirsutum
ctcttattttccttaaagaaaaacagagagaaagctctcaaattttctcttaggcctgtgccaccctcatcggagatccggctagccgaggtcgtgagttcgtcggtaagtcccctctctccctctcttgttttttaaaaaaaaaccgtttaaaaaaatttgaaaaggaaacagaacaaacgaaatccaaatcaagagaaaattcgaaaagaaaaaaaactgaaaaatcacctttcaaaacttagttccgattcttgatttactcttgaactttgtattatctccgaaaaaatatatatatcccccaaaatacaatcgattcctctctaaaaatcccccctaaaatacaatccattcttccatcgaaatatcaaaaaatcccccctcaaatactatcgatcccc

SEQ ID NO: 242878 - DNA, 281 bp, Gossypium hirsutum
atcttccataaaattcaaataggattgcctttttaaattatctgatacgcctgcggcaagcgtcaaagtgactgtggtgcatcatctatacaagcttctatcgaataaaatgccatactttctggatttttataaaaaactcgttcatttaaaatctgcttctaatcttcaattgcaaaatcttgctgaacaaatgctagctgtgaataagggccttgaaaaggttcttcaaaaactattcgcttcacataatgatcgttatatctctttatgctttccga

SEQ ID NO: 242879 - DNA, 421 bp, Gossypium hirsutum
  unsure (1)..(421): unsure at all n locations
ctcaaatgcattagctgtggcagtgattgcttctgttgcatggataacttatgagatatgcttgaaagcaactgatccatggaatganangtggcaaantgcttggatcatcacagctttctgggacatactttcgttgccctactttggggtatttgctacctttgggcaccatctcaaagctcccaacgatatgcatactcggaagatgtgggagaggaattcgatgatgaagaagctcaatctctaactagggggcaatcgaacggcgatgtgagtttagtcaagcaggagcaaaagaatggaaatgctgctatctccgatgaggaagatgaatctgaagaggataaaagggagtaaaatccatcgccggaacatggtttctatcaaaccaactttcgagcggatcccacgtgaagat

SEQ ID NO: 242880 - DNA, 412 bp, Gossypium hirsutum
ggccgacgcgacgcgaacggaagcctcacttattgattgacaactcgatgttttaaactgatcctggagacaactagcgcagggttttcacgtatcttgggccaaatatacaaccaccatttttgaattcaaagcaagctgataatgaaatggccggtggggttaaaaagtcggacctaagtggatggatccggagatcctcgggttaactggatttatggaagtcgactcacatttcatatagttgaaatggagaaaaagaggtttttaaagtttttcagttttgatgataaatatatgtaaatggcaagtgtgcattctgctttcctctcccatttcttccgcaacttatattacctgtacatgctacttctcactctacctataatataacatcatacattttcagttc

SEQ ID NO: 242881 - DNA, 354 bp, Gossypium hirsutum
cccatacttccggagcactgcactcacaatgaggcattttgtttgtcaccgagagctatcagtgtttttatcgctatggtgatggcaatatgcccctctgaattctgaaatgattgggagtttactgggccttaagtgaactttgggtggattaacatctgaacgtaacagacttggtacaagggaaaaatgagaaacgggataccttcctatatggataggatgctcggagacctatttgagctggcatgatacgacgattattattggttgacggacttgttatatggaatctaactaggcaatggtggattggaaacaagaggtattaaaatcggactacaaaggatcggg

SEQ ID NO: 242882 - DNA, 286 bp, Gossypium hirsutum
  unsure (1)..(286): unsure at all n locations
ccgaagcaagcgcaggcgagcaacnacccttaaccagcagaacacaaaggccancagaggcggcacaggancgacgaccgggggnggnncngaancaaaancagaaagccagggaacagagaaancggccaaaaagagacagaagaaaaagaaccngacanggcggncaggggccagagagaaggacagaaccnccnccgaagaggcngcngnngnnaggaaagggacgcaccgngaagggacaaaaaccccacaanggagagaaggacccaagggggcaaagacc

SEQ ID NO: 242883 - DNA, 139 bp, Gossypium hirsutum
ccccaattgaagcatttttaaccacaaccataggtttatttaaaataaatattaataacgcttgggaaatatttcaagggaccccgtaatcccaccaaatcctgcaaggcaaggggctcttatcttaagggtcatttta

SEQ ID NO: 242884 - DNA, 342 bp, Gossypium hirsutum
acgcggacgcgtggggttttggcgaaccatcttttttgctagaacgatgagtaagccaaacgcgatgaagaattaaatgaagaactaaagtgattatgacttttttataaagtcaaatggtcaaataaattaatattgttagaaactagcagtacccaacttaaatcgacttgaaaaacatacacctttcaacaactgggagtaataacgaaaaaggccgcaaccgatcgaccttaccaacaaattgcgcaaactgaattgggaaatgggacacacccctgtaggggggcatttatcaacggagcccgttgttgttaccccccagggggaccggtacacttt

SEQ ID NO: 242885 - DNA, 385 bp, Gossypium hirsutum
attgggcagtaatgtatacatgcaacaaaatcattgtttcagtcctctgatggtttatatgggtagctaaattgttagtgctggaaaaaaaaaaaaaaaaaaaaaaaaaaaaaaaaaaaaaaaaaaaaaaaaaaaaaaaaaaaaaaaaaaaaaaaaaaaaaaaaaaaaaaaaaaaaaaaaaaaaaaaaaaaaaaaaaaaaaaaaaaaaaaaaaaaaaaaagggggggcccttttaaaaaatccaaagtttttaaacggatattggaaacgcaatattttttttttatttaacccaaattaaattgtggttgcccgcatttaaaaacgcttaatttggaaaaaccctagcggccccaaattaaagttttttaaaaaaaattctttt

SEQ ID NO: 242886 - DNA, 401 bp, Gossypium hirsutum
atgttgcccccctttttgctctctgcttgggtttcgcacccccctcgccgccgccgttcatgtgccatggtttggacgcaaccagtggccggagaactgggttttcaacccccttttggagcagccctgagggtgaggtaagtttcccttctttttcttttttattttaaatgaaaaataaataaaagaatagaaaaactaaaaacgattcaccttcgaaaaatatcttagtctcagtatatttttctctctatatttggatgtcttttacactgaaaaaatccccctcccccttttacactgaatccccacggcttttaaatagccgaaaataacaaaaataagcaaaaaaaaaaatctccccttcaatattagttgcaatttttgctattactctgcta

SEQ ID NO: 242887 - DNA, 261 bp, Gossypium hirsutum
taaaacatcatctactaattacacacaccaatcactgatacatctgctcctacttaccatcccataatagatagaggccatctggataaatttttaacacaaatgacaaagccaccccctaactactctaattatttagaacaccaaactagatcatgaattactctaaattcatatcaacactcattcttacttagaatggcatcaaaatcaacactgcctttctgtggaagcccatatcctatccatgaacaaaatata

SEQ ID NO: 242888 - DNA, 251 bp, Gossypium hirsutum
cccacgcgtccgcatatttccagcatgtgaacttcttattcttctaagaaccgatccgaaggaaatgagagattatagcattctcctctatcattgtggattgtacgagcaggctctgaaatttctcaaattgtatcaagacatgaagagttcttccgcacaaaatccgtcaacagatccagttagcaacctagaagaagatactgtgaagaaattgattgttcgtctcaatctcattgcaatggagggag

SEQ ID NO: 242889 - DNA, 403 bp, Gossypium hirsutum
gtactcgaagaaattgaagctttacatggatgttagtgagcctacagggtatttcctatgtggaacttatctttgtataaaaactggtcgttggtttagtcattttaaaacttcaagatgcagttgtggagaattgatggataatccgactgatatgtgtttaaaagtgggaacagttgcatataaagatgaaagtgagggagaatcaatgtttttcataactgatgatttaagagtaatgcacggtttgccaggtgatctcatgaacatccttctcaatttgggtatcaataatgtttgtcagattgaagaaaaagttgtggacatcagttcaaatgaggtaatataaatccttgaaccaaattctacatatttcctttgcttgattatttcagattttagt

SEQ ID NO: 242890 - DNA, 398 bp, Gossypium hirsutum
aaagaacccatggaagatatcttttattaaggcagagagttgagtttccaggggagaaacctggtaatgtagaggacccaacttcacaacaggtgggtcccaatgacaccataagaggccaaaatcagataactaaaacaacagcaggagagaagcaacaaaatcacaaggattctcctgttgaagagaaggatgctaaagttgatggccatcataatatgggatctgaaatgatagatttgaatatgaagcctcattggtgaagcctcaaaaatcttataatctacccactggaagccattaatgtgttttgtttatgacgccaaaatggacactcctgttgtttgtatggatcccgaatactaattctaagaaagattgctgatcctgcaacggca

SEQ ID NO: 242891 - DNA, 391 bp, Gossypium hirsutum
aaacactctttctaggctgtctggacatctaatcctgtgagaacctccttccactccaactcttccttctccccacctcttacttcgcatcaacaatcctaaatccttataccttgtgtgttctttccatttcaaatgactgacaagtgatttgctatggaaagaagttcgaaaacaatcttttagttctaatgatctatattacttggacttagatttgattgttggatataggtatgcgtccaaacatgaatatgtttttctcttaagttttctcatgtatttagagaatctttggagggttatatcaacaaccctgtatgggtatttcaagaagaaaaaaaaaagtccgagtaacatatcttatgattatctgataaatttgcttaca

SEQ ID NO: 242892 - DNA, 386 bp, Gossypium hirsutum
  unsure (1)..(386): unsure at all n locations
cccacgcgtccgggcgtggagagaaactgttcgtgggtatgctggtgtggaggagtggtggagaacgtgggtgcatggtggtgctgaaaatggttgcgggctaagtctaggaaaattgggctttctgctttaggccgttaggcccaggcagaaattgggtcttacaagcccatcattaattagaatttgattagaactcaattactagagtatctacacctattgacccatactttatttaataattaaatcctaataaaattttaaccaaattagatcacttttaatttgagctatcctattatgatagtaaataataatatgtaattacccttattatatatgtgatgttcatatttttcaacatanannaaaaaaaataaaaa

SEQ ID NO: 242893 - DNA, 290 bp, Gossypium hirsutum
cccacgcgtccgcccacgcgtctttttttagtgagatgtaaggttatggatggggtgaagtggtgatggtggtaagacttattttgcttgtacaaatatgagttcactgtaatatgctatgaattgaaggtatcaacattcatatgatggatggatgctaattgcttattagtaaatcagtgtgatggatggatgcctattctatggtactggtatttggttaaaaaaaaataaaataatatatatttatatattatcaattatttatatattactttgtatttttaatt

SEQ ID NO: 242894 - DNA, 396 bp, Gossypium hirsutum
ggtttttgtccgagatgtaggagtgacaaggagacccttcttcatgcgatgagagactgccccaggactaaggcggtgttggctcttggtgggctgaataccaaagttctcgagggcacctacagtcgatgtgtggattggattgaggacatggctcgcacgctggacaagaaggcgctttctgacttgatcacggtgctctggaacatttggaacagtcagaataatagaattttccgtgacaaggaggaagcggccatggtgatgtggggtagagctgctgccctaagccaggatttccgcatttttaatttcgtggagaagccgttgattccgaaaccagagagcgagaaaggttggagcaaacctgatcaaggagtggtcaaaattaatttt

SEQ ID NO: 242895 - DNA, 409 bp, Gossypium hirsutum
cgggattctcttaatcaagcttcatgtgtttgtttgttggttttcgcccctctcactacattttcaaagtgatgttttaatttctcaagcaatctctttggccaatccgttgtctttggaaacgttaaattctataaatctttcttgttttctggaatcaaaattattctgatagttacaatcgttttgtttttatatatgtcaggataatttatatgtattaagcagttagggtatcgttaaaccagtgggggtttaggtcagggttagtgtttaaaagtcgtttgagagttttgcatactgacataaatggagtgcagcttttttagttcaaagtatatgccaatgtctgagattgcacatcttggaaggacaaattcaagccagttttcgagtttcaggccattgg

SEQ ID NO: 242896 - DNA, 202 bp, Gossypium hirsutum
gtcaaaacaaattaattaactattttttgtttagcagacccacctaatgttgggggcgtaccttataatgctaaagacaccacttcaaagaacaacagaacggatgtacatttacatgcatatcgataccaacagtctagtacagaccatggatgcaagatactcacaggatgggctgcttgtaaatatatacaataaaaca

SEQ ID NO: 242897 - DNA, 392 bp, Gossypium hirsutum
acccacccgtccgcccacgcgtccgggcttgcttttcattttattatgcatcaactccatatttcctgccttattttggatgcccattaatccttagaactcgaaacttgccacctgcaaagaaaaggcaggctttcttatgtagaatagcggtggtattgtcaattggagatttccaattaactgcagaaacatttgatccgttttgcttcgacacactgattttgtgggtgctctgtttgcagtatatggcctgtcaagtgggaagaatcaatttgcaagcaggtttatcaatatcggagaatgatgtctttgcaagttcatgtctgacgcttgcaacttgtgcaatccagaggtggagcaatgagtatagtttaagtggacaatcctcg

SEQ ID NO: 242898 - DNA, 396 bp, Gossypium hirsutum
gaaaaacacctgccctgcttgttttattagcgtctctcttttttttaatcagctttgcaaggcagtagtagtttacaacatttcatctttcccatctcaaatgctaacgtattggggtttccgggaggccttaacccagtagagtttcgaaggatctcagaactagtgtctcaatctttatatatgtatatatatacaagagggtttccgagttctaaacgtattggatctcataacactagtgtttcgactgatataaaataacaatctgagctgccaacataaaaccaaattctgtttacctagaacatggattcagattgggcagggttattcagggacctggttgatttgatattagcacgactggttttcgtgtctgattatttgcgattt

SEQ ID NO: 242899 - DNA, 397 bp, Gossypium hirsutum
ctgagctctcttcttccaaacaataatgattctaatagcttcgcacacctcctttctttttctctgattaacccttttctctttaaccttcaaaaccaaacaaaagctttgaaaaattctccccatatccatgcttttctctttttacacacacagacatatatattgaaaattttttcatgcttctttaactttccctgcatatgtaaaagtaaaaattaaaaccctgcaacatatagcagcagtaaagagggtggtgcagaaagtcttgtgactcagatcccaatacactgtccaatctatattacaccattaacgagaaaaaaatttatttcactctcaagcacaaagagttctttctttctttccttctttctttcccttggggtcgtttata

SEQ ID NO: 242900 - DNA, 412 bp, Gossypium hirsutum
tattccccacctcctccggttcactcttcaccaccaccttcacctccaccatgtatagaacgtcctccaccgccaccaccaccatgcgtagagtactcgccaccaccaccatccccatcgccgcctcccccaattcattacaagccacccccatcaccttcaccaccgccacccgttgtaacatattcctcacctccaccaccacctccagttatttaccattcacctccaccaccatcactgtcaccccctccagctcctgtgtatgagggaccattgccaccagtaattggagtgtcatacgcttcacctcctccgccacctttctattgattcttttgagaaatttcctcctctcataaccttcttctcaaaccacaaaaggcaaaaaaaaaaaattgttcgcagaatt

SEQ ID NO: 242901 - DNA, 357 bp, Gossypium hirsutum
cccacgcgtccgcggacgcgtgggcttatccctattgttgttgctctggtcccaaatcttccctttgttatccatatttctgtgcttataaatccttaatctacgccaccccttcattccttgtttttatctttcccttctttaaacctctatagatggaagtgctgatgggacctaccttcgccatcgacgttgccgcatcggcagcggcctacactagagaccgttctaaggatacgatttcgtctccttgcttgtttatcaaggacgatgaagcttgtcccggctcggatcccaggtctccggatctatcctccgatagttccttctcgatcggctcccccggagacagcgacg

SEQ ID NO: 242902 - DNA, 342 bp, Gossypium hirsutum
gccacgcgtcgcttacctggagatggaatctactggcataggatccggtttggcacaattggacttaggcccgaggtgttaggagtttttttggctggtatgtaggaaaaactctaactaacgtgagaggaaacggagactttgacaaagataattggccaattgtatgcgcctagagagttctccacaccctcgtgattgtaaggcgatatttggtgtggaaacgttaaccgcggataatcaggagtctttttgtatgacttgtaattggtcttactatattaataaaatgcaattaacatgaactttaatggacacattttagatatatgtggtttgttg

SEQ ID NO: 242903 - DNA, 404 bp, Gossypium hirsutum
gcagcaggttggtgaaatgtttttaatttcacatagatttgacttctttatacgtgttcttgatcttttgcagtaaatttggtgggacacagcactatgcaatgttcaactttgatgagactaatgttagatgagccatcaattttgttttatctttccgtagtgaaattatgttcctagccttcttttatttttgagtggctgtattttttatgcttcacttgtgcatctattggtgtgtgtgtctgtgttatagttgaaccataaaaaagttgttcctttaattttcttaatagtttatataatttgaactctattcatattatgggttttctgacaaaaatgctttcaattatgcatctttttggttgacaaaaatgtgtttgggttgcattctgtaatct

SEQ ID NO: 242904 - DNA, 399 bp, Gossypium hirsutum
atctatacaaaaacttctccaacgtgttgatggagcgttcgcctgatgcatctagagatggaacattgcaatcattaaaatctgtcaatggagattcaatggctgatgacatcgaagaaccatcaaccatggaggtggatgatgagaatgaaagaccaaagaaaagtcaatcaaatgggggtaaaacgacaaatggttacaatgtaagggaaaaagaacagtggtgtttatcaactctcggctatgtcaaggctttctcacggcaatatgcatctgagatatggcctcacatcgagaagctggatgcagaggtattcactgaagatgcccatcctattttacggaaagctgtatattctggccttcgccggctaagcaatgaactgtaactgcatgact

SEQ ID NO: 242905 - DNA, 341 bp, Gossypium hirsutum
cgacaaataagatgtagcaagctgttgttgccttgttgtatcacattgaaaatggttttagcatagttgcttagctctgttgctagtctgcttgtagcggcctgttgctgcccttcctgtgggggatgtgccggttatggcactagcagcatgtgatatcccacatacggtcacatggcagggtttagccttcaatgtcgctcctttaattgatatgttctacgatattgcgtgactatatgatctaatagtatattacaatccggagacccctattctatattgctttagagatggtaattaaggaatgcagtgagtggtcttctgtgctgaatcctcaa

SEQ ID NO: 242906 - DNA, 368 bp, Gossypium hirsutum
cccacgcgtccggcatattttttaacttagagcggaggcagcagcgagggaggcggggcagaacaggaaatacaatgaactccatcagcagcttcagtctatgatgactatgttccaccaatttcaaaatccgccatcatagacatgttttcttgtaacttttaacattattttaagaatattttgaatattcatttccaatttatataatatatttttcgtataattttgttttaaaaaaaaaaaaaaaaaaaaaataattatataacattctatataaattatttatatattatataatctatcttataaacaaaaatatttttattaaaatattattttgcttttatttattggtttctattttt

SEQ ID NO: 242907 - DNA, 198 bp, Gossypium hirsutum
cccacgcgtccggtaatagtgggcctgttggttattgtaactgggtaaggtctcttgtatttgggcctgccgtttaggcttttgtatttgggtaaaggactgttaagagactttatattttgaaattttggattatgccttggctttcaatgggccgggcaaaattgaggtattacaattttcatttgtttaatcaat

SEQ ID NO: 242908 - DNA, 262 bp, Gossypium hirsutum
gaagtcctccctcgacctacgcgtacagggcagcttaacattcggggtgttaaataaacaaaggaagccgcgcactgtgggaggactcactaccaagctagggacagaaggcaaacatgctatccgatactaagcaccaatgaaggctcgcaagagcatggtcattgctagaactctgtacgaggccataaattgaacacgcgttctagatgacacaagaatgccactaatgatccgccacaaggtgtatacacatgctaat

SEQ ID NO: 242909 - DNA, 404 bp, Gossypium hirsutum
cggacgcgtgggtgaattttgtttgttgatgattatggaagggatagcaagcagatcagagttgcgcaaagagctagagagagaacgccgtcgtgtaagggaccggcaaagaaggcagtctatgagccatgaggagagagagaagcatctcgctagacgccgaagaaactatcaattgcggagacagagagctgaaactgctcggttataccctgctccacctcccgttcaatttgaagatacaagcatttcaacaattcaatcgcccttgagcaattccatttcaaatataagtcctcagttttatgctgccgctcttgtggatcccaatcatggaccaaaaagactaatgccggatacgagaagtgcccagagtttaaaaattccagcttataagttagcga

SEQ ID NO: 242910 - DNA, 337 bp, Gossypium hirsutum
acgacagaatcctgaaaagcaagtggtcctttcctttaaaaaaacatgttttgttattttaccagcctatctatctttttgtactgaatgtaaagctatttttatcataaaatacttttcaaataatatcttaaaaaaaaaaagaaccttaaatgtcatggcaggctggttttcttttctttgttaccactattaccaaatgtggtatttttattagaccctttcgtatagaattcgtatgtgtatcaactgtaaaccaaagcaaagttgtcatgttgtgcgtgtattaggaaaaggtatgttgaaattgtgaactacattgctttttgcctgtttt

SEQ ID NO: 242911 - DNA, 289 bp, Gossypium hirsutum
cccacgcgtcctattttattttatattaagaatgctgagtttgcttgctaatggaaaagctacatatgctaataaatattagaactagactttgtcatgcttctctgttgtatttcagcttgatataaaacattttgtggcgattgaataaaatgatctagtcttcttttatttgttaaaaaaaaaaataaaaaaaaactaaaaagaaggaaacataaaaaaatttaaatatctttgtagaggatccttgcccaaaaacgactgcttgctacttagtttgcattttttt

SEQ ID NO: 242912 - DNA, 291 bp, Gossypium hirsutum
gtagatttgcaaggcgatttttaagaaaagattgagccaaaggttgttcgttctgcttctcctgcattgttcagtataggttctgaaaatatggaagactttgtaagctggttaaaaatgcctttcttaagtttctaccgttcatacaacaaagactttctaggaagtgcttcaaagcttgatacattcagtgcatatgatcggttcaatgtttcatcgtttagagagttggaactgcaagatggggctaggctgcttctgccggtgggtattaatgacactgttattcca

SEQ ID NO: 242913 - DNA, 257 bp, Gossypium hirsutum
gaaaaacgttaatgtttccttccatgccgccttggggtaggcctccaatgggcgactgtaaccccttatgagcttggattgttctttactgaaggtgtttcttaggagaaaaaaccatccatattatcaattcgatataatagtgctattctagtgtttactactaacaggaagtgaaaatgaatttcatcctagccctcattatgatttttcttatttgtggtaacgaacagatgattttattggctgatgatata

SEQ ID NO: 242914 - DNA, 279 bp, Gossypium hirsutum
cccacactttcgtttttacaaaaaatttgcatgatgactggccacttcccaagataaaagacactataagattcaagaaaacaaatcaaagagaagctgttcaaagccagaatggggagttcattgctaggatttgtaggcaaagtgttagaaagatgaataaaagctgttgtgaatatgatcactttatatctggacgactagcatcctgatcgaccttacattttcatcaaccatcaaaaaacaggtgatttcacaagtaaagtcgctggattagga

SEQ ID NO: 242915 - DNA, 281 bp, Gossypium hirsutum
attttaactttcaaatgcattttttcgcatgctctgcggggaccggtggatgaaacgcggccgtcaagggtttaaacagcccttcatcatatgagctaagctcatatcgaatatgctgcaccggttcctatgaagtcttcaactctttgcatgtttttaaagaaaaccgagttcgaccacaaggctgttgatataacactaccttgcaaggtatcatcataccttggattatatactatatactgcactatacgtaacatagctgccatttggcatgtagg

SEQ ID NO: 242916 - DNA, 258 bp, Gossypium hirsutum
caaacccgaagggttcctttcgaagggatcacggctcaagacgtcttagaagggggcagcccccagacccagatcgccgacgcaggaaaggcatattacaagacgatgggccttacccctccaaactccacccgtgtctagcctcgcctctcttcttggttttccatccccgccaccctgacctttgtggtggcgggtgagctgatgatactatactatagcactacttgattataaggagtcagagatggtgggtgt

SEQ ID NO: 242917 - DNA, 285 bp, Gossypium hirsutum
cccacgcgtccggtttctaacaaaaatttaaacttttctttgctctctctctgcaggtccaagtcctgtcaagtcccggcgagctaccaccgccctccgccgcgtctccgttgccggcgaccgccgtgaggtgcagaggcggtggagtagaggccacttgctgtcgacgtgattagaggcgatgggatagggtttcttagtttaggttttttctttttttaattttgagtttgggctatgggtatttgggctgtaatggacttgggttaatgggtttagtgtggg

SEQ ID NO: 242918 - DNA, 211 bp, Gossypium hirsutum
  unsure (1)..(211): unsure at all n locations
cggacgcgtgggcgttcgccgggagggacacaggggaagggagcacccgcacaccgggaaagcaacagacagaacggaggncangagccaagggaggaggcccccagagcgggggacaggacaacgagcaaaggaaancccacgccaggaagaggaagaagaagccccgccacgagacnananccagaagccagagagggggaaaaaccgg

SEQ ID NO: 242919 - DNA, 281 bp, Gossypium hirsutum
ccctcgcgttcggtttggaacaggctctttgagtgataagcagtctgaaactggttcaacggacgatgaaaaatccgaaataactgatgctgctctttctatgggaacagaaactgatggctcagctgaatacgtgcattcccccgaagagcgtatctctggggaagcccaaagtcgtaccaaaggtccgagttttacaaaaacctgcacaagcaacaccaacatcaaaatcagaatctccgagagcttcttcacccgccattaaaaagactctcagctcg

SEQ ID NO: 242920 - DNA, 278 bp, Gossypium hirsutum
cccacgcgtccggtgtctattttggctgccattagtgcttattggcaatatttgcacttcccaatcccaaaacacaactgtctctcaactcaaccggaatggctggagcccattgaccactgcatcggaagaaagcgagatctatattggtccttttttctttaattttctggggcctacttcttgcaaaatttcttaattactgactgatgtaagtcttgaatgggcattagccttccttggatcttaagttttatggcgatatttatattttgatt

SEQ ID NO: 242921 - DNA, 291 bp, Gossypium hirsutum
cccacgcgtccgccggattcgcatgggagagaaataagcatcaacaatatggttcttataacgacgtcagccataactaaaggtaatatgcatattctccccgagaaggaacacatgaaattccccgaagaaagagtactcggagccaaaaattggcaaatgcagatcttagttgcttctgttactgatgatgcaagcagaagcaacgacacaggtatcagagtaacgaccataaaagaagcttttagttctacatctgctaataaaagaaagctgatcaacacttccgag

SEQ ID NO: 242922 - DNA, 258 bp, Gossypium hirsutum
  unsure (1)..(258): unsure at all n locations
nccaaagctccggtttttttaccgctaccatctataactaggaggcttctgagccgaagggggaaccatctctaccacacctgggtgctgatctccattccaaggtacgctaaatcaccctaaacttttccattacctgtgttgtttactggaaaaccactcatgtaaatgctgctacgcgcataacgatggactgtttttgcctacacatttaatgtttcatgttctgccccatcattcaatgtttgataccacact

SEQ ID NO: 242923 - DNA, 288 bp, Gossypium hirsutum
ttgcacaccttgtttttgtatttaacctgaggttccgtatgggccctgtggtagaccacaagtgcagagtatgtggaaaactttggtggcaaaagtcaccctgaagttcacatcgaataattaaaggtagtgacatgccaactgctgggattctaccctgctgccatgtgtttcacgctgaatgcttagagcaagttactccgaagtcccagattcatgatcctccatgcccattgagcctcaaaaccattggaccactagaagaatctgcatcagtttcagaaccta

SEQ ID NO: 242924 - DNA, 240 bp, Gossypium hirsutum
cccacgcgtccgcttctattcagcgtatcggaacattttgccgatctgggccctcggagaatatcattgccgggtgttgcaggccccctgagattatcccgccattcataatatggtcagatgacctttttatcattcagaacattttatttttgttaaaaaagaaaacccatttgacatcaatgaaatatgaaggctttttgtgggggcaaaatataaaaataaattttttttatatag

SEQ ID NO: 242925 - DNA, 292 bp, Gossypium hirsutum
ccctcgcgttcgttttaaaaaaaaaaataaaaaaagggaggtaaataaaaaaaaaaaaaaaacaaaaaaaaccaaaaaaaaataatcaacaaaaaaaccaaagtacactctataaaatctaaactgtatcattaaaacataatcctgtcctaataatcaaaatactatcatggggggtcccctttaaagaaccgaattttctttccctcccattggaactattatgtttttttttggggccccaaaatttaaacccccggccccgtttttcaaaaagtccagacgggaaaac

SEQ ID NO: 242926 - DNA, 282 bp, Gossypium hirsutum
caaaattccaagactaatacttttcgtgtggttgctttagaaaaatatgcaggaaagaaagagacagagaaggttcgatagcagactgatgccttctcatcaggattgctatagaaagaatgaaagtacaaacagtttaagaaccttggtctcagaattgtggtaccatgtgaagctggctaacatggttgtatcaagatcttctcttttccttattttatttcattatatctgattaatttgtttttggcattttgactctgtagaatgagttgaattact

SEQ ID NO: 242927 - DNA, 285 bp, Gossypium hirsutum
gaaagagcttgcttcttgagctcgggttataatccaatccaaggcaccttgtgataccattgttggtttctcctaagaaagcagcatgttaaaggtaagatcaggccttggatcctttttgacaaatcttgtttaaggtgaaaactactgggttttcaaaattggtttgaatttcaaatgatgttaagttagataaatatcaggaaaactagagaagaaaaaaaaaaagcagaaaagaagagaaaggtagatatcagtcctgatggtagggattaaatttttgga

SEQ ID NO: 242928 - DNA, 191 bp, Gossypium hirsutum
gcttagcattatgcgttattcgttctccatgatttagtttcatagggccaagtcatatatagagtagcttcatcattgtttagactactgtaatagcaactagctatattataactacatagatcgtttaacgacaaagtctcttattccatatatcatagtgatagcaggcatactctaagcatagatgt

SEQ ID NO: 242929 - DNA, 259 bp, Gossypium hirsutum
  unsure (1)..(259): unsure at all n locations
aaacactaggagaatggggagcnnnacaaacaaggcnagggccggagncccnaagnaggncnccaaganccncaaggngagcaagacgangangagcgcacccaaagcagccaaagccgccancacgagcagcgacgaggagaaccacnngancccgagcnngnccnacgnacaaaacggcggnacacccgcngcngcaagcngcagnggggnaaaagcacccnacggcgaggnncagaccnccccggaccgccaaaac

SEQ ID NO: 242930 - DNA, 223 bp, Gossypium hirsutum
gccgcgcgggggtgcggccgttccaggatctggcgacgcggggccagtgcgcggcgagcggcgggtgccggtggtgccgcagcgaggcgctcgacgacatgtgcttcgaggccatcgaggcgtggcgccttccgcgtcaggtgttctcctgcgacccaccctccggcgccgcccacgcccgcttcaactgaagtaatgccgcggccggccgccggcgaagctc

SEQ ID NO: 242931 - DNA, 283 bp, Gossypium hirsutum
cagacgcgtgggcttttggtcttacaaactgtcggctcatctacggaataactaccttacggagttcaccattgcttccttggagatattccggcgattccaatggattttcttccgcgttgaaaacgagtggaataaaatcaacttcaggccaaatatgcagctctccatgaatgatccaagcgatgatgaagtcaaattactttcttcttcagctggttacaatgtataaactgttcgaattattttgtcgacagattcatggaggtttaactacttaaat

SEQ ID NO: 242932 - DNA, 232 bp, Gossypium hirsutum
aaccttctccatgtttcacgccggcctatttcctgaaagggacgtaatctcccaaacctcaatcggcttgcaacgggaactcgggtctgctttaggaagcggggcgctcgaatcggcaaggggatcagcccatacaaactgctggcggagcatgctccgcttaccgaagcgcttttccctatccaaagaacggacgtcctgtggcacgatgggtcggggatccctcgaacca

SEQ ID NO: 242933 - DNA, 310 bp, Gossypium hirsutum
  unsure (1)..(310): unsure at all n locations
gacccaggcctccnatcctttttcccactttcttggttgaagctggaacgcgagactggtttttgaatttgtgtggtcggagtaatgaatcctatctggccagaggttcgaacctgggtgggtgactgggtgttccattacggtgctaccaactgagctatgcttgttctcatgtaataagaacaattcctgttcaaggaggaaaacaaatctgcaatactgctttaagataaaattttcccttttttcacaacaagcaaagataagtgctactgcgtgctaggatacctaatccattatcgatgaggaa

SEQ ID NO: 242934 - DNA, 181 bp, Gossypium hirsutum
cacactattcactcattcattacacatgctaccattatcactatactatgatttttgtagctactcctcttgtacaataccgagtgcaaaaaaaaatacataatcatcgtatacataccaatacaataccgtacctataagtcttcctattcctgtggaagaacagaacttgaatccttat

SEQ ID NO: 242935 - DNA, 205 bp, Gossypium hirsutum
cccacgcgtccgagttgatttaccaataacagacccatggatgtagcgagctctctagattgggtccgctaaaaaaaaacaaaaccaaaagaaagaaaagagaaaggagattgagaaagaaaagcaaaaacaatcagacataatagaaatagaacatgaacggggaggaggcaacacgaggtcataaagaaaactcacagtgggg

SEQ ID NO: 242936 - DNA, 275 bp, Gossypium hirsutum
cccacgcttccgtttttctataaaccaaagggggaagcggggaagaagaaccgacgatagtccatcgctgcggctctcctcgatttcaaatggctactcttccatatatagtccatcttagattccaatgcaatcacatctcgttcatcaactttgatgtaactataacgtcattttaattgctttcaaggaaatcccaggctaattgtaagcggcgtgatttgttggataataaatcagaggaatgattcattgtcttgtgaggatttctttct

SEQ ID NO: 242937 - DNA, 281 bp, Gossypium hirsutum
ccctttcgtcttgctactcgtccggtgcggcagagggggggtcttttgaaacaataacagacactgaatatataggcactgatgctggtgaagctccagaatgggaaattctgaaaagtatcgtgtatggtggattaattgaatcaatcacaagtttaggggttgtgtcttctgcagccggggccggcgccgctacatagaatgttttggcttcgggagcggcaaatctgattgcaggacttatgatcattcgaaataatctgacggaactgaaaaatgac

SEQ ID NO: 242938 - DNA, 293 bp, Gossypium hirsutum
gttctatctcacgtttttttatcggcaactactgttcaagaaggatacttgaaaaaagatcctcctggatagcacccgctttgcatctactgcctatggaaatgcatcctccatggccagaaggattgttgtctgctcctggaataaggaagaacagtgttggtcctagtatgcgtattagatctgataaatctactccgggcggcctctacacataacccaaggtgatgacgcgtctcaccgataacattaccgatgaaaagcttccctaatagattgatgagatccgtctt

SEQ ID NO: 242939 - DNA, 276 bp, Gossypium hirsutum
cgcgagtggccgccttttttcaagatatttccctctagaggtttttttatgcccagggggcaccaatcttaatttaattttcacagatacaaaaatgcatcggtcgccatgaacgcaaacatgctgcactagcaatttcatctttcaatggcaaacaactgtatggtcagcctatatatgcaattgggcatctccaagtaccccaagggagggcacatcaagtcattttaatatttttgttggggacctttgccccgaagtaacacatgctacttt

SEQ ID NO: 242940 - DNA, 298 bp, Gossypium hirsutum
gttcgagcttacgattgattatcgtcaactggttttccttgatgggagaggaaaaaagaaactcatggatggtgcccggatagcatttactgacgatgtagatccatcctctatcgccgggaggattgttgaatgctcctggaataaggaagaacagtgttggtcctgtatgcgtattagatctgataaatctactccaaacgacatcaacacataccggaaggtgatgaggagtatcacagataacattaccgaggaaaagcttctcgaagagattgatgagataagtcttctcccg

SEQ ID NO: 242941 - DNA, 213 bp, Gossypium hirsutum
aactattttgtgttttttcgaatggagcacaaatgctgggaagtttgaactggattaaaaacttggagctcgatactcaaatggagataaattgaatatcattttttaagctcaagatggggtaaagatattatcgatctacatgagctgaattaaacttggttatagagtcttctactatgaagttggaacccgtagcttgtttaaataaaa

SEQ ID NO: 242942 - DNA, 262 bp, Gossypium hirsutum
ccctaccttagatttatcagctccattaagtttgccttgggtagttaaacaagagcccaatcttgaaagcatacataatcctcttcaggtcgatccctggttcctgaattaatcttggacccaagtatattttctgatgagtcgagattcggagcagtaaaagaccaatttaatcgaatgcaatctcggagtagtaaaaccaccacgattactcagtcatcggattcaacttcaacagtatggcttggctctttctcaacac

SEQ ID NO: 242943 - DNA, 288 bp, Gossypium hirsutum
ttctcccctttttttcataaacctcacctcgttgagcgggtttatataagagaagcgcccctcatcgcttactccccactaatatatactacctatacacatccatactatatcaccatgctgtttttcgaacacacctttaataagccacaacaaacacggtccaacttccttatgataacatacacctctacaccctacaacatcttcacataccatataaataattggtgtcacaccacacactgtgccctgctaaacacactcgaagttatgcatgaccttacc

SEQ ID NO: 242944 - DNA, 358 bp, Gossypium hirsutum
aatcgccttcaaaaatgagtgactgccagccgttgtcaatacctattttgactgctgtccagcatgctatggcttcagcagcaaaaggagacgaaacaccatcgtgaatttttgagtaagataaaaggacctttccttccgaatctcgaaccacaatgcctgaagctgaccggttctgggtttctttatatgcactgtcaaagttgatcttgacaaactccctctgtggcccaaagtgtgtagtagaaaatctgaccttgacgagggttgagctgctctaccgcccaagacattcccgaaagacatgattcattttttcagctctttggccacatcggggacaacttgtattggcagc

SEQ ID NO: 242945 - DNA, 363 bp, Gossypium hirsutum
  unsure (1)..(363): unsure at all n locations
attttagggtggtttttttatacatgctttgcgaggttcaagaagacatttgcttatgtttttcttgccaatggaaaatgtttagttttccctatagtcattccccaaacagtctttgggtcactatgtagaagagaagtgtagttaaagtttgagggatatataatgaagtatatataggtgctttctcaaaaaatgtaccaaatgtaagtttttaatgtattgttggttcaaatataaaaaagaacatggttgggcatcaatccctatctaaagggtccatttggttttccaaangtncanntnntnattttnntttntntaaaattaatatttatttaaaatggatactatttattcttt

SEQ ID NO: 242946 - DNA, 227 bp, Gossypium hirsutum
cgttgttaaaacagtcagtctctcacactagtattcagaaactacttttcattgcttcattcttttctttccatgtgcattgctaaaaattgaaaaggagattagttcccgtggtgctcttttgattgccctttatgtccactggcaagccttcagcatgctcaacttatctgatatcctttgctgatggagatgagttgagtcattatcttcctgctttctttttg

SEQ ID NO: 242947 - DNA, 226 bp, Gossypium hirsutum
cgccgaccaaagcagcggaccatgccgagagcccatgggctatgaaatgggggacattaccacgaactggccgataagagctactaagaagcctataatgacctggggccagaaaacatgactagcattggtactattaaaatgaataatatattgagaaataattgtagaattgtatctaataaggatggattatcgtgagacagcttgacgcgttggggactac

SEQ ID NO: 242948 - DNA, 351 bp, Gossypium hirsutum
gtttgcatatgtgaaaatgaagtttcggaaccttttttgtttgttgagagcattcctggcactttggacattaatgtgaaggttcgcaaaagttggctactcaatgttcttcaaagttagacgaactaaaaaactggaagtggatgttccgatctctgtacaggtaagtgatactaacaacccaggttctctcgtatgaataaggccatattttattttgttaagtccatgtatattatcccatcttttgcttttattgcatcatgagatgacaaacaaatgatctgatgtacctttgttttaactgattgagaaattttatgatgaaataaagatgttataactcgtaag

SEQ ID NO: 242949 - DNA, 261 bp, Gossypium hirsutum
  unsure (1)..(261): unsure at all n locations
tctngcttctctgaagacaaccattgggggtggagctccannagattttganncatgcaagtattgggatatttcanngtagcagttgaaatctctgggtntnncaattttgatacccgatgagaaataaagtagttgagggttggtagaatgggcttatanntattatatanntagctaaacnnatttatttgctcgcaaccttatgtagatnncagcacctttctcccacgtggttttagtttaacttcttttctcaga

SEQ ID NO: 242950 - DNA, 248 bp, Gossypium hirsutum
ggtgggagatgttgagcttcacacaggaaccgtctctaattgacactaacaaaagatgctttgtcaaataaacagggggggtctacgaacttaatgacatgggcgtgggatatgaggatgccccaccaccgcctgagattgaagaagggtgcggggaggtagacgacaaccataccctctaacttgttactgttgatctggttgtaactggagaaaatgaagactactatgctaatgacaaaattatt

SEQ ID NO: 242951 - DNA, 294 bp, Gossypium hirsutum
gcgaccgccggaattcccggcgcccacgcgtcggagccatataagttagtaaataaaaacggtcttatatatggggccttgagaccaatcctgactaaatctctattgcccgtcatgctaagcggtaaaacatttacgagcttgaagggcaggccttaatgcttttcatagctcctcaagtcatgtgtgtgcatatgcgcagatcaattaaaaagaaccacaaatcgattaataaatgagaaaactggaagtgatatattcgaaaagtagccgcagaatagagttattgtgtgc

SEQ ID NO: 242952 - DNA, 251 bp, Gossypium hirsutum
agctcttggttgatgcacctgatatgattgagaaggtccataagagctggacgtgcactttaagggtaacgtatggtctggtgtgattttgaagctttgtttagcattaggttgttaagaatgtagatattgtttttgggaagtgtcaatatggatttttaggatcttgtcattcttcacaagcctcataagtattctatatgttcttttaatcctttttgtggtataagaatgttcaatgacttgattat

SEQ ID NO: 242953 - DNA, 419 bp, Gossypium hirsutum
aaaaatcaatgggaacctcatgaacttgtacccaaaaaggtgatgaaattaatagaatcctgagtgggtcttctccccattgcaacttatgcagatggttattaaatgtccaagaagaccctttaataactctctccatatccataatgtgaaaaaatttaaaaatacacctctttcccccagatctctaatttgtacccctttgattggatgccataaattagccataatacttttcattgctgggtaatggataatactggcagtaaggaaacacccaactagacttaaatcttcttctttacttaccgattctatttctccttccatttgcaggatttcttcctcttcgtcatcaagggatagagttgtaaagtcagattccatggtcgttatacgtgaagaatagaaagagaaga

SEQ ID NO: 242954 - DNA, 406 bp, Gossypium hirsutum
cccacgcgtccgcccacgcgtccgataaaagataaaaatatcaaattgaacacgcggatgacaaggaggggtgaatgggaaataatcccatcctccaaaacgcgtagttccattagggattgaaatgtgatgaaaataaaattatcaggcttaattgaaagaaataaaaacaatcagaaggatctaattgaaacaagtgtaaaatgcggaaggacctagagggatattctcccattttaaaagaaaacacgcggatccctgggtgcgggtagcccaaaacggtgcggttttggcgctaaaacccccaggtgaaacgatgttattttatttgtgctataaaagcaaaaatttattcaaaaattttcatttctcccttctttaaaacaaaaaataaaccagaaaaacc

SEQ ID NO: 242955 - DNA, 384 bp, Gossypium hirsutum
cgaattcccggtcaccacgcgtccgatgcacctaactatgacgaattcgattgaatggtcgattgattatggcaggaatttagtgatcactactgaatcaaaatcaaactttggggggaaatggagttgtccaagatttttacgatatgttgttctgtattgctcttgtgctcctcgctggcctatggtcaagcaaggagccctcctgctccggtcgcaatgagcccaacttcaacaccagtcccagcaccggcaccgtcatatgtaaacctcacttatttactctaagtggctgatgcatttacactttccttgactaccttgagtccactaaagtgattgacaccttttaaaaccaagccaacaacactgatcaagggatta

SEQ ID NO: 242956 - DNA, 388 bp, Gossypium hirsutum
tctaggatcatatgcagtattttgtaatagtttataggagctacgtactgtgaactcccccgacgcttcagcactccaaacttgaaagtcttcgtgtggtctctcagccaacgggatgctgagaatcatatctgctacatccatcgggaaggtggtatctgagtgcaactgctcaacccatgccccattcttcaacatctccacaaacttcagatctaaggaccccaccaatagcaggcagtaaatctttcttatcaaattctagggaacacgattcaatttttaaccaaaaaggggatgaattttatatcttggacgaaagagttgtgaatcaagaccctccggtggggtaattgctatcttcaatcgttgtagatggtgagtagat

SEQ ID NO: 242957 - DNA, 353 bp, Gossypium hirsutum
gtttttgctgtatatacatacaaaggtacgtacgtacatacatacatatatacatatgtgtctttaatttgtttttcgcttcttttggtcaaggttggatatggtgaaattgcatagaagtctcgaagatgagggctttgattcccatgtgaagtgaaatgtatatcatattgggtcttggttttatatgcatcattcatgttttttttgtcttttaagaatgtaagaatgtaacttccggtgcccagtatgatcaactgagcaggaaaaacaatgtaactgatgcattaactcctctgtatgtatgtatgtacgtatgtatgttgcattaccttgattatatgctagtgatt

SEQ ID NO: 242958 - DNA, 427 bp, Gossypium hirsutum
gagaatagatgaacttgtttaatgttgggaacttagttggagaacttgtgaatagctaaacatggtatatttctttgttttggtaaaagaatctaatgccagtaagtgcccattggggtatattcctgttccattttttaacataagttttggcttttctctgctaaagcttgatttatacttaaaacatttaatcaagagccattcttctctctacggcgcttggctcacagccttctgtttgtaaatttgttcccaggtagaatatgatattctcagatgctagcatttgatgttggtgaattatgtgacctttggtggagagtgtgaagctctgcgctgagcaaatagatgtaagcagttggcttttagtagtaatgaagaacatacaagtgtttccctttttttataagtaattatatgtata

SEQ ID NO: 242959 - DNA, 399 bp, Gossypium hirsutum
attttatgtcatgcatgaatatataatgctcatgaactttctaaacttgtttgttgaattagaaattggcttctcttctcgataggatttaatttctctcgttttctatgcatgattgttggagttacgggttgctaaaggaaaatcggcaccatcagttgctcctcaagtttctgttagcaagaacctgccccctgcttctgactgggaccatgctccccagcacactgctcagcagcctgttctctcctcaaatgttgtcgagatgtctggggttgatatggttgatgaaatttcacccatagagtatgaaggtgaaataaaatctgtttatgtaaggaacttgctctctactgtttctgagtctgaaattgaagaggaattcaagaaatttggtga

SEQ ID NO: 242960 - DNA, 431 bp, Gossypium hirsutum
cggacgcgtccgcccacgcgtccggagaccttattttcaataagatacgggcagtatttggttttggaatatgattaattttattccaaaacgaggaattcttttttgggtttgaattattggaacttcatgaagaattggaacttcatgaagacttattctttcaactattttattgtgaaagatttataagactttgcaactctgatcttggtcctactggttcatggttttaaagttgaaacttggaccgagtgtctctgttgtcttgtttgccaatacccaaactatccttttagacttataataatgacaatgatgaaaatgttgccttccagcaacttaaagtctgtcagggcgcagagtgtctccttgaggatgtatatcctttgtgtacatattaatgttatgatgttacttaagggcgaaat

SEQ ID NO: 242961 - DNA, 178 bp, Gossypium hirsutum
cagacgcgtgggctcctttactaacattacatcctatctgaaaccctaaattccatggcgagttgttactgatgcgaagaaaaattctacttaaacaaccccccccttcatggctacctctatcaaatgcttgcttctttcaaatacaacgttttcagcagctaccccgcttccaatg

SEQ ID NO: 242962 - DNA, 187 bp, Gossypium hirsutum
aataaaatgtttaaattgcctttttttttttttccagattgactacttacgggggggctgtataagagagcggatcccgctactttcttaaggcgtctttaccaaatgtcttttcttatagaatttctcgtgtctccatgttatttatcaatcttccacgctcttttttatctaattgttgaaattt

SEQ ID NO: 242963 - DNA, 404 bp, Gossypium hirsutum
attcaatagttggaattttccttttgcttctcatcccaattacagaatataagttttaaggtttagaaaagagaaacacccattttcaagtttcattacctttcaaacctgacaattgttgggttggtatcatgtttgtgtagtttctcatgtcaagttattttatgattatataacttttggcattttaataatttatgtttatatagatttggcatatttttgtaaaaaaaaaaagaaaattgaaaatatattagttgaaaagtaattggctcgaggttgaaggagaaagaaaattggctaccgttattatcaggtcggtgagaaataagtcagtagaaagctatagtgttggtgagtcgactggacttctcttctggatgacatttggcattgggaagaaa

SEQ ID NO: 242964 - DNA, 328 bp, Gossypium hirsutum
cccacgcgtccgaaaaaagtaggtcaaaatccatctccaccaacaaagatgaagccatgagagaattttgggtgattttgggttatctttcgcctacttgttctttcagtttatttatcccttccttcttttgattgaatcctaatcttctcctaagtttggtatctgctacaatggccgttcaagctcaatacccttctaatgttcttcttttaaacagaagtggacaagaggggaatgagtttccattgcagtaacaagcatgaggagtttttctcgatcaatcccattctcatattgttgttcaacaataataataatattccac

SEQ ID NO: 242965 - DNA, 274 bp, Gossypium hirsutum
atcaattgaagatttacccttgctgcctgggacctaggttgatattgaagcttttatgtcaagactactactgtactgctgggaaaattataagtggaaatatgattctccgaaattaaataataattattatcataattaatattatttactattttaatatttatattttatatatatatttttttaaagttaacttattctaattttattaagtttatttttaataattatattttaatagggggcgttttttttagagattaaaattttt

SEQ ID NO: 242966 - DNA, 219 bp, Gossypium hirsutum
cccacgcgtccggcagtatatacgagaacacttcccacttcattgtttcttcgtgttggttcattcttttcctaaatcgaaacataaaatttgtttatgatccatatacatgttttttttgggctactctttattggtagaatatgtttgcagtatatacatgtacatcttttctatacaaaataaatattattgctggtctttagttagatttgatta

SEQ ID NO: 242967 - DNA, 317 bp, Gossypium hirsutum
cccaaagaacatatctaaacccccgatcctgtacttgttcaccgccaaaagaagccacgaggaggaaacgcaccctatacgtatggggagtcggcattctctgtttcgcactgtgagatgatcggcactcctgctattccacagtctcagagagtaccacaattgcgctgatcaacgcgaatactgcggattacccaagacgtgtaacgtgatgatggatctccccttactcagtatatcggagctataggccttgcattgaggatttataagaaacatttcaagctcaagctgcaaggtgaactatggggttggac

SEQ ID NO: 242968 - DNA, 245 bp, Gossypium hirsutum
cccacgcgtccggtaaaaatggatgagagtattgagcttaggagaaggggatttaactggaatcaaaactcattctggtacttagatttgggttgaagttccttagtgttgatgatattgaatttgtttgtatgtacagaaaactgtgtgaagttgttggtctcaatctgtattaacaatattgtttgtctggtgatgaaaaaaaaaggaagaaaaagcaaatgaaatgactgtaatgtattcat

SEQ ID NO: 242969 - DNA, 324 bp, Gossypium hirsutum
cgacacgactgctcccgccgattccgcccttaacactttagggcatcgctctcccgattcggatccgactccgaatcccgacgcctcaccgacaccgtctgatcttaatcgcgcggctgaggaaaccgggcacgacgaaagcaatctcgagcagcagttgcaggacctcgatttgaaggaggaggttgcggcggcggtggcggctgctgagacgaaagatgatggggagagaaaaggcgacaatgattacaatgaagctgatgctggcgctgccgaggaaaaagaagatgaggaggagaaaaacgagaacgaaaatgatggtga

SEQ ID NO: 242970 - DNA, 329 bp, Gossypium hirsutum
cagggttccatctccgccatcaacgaaagccagtgcgagagaacatcaaatccctggttcacgtacgagcctccacctctcttcttcccctgttttgactgttgtgttcttctaaacaagatccctgaacaacgaatggggaataattgagtactttactactctcttcgttgttcaggatcgtttagaagaactccctatttacaacagcaaaaaaaaaaaaagtacaaagagacgaggttcattttccatattcattattcgaggttgaaacgaaagaaattgcttttgtttcgttgtttttccgtaatttaaatcgaccccttttg

SEQ ID NO: 242971 - DNA, 253 bp, Gossypium hirsutum
ggaacccggggacccacgcgtccccacctcacttgaaaccactttcactcctagctgtttttcttctaccaatccacacttgtttttggacacattggcctgtggtggactaaagaggagccaatgatgatcagctggttttggactaaaagaacgaggctaccatacatatttgacattcatgaatggaaatttacaggattctgttctacttttggtttatacatgactctggagacgatagaagtcttac

SEQ ID NO: 242972 - DNA, 290 bp, Gossypium hirsutum
ggtgaagattaacaccctaccaagtttgttgattatgtcttgaaagctgcaccttggctgaacatggtgcactgcctgttctttgtggatctttggggaccctacatgagaccaagcattgataaccatgaattggcaactcgccctgtactgttctacgatactggaaagatacagtgagacgattttactttccatagagagagagatggtgctacattgggggatgaaacgggtcgtagtctgctacagaagactgaatactgtctggatggatttaccttaagagc

SEQ ID NO: 242973 - DNA, 431 bp, Gossypium hirsutum
  unsure (1)..(431): unsure at all n locations
tctgatgctcgcaaaccacgcagaaagagtagaccaaaaaagagaaaacaacaggtttgtttattgtttgtgacttgcgttggtttttctttttccttgccatgattcttcaactaccgatatccaaaagccacagtttcatagtaatgcagatggtcttaatggttaaagctggttcagttgcagttttccttatcattgttacttttactattccatgtctggttgaactatgctgatgtgtatttgggataatatcttctaaggacctttcgagtaaaaaaaaaaaaaaaaaaaaaaaaaaaaaaaaannttttnntaaaaattaattaaattttttaattaataaatatttattattttttatttatttattttattattttttatattattttttatttttttttattatattatatatttattat

SEQ ID NO: 242974 - DNA, 333 bp, Gossypium hirsutum
cccacgcgtccgaaacttcaattaacttccacaatttcagaggctttgagaagcctctctttccaaggcttctttctctccatttctttctgctgctgtatgttggagccttggggagttgtggttcattttattttccattaactccaggcaaaaaatgatgataaggaagacatgccctatccctaatctccataaccaagacggcctagaaaccgtcctggaagtgcctattctcgaagaaatgtatacccaattgggcaccgatgcggctttattaccatggctaaacatgcgagccttaatgaatgataatatatcatcaacacccca

SEQ ID NO: 242975 - DNA, 250 bp, Gossypium hirsutum
gcaggatcatagctttctctcacaaagagttaaccacagtggagtaaccacaatgtaatgtcataagtatttgacgagaaagacatgtgacatatatcttgcctatagttcttcgctgctctatatacaaaaaacacagattgcgagtgcagactcatgcgatttagtgtaatagctattaaaggtgcggtttacttaaaagtagagagtttgatataccatctttgattcttgttttctactagtgtgt

SEQ ID NO: 242976 - DNA, 379 bp, Gossypium hirsutum
cccacgcgtccgcggacgcgtgggttgaaggctatcataatacttttgataatattaccggcgcggagcttgtggttatgcccagaatggtgagagccaggcccatgatagctagactatccaaactatcatgcctttttgcatcgttgaaagtttccggtgtttctggacctgtgaatgggacgctaagtgaaacacgtgcttgctgagtttgctgctccttcaacagacattgtggatgttgcttgtatagaaaatgcagataagtataggttggaaagggcttataaaaatctcttttccagtaagtgtgtatggaagaaacagaagggaaactatattaacagagaaagctattagagtttctctttaatggtat

SEQ ID NO: 242977 - DNA, 243 bp, Gossypium hirsutum
gttgagaaacaagacgttaatcatgatagtaatgctactgcttttgataccgagaaagaatcgaagaggaaaaagaagaaaggaaacgacaaactgacagaagttcccgttgctgaggacgatgtcgtcgttgaaaaggaagaaaagaagaaaaaaccgaaagtcgaacgaaaaggagggaaaacaaatggtaaagttctcaacttcaatgcacgaggatggtaccaccgggtgaagagaaac

SEQ ID NO: 242978 - DNA, 378 bp, Gossypium hirsutum
gctctctaaaatttggcctcttattcgtgagaatttagtatggtatattagggatggggccaatgtttgctgttggaaagaccattggattccaagtatgggccctttaatattaaaaattccatcttttactaaccttgatttggattgtagtattagggagatggttaattttgatgggagctagaacctagacttgtttcgtgtttgggtttctgaagaagtgattagcagaatcactagtattcctcctccacatccggatttcggttctgatagagtagtatgggctcgttcagtgtcaggagctttcgcagtttgcagtgcttaattggtcattgaaaggagatacgtggaactcttaagaggagcaattga

SEQ ID NO: 242979 - DNA, 288 bp, Gossypium hirsutum
caaaatccaagtactaaagaaaaagaaaatcgagtctgatccggtttttccagttgatggagatagaatcgtcgttgtaaattgttccgatctaatatatatttttggtaatcatttctgttgtactgatatgtatacctacaccatatctttcatttacttctttcatgagcacattttactctcaaaatttgaattaaagattgttatatttgaacatttcttgattatttgaacaaaaaaaaaaaaaaaaaaaaaaaaaaaaaaataaaataatttaaaaaataa

SEQ ID NO: 242980 - DNA, 341 bp, Gossypium hirsutum
gtgagaaggcatctccaaatgcaagtccgtgcgactaagttaagtgcattcgcgacttgtgtgaagatagctgaggaaggtggtggaatgcatgctctttatgcaggactcattcccagcatattgcaggtgttaccatcagcagccataagttacttggtttacgagtttatgaagatagttctaaaggtggagtcggcatataacattatatccttttattgaaattctaagaggagccttgtcaacttcaaatttaccaaataacatgtggacaatcatgattctcgtttaatgcagttatttcagatgatatgattcttttttataagtgatttatt

SEQ ID NO: 242981 - DNA, 230 bp, Gossypium hirsutum
  unsure (1)..(230): unsure at all n locations
ggcattattaacccctcccttttgagtttcttgattcgatgacaatttggatggcattacacttttctttttgatgattgttttgttactgtctaaacctcaccaatacttttgtttatttttaacatttgatgcttgccatgtttgttatacaagagtttacccagttagttaatagtatgacaatttcccactttgctcannnnaaaaaaaaaaaaaattaaataatt

SEQ ID NO: 242982 - DNA, 204 bp, Gossypium hirsutum
attacaggacaacacagtggcttattatcttacagctttaaaagacatgttcggtggtgggatcaatcgtctgtttcttctttatgagattgggggagcccagggtgcccttcaccgtctagctatacccatgaagaatgttttatactgggaaatatttgcggtgaatataaacatactaaggaggtggtgggagcaaacgaa

SEQ ID NO: 242983 - DNA, 305 bp, Gossypium hirsutum
cccacgcgtccgcaaaaatttcctatagaaaaaaggctccccctgcaagggccatgtctttaacatctatcatcgatccttgcgagactttcaggggaagagctaaagatggccttggaaaactgttttcaattgagctcagtttgcaccattagagcttgtgtgatgcaaagctaccgccatcaattttcatctgttgagaagattcatttgccgacatttcgagggctcaacaaacccaatctgtcattctcttcgtcttttgctcattcattcaatggcagatgccaaaaaatcaggctcat

SEQ ID NO: 242984 - DNA, 192 bp, Gossypium hirsutum
gcacgcgtcggagggcactcagagaatgtgggggccgggtatgatccgtgacattttcccttctttggggacccgtgagggggcgcgagtaaaacaaaagggagaggatgttacatcttgaaggcactgagacttacttggatcaaaaaacttttttccgacggaatctcaggctgcagggcaattgactta

SEQ ID NO: 242985 - DNA, 123 bp, Gossypium hirsutum
gccacgcgtcgtttatttttaacctgcgttagtgactagaacccaccaaaaggagttgtggctagacaggcgacgtgtccctttttcccttatgaagtattatgtatgtattcctttaaaacc

SEQ ID NO: 242986 - DNA, 257 bp, Gossypium hirsutum
gtacagtactggagggggaaatattatgaatgggtacttaagggattgaaacccaatcttttgaacaataaggaactcaaaatatggacttggatggcgcgacagttgggaccctttgcttacaccaaggggactagggatagctcgacttttactgagcaaaatttacagcgggacactgctgggagtataggtgatgtactagaccctgtaagacaggaatgaactccagaattgaacttgggtcaggaaaattg

SEQ ID NO: 242987 - DNA, 375 bp, Gossypium hirsutum
gacccacgcttccgctaaaagattcctaaacagactgtttatttcatatgatgaaaagaaatatcagggagcggagtttaaagatgggatgaaggatgtggctaccaaacgtatggagcttcagaattctttatctatactatggtcaaagcaagaagctgcacttgtaaaaaccagggaactgaagaaactatgtgatagtactcctttcatcgtatttagaaggaagacccgaatcaatatttggagagatcaatgccttgttaattaccagtatctagctcttgatttgactttacatttaatgatagtgtatttttgaagtcaaattattacttgttccttgcttttaatactaatggaaaataacttcaa

SEQ ID NO: 242988 - DNA, 279 bp, Gossypium hirsutum
tgcatatcatatctaagattgcatatcctcaaaaattatgtttccatatgtgagcccgggctaaaattgggtattacactatccatacttctattgtaacagggcactctcgaaataggtggtccattgtttcagctcttgcttcacatcgggggcagcttgtactagttgatagcttcctgtgttgtaaattcacttttgtaggcaaaaagttccatgatattctccatattgtaatttttatttttgttggtagattcaggccccaaagttttttgt

SEQ ID NO: 242989 - DNA, 389 bp, Gossypium hirsutum
ctttagctctttttttttttcaatttaaaaaaaaatctcattgactgggaatcgatctcaattctcaggtatttatttttgctgacaacaatggcgggtcagaggaatagctatgggaagcgggctcattctcactctggctattctgagaatggatcaaatacgaggagaaatgcaggtgatgacagggaacactttgttattgattcagacgataccgtatataggtatttgtgccctgcaagacagataggaagcattatcggaaggggaggggagattgttaagcaattaatagcacaaactaaatcaaaaattagaattggtgaaacaattcctggttctgatgagcgcgcggtactatctatagctctagagatgagagaaat

SEQ ID NO: 242990 - DNA, 160 bp, Gossypium hirsutum
cccacgcgtccgaaaaaaataaaaaaagaaaaagcttcaaaaaaaattggtttaatatgagggcattgatattccgttatagagcaacgtgtttcatatattaaccgatttaccttcatgggcgtcacggtcggctgcccttacaatcgccacctggctt

SEQ ID NO: 242991 - DNA, 217 bp, Gossypium hirsutum
cgggctacgacgcacgcgtgcgtccacgcgttctgaaattgcactgtaagattgatatcggcgttcaactcttttggtccggtgcgtacttgaagtgacggataccggatcataggtgatgaacggagcctgctgaaggggtggccgtcgtgcataaaagaaaccggtttgtcgttcagagaaagcccgattacagcttaccgtcggtccgaattag

SEQ ID NO: 242992 - DNA, 235 bp, Gossypium hirsutum
gggatttatggcttatcgatggaccaagatttgacggaactagcaaccagcagctataggggagacggggaactgtgactggcgtcggatctactgattgcacaagacccacgactgttgccaacactgacggttatgaaaacagaggaagcgacctcgaagtacacacatgatacggcagaggagataaatctgacgacagacgcggcggtgctggacacggtgttgataacac

SEQ ID NO: 242993 - DNA, 195 bp, Gossypium hirsutum
cccacacgttcgaccaatcatacgtacctatatgtcgctctcaagggaatcatagcctgttgcggcgacgtttatctctatccgtttacatgctgtacaaaagaccacgcagagatggtcactggtgcatccttaacgattgtgaatgattactgcacttggtatatgcaagacaccagtggaaaaagatccctc

SEQ ID NO: 242994 - DNA, 368 bp, Gossypium hirsutum
cagaaaactgtcaatttcctcgagaagagagcaatgcatctcttgaagacagccttgaaggacctactagcagaaaagcattggtgcatagatatcttgagaagaagaaagacagatgaaggtttaagaacaagagaaagttggcaatgtcttcatctccgaccttagacatctacttaaatcaagtgggagatcagttttcaaatgagcagttgaaacaaagtgaaccatattattctccccaagcagaagcacaccgcatgcctcttgagtgcagctccattgaaaatgttgcaaagattccccgccttactactgatggaaaagatgcattcaaaatatgaccatgaatggagcccctaccatgt

SEQ ID NO: 242995 - DNA, 393 bp, Gossypium hirsutum
  unsure (1)..(393): unsure at all n locations
gttcagtcttgtgtggtgcatttacagaaagtacctttggctcggagatttgcattagttcctcttggacccccattgctagcttacaggagcaattgcaaggcaatgttaagtgctgttgctggtgctgttgaactagtggttgatcgcccatataaggctggggaacctattgttgtctggtgtggaccacagcctaattcgaaactgcttataaactatggttttgttgatgatgataattcttatgatcgcctggttgttgaggcagctttgaatactgaggatcctcaatatcaagacaagagactggttgttcaaagaaatggaaaactatctgtacaagcttttcctgtttatgcanggaagggaaaagaagctgtctcggatatg

SEQ ID NO: 242996 - DNA, 354 bp, Gossypium hirsutum
gaagaatactggtcaaaagccgtattgaagtgaatgcttacgtttgtccttcggtcatcgtgattatgaagtctgcctgattcacagatacataagaagctagagccaacagcagaaaaggcgacatactcatttgtcccctgagtaaagacccatgacactgtcgaaaaacatggttgctatcttcctctgtttgtttgcatctaggtcacccagcttcagtaatcactctcttcagtttgagattagcaaaagtagggatattgttccaagagatcttccatactgtaattttaatttttgaggggatatgtaaattccataattttctgtagaaatttttggtttcagcat

SEQ ID NO: 242997 - DNA, 399 bp, Gossypium hirsutum
  unsure (1)..(399): unsure at all n locations
cccacgcgtccgcccacgcgtccgaggaaacgctcaatacaaagacgctccccactttgccctctccccttctcccactttcaaacttgaaaaaagcagacggacaatccttcatcgcagggtcagcttgcaagcaaggaaaaaatggagaaagaacgagcaagactggcagtgctgatgaattgaataaaggatattttgatgatatgtctgagctaaaacaacacggtggtaaggaatttggtcaaaatttgttgtgaagttgaagtaaaaaccaagctatatgcatgcataagccttgcctgcactgctttcggaggtttttaaatgatacaagctctactggatagactngnntctttgcttcttcagcaactagtgcaagaatacagcaactgg

SEQ ID NO: 242998 - DNA, 324 bp, Gossypium hirsutum
aaaaagaccgtagatacttgaaaaaatacgcacctgagctatccatatactctcgcaagacctgaatacgtgtgctaacacctgtggttgctgcttcttaatagagtgagcaccaatcagctgacattctaagatacaccactacgccactaagactggctatgacaccttatataaccacctgcgttgtagctatactcatacaacatcatgggccgtgtgcacacaccatgaatagatgctggcttaaagagtctgcctgcctaagtccactagataggtaacaatctagtgacactatggcatgctacgctatcgtatatg

SEQ ID NO: 242999 - DNA, 343 bp, Gossypium hirsutum
cttggacagcccactaaggagatggaggcacaaaccatccacaaggtggcccaagccgtccatccaaaggtaaaatagttcgcaagaccctttcttcagtgacgacaactaccagtggagggggacggcatcttcctcctccaaaaaaaacaaattcatccactcttcttccactactcaagggtcggccacacaagtgagattttcaagggattcccatgatattattagtatgggatgttggggctactccactataaataggacatccatccctcattcatcccatatctggattttcttcccacttcttgagcactacacttgagagaagaaacataag

SEQ ID NO: 243000 - DNA, 335 bp, Gossypium hirsutum
  unsure (1)..(335): unsure at all n locations
tccgtctcgggaaagggaagggttnnttggagaaaggtcgaagtcgatcgatgctcnngcctcatattattgnnaccccaacaacccttactcanngcattcctcgatgttggtgcgtgccaaaatcgtgtttctcgggaatcaaccatgnngcatgatttgcagagcttggcaacgcaaagcgaggtnngtccgttttgttgatgnccatgtaggcattctttgcatatgtaaagattgtgatgtgctaattagtgtttgtcctgtctgcgaggttaagaaaacagctcatgtccaagtttacttatcataaactgtgaaacaaattacagatt

SEQ ID NO: 243001 - DNA, 257 bp, Gossypium hirsutum
gcttaacatctgttgattttatatttggaagatctcttggtttactgctggtttaaaaaattatatttgttctgtaacagctgtgtacttggtagctcaatatgctcgctatgaaatgaggaaaatggaagcggagctagaggagaaaaagaagcacgaagaagaagaaatgaaaaggaagcaagaagaagaggagaaagataaagaggtggaacaaattgcccctgattcagagcttttcgaggtaaaaaggagac

SEQ ID NO: 243002 - DNA, 431 bp, Gossypium hirsutum
cccacgcgtccgacgacattgataaccgaattattactgaagttttgggtcttggaaggtatggtcgaattcgatttcaaagatcttttgttaacccaacccaatattttggatctagctcgcagcaatacgtgccttcggggaattaggctcaaactaaagttcagaggttaagaaaccagatgactgagatgcaagcgagcacagttgagcaattaagcggaggcagcatcaaaagaagcaaaggctcaaagaaaatatgaagaactccatctacaacttaaagcgaatgcagcagcgagggaagcagatacaagcagaaaatatgataaacttcagttagcttcagaatatgatgaagatgtttcagcagtcacagaaatttgccgtcttagacgtttgttttcttaattgtaagaatattttaacat

SEQ ID NO: 243003 - DNA, 388 bp, Gossypium hirsutum
cccacgcgtccgccgtaagacattttccattctcttctctacactctcatcggctcagcttcaaaattttctttgcagactttctttagaaatgtatgttttctatttccactttcatttctactcattttctgtggcttctcccattccaatccattcttcatttcgattccctcaatccttcccgctccgaccctatacccgaatttcaatccattcttcattctcattgaattatttctgttggtgaattaatgcaatttccaagcttctacgtgatgggtttgtaattttctaaacctcatagcttttatgggtttctttttggtattaatttttagcttttaattggatttctcgatgttcttaaacttttcttccattggat

SEQ ID NO: 243004 - DNA, 216 bp, Gossypium hirsutum
aaaaaaaggaagggcggggtcccaaggacagggtttaaaggggtaggggtttttaaatccccccccccaaaacgggttttttggggggggcccgactttttacaaaagcttgggattgaaaatgcttgaactgaaaagggatcctgataaaatttttccaaaagttggagggcaaaaaggttcctcccccctaaattttaaacaccccaaattttt

SEQ ID NO: 243005 - DNA, 315 bp, Gossypium hirsutum
ggaacaaatagctaaacagtaatggacttggacttcattcagaatcgacactgttcagaagtcactatttctattcttttggcaataaaaatagttgtctcactgtgagagagataagagttgtttttcatgcataactgtgatccataaagaatagggtagtttattttaatgcttgtagttgtctgaatcgttgtcatttttttaaatcttagaacattcaacccctcaccccatttctggtctgaaatttcattctttgtccccatgttttagtccagatgggtataaaataaagaaagaaccgcagaactt

SEQ ID NO: 243006 - DNA, 336 bp, Gossypium hirsutum
ctaacacgcacgagtaaacaactgtgattgttgccacggcctgagagaacggcagggctgaaatctgtgatcgaacatgccaatagattttatatagactaaccggtcgttgtaagactgatagtcctgttgcatttgatgaccgtaatggtgcatatatacgtgggtcatgggattacactgttccaattgggtaagggttgctacatgtaacaactgacagcatgcatattccgaaccagcatacctatgaagggcaagctggctcggttcattgcactgacagctacatttgtactgcttcactttacatgacgcggtgtgcttatgattttt

SEQ ID NO: 243007 - DNA, 260 bp, Gossypium hirsutum
ggatcttacatcatgctgccaagctccccattcatctacagaagcaggtcatcaattctataaaacccagtatctgctgataaacgtagcttattgcgtcagtcattggcaattgtcatcttgataccattgaacatgtatttcttctcctccttaaaattagatgtaagaaaaattgagataagggagaaagtgtggaaggtgaggatttatttgcttgaagtgatagcagaaaaatgcaccaatgccgagattttgat

SEQ ID NO: 243008 - DNA, 310 bp, Gossypium hirsutum
  unsure (1)..(310): unsure at all n locations
agtgtttttttcccttaaaaaaaaggttgtagacttttgatttgttttgtccacaaaagaatttaaccggattaatagtatatgctcccattggcctttttggctaacgtagcaaattcttgcatcatatcatggattgatgcaaggtaagaaatgtgtaagtttattcatgcaactgctgtttaacagtttagatgttaaaaagttggttttaaacagacaaccacttactgttttcagggatgaattttaactcaaatattcagttttgaatcatcaaggttaccttcgttaatggcttnnnntaaaa

SEQ ID NO: 243009 - DNA, 260 bp, Gossypium hirsutum
accacgcgttcgaatagtttattgttttcgatggcgcttttatttctgagatcttcaccatacatcggggtttggctagcacaagtaaggcagttgaaatttacaaaatccgcagtgtactaggctctccaactgagaaatcattgacaaatgggcttaattatgctagacctatacactatcaaattcccgtgttctattggacacattatgcttagttgatttcatttgcaaggcatgacacaacaaaccttattaca

SEQ ID NO: 243010 - DNA, 372 bp, Gossypium hirsutum
cccacgcgtccggcagctgcaggagtttgtcagggatattttaccgatagccaccgacatcaatagcaataaaatttacttgagcaagcaaggccttgtttaattagtctaattggatataagagcagatatttgggacggttttgataaattccagtgatggaccacatcaccacatgaatcaaccggtgaaagctattagcctttttagcttagcttactaattttagaaaaaagatgccaaagtttgccgaacagctttctgtttcttgcctgctttggattttagtgaagacagtctcagtttcaattgattggattattgaattcagggctgttagataatggtaactttgagcaagccccgaatgc

SEQ ID NO: 243011 - DNA, 175 bp, Gossypium hirsutum
atgtatctataaatactacactcttcctttgattgcagacaagggacactgggggttcgcgattctttgactggcccctctcatcttgcttgctctccatcctaacatggcggtattgtttacattcttgcacttaacttgtctttacttcaataaacaccctctcttcttagac

SEQ ID NO: 243012 - DNA, 199 bp, Gossypium hirsutum
gtttctgggttaaagacacaattgttattatgttctattcctgccaggtctggcgatttgtttaaagatgctgtgggcgtattaaaatgaatgcaacggagtcagctcagttaatgaaataaatcttataatataaaatatattttgaaataaaaaactcataaattatctatacaaaaatactaagaaatatgtttta

SEQ ID NO: 243013 - DNA, 333 bp, Gossypium hirsutum
gcataagcatcatcatcttcctagtcttaggtttggatccgtttcaatggcatccaccacctccctcaaaccgatcccttccatcaacttgccttcccaatctcacagagctttagcttccaatttctcttattcaaagccttttcccttccatggcctcaacctctcatcggtcactgaaaccagttccttcacctcatcaagatcctccaaccccttcactaccactgccttcttcttcaacaagttcaagcaggaggccgctccacatactcccaagcccacaaaagttcaagagctacacgtttatgaaatgaacgagagagacagaag

SEQ ID NO: 243014 - DNA, 221 bp, Gossypium hirsutum
  unsure (1)..(221): unsure at all n locations
ttgtttctttgatttcttacattctccactaaggggataaatggatgaagaaatgcataaccggaggttaaagatgaagaacatggagctttatatttatactgtaaactgattactatatatatatataagttatatttatatatgtaatcactttggggctcaattgagatatgaatatggggacctttttaatttcttgttgncgaacaaacaatgca

SEQ ID NO: 243015 - DNA, 414 bp, Gossypium hirsutum
  unsure (1)..(414): unsure at all n locations
cagaaatctttgcaaatgcttcacaaacccatcttcctctcagtcaatccgcaagcttcatcggcgccggatgcacctccaccatcgacgcgattttaatcggacccccaaggatctgatgaccctttgaccggagaggcaaaggaggaatgaatcgacaccgaatcagtaagccaatcctttccccaccttttgtattttcatgacaaattcaaaatagagaaagaaaataaagaaaatgaagaagtaacaaccaagattaatgaacgaatcgctttagagtatatttgcttccgtattcaaatgctatttaagcgtaatatatgaaaaaaggagggaaataatcagatcttanatcacctctttgaaaactgttttttttcaaactcttttttgataccgatttttactact

SEQ ID NO: 243016 - DNA, 309 bp, Gossypium hirsutum
aaattatttataatgttatgtcaatttactagcactgccatatcatttcaattgatttgattttcaaaaatttgaaaacaaggttactcaattttaacttcaagtcacatattccatttgttaggaaaagctatatcttttttcagaattttataaaaaaagattttatttgaattttctactgtggtacattaaagttcatatgtagctcaattccatgtgttgctttatttataggtgcttcgagagttcaatcatgttaatccacaaacagatgaggaaggaaaagtatttttagacacaagagac

SEQ ID NO: 243017 - DNA, 330 bp, Gossypium hirsutum
  unsure (1)..(330): unsure at all n locations
ctggattcatttccaatggcaatacagaattctaccagggttagccaggatatggggatagaggcacctatacctatcagctcaaagttgagtgatttcaataacatatttcgaaggatagtaaatgcagctgagcatcctcacttgagcattcctgaaactgaggctgggagaagccggaagcagtaccatcggctcataaaccgatctctcatggttgtttcagttggagctgctgtagccattgttggatttgcagcttaccgcgtatatgctactaggaagaatgcttctagttgagggatgacgattctnctatcttctagacac

SEQ ID NO: 243018 - DNA, 228 bp, Gossypium hirsutum
attaggttcatcaagcaggatttagaggtgaaaagatcgatgttgttgttaaggtaagtgcccttgaaaataattttaaaacctcacatgtctatgtgattttgaccattcaagtttatggcaagtgcaatattctggaatctgggatcttatgatgaccgacatccgttacttacaagcatttgcactatacattcacaagaatgatgtcaaatttgctctgttttt

SEQ ID NO: 243019 - DNA, 394 bp, Gossypium hirsutum
ctttttcactgtttcttcaactgaaaactcaggtcgattcaacgaacaacgttagggctttttaccatctgaagcttaaccaatagccgacaatggaagccggagatggaggggttgacgtagtcgttgattctaaggatttacagcaacagagtaaagccttcgataaactcaccgatcgtgtcgaagatcgccagctcgattcttctcgtgccaaatcggccatggcatcgattgcggcatcagctgaagcagaaaagaatgcaatgagattgagagagaaagaattagctgcagtaaagatcaacgcggccgatgtggacatcatcgcaaacgaactagagttggacaaaaaggttgcagagagaacacttcgcgagcacaaaggtgatgc

SEQ ID NO: 243020 - DNA, 410 bp, Gossypium hirsutum
cccacgcgtccgaaaaaactcaacagcccccattttctctcaaacccccctcatattcggtcgtttggactgccgccaacgcactcgtggccgacggccggcctcgtgcgagggcttttccggccaaagcgttgaagcgcgttcaaaggccaaaaccgcagatcggggaaacaaggagagaaaaaacttggccccttcccaaaccgaatccgacgacggtgaaagaccaccgacggcagggctgcgagtctgcttcaaaagcgtggaagaggcgtgtggtggcgcggcggcagcaatggcaggtctagatgcggcggctgaagagggttaggggctaaggtttattttttgctgaatgttaagataagtgggctagggtttttaatttttgggccttggttttatttggt

SEQ ID NO: 243021 - DNA, 403 bp, Gossypium hirsutum
  unsure (1)..(403): unsure at all n locations
tacgactacaaggcggcgggtcgcgaagccatcgctagggaaaatcccgtggttaaagcagccaagattatcagagtttagtttttaccaaatggatccaaattaaattaaataaactattcaaaacatttttcgacctgaaaatagcaagttgtggagatctatgctcgatctcaaaaagaaaaagaaaaaagtaaaaaaagactgtttcagagagggagaattagttgtggggttgagtttttaattgtgaaaaaagaaagtttgtaagagatttgcaatcttgtcccttgttgtaaagtaaaaaaagaagaagataaaaactaggggccaaatggagcagattaattttnttgannaaaaananngngggctaaataaagggacttggtaacagggacat

SEQ ID NO: 243022 - DNA, 364 bp, Gossypium hirsutum
aaaaaaaaaaaaaaaaaaaaaaaataaaataaaaaaaaaaaaaaaaaaaaaaaaaaaaaaggaaaaaaaaaaaaaaaaaaaaaaaaaagggaagaaaatataagggaaaaaaaattaaaaaaggggggcatgtttaaagggtggctgtttttttagggggttcttggttgtgggttcccttttttttggttttactaacgtttttttttgtggaatgccggggtttttacaatgtggggggtttttaaaatatttggctttttaaatttttggctttttcgggatttggccttttcggagtggcctttttttaagtggggtggcataaatggaaatttgtaaacgggttgttcttttccatttt

SEQ ID NO: 243023 - DNA, 419 bp, Gossypium hirsutum
  unsure (1)..(419): unsure at all n locations
cccacgcgtccggtttaaattcatttactaatataaattgtcttttcgtattatgatccgatcatgtaatactgttaaatattagacaaccggtgagctgatatttatttttattttacatgtaaaaatcacgggaagtcaatatacaaagagtactaatgtaattatgaataattttattaaaataatttgttcgaaaaaatataaatgtagatagatgaaaatattaaacttagaatatcagatacaataattctgactttcgttttatgctctattgtttacttcttactttagtttctttctaattgattcttttatggctctcacntttaacttggatttctgggattgttcagaccctcctttatgcagactttttctactattacttcgacagctggaaaaacaacaaaaag

SEQ ID NO: 243024 - DNA, 441 bp, Gossypium hirsutum
  unsure (1)..(441): unsure at all n locations
cttccatctgtagttggagatctacatggagaccttgatcaagcaagatatgcgcttgaaatggctggtgtcttgagttcggatggtcaagacctatggactggagaagatgcggtattctttttctactactaattttgttgataacaatgatgcagaaaactagaatttttcttatgttgtttcttactatcataatggccactacaactatacccaatgtggaaaaattcttgtgtgtatggatttatttctctactcagaaccccatctgatgcctatgtttctgtttgagaaaaaaggtacttgttcagctaggagatgtgcttgatcgangagatgatgaaatagctatcttatccttggtgcgatcattagatatacaagccaaggctaaaggtggagctgttttccaggtcaatggaaatcatgaaactatga

SEQ ID NO: 243025 - DNA, 423 bp, Gossypium hirsutum
ggaagaatcctttgaacaattttctcctgaagttagaataaaagatccacgcaatagagaagctgcttcttttcttcctcctattaaactttttcatggaacttcagattattcaataccatcagatgccaggttagaatgcctgttgacatagtggtaactaagttctatcggatatagcacctagatgttaaccatttaataccttcgtttacttctatttaattccattactatatttttattctggaattataagatgtattaagtaataacaattgcaattggaatgattctgccagattgtgctttgtagtgaatgtattttgatgaacagacatcatactgctgcaatggatttactgctatttttcacagaaacaggtgtattggttcttgacattgatgtttactgtgcagtat

SEQ ID NO: 243026 - DNA, 426 bp, Gossypium hirsutum
  unsure (1)..(426): unsure at all n locations
aaaaaaagaaactctctgaaagagagttggggaggggctctcggagtgtcaccggacctccatccaggggtgcgcacgcgctcacgcacccccatcgtctccatcgcatacggtggccagaggtttaaaaacctcgcctttcaacgccgattaaaggtatccctttcctttttattatttgcaatatatatatgtacatatattttaaaaaatttcacctttgcatatttcgatcgactgtagtactcctttctgtatatgtatgtaaaaataaactttttattgaatctatgtacgtattttgaaaacgtaaaaatcggtcctttacatctttttcgattcgggcttttatagccactgtttacagtatatttggtaagaataatttccttcgattccttcctatnttgtatgctgcttttcttt

SEQ ID NO: 243027 - DNA, 437 bp, Gossypium hirsutum
acgagttggagagctttccgacatgcgactgcttccgcctcaaaagctgatgatattcggtggtgattctcctcaaatgagagaagaactgtaccctctctatctctggccactatacccactgccgatctattttgtctatcgtcataagctccatcgaagttaatcttaacaatccagtcaggtggcttcctccattttttgacagttatgatttacccctgttcttatgaaccctagcattcctatctccccagatagcccatagtgcgcagcagaagatccggcactgagatgtcgaactcttcgagaaaacccagggcacttacgaaaaagatgatccgtattctcttcacctaaaccacaacgggggcacacagttgtattcgaatagttcttaattaccatattagctcgtgtagctagaaaattccatg

SEQ ID NO: 243028 - DNA, 439 bp, Gossypium hirsutum
aaccccagcctcagcaccctcggttcaacccaagcttcacttctggtagcaatagtacttaattgatccctgaaatccgaatcgattcatttttgtttatatcctttttaactgtttagttatttggtttttggatttgtatgtaattgtagatgctgctgctttgaggcttcgaagtgggggaaattttgttggaaatcaaaagcagcggagtttgaggccacagcaagagatgagtcatgaagttcgtttaccgctggagtggacttattgactcaaacctgcatgcggtggtggcttactaattgttggttctcttgttttaaacgtttttttttatagtttagaaattttaaggttagaagaaagaaaatgggaagaagtttgatagtttgctatagggaaaatagtaatatagtgggtatataaggtttaagat

SEQ ID NO: 243029 - DNA, 400 bp, Gossypium hirsutum
accacgcgtccgtttccttacatttgcagtcttcacaggcagctttgctcagtgcaaagagatcatatatggcaatgcagaggagcaatggcataagaaactatggttctttattgtgggaagaccggcttatggaaagtggttttatatggatggactgccttcattgttcctttcttgctttggcattctgtttgacgatcacaagggccctccaatgtatgtttttgttgaccagaatgacacaaacactgtgcctaggtgggttggaagtggtcaaaatgggattggaagaatgagggcagtcagcttagatgacagccacgaagaaatgaagatcccgttgccgatgaggttcttaggttgtgctagatcttcctatattgttcttgaactttta

SEQ ID NO: 243030 - DNA, 228 bp, Gossypium hirsutum
cttacgacgatcggagtccttgctggaggcaagggcttgctgcggctagggttcttctttttttttttatttcaattttgctgtattgggttgctagttactgagtttagagtttgggtctgttaggtggtttgggcctgagtgttataatgtaaagtgggtgttagattggacctgggcacatttgggtttatacaatgtatatatataaaatgaaatttaaaaggt

SEQ ID NO: 243031 - DNA, 225 bp, Gossypium hirsutum
ctagaagatttttttttcctgtcttatttttcttttttcaataaagaaagtaaattttccttcgcgttacctgacccaatcataaattttgtaagtataaattttcttaggcaaccctatttggatataggatgttttttgggtttataatagttcctgccctcgtgaaaattgtacaatgcattgcaaaactattggaataaaaaggaattggattatttattt

SEQ ID NO: 243032 - DNA, 444 bp, Gossypium hirsutum
tgaggattatacatgcgtgaaatcccacggacctaatcccaaaacaacccatatatatggtaactgcgttgtaaagagcttctgcagtagtgtattggatgagcccaggtgtgcagcagagagtgatttcctcagcttttgtcacacatgcaaaaagaatcttgaacagaaaatcgacatttacatttacagaggtgagaaggctttttgcagtcaagagtgccgctatcaggaaatggtactagatgaagaagagaaataaaaaattttcatttcatcactgctttagatcataaaatcattttcatgtttgataatgattccataaaccaaatctctttgtagtgtttaatttagcttttgtttttaaaaaccctctccactgcagatagtgaaaagagaggatgagatgatgtagagttaatgttaattatttatatgact

SEQ ID NO: 243033 - DNA, 445 bp, Gossypium hirsutum
  unsure (1)..(445): unsure at all n locations
gttgcgtaaccctttacaaagactgaaattctggctttatagtcgaaaaggaaaggaaaaatttacgaaaaataaaaaaaatacaatgtttttctttttttgtttccctttgctgttgttgcttgtttgtctctttgcaggtgtgggtgtgctggcgctcgggtacgggtggtgcgtgaagaccgtacggaggtgcgcagggggccgtacggaggcgcgggcatggctgctggagggtactgagcgtttgacgcaaggaagggggacgacttanggtttctgaaacctgttaaggatatgggtttattgggcctgttcttgtagttgggctatcgtttgggcctctggggtattgggttaagttttaactattagattttaattgggtcttgggttatgttttgggtttgtatatggtacttggggcatcgggcccattgtattt

SEQ ID NO: 243034 - DNA, 123 bp, Gossypium hirsutum
ggtcaaatgataaaactactggactcttaattctagtaaaatcatgatcaaattccggaaaacggtgaatattaaaaaacagaaacttgaaaacagaaatggttcttaagccaagaaaggaaa

SEQ ID NO: 243035 - DNA, 383 bp, Gossypium hirsutum
  unsure (1)..(383): unsure at all n locations
cccacgcgtccgattcagcagttttttgaaaaacatgtgccgaaaactggatatggtattggtaattaacctttttcccaatgtaactatcgctggatgatatttgacaggattagcctttttgcctcttgatgatatttatttttcctcctctatctcttgcattataaatttgtctgcttaagctcgaatttgcatccgagcctagcagcaccttgtgaacaacctagtttctgcatcttgttgattgtcttgcaaaaatatactactgttggaagcatttcttaatgtcatgacactaangctacattgtttaatattatattcaacggtgaacatttccacatcgaatctttacatgccttctttctggtacatgtgga

SEQ ID NO: 243036 - DNA, 265 bp, Gossypium hirsutum
tctaaatgtcgagaagggatcgatgttaatatgatggagtcatctggaatgctcagggctcgtttggactcatcaatgcaagagccacaacaagaagaacaagaagttggtgtcaaagatggaaaagataggacggtgggacagtctggcatgtctctcgctaacagttctactgctgaatacatgcctgagcctttgaatgctttaccttgtgggacagctgctgagctaggcttagatttcaaagttagggaggatcttgtgt

SEQ ID NO: 243037 - DNA, 310 bp, Gossypium hirsutum
gaaaattgttcactagggttggggtactccgtaggggaggagttggcacttaggggaatgattgctatgaattctttaatgtttcacataaacccggtgaagatcctgaaatccaaattgacccgctgttttgttattacatttataatttttcatacctgcctgtcctcttctcagtccaggcacaatgttgtcttacacccattagattggcatgtgaggccgttgaaatgaataatttgttttggaatatgtgtttttgcctgcagcaaaagtactactgcgcggtcaaatacatggacgtgctgtt

SEQ ID NO: 243038 - DNA, 418 bp, Gossypium hirsutum
tttttccccatttcatatccatgccgattttggttgctttctggcaagcgagcgcctcagccgcgaagactgatgtcacctgttgatagatctccgaacatgatagaagagttttgccttcactatccctggccacaatccccacagtcgcttgattaccctttctatcataggctgcatcaaaattgatcttcacgaactgattgcccataaggcacagcaaaatgtcctacactgtgatactgaattcttcgcaaatacccaggacattcccggaagagatgatccatgttctccgatccagctccacaccgggggcatactgatgtattagttagcttgttctgaagtaagttaactcgtgtagctagaaaattccatgatatcttccatattgtaattttgatttttgagggga

SEQ ID NO: 243039 - DNA, 445 bp, Gossypium hirsutum
  unsure (1)..(445): unsure at all n locations
caaacttcaggatttggcaatgagctcactattgatgtgaaaaaaggggccgtctctcagagaggaaaagcttctccagatggtagcttgacccctgattccacttcctatgctgatgaaaaaactgcgaatctcttcagtgctagtgatcgtgccatcgagagcgagtctgcatatacacacagtgaagatgaatctgccagaagtcctcgtggtagtcctactgatagaaactctctagaaagcccatctaaaccattttctgatgacccttttggaaagagcactgaagcagaggcagaaagacaccaaagttttgatgaatcangatgggggacctttgataatgatgatatggactctgtgtggggttntaattctcttaataccaaggactcggacaaggccagagactttttggatcaagtgattttgatgtacacac

SEQ ID NO: 243040 - DNA, 251 bp, Gossypium hirsutum
gacacaccttcgtatttttttaagcacattatcataacagctctatcaaacttcttaggggaggggttcatacatgtacgttactccaaaatacacttgcagagaataaataaactgacagtgtaacgaaaagtaccgaccactaatgtagacaaattcactctttacaaataacctagacttaataatcatatataaaattttagaaaatcatacatatctttaactaccatatttataatccttatcat

SEQ ID NO: 243041 - DNA, 218 bp, Gossypium hirsutum
cccacgcgtacgatatgaaagacgttcatataagtatgacgcgactgacttaagacaaatccttggtatacttgagatattgtgcatatagggttatactggggggaaacgctcgtacttaggctagactgctaggttggatatcctgatcgcatattactcattacagggaaccatgaaagtctttacaaatataggtttacagatgctatgatgag

SEQ ID NO: 243042 - DNA, 437 bp, Gossypium hirsutum
atttcggttccagtgatagactgcatgtgttctgttcatgatctccagtgtcgaatggccgtaactggcttcccggaatgatgatgggaaaaaagtggcaattgactcatttgtattgaacaatcagtactggtcaagtaacgttcgagaaaggaaactgaagaggcattatttgaatgggatgaggatgattgcttcttaatgaaaagataatatgaagatatatcatctctggtagtgcttgatgaagtttcattgcaagagatgaaaatgccaacaatgataagaataagaataagaatatatatatatatatcctacaccttgtttggcttctcttgcagtcatctttttgttggcatatatatatatatatcctacaccttgtttgcaagagatgaagtttcattgcttggaaatgcaatatctcgaagtga

SEQ ID NO: 243043 - DNA, 439 bp, Gossypium hirsutum
cagcaacaactagaagcagaacgtcgtgcaaaattcgtatatgagctaatgattgacaatgcaccagctgccattgtgggtcttgttggtcgcaaggagtacgaacaatctgctaaggacctctatttcttcattcagtctagtgtttgtttgaagctgctggcatatgatcttcttgagctcttgctgttgtctgcatttccagagatggagtatgtattcaagcagttccatgtagaaaaacacaagtttggtgagtttaaagcaaactaagtcgcattttcatatagacaagtctggcatcattaaatccttccggatcatctctcatgcccatccggagacaaatacttcaattgtatcttacgcctccaaattctgtctttctttttgtcatggaaattgtaagtaaatcttgaaattatatgaagggatggaa

SEQ ID NO: 243044 - DNA, 338 bp, Gossypium hirsutum
cccacgcgtccgggagaaacggtcgtacggaaaaaaccgctcgtgaaagtcgtgcgtgagttcgattgcagcactggtgtgttctagaagcccttaggtttctggcattttcaaacagttgggccttttgggccatttgtgaattgggctacaggactgtgtagtttgggtgtctgtttaattgggtcaaattatatgtagttgggttaaggaactttgggtacttgtttaggctagtatttttgtttgggctaaataaattgtaaatggactttaaatccataaacactttaatttaatatttaattatatttttttaaaaaaaaataatgattaaa

SEQ ID NO: 243045 - DNA, 323 bp, Gossypium hirsutum
cccacgcgtccgaacgtcgtcatcgtcgaatgtggatgatatgtcatcgacaccggaagagctgagtgagatagtggagctgccgagtttagggacgagctatgagtcggctgagtcagggaacgagttcgtgtacgtggaccgctttgatgggtggctttttaatccttgtggtatcccttgggattatgaagaaaattgtgggtacttcggggatgaaacttcaatgcaaatacaagatagtctcattacaaatgggtttagtcctttactatgggatcattaatgcataattaataataaatcaaattttgtttggctta

SEQ ID NO: 243046 - DNA, 403 bp, Gossypium hirsutum
cttcactaaacatagaagaggatgaggaggacttcccgcaagactctccagaggagcgccgagttgatttagttgttcccttaaaaaaatcagtgaagcaaataattcgtgagaccactgttgtaactacaagacggattcttgaaagacttgctgttatctatgtttcacaacgcatggcgtggaaactccttaaagatgtcccaaaatcagctgtcagaaaatcccaaaggggaatgcctgcaacagtgtatttcttcagagttagcagaacaactttcagaggtcaccttcttggagtcacggctgcatggattgtccaaaccggtattgaaatctaccgaagcttttctcgcataacgaactctgatgagagtaatgaggccaatgtaacagttcgagc

SEQ ID NO: 243047 - DNA, 105 bp, Gossypium hirsutum
tcttccaatggttcagatgtgaggagtagttcgaaaagccatcgagaaacatagacctgcggggattatctagttgttcatcacacctggaagctatcgggtctg

SEQ ID NO: 243048 - DNA, 161 bp, Gossypium hirsutum
ggcgaccggattccggtcgccccgcgtcgccacgcgacggaatctcagaaggcccaaaacaaagcagtttctcccacgatttcgatatctggtgagagatcgtgtcaatgagcgacggggaaagacgctgtgcgacgcccggaaatgcggttgcgggagta

SEQ ID NO: 243049 - DNA, 407 bp, Gossypium hirsutum
aaaaaaaaaaaagagagtaaatttatacagtcaccgttaagtcttttgggtccgctctccaccgtctgttacggacaccatctgcgccgtgaaattcttcatagatcttctcctaccttttgggatctaacaaagtcttgaaaggtaaacgcagataaacccccattttcattttcaatttcgtttttggatcaagagtctatattagaagaaaaaaaagggacccgattttagtttttttgtttagtttcgcattttcaaggataaaaaagtttataatttctttatcaaaaagaacaagccagtttcagtttttattgcagacgtttcgttttggagcataaagatttgatcgttctttctttctttatataagatacataaaaaaattagattagaaaggaaag

SEQ ID NO: 243050 - DNA, 286 bp, Gossypium hirsutum
ccacctcgactgccattggatcatggctcgacataatcgatcatgattttattgcctggccacagactttggctcacatttttgatgtggacagctggacttatgggccttaactatacctatggtgaatgctatggagcattttgaaagactgactgttgccaagactagagatggtccacagtagacataaccaacacagagtgatgtctccttaagtagacacatactgcagtgacttgccttacaacaaaggctgtagttgccagttgtatttttttaatgt

SEQ ID NO: 243051 - DNA, 360 bp, Gossypium hirsutum
gggaagttttgatacgagcagtgtctcatagccggaagaaacatatggttcagtaagaactgatttgtctgatacacaacagtcttgtcaacatagtgtttcgatgaatcgtagtgctgctattgttgttccatcaccaatgatgcatcagagaccttcacaattggatgtggggtaagcacaaagggaaacaaagagaaagttacctttttcaccacaagattctcttggtgaatgatctcaaggccctatcgtggtggctgtgatcttgaacccagtacgatctgaacaggtagagaaaaagaacccatcttttgaaggttgaaggtaattaagttagcaagttacttgatggaaaca

SEQ ID NO: 243052 - DNA, 294 bp, Gossypium hirsutum
agttcatccattccctcgcatatttctagcacccacaaacaatgctagcgatcgggggggatattctacctatgtgcaccaaataacaagagtaaaacggcgtattgtccatttgactatttgggcattaatcagcatactactaactatctatatgacccacatcatcctaaaccaaaagtttcaggctatcagcaagattggtatgctggatttgcttatgcaaaatgaggattgtctattggtcctacaactcattctcctttggatttacaatgtaccttggggattata

SEQ ID NO: 243053 - DNA, 405 bp, Gossypium hirsutum
cggacgcgtgggcggacgcgtgggctgcaaaggtttggttaaatgggaaattttgatccaaaagagggattggttggcagaagaggtgtacaaagaaatttttggttggaaaagcttggatgataccatggtggatgatcttgtagacaaggacatgagcacaaagtatggaagatggcttgattttgacatggaagcatttgaagagggtgtagaaattgagaagattgtattaacttctttagttgatgaattagtttctgatttattattattgctttaaggtagcctctcttcttcttttttagtattttttgaggttccattgttaaaatcttctttgctcagaaagaagatatatatatacttgctgtataattcaaaattgtgaactttgcattcatg

SEQ ID NO: 243054 - DNA, 392 bp, Gossypium hirsutum
cccacccgtccgttctccatcaaaaagtcacagtcttcgcttttcgataaagccgtgaagccaagagatggcgtcgttttggaggatgcctcgtcaattgaagtgatggatatgcctgctgttaacggcgattccatcaggttctttgccgagaaaagaaaactagcggatttgagttcgagggatatcgcggggattctgtccggaataaaggtagcagcgaggaccacagtgccagtgaagggaaaggcgttggtcaatttccggtggggaatgaggatcccgtcagagatgaagagcggcgtatgcggaaatcgtgatccgaagactggagtttctttgacgaagattccatttctggtgatggataagattggtatcgaacatgtgga

SEQ ID NO: 243055 - DNA, 267 bp, Gossypium hirsutum
aaactatttgcatggaactgcaaatattttcgtagatatcaactgggacaatatgggaggataaaatgcttcagtgtgcaattaaatattggatagaacatggatttattgtcatatatgttgctctacaacataactagtaggatgttcgatctgctagagttggtaagctgtggagatatttggataaatctgatttcataagcaaattgatactgacaagataactattaaatgcttaaatatatgcttacattcaaagaaagc

SEQ ID NO: 243056 - DNA, 115 bp, Gossypium hirsutum
atcagaagggtatgcataaagtaaaacaaattggatcacaagatcaactccttaatgctgcaaaagtatctttaggaattttgggcgtcatttccaagttgactttgaagagagg

SEQ ID NO: 243057 - DNA, 347 bp, Gossypium hirsutum
  unsure (1)..(347): unsure at all n locations
cccacgcgtccggccaaattatcaaagtgttgcaccagattattcaccagtctccaaatgtgtattttaattttccctagaatgttcaacgaccataagactctgtaaaaatctttgtaatcctcatcaatagaggacatgtatatagtgtcctgtaaatattttgtatttaggacccgatacccactcttaacagtgtattccccagaacctttatgttttcaaaccaacctatcctccagaccactttcagatatgggaatagaaaaaattcgatcagctgtacttctcaatnaaaaaaataaaaatttaaaaaattatataatttattttttttttttaattat

SEQ ID NO: 243058 - DNA, 389 bp, Gossypium hirsutum
acgcttttgagcactgctttgctgtctactcgccattctttttgcccgtttcgatgcatgttgtgcttgcagctctaagagaactaagaagatataagcaagaaaaggccaagtacctaacttggaaggctaaagcaaacacggcaacataaagcaaaggccccaactgcaaaagggattattctaagccatgggagatattcaagaaacaatttggcgacagggtccgaaacacaatttttgcaggcttgtaaccctaccaatttacctcatgccttataccatagaaacttatctaaaagtggttgaatttcggactattttttatgagtccaagatttggatatatgcgactgctgtctgatggaaatgcaacgaatgtgttcttt

SEQ ID NO: 243059 - DNA, 329 bp, Gossypium hirsutum
aaattctgccgtataagagaataatatttgtttgtagtggtgaaaggcaagtttcagtatatctaatgtaatttttccaatgttctctaggtatttgtctgagaagaaagaggaagcctcatctcagtaaagtacccttttttcctgcttttctttccattttgagattctgctattttcttgtgatccctgtaagaatctattctgagctttactttataaagaaactgatttaattctaccttcatctggccgaagcttaagcacatagtaagccgattactgttaagtggaatcatgatcggccgcctttcttattatgcatgagt

SEQ ID NO: 243060 - DNA, 367 bp, Gossypium hirsutum
  unsure (1)..(367): unsure at all n locations
gaggatcgattcgtttggtgtctgcccattcgagccagcagatttacactagggcaaccaacacctagatcctttgttatatttttgcttaaattagttctatgtagtatttgcctttcttgactttctataaatgatttttccttttgctaaagacctccatctaaattgtgtgagctacagtttcttgttgtactggtttaatggataagtttttgttcctcanaaaaaaaaacananttaaaaatataaaaaataaaaataaaaaaaaaaaaattaaaaaaaaaaaaaaaaaccccatttaaaaaaaaaaaaaaaaaaaaaagggggggccgttttaaaggatccaagtttacttccccgggct

SEQ ID NO: 243061 - DNA, 169 bp, Gossypium hirsutum
ggaacaaaaggctgaaatcattttgttgcaccgaccatatatagctgctgagggcgagataacaagctctgatatacgaactaacacatggtgctgtcgaattcccatacgtccttgactagaataaggaccacgacatccaagcaccccttattggatgacaagaaga

SEQ ID NO: 243062 - DNA, 387 bp, Gossypium hirsutum
agcggaggagcttttgaggaagatccaagaactggaggcaggacatgagcatctccagcaagaaatgtctagattaaaacaatccggcgccggtcagtcaaagcccgaccacattcgtcaaagatcccactctacttcccctcaacgccgccgcttcccggggaattcggccgcggcggcggctacgacggctgctgctttgaagaaaagttcttgctcgtttcggcattcgtcgccgttgcaaagagagagcagaaggtgtgataccggaaatggcggcggcggaggtgatggagaaagccggaataccggtccggttgccgttaatttcactaacagtcagtatttaaatatattgcagtctatgggacaatctgttcatatatt

SEQ ID NO: 243063 - DNA, 223 bp, Gossypium hirsutum
cccacgcgtccgatttgtagagcctttaatgaataaccaatatctgttcgcacgacatgagcatctccagcgggaagtgtctaaattaatacaaacccgctccgatcactcaaatctcctaccacattcgactaagataccaatcttcttatctctaacacctcctatttctgtagaattctgtcgcatctataaatacgacatctgcaagctttcaataaaa

SEQ ID NO: 243064 - DNA, 331 bp, Gossypium hirsutum
ctcacgcgtccgcccacgcgtctttctattagaagaagacgaggaagaagaagaggaagaagaatatccttgtagctccgaggtcgagtttcccttacaggaagaacctttacctcaaatacttatcgatgagaaatggtcgaatcgcttgttcaagttcatcgccattggcattccttcagccattttggtcatagttgcaattaaatgggttggaccctttatgttgaaaaaggagattgtccctgttttacaatgggaggcccatgcattcatcacaaccgagagtatacttgtaaatggaacttcattagcttctatttccaacttt

SEQ ID NO: 243065 - DNA, 152 bp, Gossypium hirsutum
cggacgcgtgggaaagttttgatattagctctgctggttgtgtaagattgccgtttcaaaatacaaagttatctgctatattttagtttattatatattatatatatgtatgtatgactatgtgataatatcaacttattcattcctttttt

SEQ ID NO: 243066 - DNA, 251 bp, Gossypium hirsutum
  unsure (1)..(251): unsure at all n locations
ctttattgtagggtactcccaaaacaggtgctccctcgactccgctccattctggcatcttcgacaggtcgcagatcccaacattcttcgataatgtagattacaaaaagtaggaacatagttacaaaaaatcctccagtttgtaattttaatttttggatgtaaatcaaggctccacaatctcttgtaaaagagtctgtaatttgattgtatttgattttgttcaccctgtaaaagaagtttgtgcccnc

SEQ ID NO: 243067 - DNA, 241 bp, Gossypium hirsutum
cccacgcgtccgggttgattgatttcatgtttgactggcaacagcttttgcagtggattatcttaagccttatattctcttatcttctagccaagctaatctccttagtcgtttcttttcaagacgataaccttttctataaccctagcccgaaacttcaatgttcaaggctactagaaaatcgaccatttcggtttttgatcctacccgattggaagtactgagcacttgggactgcaca

SEQ ID NO: 243068 - DNA, 348 bp, Gossypium hirsutum
aaaattgaagcgatcaaatggtccaatgagcaaagagaaaaagttgttaattactgggaggggaaaaatgcaatatcaaaatcatgatgttattggtttgactggtcatcttccatcagataaacaacaaagtaaagagcaacaactatgttctatgaagaaacgcaaagcactacttatagagcatgataaaagttccaacgttaatgcatcagatccccaaagatcagtgccaagagaccttcctttcacagatgatggaagtgcagaggtggatgccaagtttctcaatcataaaaagaactatgtttgtggaagtgctgaacaacttggtgcagaggaaacaaa

SEQ ID NO: 243069 - DNA, 408 bp, Gossypium hirsutum
gtcgaaggcggttggccgggcataacgaaaggcgtcggaagagctcagctgaatcatcatcagcagcagaaagttcaagtcgcagagggatgatgatcagtgctcaactgaaagagtctcattacctagctgatgatcaaagagccagagtcaatccaatggcaatccatggcagttcatcttttaagcgttcccaaatcagataaggaagcttaagcgaccaaaacaatacgctccctctcttctgtcatccgatggttcatgtcttgcactatgtactacttactagattttaatggaggattttaataacaatgtcaggcatcaactcgattatcgagatttcacaaagtttgttttcatgcgaacttgccttgctgtataatgatgataatattcctttatcta

SEQ ID NO: 243070 - DNA, 365 bp, Gossypium hirsutum
cccacgcgtccggaagagatggtgactggattgtcccaattttagatagttatgatcaaaatgcttttggtagtctaggtgacatcaatgattctaagcagccatttgatggatgtgagagtggaagaaattgaactttttgctttgaggataagtctagttgatttcaagtcattgcacctttatctctgcaatatacagttccattctcttaggtagttagatcctagcttgaatggagatgatcgggtgtttgaaaaccacaatgtgcttcgcgagacaactaataagcttatatcaacgcagtgacagaatgacaggcttgtcggtacagtaataaagaagcttgggtggaacggatgatg

SEQ ID NO: 243071 - DNA, 356 bp, Gossypium hirsutum
  unsure (1)..(356): unsure at all n locations
gaagacatcaactatgaaaaatcagtgtacaagactaaaatgtgcccactctgccttgtttcaactaaggaaatcctgatcgattccttttttggcctccgcttgcttgtttcgagagatgttttgtctgtggatgcagtaaagtaaaaaaaatcccggattcatcagatcatctgcaaataggtatatatagatattaatgcttgtaattctatttgaccacttaaatgatggatgggtactgagaccattcaacacactgtaaattaggcaaaacattcatgattttgcatttataaattcagctaagcttaaagtaacaacaatgttaatagatatgcaacanagattacact

SEQ ID NO: 243072 - DNA, 232 bp, Gossypium hirsutum
  unsure (1)..(232): unsure at all n locations
cccacgcgtccggaatcattgttttcagatttcatatttaatttaatcttttttatggttcagttcagaatgtaaaaattaattaaaacattgtactcaacgtgacactttggccattcttatttcaaaagaaaattcatattgcataatcagctcatttacactttaatgagcctttttctttgnaaaaaaaaaaaaaaaaaaaaaaaaagaaaaaaaaaaaaaaaggagg

SEQ ID NO: 243073 - DNA, 382 bp, Gossypium hirsutum
agcaaatgcaagagaaatttaataagtattgggctgagtattcgttgatattgtcatgtgctgcaattttagatcctcgttacaagttgaattatgtgcagtattgctttactacaatctatggtgaccatgcttcagattttgttgagaccattcttagcaatcttagactcttgtttgatggttaagaaatccaaatccacgtcttcctctttggctgggagttctaatgttttggataaaaatcctattgattctggtttggatgaacacaatgatagtagtgctgaatttgagggatattttgatgagagtgacgattataaacggtttttaaatgaatctagctctagaagtgagaagtcacagttggacctttatt

SEQ ID NO: 243074 - DNA, 376 bp, Gossypium hirsutum
cccacgcgtccgccacggtttcagtcaactcctcaccatctcccatgcaagttgaaacggtgacaacacttacttcaccaggtcaatacgaagcaggccagccatcatcatctgaaaagatgcccaatagagttggaaaagacggtaaaatattgaagaaatcagtcatccttaatcaaatttggaaggatgacttgaattctggacgtacattggtaacgttgttcgaactgtttggtgaaagcattctctccttcattccatctcctgagatgtctttgtttatataacatgttgtagaatagcttatttcttatcgttatcggcgttagaaaaaatgaaactgcgttcatctgaatcattaaaccttttcaaa

SEQ ID NO: 243075 - DNA, 336 bp, Gossypium hirsutum
gaacaaggaagcttcctccaaatcttaagagtattgctgttttcttttctctatgaggtttgtttcagacttgtcaccaagacaactttgttaggagctatgttacgctgcgctgtcaataaatctatcccctgagaaagtttcactatttaaaaaaaaaaaaaaaaaaaaaaaaaaaaaaaaaaaaaaaaaaaaaaaaaaaaaaaaaaaaaaaaaaaaaaaaaaaaaaaaaaaaaaaaaaaaaaaaaaaaaaaaaaaaaaaataaaaaaagggggggggccgttttaagggatccaagttttactcccggggcttgcaaggttatagtttttttt

SEQ ID NO: 243076 - DNA, 373 bp, Gossypium hirsutum
ggccgcccacgcgaacgtcttgctatgaatgtttcttccaatttttttttgcgaacgagggaggaaaaggggaccattcaagaattaaccatgttcactgacattttaatccatgtaacatctattaaaacttgggagaacttatatcataacattatgactattctaaatgcatattttcatttttctaaaactaaactatcactttatatgatatattacatgggataaaacttgttatctctaaacatttatatgaaatatacacatcttaggtttttttcttttatgacactaaattaaatttatgagttaaatcatcttataaagttcatatatatattatatttattatatatttatctttattata

SEQ ID NO: 243077 - DNA, 429 bp, Gossypium hirsutum
gatgcaatcttgataggagcccagttttgctcagattctttctcttccatttctcatgctggagtcaagaatggtgtttcatattcgctgtatgctaggattgaatctatcacttcactggaaattctggaacaatgtggaggtttgcagaggaagcaaatcactcttgttgacaatgatggagtaaaactaagatttctcttgtggaatgagcaggtaatcctagccaatcttttcagtgttggaagcatgctcgccctggataggccatatattgctattgcagcagagagtgcccttgaaacaagtatgcctatcatccacacaaaatcgaactcaaggatcaaagttgcatgctgcagctgatcctacacaaggtcccaaagtttctcaagtgagcttgccctgtgattccccagggtcaattga

SEQ ID NO: 243078 - DNA, 422 bp, Gossypium hirsutum
gagagtttggtagaaattgaagcaaacaaacctgcaaggcagaaaataattgaacccaagacaccgtaccatcccatgattgatgatgatgatggtatgcatagtgtttacccttctacttaagtttagtatttcatgcttagatacttgtgtaagtattcacaaattggtgttgaactagctttatttttaatttattcctgctttgggttagaactttattctgaaagttgaattgcattttcacattgcaatctggctcttgatttgcagggtctttgtctcctgtagggcatggtttcaatgattgtatcggtgatgctatggatgcagaagagttgcgctctgctttgaaggatgtggcttcctcgagcaaaaaaacaattgggcagtctagtggttggacatcttctgatgatgat

SEQ ID NO: 243079 - DNA, 363 bp, Gossypium hirsutum
gcagaactagatggatgtgctatatatgatcagtgtgccagtttgctgaatgtggggcgggggaaagatttgcgtaagcttgcttcaatgcttgtgaatctgatgaacggtggacaaccactacaaaatgcttctattgatgttctgagcccttcacttattcctgcaacttatgcttttgtttttcagaaagccatggacctttacaagaaacataggctgcagatctgtgcttttacaaatgccattggtgggatgtttggcatctactttattgcccaacgaggagcatagttctgatcttgtattctatgaagcaaaatagccagtttaagatttctgaagctggaatgggtgattcag

SEQ ID NO: 243080 - DNA, 379 bp, Gossypium hirsutum
cccacgcgtccgcccacgcgtccggaacaatcagtcagatgctatgttgaacccacttggcatgcaaaacccaaaccagccacggatcccaagttttgctgatccttatcagcagtatatgggtcttcaccagatgcaattacaccctccacagtgtcaagcaacggcccagccgagttccagtaaaccaagtaacagtaagggagctgagaatcttgaaaatcacccatcaggtgatatggcacgatagcactaaaatattggctggctatctgagttctggacgagtgttgctcgtgtattccttttaatctgcaacacacaacattaaagatctgtgcattgcaggttgacaattcaagcgaggatcattcccgaa

SEQ ID NO: 243081 - DNA, 348 bp, Gossypium hirsutum
  unsure (1)..(348): unsure at all n locations
gttcccaatgatgtccctgatgaattggttgaaggctcttctgaagacgacgaagaagaagaacccaagaagtctaatatcaagcccaagaaagctaagatcaactagtacttaggtaaaaaacaatgtatggaattattctagttttcaaccttgtcaccctcctgtgtcattgaagaaacgtgaatcaactatttatagcattatgttgaacaaaaaatgcattgtgaaatanaaaaaataaaaaaaaaaaaaaaaaaaaaaaaaatataattaaataaaatataaaaaatttttaaaatataaatattatttaatttaaaataaataattaaaaaattatattat

SEQ ID NO: 243082 - DNA, 396 bp, Gossypium hirsutum
aaaaccccaaaatagatttccccaaacacacagccattttggccaaaaccccaaaacaaatttcccccaaaatccctaggcatctgaagctcctcagtcgacccgaccacctactcatcaccgtcctttgtagtctctattgcgtcccgtcgccgtcgctctccgctgccgtaaccaatagattagcgctagtcaattttcttctccattttggttttctctagaagcaaattcattaataaagaagctccttgatcccaatcctaaaacttttcatgaacttttctagatatacaaggtgcttaaagtgtaaagcagagggtccaaagagggttgttacggatgatgttcaaatgaagaaagaggattggaactacccagggaacattggcaccc

SEQ ID NO: 243083 - DNA, 404 bp, Gossypium hirsutum
agctttctcaagaatctattcatgttattgttctcggtttctcgtctgccatcataacagctgaaaacattcgtggagaatttaaatatagaaccaaagacaaagaggaactatttgccagcaaatctcacaagcgacatgtcataaaggttggaaccatgatccgatttttagtcaagagttttgatgaggaaatacttcatatcattggatctctgatatcagctcacacaggaagcattcgttggttggatagacatttggaggaagattcagaatttgataggagttctatgaagagtagagatagagaatggcttggggataaagctgttgatgagggagcaactcccatgagctacgataatcatattaaaatgtccaaaaagcgtagaatcacagaa

SEQ ID NO: 243084 - DNA, 350 bp, Gossypium hirsutum
  unsure (1)..(350): unsure at all n locations
ctatatgctatttctagcgcttatctgatattgtgaaatttcatttttaaatgtacaatatcttctcttttttattttttcccttgaaatctatgacatgtttgtgaagctttggttttccattttcatacattgtatctttacttgggattttctttatttatttttacttgttagccttctctcagttcttttttcttctgaatcttatactctttaatgcattaactagtgatggtgttatgttttgtattttaatcagtcagtttctgccttctcaaaggtccagtaacttagcattagttntggcacgttagagagttcaacatgccgaaggtgagaagagatcg

SEQ ID NO: 243085 - DNA, 310 bp, Gossypium hirsutum
  unsure (1)..(310): unsure at all n locations
gtttccttgttttatacatgaacaagatcaatttttcctttgaaaacatgaacaatatatatatttgagaatattatatattcatttgtacaaaagacttcccacatacttttgggactcctttcaagggccgttgggcttattgtaatcttttaatccaaaatagtttgcttcanaaaaaaaaaaaaaaaactaaatataaaaaaaaataatatgtcaaaaaatacaaaaagggcgggcttgcttggatagacaatcgttaagaatactcgcatcttaaaagggcgctcttttttaaggagagatcgat

SEQ ID NO: 243086 - DNA, 280 bp, Gossypium hirsutum
cccacgcgtccgatcgattaatgtttatgtgtaagctgcaaaatttggactgcaaagtgcatgatttctgtgccctcgatatttttgggcttaatgggccaaaatttgaatgatgggccaacgggcccaattcgctgagtcttggaaaaaaaaaagaggagaaagggagttttctctctggggaagcccagaaatcggtcaggaaagccaccgcacgccgtcgcagcttcaccgcgtcggccaccgtacacggtggccgaaaatcgccttaaggtatgga

SEQ ID NO: 243087 - DNA, 250 bp, Gossypium hirsutum
gatatgagcagtgacagtgaagttgataaccctctcgtgtaggatgatgggtctcatgtgaatgccgagatgaacggggacgacaaaaaggaaattaatttgatcatagtttgttgaaaggaacataaatctaaagagcagatcatatttaaagcactaagcttggattactgttgctgttaggaaaaaaaatttggcttgcaaaatagttttctaaagtatggttttttaatagatattaattcattgc

SEQ ID NO: 243088 - DNA, 356 bp, Gossypium hirsutum
gcagtctcgtatgcagcctccattgctttactttcagaattcttcaaataggagaggagtgcagactcatttccccacttctgctagagtttcaaggttaaggaatcgaatattgaatcaacctcggatggcaccatctaggacaaggaattttcaatttcctttagacatggacttagatatgagacttgatatactggaagccatggatgctgcaattggagattcttatgacatgggaatggctagtcacattttccaaattcagcgtgattttaatgaaattgattacgaaatgctgttggcccttgatgattactatcatcagcattggtgtgcatttattaatcaaatta

SEQ ID NO: 243089 - DNA, 297 bp, Gossypium hirsutum
agctgtcggtgcttaagggaaaccactgactgtacggcaagaagtttttggtgctctgcgtccaactgctctgaggggtacatacacagactatgctattcttactgaggactaactttcttctaaaccagcttcattgactcatgcggtaacaaatgccattccatttgctacattgactgcatggagtgccttaaaaagtcctgcaaggacaactgtaggtgaaacgctgttagaagtatgcagcggaggtacagtaagtttttctagcattcaaatcgcagttgctgcagggtg

SEQ ID NO: 243090 - DNA, 391 bp, Gossypium hirsutum
cgaaaatagacagttgtctcccagtgatgatattgacgctgagggataagagcggcaacaagatatgggctgactacatttgacaatggtttttgtgtatgagaaagagtaatctgtaaattcatttccattgttggagatgtacaaagttcatgtcaagctgattctgttctttaaaagatgtgcaattcagtcaacagttgcatcttctgaatttcatattcctgcattgtataaatctgaaaattgtcacatgtggtcaaaacatagacgacacaaattatccttttgggaggtttactgggggccggtgttgaattttaaatcaaacgttatctgtgcgttgggtggtttttttgaatcataagagcacaaagagaaaacttcaaat

SEQ ID NO: 243091 - DNA, 357 bp, Gossypium hirsutum
aaaagattctccttttctgtgtttcaatcccaactgccgaagactggttcttgaaccgaatttctgttaacattaaaaaagaaacccagaaatggtggagacattgccggttgggcggtttcagttgcaacaacaaaggctggaacttaagagatggattccggcgtttctttcttcgcataaaacgctctttgttctcctctggatcgcagctttcggttcggtttttttctggcaatggaatatcggtgggagtgggttttcgatattcgccaaagttggaccgggtcggcctatgcccaaaatgcgtcctttcgcgtttaatttgactgatttcggtggggtcggtgatggggt

SEQ ID NO: 243092 - DNA, 367 bp, Gossypium hirsutum
cggacgcgtgggtatagccaaataatcaaaagaaaaaaacaacaatttttgttctcctattggctgctactccgctgctgttttcttattttcttttgcaggtacggagcgtgtgctggcactaggcgtgagggtggcgtacagcctgttgatgtggaggcacgagcggcgttggggctgtacggcggctgaaggctgcgggccaagggagagaaaccctagggtttctatttctaaagtcttttaggctatttgggccttgtaactttgggtctgggtttatttgtaaatgggctatgggccattgcaatagttttggactttggactgttataaggtttggattttatatttattttttgtttat

SEQ ID NO: 243093 - DNA, 385 bp, Gossypium hirsutum
cccacgcgtccgcaaatgccttatctatcgaaatccctaattattagtcagagccagagagatcactggtttgttgatttcttacccccaattcctcgattgctttttttacttacaaggaaaaggttcagtgtttaggtttcttgcaaacttacataacccacacagagaagacgaaaaaggtggcattcgattctggtttttggtgaattcgacttttaagacccgttgaatgaagtgaaatcgtcttcacataacccacacagagaagaccaagaaggtggcatttggtttcttgttttactactggcggtattcaagggtcaatttcttttattttgcggatttaatctttgggttttctttgtttttccatccccaattt

SEQ ID NO: 243094 - DNA, 382 bp, Gossypium hirsutum
cccacgcgtccgcccacgcgtccgatcattatgcactttcttttcggctggatcaacactctactcttgtttgaaaataccttacaataaagaaagttttactgccttacaatgttttcgagtataactggaattagtcaaaaacactagaagcataaaaagtagtttatctggaattcgtgcatcaaatgtgactagatgcaaaagaaggttctttgcctgctcaaaagctagtagctgtatagcgaaaggagaggcctaagaagcaactaataagcacgacaacatgcagcaacaagtatgcaggcagagtataaacctttttaaatctttcagagccatacatatgctacagatgtgaagtgtattacataattaaaag

SEQ ID NO: 243095 - DNA, 364 bp, Gossypium hirsutum
  unsure (1)..(364): unsure at all n locations
tcgtttaccccctcataaatgaanttgttccgatccatccataacacccatatagcgcgggcagtcattctatagaaagccatgggtctactctcaatggaggacatgccttgaaaatatgctcccttgtttcagctcctgttagacaccttctacacatgggggaagccatcattctgagaaatttaagattactaaaactaggcatatagttacaaagtttctccattttgtaattttgattttcgagggtggattcattttccataatttcttgaatatttgcttgtgatctgaattgtatttgatccccgaccttctttgtgtaatataaaactttttcttttttattttataatggtat

SEQ ID NO: 243096 - DNA, 298 bp, Gossypium hirsutum
gccacgcatgaggtaacttgtatcctgcctgacgaccaccggtagaatgcgtgtctacaggaggtggcgacgaccaaaatccgacacatgctatgcacgccgttgtaacgactgctatgctcgtccttgggtgcctatgtcagtgtctctgacctattctgagaggtggcggcacctatggcgaaagaatacttgaaggaacggacgtgggtttcaacatcaactctgacaataactggggtgggatgatgccaaccatatttgcaggcatctatacttaatatatacaggcacctct

SEQ ID NO: 243097 - DNA, 308 bp, Gossypium hirsutum
ggatgagaaggaagaaagttttgagaagctgcaacagcaagagcgtgagaaggtcaagcagtctaaccccaatccttgaaatgcagaggaatacaggcgcagggcggatgaaattgcaaaattcataaagttctaggatgaagagatgcaagcttttgtgacagagagggataagctgatcaaagcacacgaaaagaagatggttggcatgagagagaggcattggcaggaagaagttgagcttgaaaaggagtttgatgctgaattgagccaactaatggggcaggtcactctaaatggctcaaaag

SEQ ID NO: 243098 - DNA, 380 bp, Gossypium hirsutum
gcatcagcagctacatatgaagatcttaagagaaaactcgaattctttcaatcaaaagtgaagcatgcagttgaagtactaaagcctcagtgcatcaacaacggaacaggcgcaggcgcgatccaagagttagaaggacttgcagaaatggacattaacgcaccatttcacgagcaagctcagccgtcgcagcaggtgccaacacagccaccgatactacagaacgaaggacaagggccttgatgttttttagttggtgtaggaaatgttttgacttaggcacacaaccatgatatatgtctgtaaagggaaacagggaagttgcagatcaattttttttttctttttgttgttgctgagggtgtctgaaacattttttc

SEQ ID NO: 243099 - DNA, 323 bp, Gossypium hirsutum
cccacgcgtccggccgaactctttcaggaccctctccaaaaccctcacccgctcattctccaccaaatcatcccaccagaaccaccaccagaaaacccacaaatatttagatcccaactccttgttgggcagctggaagacccccaacaaccccaaagaggccgagaagaaactcgccctgttgcgacgagactacgccaagcaagtaaaaaatgtacgcaaggagtacatccacgagatggagttgttgcgtcttgagaagctcagaaaagaagaggctaggaaagaggctatacgagttgctaatgaggagcgtaaaaggc

SEQ ID NO: 243100 - DNA, 265 bp, Gossypium hirsutum
accatatccatggcagtatcttaagctggatctcagttgcttgccattgcttggatctcagttgactttgttgtatttattgacaccatattgtaatataattacaatctttctcgcttaaaaaaaaaaaaaaaaaaaaaaaaaaaaaaaaaaaaaaaaaaaaaaaaaaaaaaaaaaaaaaggaagggcggtctatttaaaaaaaccaaacttaccctcgcctgcaaggcaataaatttttttttttttgaggtaacttaaatta

SEQ ID NO: 243101 - DNA, 224 bp, Gossypium hirsutum
  unsure (1)..(224): unsure at all n locations
ntcacatggacttcactcaaccttcatgaagcatggctcgaaaactgatttttgtctgcaactttaaaactcctgctgtatattactccaatttgcattgaaagaagggtattggataatgaaacagtatgtacaatgagatgagagttgatagttgctgctatagaaaaggattttatgtgagaccagatgaagcaaactaatttcatatcaagagatatttt

SEQ ID NO: 243102 - DNA, 376 bp, Gossypium hirsutum
agacaacatgtgtaagagaccttcatctttttcacctccacaagtgcgaaagtccaactctattggctggtaatgtggatgtacgaaactattattgacaattgagctactttaaccatggttgttagtataaagggtttttttttgtacttcagtttaagatatgcttgtccgggacttaatctcgttggcttatgcagttatctttaagaagtagcatccagcaagtacgaagttcggattccatcgttccttctttctttcgaagaaaaaaaatacatatattagtttctgaagactggaatctatatagcctttccactattgcttcatagattacaaatatttagatagatagatgatgaaattgaatgat

SEQ ID NO: 243103 - DNA, 217 bp, Gossypium hirsutum
ctctagccaagcaatgaatgatgtaggtgatttctgttatcgggtgggcctacgggggctgaagaaaagagttcatttttgcttccttaggaagaaaccaacttcattgaaattgtgcatctattcaatggagtaaatgcagaatttagagacggtcttctctatattattaaatctttaaataaatttattgcgatttcatatgcaattatcttta

SEQ ID NO: 243104 - DNA, 217 bp, Gossypium hirsutum
cccacgcgtccgagcagttggagtttggcgaggagcagttgaggcttcatagagagtggattaatgggtcttggacgccaccattggcgggagatgagcaagttaaggagtctgacagagcagtgaccgaagcaaagatgaaatttagcaaagttgtcacccaagagaagttaaagcgtgataatgcagcaagcaaaaaaaagtcaaagtctggttt

SEQ ID NO: 243105 - DNA, 358 bp, Gossypium hirsutum
atcaagctggcggtatcggcagagaagtctgttttggttctgtgaataccgatcaacaggtggctggtcgattggcagcaccagctgccccacagccattctcttctgttgggggtaacccgtttggctaagcatcctttcgctgcctgtaaaattgatggaaagttttggttttagttggaatcatccaagcgctgctataagattttcactcttgttcatttcagggttcaaggaattgatgtccgtattggcaatttatagttagtttgaaactcataacggaaaagcgaggtgcaaagcttatatgtagcgatggtactgcatgtaaatttttggggatctattttactttttt

SEQ ID NO: 243106 - DNA, 320 bp, Gossypium hirsutum
caacttctgaatccagtgtcaacatctcggtgtagctttgtgtaaattacgattagagagaaaagctgggaaagaaaatggcttcttgggcatttgcgatgtagctgtataactgatttttaggtttccgttaaaaattataattataaccttatctttcttggccatgtctttctctctaggttgttgtatatggaactctttccatgtagtttggcttgacattttgcagagcatcattgccaactgatcaatcctttgttattccagcgcttcaagttgatcttaaaaaaaaaaaataaaatcatcaaaaaataatt

SEQ ID NO: 243107 - DNA, 351 bp, Gossypium hirsutum
  unsure (1)..(351): unsure at all n locations
cggacgcgtgggaggaaattaaagtctagtttttaggtatgaagtatgaaaatgttagttaaaagaaatgagacctaaaccttctttaatcattggctccgccaaagccctgggtattcgagatttactatgtgcaattttatgcatggtttccgaatcctctcgtgtagttgtcatgagtggtttttaatccagttagtttagttaatttgttggctttagtttagattgtattaatttttagtttgtttgtaatgtataatggtttgattctattactcaaactcctcgtttataataatttgatacttgtggttatttgntaaaaaaaaatattaactaaaataaaat

SEQ ID NO: 243108 - DNA, 232 bp, Gossypium hirsutum
gaaaacaatcaacttttgaaacatgctgcattcttcattaggctttttcaaatgtccgaacacagaaaaatcatttcaattttgaggtctctgtgttattagatcaaactattgttctatttgcataagccttgtaatgtactttttatttgcagtacgtatcttattgtatatagttatgaattgggtgctgccgttgtacaacattttatgaatttacattacttgcgca

SEQ ID NO: 243109 - DNA, 302 bp, Gossypium hirsutum
gacaaaatgaagaatcgttaaaactaaagctacatcatactgaacaagtggctcttcgcatggaagaggcagcagaagttgtttggggacggtttctagaggctgagaatgttgctgaggtgctcatgggaatttcaaaggaactattaggtcgacttcagattgttcagtttaacatgaatggttcgattcaacgagaagctgagctcaaatctaaacttgaaggttgcattgaagagttgaatgccaaatgtttagctttaggaaaagcttgatatcaacaatgtggaacatgctgaaaa

SEQ ID NO: 243110 - DNA, 384 bp, Gossypium hirsutum
gagaaatcggattcaggtgggaatgacgagcactcggattcaaatacaacccctacttcaactgagaatggggatggagctaatggaggttctacaagtaattcggattccggtgaatcaaatggacagactgaaaaatcgaatgccggatcagacagcaattcaaatgctgttcagagtgaagaatcaaacaataattctggaggagaggggacacacacaaatgaaaattcaaatgctgaccagaacagtggaacatcgtcgaacactaatgataatgctggtgcaggtcagaatgagaatgatagtagcaattcgaacaatgacgggaatgcgaatgggaatggtggcagcacaggcaatcagagcaacaccaatgacaat

SEQ ID NO: 243111 - DNA, 219 bp, Gossypium hirsutum
tccgaattcccgtcgacccacctcggctgatccgaggaggctaccgaaagttcggtgggagaggtgctgggcggttcagaagtccgtgaaaaatttcacggttgtttaaaattggtttttgtaccttttttttcaagattgttggattgatgttggttgattaattaactgtctgtgaaatttaatgttggttgattatctaattaactcgattgatta

SEQ ID NO: 243112 - DNA, 352 bp, Gossypium hirsutum
cccacacggacgtagaaatggatgttgttgactctgccattgtctatggcgaggagagaggtgccgccataggcaccaccaaagacactagcaaaaatgctggtttgtattggcggtcgttccatctgacataccatgaactgtttgacgctcgtgtggaccctgcggaggaactgtccaaagagcgcttcgaagagtgcatcaaagatatggtgacaagaatagggactagtgttggtcaatctgttatcacttacgtgaactctgacatggctttgttatggactctcttgtctgaatcatagccttattaaaaccctgatgaaatatctgatctcaagtatgatatcaa

SEQ ID NO: 243113 - DNA, 389 bp, Gossypium hirsutum
gaaaaaattcggattctgctctcttttttctctatatctgtattgtattctcccctttacattaaaaaatttaaaggctttatagccaaatacaagcggtttctgcccattttcttgttcaagttgcaggatatgaagacatgagagtgaagcgcacggacgtggggcgggccatgcgcccacgtccgtgcgcgagtctggggtcgtgtgatgtgccgacgtgtgtggtagagggatgccgaacgtggggctgcattgcaagtagagggaaaccctagggttttcaaaaattccaaccacttgggcttatcaagcctaatttaatttgggtccatattttggtctattttgggccaaattttgatttcgggcaacaactttaaaatttg

SEQ ID NO: 243114 - DNA, 392 bp, Gossypium hirsutum
cgaagttgctttgtaagcaaagtttttagctatgttgaatccaaaagctggttggaggttgagactcaaaggggaaagccttcatggcagatgaatgctgctatgctatgttgaaatttggatgaataaaattctcattttactttttttttttttgaaacaaagttatttagttttcaataaatcgtatcggggagtcatgaaaatgtaaacccaaccatttatagatttatattttcttgaacatttatatagttattataatttgttatgtcaatgtattattatacagttatataaattttaacgtattagtaattcatgtaatataagttttgatacagaaaaagatgaaaatttcactttcaacaaacaatcagtgatgtgtattc

SEQ ID NO: 243115 - DNA, 273 bp, Gossypium hirsutum
gccaatttccctagattggcgaaactctctcacttcgattctttcacgatacacaacgaatccgaatattttcttctctttggttcaggctcacctaactgaagtgaaacataaatatcattttctgacccctttcttaatgccgaaagacttttagactccgggttctccccttggtaattatcatgaactgaagacttcccattgaaacttggaataaattggtgttccacattaactgctgcttcatccctacacttggtacccatgatt

SEQ ID NO: 243116 - DNA, 326 bp, Gossypium hirsutum
ggcacttccggcgctactgtggcagaggagaatcggcggcgaggagaggggggataaagaagcggaagtgagaaagcaaagcggaggaacgcatagttggaggcacgcgtggcgcatcttaacgtggaggcgcaggtttggcatgcgaaagccagggcactggaggctacagcggctccattacaagcgcagctacaacaggctataatgagcggaggggctgacgtcttcatgcacgacagtaagagaggggaggagggggtgatgtgcggtgaatggcaagcggtggacgcctagtttgtttacgtggaccccgaccgggtggt

SEQ ID NO: 243117 - DNA, 229 bp, Gossypium hirsutum
ggggttaataagattgactaaactccatattgtgaaaaaaaaaaacccaaaaaagaatggtcttttatttaaaaaaaaaaaaaaaaaaaaaaataataaagaaaactaaataaaaataaaaataaagtagtagaactgaaaaaaaaacctggaatttgttttcgataattactcgggagataaaggacaagataaaaaaaatcaacgcctttgaggattttatatatat

SEQ ID NO: 243118 - DNA, 385 bp, Gossypium hirsutum
gaaattttggtgaaaaagttacaaaatatggtaaaagccgactcttcagcagtctgtaactctggaggtgatgatggcaatgagatatctgttctgaatagtgattcaactagagctacatgtacaaaaacattcgaaaaagaggtcccctctgccacaagtgtacaggtggatgagccatcaaaagatgtatctcttcttaggacagcagctaggccttccagaaccataattgacggtggcactagtgctattccgagcaagcatgttgaggaaaaaagaaagacaggcaactttaaactgttatgtatgtttatagcaattctggttgcaatattttctgcattagctgtatattttttgagtgagaaacaagtcatgtttg

SEQ ID NO: 243119 - DNA, 360 bp, Gossypium hirsutum
gaagaacataatgagaattttcaaaaaattttaaatgcttgatgaaaattttcaaaaatttgggagccaatgtcccctggctcccattactatccgaccctacggtcgggtttgagtaacttagaatgcaaacagaataataagttggtgatacatgtttcaggttaggcatatactgaatgatcgaaagaagctacgtaaagtgattgatccagagatggctcagagttcatacaccattgaatctatagctatgttcgcgaacctggcatcacgttgcgtccgtgttgagagcggaaagcggccgtcgatgccggaatgtgtgagagaactccaacttattttcagcacaaatgcaaa

SEQ ID NO: 243120 - DNA, 390 bp, Gossypium hirsutum
cttttctgttgctattttgttattttccttttctctttctgtttgctgcttgtttgttgcgtctgttgcaggtacagctggagtggacgcacgtgcagagacatcgttgatgcgtgcagagaacccctggtttcagccacaatgcaaacagttccagaaaccgcctccaatattgggctagggttggctggtttgaattttagtgggttattttgggtattgagtttattcgggtttttctaggctgtttaggtatttcgggttttgtaatcgggtttgggtttacggtctgtttcgggtttgggtataattagattttggaccttaattgtttgggttaatttttggactggtattaagttagtgggttttgggttgaggcttaatgta

SEQ ID NO: 243121 - DNA, 387 bp, Gossypium hirsutum
gttacatcctgcctccttataggctgataggtattcgaaattaaattatatatttttataatttaataatttatatttttataaaatttaaagaattaaattaaaattttattattttttaaagaaaatataattttattattaatttaaaattgtataaactataaacttacggaagtaaaaaaaattatattttagaggtcgcggtatttgcgactgctcccccagttctcgacgtcgtttttacatatcattctgttctgtgctgttagaaaattgttgccctacttgagttcttgtacactcgcagtcttggaatgtgacgagtgaagactcgttaaatcactacacaaagtgtaaattattgaagtttttttttttttgaaa

SEQ ID NO: 243122 - DNA, 388 bp, Gossypium hirsutum
cccacgcgtccgggaccaaatgatcctcgttggttcggtggacttggtggagatcacggtttccctggcgcacaaccgggtgttcctcctggtgctcgttttgatccatatggtccacctggtgttcctggttttgagcctaatcgatttatcagaaatccgccacggaggcctggtggtggtactcatccggacctagagcattttgggggtggggattttatatagattagaatttagggtccttttggtttgtccatggatttgatatcttttactattctgttaaatataagtgaaggatctaaagattatacttaaaataatatattaagcatgttaatagtgctttttctttgataacaaatatacagcaaattgaatagta

SEQ ID NO: 243123 - DNA, 373 bp, Gossypium hirsutum
gggttcatctttctctcttttgttgttgggttgaagaaaaatgacagcacaagtgagcagttcattggtaagggtattgagtggtcacatggaagagcagcatgctgggaagtctgatatcttgattacaaaagatttgctgggaaatttgtcaaatgctaaaccaacaacacccaaagctatagatcttgaatttaaggtgaaaaattttagatttatcttcttcttttttagctttgtttctgcaacaaatcccaagaattcatttatgtcgatttaactctctgtactatagttttcagttcacaattagtttgcttctccatttatattgaatttaaaagaaacagagtatttattacagttttttaat

SEQ ID NO: 243124 - DNA, 170 bp, Gossypium hirsutum
agtcgaactcttggtggagaaaggaaccgcttccatcacctcagatgactagacatgggccattaacaagagcctattacacacccggctggaaaggccaaacgaatacaacaaccacatgattatatgaaactgtataacaagcagaactaaaaggggctaacgaactg

SEQ ID NO: 243125 - DNA, 318 bp, Gossypium hirsutum
gccggtccctggtattccatattatctcacagagtacagcaccctagcgctctctgttgcctacttccatgtcaacctacccaggatttattgattaatgcagcaataatatataggctcgccgagaggcgaatgccatatcatgcgacccgtgtgaagctaggcggccaggatagaccatctctgcatgagggacctgttacatgaactgtgctacgttagtctgcaaggtcccactctccggcgtaaatgtatgtggacacataccttcgaatgccaacatctgtgatacgggagatgcagttataagagtgcatg

SEQ ID NO: 243126 - DNA, 298 bp, Gossypium hirsutum
gtgatgcgaagctatctcgtaacatccctgctcgctctgggaagactgatggatttgggcgtcctgttgctgtgcagatggagtggacgcacgtgctcagacatcttttgtgcgtgcagtgtagcattgtattcatgcacaatgcaaacaggtacagaaaccgactccaatatagagctgatggcggctgattgagctcatagcatggtgattgtgaggatagcacatattcggcttacaatgagctgatgacgtatgaggatgccctcaataatggtcttacctgcggccgtgccaa

SEQ ID NO: 243127 - DNA, 297 bp, Gossypium hirsutum
agaaggtctccaccgccatcattgttgctgccgcctcaatgagcgccgtcatggccgccggtgtcccagctcctgccccttccgaaggtggttctggccctagctcctctcctgcttctgctgcagcaccgggagcggattccagcgtcgctgccgccaccttgcctgttcttggatccttggttggggcttcccttgtttctttcgtttcttactttctgtaatcatctaaatgtatgaaaaccatgcgatgaatattgaaaatattggaaatgaataaaatggagctttgatgaa

SEQ ID NO: 243128 - DNA, 395 bp, Gossypium hirsutum
ctttttgtgtaagatcaacaccagttgaataaaccctttcatgcccaacctgatttctcgcgtactaaagcaaccaaaaagcatagaaagaatatctgcactgttcatctgttccttgttcgaagaccatggatatttcctaaaaatgtgataacaatcttcttccccaaaaccacattgaggaagcaacattcatcactattcttctctatctaagatttgctaaagtagggatgtaattccaggcaatgcgccagatgataattgtaatcttagatggtagttgttgattccatagcttttcaaaaagtttcttattttcggtctataataaataattgctaggatccaggttagcaatttgtaatagtttataagcactatggactgagtat

SEQ ID NO: 243129 - DNA, 390 bp, Gossypium hirsutum
aaaaaaattctccttacatcgttttaattcgggctttttatagccactatacatagtattttacatatttaatgttatttcctgccatatatgtgttgcctctgtcgttcttctttccccttttgcaggtaccaacgaggagatttagcagtgaacgaatgctgacaacggtacaccggcgttgattcgggcgtcgaccacggcatgatttgaagcctggaatcatggcctggaaccacggcactgatagtgggtaactggaacgacgcgagatgaacagacgcgttgattgaaatgtttgcggcgcttagggtttctgaaaccctaggcctctctgtcttccattagtaaattgggccacttgggccctgtgtattttgggtagcatac

SEQ ID NO: 243130 - DNA, 288 bp, Gossypium hirsutum
ctacaccctattttgtaatcgtttacttgcatatttgcatctacttaataataatctcgtgtcaactaatttaaaaaaaaaaaaaaaaaaaaaaaaaaaaaaaaaaaaaaaaaaaataaaaaaataaaaaaaaaaaaaaaggagataacgttaaagaaaaaatgctgacaacggcacagatgaaaaaaaatttaacttttaccacgggatgattaaaatgtatggaatggtggaatgtaaacaaagcactgtttgtgaacaaccggaacgaccccagattaaccgtct

SEQ ID NO: 243131 - DNA, 384 bp, Gossypium hirsutum
ccgggtttcaaaagaacgcggtgaaccaaatattgaaccccattgatcgttgtgaagctaattacaaatcattcaatgaattacaaggtctaacatgggaggaagttctgaataagggaacaaggcatttcagtgaggagttcagcaagttttgtgacaggaaaatgaatgaaattgtggctatgttgggttggaaccgagcttggcctgaaccattgctacaagcctttttcggtgcctcaaagagtgtgtggttggttcaccttttggccaactcggtgcatcctggtttaccaatcttcagggtggataaaggggtaaggtttgattcagtatacatggaggacatggatggagaaagagccaagaaattggttccaagca

SEQ ID NO: 243132 - DNA, 379 bp, Gossypium hirsutum
cccacgcgtccggtcgaattaagtaaaaagcggaagatggctgcaagcttagcttccagatgctccagggtgggacgttcattgatggatggccttcgaaacaacttctctaatttaccaatcacatcaagagagacaacatttggcagtttcctgtatcagcaacaaaggactttcatacagatgagaactgttctcaaagtagtggacaactcaggggcaaaaaaaggtaatgtgtatacaagcattgaaggggaagaaaggggcaagattgggagacaccataattgcatctgtaaaggaagccatgcctaatggaaaggtgaagaaaggaaaggtggtatatggtgtggttgcgcgtgctgccatgcaccggggt

SEQ ID NO: 243133 - DNA, 394 bp, Gossypium hirsutum
tccacgcgtccgaccgtagacaaatccaaggagtctgtgctaaatgagtgaaaaccaggacatcccttgcccaattggggttgtttcggactctgagagtgatccacctgaaaatgaaccggatgatacccagacgcatatgtcgatgtcgactggaagcaagaaaagaagctgggaaatcgataattaagtggaagctaaaggaaaagccccccagaaatggatatcgggaaaagaagcttcaacctcccagcaacagccaaaaccgaaaagtgaaaagaactgtggggaagctgtgcaaaacagattgaaaaaatttccaccatcaagttgacagacgaagaaagacggtaaatggtcctaattgaactattgaaaaatttccaccatcaag

SEQ ID NO: 243134 - DNA, 366 bp, Gossypium hirsutum
  unsure (1)..(366): unsure at all n locations
ccacccgtccgtttcctccagagtccaggtccttagttttagcgccatctttcgtcccaaaatctcgtggctttgtgctagggtttgaagttaacaattcttcagaaagaaaaatataaagcagggtttgaagttaacaaatttttcaaaaagaaaaatataaagcagcaatgaatccggttcacttncaacccgcgccgncttcaccttggttcccaatgttacttccggaacctncgaattcgagtacattnttggagaccagaaatgtgcgtgatcccttagagaatngcaagataccctcaatcttgccaacgccgtgcaaaaggagttggaaatactgatgatgataaaagatgggtcgat

SEQ ID NO: 243135 - DNA, 405 bp, Gossypium hirsutum
cccacgcgttcgggaggatggaatcgaataagaagaggagaatgaagaggactatgacgattatgagagtgaatacagcgaagaggaggaagaggagaaggatacgaaaaagaagggccctgctgctaatggtgcagtgcataataaaggctcaagctctgaaggttcaggctcagatgaggaatgaaaaataaatgccaaatttcatttagaagaataaaaccctactttatttttctcttccagaatatctctataactttttttttaaatagtgattaaattaaggaggataagcttcagagattcaaagtaactatgatactacagggattagacactagcgtactatttattaaaaaaattacatggatgtatcggattcgggttattttagagtttaaa

SEQ ID NO: 243136 - DNA, 266 bp, Gossypium hirsutum
cccttgcgcggttagtcatggacaagactcctcatatttatctggcatttgatggtgctgaggccttcgcaagggaacaagtaggtgacatgcaatctttgatttgctaatgctctttaacatccatgtcactgaaaggtctatcgggtctgttcttaaattttgtaaaaatctgaaccttttattctttagcttttagttccttgttgcttgcctttagtattatttgttctactttattcctacttaaacattcaaggtttttc

SEQ ID NO: 243137 - DNA, 99 bp, Gossypium hirsutum
gtgggatgcgatgtttgtgataattaggtaggtcaaaagtacaaagtctcctcgtaagacgcttatgtatgaaggtgatcgcttcaagtgcatagttac

SEQ ID NO: 243138 - DNA, 213 bp, Gossypium hirsutum
  unsure (1)..(213): unsure at all n locations
cccacgcgtncgnccacgcgtncgtgaaaaatgggggagggaaatctcgatggtcacactcccttctccttcaacggctggatacggtgaaattttaccatcaaacttattccatatccacttcgaagcgtaagtgctttccctaacccaaactcgtttccatacatattgaaccttggcgagctttcaataatcacacttcggggatataaa

SEQ ID NO: 243139 - DNA, 223 bp, Gossypium hirsutum
ggataaaatccccaaagacgtccttcatgcaactggtacgatcaacaaggatgacaaaaagtcatctggtttaagaaaattacgagttgttttcaagggaatagatggggttgcagatatggatatggctggtggtgcatgatcctcgcaatataaaatcatactgatattgttagacaaaattttcaatcatctctgcagtatttatggaagaatatatgtt

SEQ ID NO: 243140 - DNA, 158 bp, Gossypium hirsutum
ttggatcttttaaaaaaagtttgctgggaaggattggtgggttcttcttaacaaaaaaattaaggccaaagccttgggccttggtgggcacccctgggccagtcaatttcctatttacttttaaaccctattttcagggaaggggtttccttggggga

SEQ ID NO: 243141 - DNA, 404 bp, Gossypium hirsutum
  unsure (1)..(404): unsure at all n locations
gaagaaatggcactggattgtgtaaaccatgtaagtgccctggatgaatcgttgccagaattcgaggaaaaaaggctgtccatcctgaatcagcttaaggcattggaagataagttactaactatgggggatgatcaattcatggaggacttgaaatcaattcagaattccctttgatggtcttgatgagaagaatgacctgcgcagcanagaaggtaatgaattttcaaaagaaacaagttgtggcaaaacaatggcttccatggcaaagagtctccttcctttcctggatgcagctgataacgggactgaagaaggaactatgtatggaaaacaaggagaatctgattctgaaccggtagtaatgcagacatatcctggtccagaactggagttggacccca

SEQ ID NO: 243142 - DNA, 172 bp, Gossypium hirsutum
cttccgccaacccttccaaaagattattttgttcttaagctgggaacctgaacttagccttcattaagggtgggattggagaggggaaaaatttttttaagggtaccggggtcaaaggttattaatggttattcttttaaactatgttttagagcgacttaataccttcttg

SEQ ID NO: 243143 - DNA, 264 bp, Gossypium hirsutum
accacgcgttcgtctatacatgcaaaaacttgctaatttttctatggttaagctgaaacagttttcttatgaaaagcggccactgaccccggatgaaatatcgaccacatacctccgttttgttccccaaatatatgttctctccgctgggttcctaaaagtgcttctccctacgatggtgatattgccgctttatacgcatataaagctttatcatttgcggcttgcaaacgctctcttatctgctctttgttactctaccta

SEQ ID NO: 243144 - DNA, 384 bp, Gossypium hirsutum
  unsure (1)..(384): unsure at all n locations
cggccccgtgggaaaaaaaatttaaggcctaccctctttttaattcggccgacctttaagtcttttcgcctgccgtccaaccttattcctggatcgacggtaataatacaaaaggcctaatccgcttccgttcgaccgtaagtccaaaggttcttttgaaagtctctgaatccccccccaaaaaaactccgattgcgacgaagtgagcgagggatcgaggggaaccaagaacggaggtacgagacgtgctgggcgttcggtacgatagctggcgtacgggtgcgcgcatgactactgaaacgcntgagcgtactgaggcgtggaggctgaatggttgcggcgccatggagagagccttanggtttcatttggccgatcctagat

SEQ ID NO: 243145 - DNA, 340 bp, Gossypium hirsutum
  unsure (1)..(340): unsure at all n locations
cccacgcgtccgcccacgcgtccggtctttgctgtgctgttcttgtcctttgtttgtcttcttttgcaggtacggaggagaacgtggagcacgtacagaggctatgcgctggcgtacggaggtagctggcgatcgggggctgctggtggctcagctgctgcggcgcaaggcgaaccttagggttcctgaggattgcttgacctttgggccaatcgggctgtatttttgggtctaggttaatgggccattgtatttggttttgggcctaaacaatgggtttgggctattggattttaattgggtcttgggttatgctngctggtttgggggttgttaatat

SEQ ID NO: 243146 - DNA, 396 bp, Gossypium hirsutum
  unsure (1)..(396): unsure at all n locations
caaacttgttgaaaactctcatctttcttatttctcccttccgttctttcctcactctttctcttatttcaccaccatctcctttccttgatccttctcataacacctaaggatcctgagttttttttttaacctttctttttgttcttttatcagattttaggttcaaccttaataaaattgtctttctctctctgttttcctcggnttctgcgctgtcccgactaccaccttttctttctcctttctcaggagcatagataaagggataaatgcaaagctaaaccattggtcactgattgaagcattgccaaatggtgagcttacgcagacgcaagctcctgggactctgctcttggacgagttccttttttactccactttctagatttttcg

SEQ ID NO: 243147 - DNA, 385 bp, Gossypium hirsutum
aaatttttaaaaatggccaactctctgtggtctttcaagaggtgacaccgcctgagccagtatgaagcgtaaggcagtgatgaggacgcccttagtgctgcaatctgtgaggtccctattcttttgggggataactgctgcaattgaattgtaaggggtcttcttttcccttgagggccttcccaaagggtcatagcagtctcatttctcttggcggccattgcatagataagagcaacctttgactcggggtcagtactctccagtagcatgtcttccttttcaaccctcagctgccaagactaataaggtccagggaattagttggccgtaaaagctgagaggagcattgatgaaaagaggtgtgagcaacatgcaaacatgt

SEQ ID NO: 243148 - DNA, 153 bp, Gossypium hirsutum
aaattttgtaaaaaactctaatcttttttgtctttcacgaggggacaccgcttaagggggggttaattttaacgcaaggtggatgactcgatccttgttataacacctaaggatcctaatcttttgtgggaaccctgctgttagtgaattgat

SEQ ID NO: 243149 - DNA, 404 bp, Gossypium hirsutum
cttttctttcattcaaatcgaaggcccctctcgcaaatggagatcgaaacagcgcaatctccgaagacgaaaatggagtccctgagatccatctgcgacagagaggttcgggtccatcaacagaacctagattcttttacggccttgtttcccacttctcttcatttcatcaaggccctggcgcaggatgctgctcaagctcatgttgaactcgcaaaattgaaagctaatttaagagaagccgaagatgagcttgtcaaagttttagcagcgaagacccgtaaagaggcaaagcagatggctacgagggactcaatatctgctataaaagctagagtagaagaatttaaaagaaccgtccaagtacaaaaagctaggagggatgagttagaatcaattatatc

SEQ ID NO: 243150 - DNA, 246 bp, Gossypium hirsutum
  unsure (1)..(246): unsure at all n locations
gggttttgtcatcaatttcattttatcctctcttcctcgctgatggcggaggaaggctacatcctccaggtatgtttcttctcccgtttttaaggcttctgttgcannnnnnnnnannnagcacaccatattatttctttttaaataaaaaaaggctttcttgaaaaaaaagtttctttctttggatatattggatgaccgcccctataactgacttgtttgttggtgttgaaatgcattttttta

SEQ ID NO: 243151 - DNA, 399 bp, Gossypium hirsutum
  unsure (1)..(399): unsure at all n locations
cccacgcgttcgaaaattctcccgtctaaaaaaaaaaaaaaaaaaaaaaaaaaaaaaaaaaggaaaaaaaaaaaaaaaaaaagagaaaaaaaaaaaaaaaaaaaaaaaaaaaaaaaaaaaaaaaaaannaaaaaaaaaaannaaaaaaaaaaaaaaaannnggggggggggggattaaaaagaaaaaaattaaaaaannggggggggggcgtttttaaggattaaaatttttttccccgggtttgggaagttttattttttttttaggggcccaaaaattaaaatcatggggccgggttttaaaaacggggggtgggaaaaaccctgggtttccccaattttaatggtttggaaaaaaacccctttttcccatttgggaaaattaaaaaaagggccccc

SEQ ID NO: 243152 - DNA, 377 bp, Gossypium hirsutum
  unsure (1)..(377): unsure at all n locations
ctaaaggacttcagagtctgcaagtgctttcgttatcatgtagcgtgcaagtaaggcatcaactccatattgaataactcggtgcattatcgactaattccctaacaataaccagttatcaatttatatgttatcgtataatgtgacattgacgtacaggcagaagttttatgattagcatgcggatgttactggagaaaagataaatagaaccaccgactatttgctgaggcttcttgttcttttgccctgtcttctattttttttatttctcgggtcttccagtaatgtagttcttacagtttaccttgttgggtttctgcaagatacattttaactgattacaagcggatatctcaatacagaacttangagat

SEQ ID NO: 243153 - DNA, 391 bp, Gossypium hirsutum
cccacgcgttcgaccactcttccgtttattttgtcggtaccatcttccaaaaacaagccggcttccaaaatcaaaaccggtcgatgctcattcctctctccaaagcctacctcttcctcttctgtcaatctggttccctcctcctcccccataatctatcattgatgaccatctgaacatttccaattaggtaactctctcttccattctttaagcaatccgcggctaaactatgtgctaggatattagcagatctgggtatgtctttgagctggatactatgaaaactccttttcaattgttgtatgtcccaaataatagcccctattactgatttatctcgaatgtccgactgactttttttaataatggtttttgccatcttcttcta

SEQ ID NO: 243154 - DNA, 304 bp, Gossypium hirsutum
cccacgcgtccgctttagaaatgtctaatagctgttctgtgtcacattcccaagatatagagggtgctgatgaaaacaagtggcaccatgttcgaaagggcaccaaaataattgtgcaagttgtgaaagaaggattgggtacaaaaggtcccactctgactccttatccaaaattaagaagcagattctggatattactcgcttgttgcgacagaattggagtctcaaaaaagataactggtgttgagcgtacacgcctgaaagtcatagcaaaaactttgcagccgcaggggtttggtctaac

SEQ ID NO: 243155 - DNA, 303 bp, Gossypium hirsutum
tcgtcgcatggcgttcgctatacaaatgtttgtttgcagtactggggaacatttccgaggagtagggggtgctgatgagaacaagtggcaccagtgtcagaatagggcaccaagacatttgtgctcgttgtgaaagaaggattgggtacaaaaggtcccactctgactccttatccaaaattaagaagcagattctggatattactcgcttgttgcgacagaattggagtctcaaaaaagataactggtgttgagcgtacacgcctgaaagttattgcaaaaactttgcagtcgcaggggttt

SEQ ID NO: 243156 - DNA, 330 bp, Gossypium hirsutum
gtcggagtggctcgccgcataggatccatggattgtttgagagggcactagctatcgataaatttcataattcagttatactctggcgattgtatgtcgcatatgagattaacgttgttcacaatccatctgcagcgaggcgaatattttttcgtgctattcatgcctgtccatggtcaaaaaagctttggcttgatggttttctcaaattgaactccatcttaaccgcaaaagagctgtcagatcttcaagaagtaatgagggaaaaggagttgaatttaaggacagatatttatgaaattcttttacaagatgagatactgtcatgat

SEQ ID NO: 243157 - DNA, 387 bp, Gossypium hirsutum
cactcatgtcagtaattgttctgatcaaggcagtgacatacattacttctttagaagaactgagagggacattaaatcgaaaggggaacatcaaagtgaaacaaatatcacaatgacatgcataccacatacctcgaggacacgcaaggtattatagattgcaggggaattgaggctgcgcagatgaggatccaccttatacgaatcaatgacgacaaagtgcgggtcgctaggtgttatcgcggtaccggcaaaactaaatattcctgcaggaaccatttcatatatgtgagcaattgcaggcacaaaaccagaaatgcagtggacaaaatgctagaaatggatattaggggttggctgcagaacaaatccgcagatacatttaca

SEQ ID NO: 243158 - DNA, 218 bp, Gossypium hirsutum
aaaaaaaaaaaaacaaaataccttttaattctgaccgctatacataaaaaaacggggccattgcaaaggaacttgggcaaataaaaaaaaaaaataaaaccatgaagaaccttaaatctgggcggcctttttaaaagaaccatatttacatacgcgttaatggaaagtctattcttttatttaaatgcccctaattctaatgacatggcccttatttt

SEQ ID NO: 243159 - DNA, 254 bp, Gossypium hirsutum
ccatttatttggacgaccgacggttcttatgtgatggactgacctgcggcacgctcgcagaggaaacgggcgctgccttgttatttttctaagataatcctgtttaacaaaactctaaatccacgttgataaatgactcaagaggagtgagagaagtataaactatcgaactatacacatagaccaatacttttaacgtacttctacttattgagggaatcggacgcgggatacgggccctttttttggtacca

SEQ ID NO: 243160 - DNA, 354 bp, Gossypium hirsutum
  unsure (1)..(354): unsure at all n locations
gctatgctttcagatgcgcatgccatataacggagaaatgtgcctctgaagacggtcggttccttttgaccttgtgataattaatgcgcgtagatgggataatctgcttctatatgtactttttgatttaaagttgaatggcttagataaatccttttgtgaaaaaaaaaaaaaaaaaaaaaacaaaaaaaaataaagatacaaacaaacaaaacacaagcatgcaacatcatagnncttctatagtgnaacctaaattaaatagaggggccgccctttaagaaaccaatgtttgtgaaagccgtggggggggcaaacttttttttttttaacccgggggggcttttttggggg

SEQ ID NO: 243161 - DNA, 301 bp, Gossypium hirsutum
cccacgcgtccgcaaatgaaagcatggtgaaaaaagaacctcctcaagaaaccagcaagctcaatggaattatgccggagggtgctctaagtaatgatggatataacctggaatctagcacaaggagtgctcaagcatctgattctgctggaattcaaactgaaatgagcagtccttcctctctggcaagtcagcagaacatcaagaaaacagagccacttgtgcggaggactcctccagatgacgttggaagttggcatcaaaggagtaatgctgatagagttcatcgagaaaacaaatt

SEQ ID NO: 243162 - DNA, 324 bp, Gossypium hirsutum
  unsure (1)..(324): unsure at all n locations
attgaagcttgtattgtgtggaaaaggtctctcttcaaaatcttcaagacgttgatgttggcaagccttcttccatcttccatctgaccatggttgatcacggattttccgcactcaatggcacacatccatcagttcatgagacatgcattcagctcagcctcagcacatatttggtgtgaatttttttcatctttatgcaaccattaatgatgtcgatccttctcccacttgcagtctgaccatggttgattgcggatttgatttccctgagcacatatccatcatttcatggtacatgcattcagcanagcctcagcacat

SEQ ID NO: 243163 - DNA, 363 bp, Gossypium hirsutum
cccacgcgtccgagaagaaccacctcttgggcctgctgctaatttaggtctttttacaaccaatgatgaatttgacatacctttgtggtcattacctacgggaacacaagatggctcagggtttcaactatttaatacagatcccgatgttgcagataccttagttgatctgcagcgtagttctctcaattgcccttcgactatgaatggttatccattggctcctgagacaactatgggatctacaaatctagtacctacttcttccattggtcaggtggatacaaatctaaatgacagcttggttgacagtaccttctttggtggagaagatccctcacttcagatatttcttccaacgca

SEQ ID NO: 243164 - DNA, 420 bp, Gossypium hirsutum
  unsure (1)..(420): unsure at all n locations
cccacgcgtccgcccacgcgtccgaaaggctacaaaactcgcagcggatcccactacctcaaaaaccatcacttttcccctaaatatttgcattgatggttacaaagccattctcaaaaacaaacaagcaatccttgatgctatctctaaacgtgacgctgatgacctaaacatggagttaagctctaatgtggatcatataagccagtgcgaagatgcgttcgaagaagccaaaattaactccccaataccagaactgcattcgttacttggcaagattattttcaacagtataaacattggtgttgatatggttgattttgagaacaagaattaattttaaataatctataaatgacattaagtctataattatatatnnatttgaaaataatttattttaaatttgatgccctttac

SEQ ID NO: 243165 - DNA, 273 bp, Gossypium hirsutum
  unsure (1)..(273): unsure at all n locations
gtcgttatggggcattttaaatcgcaagcttagttaacacaacctttatatgtttttttatctatacacagtgcaaatatatctcaattataatatgatttaaaataacaaaatctcgtatcatcaagtacgaatctgagcttgcgtggctcatctctatctcccgagggtcttcagttgccgatgatgtcccccgctttaggtgagagttttgcagcagctacgagtggtggatggatggatggtggcgcccaaaagcctncagatgccagc

SEQ ID NO: 243166 - DNA, 341 bp, Gossypium hirsutum
gtagaccataaacaacttcacttcctccaaaaatattagcaatttctccctttccaatatgaaaactaatcgaaagctcaagaaatcagatccagcgtcatccaaggagttctatgcctaatagattctgggctgtcattaagaaattcggttgatttaaaggttgaaaaaggatttgcactatctgcatccagcaagttaattgcttgtgcttgtagtaacggacaataacggacaagtacagctcttcaatggtgaggatcttggatatgtgggaagcctattgtactctaaggccaaatcatgccatggagaaaatgatcttttttgccctaaaagct

SEQ ID NO: 243167 - DNA, 238 bp, Gossypium hirsutum
  unsure (1)..(238): unsure at all n locations
cctgcatatgcctccgccatgaacggngacgatattgcggagtggagtactgattttaaggcaagaaactcattcatcttcccccttaccataataccccaaagccggattttgattattggtggtcaaaggctgcgtcaacataaatagtggctgccgaacttctggtgttctgcctctgacgtatgttatcacctaagtgggttcctggagctccatataatccatgcagcacaac

SEQ ID NO: 243168 - DNA, 166 bp, Gossypium hirsutum
ctgctactggattctgtaatggctgtttcatttcttctcgcaggttcaactgatgtggaagtgtacagaagtgccatcgaggctgttgatggttgctacggcgcatgagaaccctagggttctttagagtgttttaatttttgggctatttgggccttgtatcttt

SEQ ID NO: 243169 - DNA, 348 bp, Gossypium hirsutum
cttagcttgatttcgactccatgtaatcatgccgttaacttgtctacaatggttgaagagagatcaaaccttgacagcagtcagcaaaagggtgaagcttcaacaataaaggttcaagatgaacaaaatctaaataggaaaataccgagctgcttaacctcaaagttaaaccatgtcaaagaatcctcatttgagaaggagactcggaagaaacttgatttcgaagaagttgcaagttctgtatccagagaaagaaaagggaataaatctatcatctctccggattctctgaatttcaaacggtcaaaatcaagtagagtccttttaccttcaatggaattttggcgc

SEQ ID NO: 243170 - DNA, 377 bp, Gossypium hirsutum
  unsure (1)..(377): unsure at all n locations
ctaggaatgaactctcgaaggcggtcgtttttacaacattacttctaggattccatttgcccctaagcatggttagttggttctaattatatcatctaaatgaagatttttttgtgttctggtgctagggactatgttactcgaactcgagggtttcgggggtcagtttgcttgctgcaactccatttgcccgaaagcattgtttgttggtactaattacatcatctactagttgttattttgcagttgccagggattagcaaccattgttttactggaaattccagattcaagacatccaacttcttgtattctggatataagttaatgaacaccacctgtgactngattcctagtctattagggttgattttaat

SEQ ID NO: 243171 - DNA, 389 bp, Gossypium hirsutum
gaacctttcattctctttgggttcattaagtagccacccaaaccaccatcaatttgatggctgacggtgcacgaatggagatcggatcttgctgaagaaagcctcacccacgaagatccggtaagagtactcctttccccttttttttttaaaaaaaaaactttaaaatcctgtactattctgtcaaaaacaaggcaagatccgacgaaaaagaagagaaaaccaaccctagcccgaatcaccatattcctgagacgtgagggctttcatcggtggtggttcaagcatcctttttcatcttctatgttaaaataatgcaagcaaatcaacaagaaagaggggaaaatttgaaatcacctttagatcactcttttgaattctttctacta

SEQ ID NO: 243172 - DNA, 149 bp, Gossypium hirsutum
tgcatgttcatgatgaatcaatgtttcgtgagtcgctaatagagtcgaaactggaaatgggcattgaataaacggatctagcatattacatcaaaatacacaataaattagtatgatgcagctggggcctctgttactgaagatccaag

SEQ ID NO: 243173 - DNA, 286 bp, Gossypium hirsutum
gaggaattgagtggtgggccattggctacacttgggaattaccaacaacaaggttttgaagtggtttatgatttggagaaaaggaacgttggatttgcaagaagaaaatgttcttctttgtgggatagtttgaaaaattaagttctgattttgggcaaaaagcgaaacttttcgagttttgcgagttgttccttttaacaatatcgtacatttcgctttttagtatgtgcacttcaattcttactttatgggacagagcattgttaatactttcatgtaaaagttt

SEQ ID NO: 243174 - DNA, 369 bp, Gossypium hirsutum
gagggaattgtcattacctgaaattcgtaacatgctgatggataaggccctgcgtgtcattcgtaaaaagcttaaagacttgagctctgtaactgaagctaaaaatggtgacaaagttaaagggaaggccagagagaaagaaaataggaaacaaaggagcatggcaaatggagatggatgtgataccaataaagatcatcagggcaagcagcctgtgcctgcctcttctcctgatgaatctggtagagggactgcaccattgtctataaatgttcctgatcccgattttcataattttgacttggatcgaagtgaaagttcttttgaagatgaccaagtctgggctgcttatgatgctgatgatgggat

SEQ ID NO: 243175 - DNA, 318 bp, Gossypium hirsutum
ctcaagttctgatgacgatgagaagaagtcaaagaagaagaaaaccaagaagaagaaaaggcggaattattctgggtcaagttcttctggtggtgcagagtttgataagcataagaggcagagaataaacaagcattcttattcatcagaagactctgactctggcaggcaatacaggactaaagaaagccgagaaaagcgttcatatacatctgaaggttccaaatctaatccagaaccctgtggtaaaaagaacaggtcaaagcattcttattcatctgcagatgactttgataggcattataggaagggcaaata

SEQ ID NO: 243176 - DNA, 342 bp, Gossypium hirsutum
gcctaatccgtgttttccccttttctgctattccattttttgccctcgtcctcaaccttctgattctacgacgcctccttgcacaggttgttgttcatcgaactcttccccgatttccctggttacacaggttagttttcctccccaagtaaaactcatctgcgatttgtgaagagaaacttgaggggacaaatctgctctcccttgctattcctacttaactgctttcgatcttttgtttttgttctttggcatgctaatgagctttatgattggttaactgttggttggcatatttaatcatgctcaaacttcaaacaaatattatttgggggaatttta

SEQ ID NO: 243177 - DNA, 319 bp, Gossypium hirsutum
  unsure (1)..(319): unsure at all n locations
cccacgcgtccgcccacgcgtccggtcattggaaggcaaggagagtcttgtgattcagtttgcaagtcaaatggacaatcatgcgtactaaataagcttttgatacttaaccagtgtgatattatccagaaatatatgagctgcaaaggagcatgcttggcaagcgttggacccgatcaacctgctgaagttgtagatgatgctcccaaaaatttgaatccaggagcatgcttgtatactcgaacacaatcaatgctatcttgtgatggttctcatcggcataccangaagacttgtccctgtgcatagtgcatcatca

SEQ ID NO: 243178 - DNA, 336 bp, Gossypium hirsutum
ggaagtcaatggcgaaggtaaacagcatgccacagaggaaagctcctgtactccggtagacgaagatgtaaaaggaagcagcattatgagtctcagagcaaatgctccattggatcaacctacagcagaaggcgtagtaactcttgatttttcaatcataaagcctggtattgccgcagacctgaaatttgggggatctggttcttttccaaatttaccatgggtttcaaccacaggtactggcccacacggtagaacaatttctggcgtcacttacagattcagcgcaaaccagataaagattggttgtgcttgccatggtacccacatgttccc

SEQ ID NO: 243179 - DNA, 325 bp, Gossypium hirsutum
actagaccgaaagaataggacattacaaactccactgaataaagaaaaaaacataacttcccattattgccctttaccactctccctcacaaaacacatcaggccaccataccttaagccctgtcttatcgttcttgttcggttattctcatcccgcaacaatcatcgacatatatctcgacattgtaaaaagcttctaaaaagcttctctaaatttgatacgagtaaagttattatttccatcaatctcactttcattgttgctcatctcaataacatgggatttcaatttcagtattggaagattggttaatgcaagtatgtc

SEQ ID NO: 243180 - DNA, 221 bp, Gossypium hirsutum
tcaattatacctaaaaactatcccttttctttcttcaccccaagacaatgaaagcggaggcgattatattgctgtttgtcatattccataactcagcaaatgcaaacccccaaccgccatgctatttcaattgcgctgactccttaattcttaatcgcaaccacaatatccttaacaccttggccaaagacaactcttcaccctatctcatctattttccc

SEQ ID NO: 243181 - DNA, 313 bp, Gossypium hirsutum
  unsure (1)..(313): unsure at all n locations
gtcgtctagaaattctagggttttttttcctaatctaagaaacaagaggaagaatcaagcttggttttctctcatgtattcttttctttttcctcttatgaatccgatattgaaatgtgttttaattcaattttgagtaattgatttttttttagttttattatctttgaatctgctgatttgatttactagaaatgattttcctaattttgggtaattagaattggatttgatctatggtatttgtggattgtgaaggtattgattcaagaacaaagcaatcaacctagnctcttttctttttttctttttg

SEQ ID NO: 243182 - DNA, 201 bp, Gossypium hirsutum
tttctttttccgtggggggttaatttggaggggggtggggatcctagaatctgggtatttctgaaaatggggaaataccaagcctacaactctatgcaaaagagccagacttggctcttactctggtggccctgaagagattgaggatggcatgggggatgggtctttttatttaccaaaatggcatgctgcttcgttggc

SEQ ID NO: 243183 - DNA, 355 bp, Gossypium hirsutum
  unsure (1)..(355): unsure at all n locations
caaattttaacccttactcgatttactccttgtaccttaataactcctaatttcacgaaatctactattccaaaaactaattagctactaagctagcctcataaatatttttattaaatatttacgagttcggtttatgaaaatggagtcccagaaatatgttttctgacacccctgactatcaggtcgttacatatcaaatgttggttagacccttatatacctaatgttggcccgttagtcgataaaatctcgctccatggaaaccttgagatggattgtctttttaaagatatggttactaaagatggtaagtggaattttgatatttcccaactctaactatncgatgaca

SEQ ID NO: 243184 - DNA, 235 bp, Gossypium hirsutum
cgaagaggagtcccgttctgaatccgacaatgccttcaaatcctctcctataccagacgctgacgtccctaataaagatagctctatatacgacgctgcacccagcgatatcgcaccagaaccaaggactttcggcgccgctattgacaaagactcagacggcgatggtggtgtagccgatgtcgcctgatgcttgctcttttaagcttccacaaatgatatgcgcctacatgga

SEQ ID NO: 243185 - DNA, 225 bp, Gossypium hirsutum
ctaagaggagtccctttcaaaatcccattatgcatttcaatccccttctataccaaaaggggagggggctaataaagattgctctctatactacactccatccagcgatatcgaacaataaccacggacttgggcaatattttaagcccatgactacctctagtcaggccttgaaaccagcgtcgaccgatgctttctattataagctttaataaatgatatgac

SEQ ID NO: 243186 - DNA, 210 bp, Gossypium hirsutum
tcggaatagtggccactatatagcggtagcagtgtcgtccgaaactactactactgaaaatagcaatgtgaagcagagtgacattgatagcggtggatcgcggctgcaatttaatgggtaatggccaattgcagcaataacgggccactattcccgttatttttcgttacagtaaattaaaaaaaaatcaattgtgatcctctttcttag

SEQ ID NO: 243187 - DNA, 121 bp, Gossypium hirsutum
gggggggagctatagaggatccaaggtgactgccacgtgcatgcgacgttatagtgtttctatagaggaacctaatggcacttcactgaccgcggttttacatgggaaaacactgggaaaa

SEQ ID NO: 243188 - DNA, 338 bp, Gossypium hirsutum
cccacgcgtccgattattaaccttgctttctaagcttctcttttataacaaaaattgttcaccattttcaaaaaatggcaatgttttatcgtatgcaaatgctactgcctgcctacgctttacttctcatcttattcactttggcctcatcaactactataacatcttcatccaaagaacaaataaaacgcgatacttgtacgcctgttccctctgcaacgacaccacccatcgtggtaactgagtgcccaccacctacttatccggcttttcctcctacagcatcaccttcaccaccaccaaatccagcttcgccaccaccagcatgcccttcatgt

SEQ ID NO: 243189 - DNA, 330 bp, Gossypium hirsutum
caggtattctttgcaggcatgttcttcgtgttctatccagtaataactgtttccatattccagacccatacctgcccagccgttggcgtttgaatagttcgtcttccataaacccattaagcaatgcaacgagagagcactccgaaaagattcagttgctagagtccttgacttcagcactcatagcagagtcaatcgaaacaaaggaacgcctcgatgttgcttgcgagcaaaccgccatggttctttgccacatgaaggaccttcctaggacgacacaaagtgcaaatgatatcgtatacaattgtccatcggatttgatcttaccag

SEQ ID NO: 243190 - DNA, 286 bp, Gossypium hirsutum
attttattttccaacatacaggattcttacccattttgtaacattaagaaataggaaggtaagatgtgcaaactttttagaaattcaattgtcttttttagatcataacaaggagctgagacagaatatgtgtaccatattattctgaactagggtagggttcaatttttttggattaccaactctctcaggtcatatatatacctttttttttttttgcttttataaagaggaaaatattccaaatctcaaccccctttagaaaaataaataccctattgaacgg

SEQ ID NO: 243191 - DNA, 351 bp, Gossypium hirsutum
cccacgcgtccgcccacgcgtccgatcattgagttggcagttctgcgcgaatgcacagctacaatcgattcaagtgtatcagttctgaatgctaatcctgattctgaaaatcgtgatggtgatattgggtggcctggagttatgactgtgagggtttatgaacttgatggtatgtctgatcatcctgatcttccaatggctggagatgcatggcagctgctggaaatagcatgccactcaaagcttgctgctagacgctaccagaagcctaaaaagggttcaaaacctgatggctctgatgataatggtgatttgcctacagtagatatgcgttcgagtgtagactcccca

SEQ ID NO: 243192 - DNA, 210 bp, Gossypium hirsutum
  unsure (1)..(210): unsure at all n locations
cccacgcgtccggttggtcatacgaggtacatgtctactgtgtaacaagttcctttacatagtgaaaatttttagcggactacggaactactgttagttattgaagttggtcatacgaggtacntnnnangaaaaaaaagtataaaatgatataatttatgaaattaaaggtgtgacagatcatnaagatcttacaatgaataggggggg

SEQ ID NO: 243193 - DNA, 401 bp, Gossypium hirsutum
gttttgttccattgaatccccatcttccttacccttcccatctttttcttccccttttcctacattgtctaaagctcgaaccagaatcaacagagtgggacacaaagcaaaagctgagcctcgagaatctgaagtgaatatagaagctgatgcgttttctcatttcaagcatttgctgcttccaataactgatagaaatccttatctttctgaaggaactagacaggctgctgcaactactgctgctttggcaaagaagaatggagctgacattactgttgtggttatcgatgaaaagcagaaagagtcattaccggagcatgaaactcaattggcaagtgttcgctggcatctctctgaaagtggatttaaggaattcaagttggtggagcgactcgggg

SEQ ID NO: 243194 - DNA, 431 bp, Gossypium hirsutum
ggcttcttcttcggttctcagcaagcttcttttgccccttttcctcactcatattgccgtctcgatctcgaaaaccgaagctcaagttgaagacacaaggtcgaagctggtgagagatgctttcgaatggccactttcaatgtcgtttcagggtgacttacacgacaatgaagaaggcgatgaggaggtagatgatgaagttgaaaatgggtatagtggtagatctttgttgtggtggaagagaatgaggtattacatttcgtatggggcgctttcggctaacagaatcccatgtccaccaagggcaggcaggtcttattatactcacaactgtttcaaggctcgtggccctgttcatccttataccaggggatgttccaggatcactcgctgcaggagatgaggttttaaatttagccctttttagaatc

SEQ ID NO: 243195 - DNA, 139 bp, Gossypium hirsutum
ggagaggttaaaatgttacctattttgtaagatgttcatcaatgttatccggattcgagatgattaacatttatgtatgcaactaattgtatccataccatctattatgcttaatcatatataaatattcaatccaatc

SEQ ID NO: 243196 - DNA, 222 bp, Gossypium hirsutum
caggcttgtattttacccaacttttttttattgctaaacctggtgcaacttagggcggggttctcagtggcaacggcgtggtctaaacttaaggtatggcatcacatggacatgttggtcaccattattataacatacgttatggacctgtaagtcttaatccttaccaatgtccatcttaatgcacaaggaggtgttttcatacacaattccataaaccat

SEQ ID NO: 243197 - DNA, 406 bp, Gossypium hirsutum
ccttaatgcatcttccaactccccagaattgacatcagtgattgactgaaaggaatcgataagttttgttcactatagaaaacagatttaagaagattgcaattggcaagcaggcaaaaaaaggaataaatttaccttggtgtaatcatgtccatagatgtgtttatagcaagaaaatgtcagcttaagatgtggaatgcttcttttagtgaaaatctcaagcacagtaccttcatcaattgcgcctggacttccttcccctgtctcataaagcctcctcgcatcacatttcgctgtatgttggttgatatctgcctggtgtgccttgtgtgatgtggataatgcaaccagaatctattaaaaacaacaaagatgatgtcctattatcgtatgcatattctgatat

SEQ ID NO: 243198 - DNA, 312 bp, Gossypium hirsutum
ctcgtaatacttgtctccttcttcgtttttctgtaatatttgtcacaacaatcaactttaatcttatcgatcacaatttttttgataaatggtgatattgatgaagaagatagtgaacaagtttcataaataattacaatcaccggtaaccaaaaaaaaaaagttacaatcaacaaatgaagtttatttagcagattttcatgcaaatgttataaaatataggggagaaaaagaaaaagaaattggtgtcttttagtcatcaaggagtattgcaaataaacaattaagtagatttgcaaataaatttctttt

SEQ ID NO: 243199 - DNA, 397 bp, Gossypium hirsutum
gacgtggtttaaagtgaatgttattcaaatgattttttactgtttgccttttgattctagaactttgtttgttggtcctacaccaaacaaagttatatataatttttttagtgtttaatttaagttttaagattgatttttagtgtatcgaataagaaagatgatgcaacagatcaccaattaattaacaaagcacaactccatcggacccacgagggtcggttcagttgataagaagatcaactcattgggaggattaactcgcaacctttcgtggttggcagtggaggagaatgatcagtaagagcaagagatggtagcaacagtgtgcatgagatgccacatgttggtgatgctttgcaagtcattacctgcatgctctaactgctaatttatg

SEQ ID NO: 243200 - DNA, 281 bp, Gossypium hirsutum
aaacaaagaggtgagtgtgtgtatattttttcatatacccttggtcaagcctaatcgtggatgttaacaggcttagaagtcaagacagtaaatgtcttttacatgtattatgccaagctgaccaaactcaataaggccatgcttggtaggattgttagtggtgtcttatgttatttggtacagatgtaatttaacaagttacgtgactgacttttataaatgagttgtgggatattaaatattctaatggaaaagattatacttcttccttactttgtact

SEQ ID NO: 243201 - DNA, 329 bp, Gossypium hirsutum
atctctactttgtttaccatccgttttttacaatggcggacgaacttcatgctggggggaatctaaggcaaccactgcaggtttctgcaccatcaaggaccaatgtgcctgctacattcttacaaatcctcaataaggccatcggattcgaaatcctgttgtagcttgctacaccaaatcgtttgcaaacggcacctcaaatgacttggctcagacgtttgcagatgccaccaatcctcatggtttcgtgcttactacataagcggttgttgtctcgtcagcaagcactaaatgaatttcattgtggttatcctcacaataaagtccaa

SEQ ID NO: 243202 - DNA, 415 bp, Gossypium hirsutum
gaacatcgaggctgtagttgaacattctaacgagaaattaatggttgacggtgatcaagtaggtgtcaaagcaaacctggtcgaagagagtgtaaatgccagtgatatcaaggattgtttattggttaagaaaagcacaactcagcctacagctgaagagagttgcaggaatcatagcatgactgagatgacggctaaagctggctctttaagtgatggatgcgcgaagaatcttgaagttttgagcacagcagaaactggccgagctacatagcgagacatggcatcttgtttatactaatacaatttatccattaaggttttttatcctgccattttagaaaatatatattgtagatttatttggaaaatgaatctcgtgaaaatgaaagaaaattgcattcgacaccagtgt

SEQ ID NO: 243203 - DNA, 257 bp, Gossypium hirsutum
atacaatacaaaatgtggactattggatttatttaaaaaaaaaaaagaaaaaaaaagatacaaagaaactgatgctagatgaataaaaaaaaacatataaacaacaatataattaatagacagaatatggaacacaaaaaaattaaagggggggcccgttttaagggaccaaggttacctcccccgtctttgcaaggtattagtttttttttggggcccccaaattcaattccctggcccgccttttaaaaccgtgg

SEQ ID NO: 243204 - DNA, 337 bp, Gossypium hirsutum
cccacccgtccgaatattttctccctgcaaacatatttttcgttacattttcgagaattcagcagcttttatggcccaatatcgggggtggtggaacctttatgacgtcttccacttttgatggcatacatgtcgttaacagaaagctgcttacaatggcagcattaggatttcattttcgtggaagctagaaaataaagtcagaccgtgccgcagagcaacttgcagtgcagaccagccagtttcagagcagacatgaatagttgcaggggcaggtgcttcatcactttcagaggtcgtcgaaattgtcactttaagacagaacatgaatattcat

SEQ ID NO: 243205 - DNA, 408 bp, Gossypium hirsutum
cggagcaccaaactaaccagttagaagttttgttatatatatataaattaccttttgagtaaaagttattaggtggatttatattgcatgttgagcaactgaacatgtcaggctatgtactctcgatattttagtgttatgtcttcttcataggtcagttagggcatgttagaacatatgctttagtaaagttgtggattgagttgtaggtatcataaggagcttgttcatgtgctgaggctggagttttcatgtgcaagcttattgttcttcgatcttgatatgacgaacttagctgtctttccgagaaaattctaaaaccaagaacgaaactatgaaacttgaagggccatatggtactttcagatcccggtctctaacatgtgttcttatagcagctgtcatgcg

SEQ ID NO: 243206 - DNA, 407 bp, Gossypium hirsutum
tgattggcctttccctatgtgtggtaacatcaactgggctaagcgtatgaaatgcaatatttgcaacactaataaacctggtcacaatgagggtggtgtgagaggtggacgtgctggtggttacaaagaacttgatgaagaagagatagaggaaacaaggcgacgtcgacgtgaggcagaagaagtcaaaatacatctctgttatcattacttgaagcttagttcattgaatatcttaatttgatggtaattatttatgtgttaatctcaggataatggtgaggtgtatgatgagtttggcaatctcaagaaaaagttccgagcaaaaacacaacaagctgaagctgctcgagtgctaccaggttcatgtcgtgctggctgggaggttgatgaactacgtgtaattg

SEQ ID NO: 243207 - DNA, 123 bp, Gossypium hirsutum
gtagagaaaaatgggtatgctgcagaaactatgagatgatgagagggacgtacctgactctaaacgcggtctagagcgcttgaggtagatcacaaccaccccatacttggacaccacagatga

SEQ ID NO: 243208 - DNA, 407 bp, Gossypium hirsutum
tgaacacggccggacaatgcctgattatgatattcataaggagtctactctgcatctagctcttggccttaccggcgttttttaagcaaggatcgttggccgttagcggcggccaccttttggctctaaataaggtgtgatgaaccttatttgggattattattagctatgaggctttcgaactttcacgggatactgctactacattttatgcttaatattacaaacagggttttgagacactattatgaaacgactacttgcctggtcaaatgcctgatagaacgtattgaggcatggcgttgacgggtactcaacagctgttggaccctaaactgatactttgacatgattgctgtgaatgattgatcattttgcaagagggcggccgataaaaaaaaactgag

SEQ ID NO: 243209 - DNA, 304 bp, Gossypium hirsutum
acatttctttatttgttgctcgcatatttacagggcacagggtgttttatttatggccactctagttgcatcaggatagcgctttgtttacaaatgctgctttacagctttatatttaacaacttggggggtattgcaactagctatatggtgatcatctatgacttttttgataattgataagatattaacgatgacatctttttttccttatgaagctatgtcgtatcaaggtggtgctgattggtatttaaattatgtgctagagataaaatctactttaacaaatattgagggccattta

SEQ ID NO: 243210 - DNA, 296 bp, Gossypium hirsutum
cccacacgtccatggacacgcgggcgagggaggcactcacgatcattagtctgatcgcgggtaagcctatacttatacgccagcgtgctgttcatcagctcctgctccatcatcagacgaaggctatactactgcggccactggatatgatgcctattctactacgacgactagggaggactgccacagttaccaaggctatcttgctggaggctgcggagggctgctacagcactaaggggagagctgtatgggatactcgcttaaaacactgtgcctattggccttgaatcttt

SEQ ID NO: 243211 - DNA, 336 bp, Gossypium hirsutum
tattttgagggttagaacaagatatttcgagatttggtgcttgaaaatttactgaaatcatcctgtttcgtttatggcgactcaagtggagtggtgattgtgctttgtttccaaatgctgcttttcggctttatatttaacaacttggggggtattgcaacttgctatttggtgttcatctatttttttttttttaatttttaagatattagtgatgacatttttttttccttagtaagctttctcgtatcaaggttgtgctgattggttttttaaaaaaaaaaaaaaaacaaaaaaaaaaacaaagaaaaacaaaaaaaatataattacaaaaat

SEQ ID NO: 243212 - DNA, 197 bp, Gossypium hirsutum
ggtttgaggacctttaaatggacaaagaagttgctttcttttttttgggtgtggcctgtaatggaattatcctttctgtttctgtaatttcttgccaattttcctggttacacgtacctaaaaggcttgagaaagagtttcctttgtttttaaatcgtttttttggtaaatggaatacataaaaaggctttccaccc

SEQ ID NO: 243213 - DNA, 367 bp, Gossypium hirsutum
acttactacacgacgagattttgtttttggcatttgttgtgggtcgaaaatttattttagcgggctggtgagtgagtgattggggattgtgtatagaaaatatagactggtagagacctaatgttgtttttcatttaatctcctaaatttgtgaactggtttttgcataggatgttgtcacttgttaatggggaccctcgtcccagcttttgtgtaatagaatgaatcatatcaccataaactacccagcagaaaaaaaaaaaaaaaaaaaaaaaaaaaaaaaaaaaaaagaaaaaaaaaaaataaaaaaaaaaaaaaaaaaaaaatataaacaaaaaaaaaaaaaaggggggggccgttttagagg

SEQ ID NO: 243214 - DNA, 294 bp, Gossypium hirsutum
  unsure (1)..(294): unsure at all n locations
accacgcgtccgtgcatcatgatttctttgacttgcgctatcaactcggcagtcatgactgttctgctttgatatgtaccgaaatgtgaccactcatgatgttcaactgagactatgagggaagtggtacggtcttatttttatgcaactttggtccacttctggatgtcttacaatcaaaattgagacgatttgatggtttttcgggttgggttagagttgactatcttgttgtttgtgcaacagatgcagaagtattttggtggatgctaaaaaanagttattagaccgctt

SEQ ID NO: 243215 - DNA, 416 bp, Gossypium hirsutum
cccacgcgtccgcccacgcgtccggtgtaggtgggtgcatccattcttatattgaaatgcacctcttaatcttttaccggttggttttaggttgggcgcttaacagttttcaaatgttgattaaaatcagttgtgtagccgctgcattcattattttgtgaaatggtggtgttttgccggatatggcatgttaagcgtcaaaactaaaaaccaattggtagtaagtataggggcagcttgaatataataccgagtgaaataaattgcaaaatgatagcacattaagcatataactcaagcagccttcacaattgcccctctattctattaacaattcagtggaaggttgttcggtactagttttgagacctgacataaccttattttatgtttcatcattatcatttttattacat

SEQ ID NO: 243216 - DNA, 416 bp, Gossypium hirsutum
ccaaaatcgaaatttggaaaatagagagaaattcttttgctcccaggcttcagatcttggtattcagatgtcgagggagagcagtgcgatatccagggatgcttacgttgttgatgaatctcagcaagtggatggtgttggtgcatcagggtcacatgtgaagcctaatattgctgaggaagaaattgatgattccagaaaggatctttctggaaagggtttggaatcagccataccttctacatatcaacaatcaccaacatcaggtgcaaaatggaagaaacataaagggaaaggttctcaggcatctgctcacacttccccttcttcaagtgctttcaattctgcagattctaccactgaaccaggagcaaattctaatctcccctcagctgctgctgcatttcctcaaattg

SEQ ID NO: 243217 - DNA, 403 bp, Gossypium hirsutum
cccacgcgtccgcccacgcgtccgctttctattcttctggtgctgctggaggtagtggtggttctggctcagatttgggccttgcttctttgtctaaaagttcaaaatcggcatctattaattcttcttctatgggggaggtaaaaatgaccaaatttacttcggaagcctttgaagctatcccagatgatattagcaaccagaacgaagctttcagggctgagctggctggtacttccccaacacttgaggcttcagttggctctggtgagccattgctcagtttaaagcttggtaaacagacatactttgaggatgtttctggaggaagcaatactaagaatttgtcttattcttccacttctggacaatctcctgcccaagcaaagagatctaaacccaa

SEQ ID NO: 243218 - DNA, 265 bp, Gossypium hirsutum
  unsure (1)..(265): unsure at all n locations
acggagcattggcgtggaactttggtggaagctggtgtgtgcagtagggtggttgatgggatttgtcggcagagggtatggtggtggcagtaatcggttgatgagatggtgactatgtgagggaccgaaatgcataatttgtgaaagtcaaagggctttttatatatacataccattgggttaaagcccaaaacttttaaaacatgactcaatttaaattaatgcaataaaaattcttctaatctaaataattagtagattggnt

SEQ ID NO: 243219 - DNA, 333 bp, Gossypium hirsutum
acgaccatctcgtctctcaagtttcaatcccagcactgcataaaatgatgcttaagcatgccatgcagcccaggcaaagagaggtgtacgcactttaaaacaccctatcgaacatgggattgctagactacgggatgaaagaacgtttccacgatccccaaaacgacgacgccgatcttcttttccccgacgatcttgatgccgtctttgacgattacgacgactttttcgttgaccctacccgtgaagggaatgaagaagatactcaataggaattattacccgttggagcattcaaatggccgaaggggcgagttgtgagtgagccaccta

SEQ ID NO: 243220 - DNA, 212 bp, Gossypium hirsutum
gaaaggaaacctaccttaaatgatgcaagctagtcgacgaagatgccgacgtagatgacgcgcttggtgaccgacagcatatacattaacgttggattgcaacaattgatacactatgatagcatttcataagggatatcagatgacttcgaatccggcgtactatattactatatttgacggactatttctatatgtacacaagaacagat

SEQ ID NO: 243221 - DNA, 396 bp, Gossypium hirsutum
ctctcgtctgaccttagaactccccctttagcgccgatctacgtctatcagcagagacgaacagccccgggcttcaaaggatgaccattttagtcgcgcgatcccttgtaaaccccgatttcgacgaaatgaaggggatacgacggccaactcgcaaggtaaacctctcttttgctttctttttttgtttttgagatagatttcaaaataaaaagaaaatagaggcgtaaaaatgaaaacagggaacaacctttgcagaatattcaacttctttgtatttgattcctcttttttttgtgtaatctgttcgtagtcgtattacaatcgaaaatcaaaggcttcatagccgaataactaaagaaaacaacaatttttgtcctctgcttttgtattggc

SEQ ID NO: 243222 - DNA, 386 bp, Gossypium hirsutum
cggagttgtggcaattcctactagtgtattttacttgaacccggacgatggaaagaatttgggcaggtttaccttctgcaaggatgaagaaactttgaggtctgcaattgagaggatgaaagaaaagctgacgaaaaagtgattaaatgtatcgcaactacgtttatcggccaaggtatgtgactagatttggctatgataacttgtaatccttgaaagatcaaactggacgttgagtgatgactcaaaccaaacctataaattttattcgaataatagaattcatcgtaagagtgacttcatgctgaattgctgcatctcaagaagttgaggcggaagagactattgtaaaactaaagcatctggaaagccttgtttaggagctg

SEQ ID NO: 243223 - DNA, 517 bp, Gossypium hirsutum
  unsure (1)..(517): unsure at all n locations
ccgtccgtatttaggtcggccccagcttaggcttaacttttttttaatttataaaaaaacaatgaaagagaatctttcttctttatttgggttttgtgccgccgcgtgacatcttagtngnngtggtgtnntgttttcaaggtgccagaaggcagtagtcgcnccagcgccaaaatggtgatannaccccttagaagtatttagctcatggctcnnngaacgcgtnnataagaagcncacnctcncatttcagcncggttgggttggccagaaagaatganaggggaacaacgnncaccatgctttattgcnngagtacccatgaagaaaatagaagatatttcaaacccgtgtttttgaccagaagttgagaatnntgcgaaaatggcttaaattgggtgtggagtttcatttattctttcacgctgcnttagaatcccgtttgggtttcaatttgactatttctctggttgggataaacctggcatctcaataaaagaaaattttattagaaaac

SEQ ID NO: 243224 - DNA, 410 bp, Gossypium hirsutum
ctacgcgtgagccaagcagtttcatttgctgccctgcagattcgtgtaacatttgtcaatgaatttggagtggaggaacctggtatcgatggcggtggaattttcaaagattttatggagaatattactcgagctgcatttgacgtgcagtatgggttatttaaggttgttaatttatgctactgctatctccttttcatcttttcatgtaaacaagtaatttctcgataagctggttgggcatatccacaagatacttttattttttatttcacttacggtaaagatgtcacttggggcttccttacctttctgatttaagatggcatgcttcttttggatcaaataggttgagagagcatattaatattcaattcttgctgaatgagggaaagataaaagaggcaaag

SEQ ID NO: 243225 - DNA, 408 bp, Gossypium hirsutum
attttattgaggctaaagaaactaaaaagagtcggaaaaagtctgccaaagcaaagggcgtgggagcaaaagtttcaggtattccaaatattgctgatgctgttcttgttagtgcaagtactgttgagaaaggcaaaagttctcgtccagcacaggctgagaaggaattattgccttcaattccatcaggtccttctttgggagattttgtaccttggaaagaggaacaagtaaacccttcccctgctccagcttggtctgctgattctaagaaactccctaaacctacatcattgcgagacatccaaaaggagcagaagaggaattcctctgtccagccaacaaatccaataatgactcctcataaatcccaatcaagtcagtcaacccctgctggtgtttcatcat

SEQ ID NO: 243226 - DNA, 405 bp, Gossypium hirsutum
tacagattggactgagggtgagacatttgttttactagatgcgtggggtgaccggtttttacaacgcaagaggaagagtctccgagccgaagaatggcaagaagttgcagagaaagtttctgaagtctcaaagattgaaaggaccgacactcaatgtcgcaaccgattggatacactgaaaaaaaagtacaagaaagagaaggctatggtagctgagaccggcactagcactagcaatagcaaatgggtttatttcaagaagatggacatgttaatgtcaagttctccacaacagggtgttatccacaaggctatttcaggtgaaatgcgggatagtccaacaatctcagaatcaaccgatagtgaggaggatgtctcagaaggattgccaccgaaaaagagaag

SEQ ID NO: 243227 - DNA, 306 bp, Gossypium hirsutum
cacacgcgtccgaagtccataaatgggggcgagttccttacatttcctgcgatgctagaaatgctggaacgctgtgcacctgtgagtgaccacttctggatgacagttgtggctgttggctgatcggttgattcacaataccgcccgacggtggaccactgttggtcaacgcacgatgaagattacgtcccggcggtggcttattatattggaacagagatgagtatcgttgagattgtgcaacactggcctctggaagatcttggcagcgataatcactatgaggatcacatggctgagccttgt

SEQ ID NO: 243228 - DNA, 407 bp, Gossypium hirsutum
cccacgcgtccgaaagaagcaaaccactgacactgctgatcattctgatgacatttcagctgaggttgaaacttccatcactgaaacagatgccattgtagctaaccacctgaaacctggagctccagtgaatgctggaatgaacaataatgttggtcaatcaagtaattcaagtctcaaagaatccaacaaaattaggggcctgcaatcgatacttcagattacaaacagtgttgagaagaccaaagtaataagcaatttgagccgtgtagattcaaggatagaacgtattgaggcatggcgttgaggggtactcaacagctgttggaccctaaactgatactttgacatgattgctgtgaatgtttgttcattttgcaagttgtgaaggagaaaaaaaaattgag

SEQ ID NO: 243229 - DNA, 361 bp, Gossypium hirsutum
aaaaaaaaaaaaaaaagaacttgttaatctctgttgtatgagataattagaccgaagtaaatgtgtacctttgtcctaaaaaaaaaaaaaaaaaaaaaaaaaaaaaaaaaaaaaaaaaaaaaaaaaaaaaaaaataagaaaggggggaatgatcgagacaactgcagcttatggtcccaacaatgttaatgtcttaaaatatactgaggtctattcaattcaatggctcttgaaaagaatactaacggttaagctcttaaatgcttacaaataaataattaaatggtgcaaagctcatattaatttatgcatggaaatatgaagtttttacgttccttccattattactattgcaaagtga

SEQ ID NO: 243230 - DNA, 353 bp, Gossypium hirsutum
ggccgtccacgcgtacgagagcagcctacgagatcaaccaaggctgaatatcctttttggccatttggcagcaggcccatggttgttctctaagatcatgccatccacagaagataataacgatgatgatttagcaatcacgtctcctgggttgtcgatatggaagaaatgggttcctagcttatgtggtaccgatctaacttggtgtttgtctgttgtgaaaaatgaaaatcgcgataaactggatgaggtcgtctccggagcagacgcagtattatttcttgtatctcagaacattccatggaagctcctaaaggccgaactttatagtctttttaatataaagggttgtg

SEQ ID NO: 243231 - DNA, 401 bp, Gossypium hirsutum
cccacgcgtccgctgattttattatgtatagagagtacataatgtagcctttgaaattgatatgtattgactggaccggttagttggacccgttggattgagaactggctggggtactggtctgagaagatgtattagattggttgacctgggaactcgtacggactggttgaattggaattttttaatgatttatttaatagaactggttaaaccagcaaaccagtggcctgacaagtttgagcaccagaccgattttgaaaactttgggcaaaagcttactagttcaaacagttgcattaggttctctaaactgattcgttgttcgatttgtatctgaaaatatgcttattttttacaatgtcttataacttatagttgataaatcttttgttttcata

SEQ ID NO: 243232 - DNA, 348 bp, Gossypium hirsutum
ggacaccatcgaatccattgccaactaacgatcaacttagcacccctggtggacgggcagttgctcctgctgtggctggtagggctccgccctccaaaccttcagctgctgcccatacccacctaccatcttcttccctgcagttttgttatataaatttgcttccgctgcttgtcctttggcatcttctcgtttcatcatttcccatagatacgggcaccaccactcacggttgagccattctcacacttaacctcacttgtatgtatatcatcttttttttcttctttctatttttcctaatatttggattattatatatctttttaccttctgtattatgtatga

SEQ ID NO: 243233 - DNA, 243 bp, Gossypium hirsutum
ggccctaccacaacaataggcatccttccgaggtcattccacccttggatcattttgaaaacttttgggaagggcggggtaaaacttaatttggtggcaggccccgttttaggaaaattacccttgaaaccggtggttgactttaggaccttgaccaagtcagttaattttaggcctgcctgcaatttttataacatgaacaagcttgcagtttgtgggaaagggaaattccgcgaacacttc

SEQ ID NO: 243234 - DNA, 270 bp, Gossypium hirsutum
  unsure (1)..(270): unsure at all n locations
gccgcaacatggtgcttggtttaccacgtaagaatcacgttataatgtctgaatgggtatcggaccaaaatgtatggaaaccaatgtgcttcaagaaataatgggacgaatcccctatanaatgaattttttaaccttttacanttttgatgctaatgggtgtgtaaattatcntggatanntgtttcttctcccctctnttttcagcaaaatagagggtgttgaagtgaatggagatgtnggcgagttcgacaaaagggagatggaact

SEQ ID NO: 243235 - DNA, 410 bp, Gossypium hirsutum
atcaactccccttttaaaaagatgtcctctacgagaagtaaagataaatcatcgggctggactgcctttgatcttaagcagaggcagaaacaagttctggtaccagaaactgaaaatgaccctttccctcctgtagcaatggcggctcttcatccctgcacaagccagacaaattgcaacgacctttcagcaaggtctttctcatctgtgctaaagccttctagcgattttccaactttgaaacagaataagaattccataaaatcaataaatgtgggcaagcctattggaaatgaagataagatagctggggtaaacaataatgatttagcccttaaaaagcttaaagagatacattgctgggctgagaatagtttgattgaggacatcttgttggctaccaataatga

SEQ ID NO: 243236 - DNA, 361 bp, Gossypium hirsutum
cccacgcgtgcgcggagactgaatctcaagggacagaccttcacgggatataccggacgaatctgatgctagcattgcaattactagaacagatgggaaagctggcagtggttaaaggaactctaactgatgatgaaggtgtaaaaatgtctgtgtaattattgatcgaataggctctcagaggcaaggcagcatatagcctattgaccatcataactttaatcagcagcaggctgtcagcgacctgatatgcgttgaacaaccaaacctgacggtatttgtactcaacaattccatggtgctacaatggagccatcattgggatcattgttttcctctttctgaatatgtgctataagaa

SEQ ID NO: 243237 - DNA, 411 bp, Gossypium hirsutum
cggaatttccgggctgacgaacacggacatgcactcgcctgttcagtggaccaaaatggcagtatagcatcacatgccttcatggaaactttgagggagcggatgttcaagccatccttgtctagtatcattgctgaatattcatatgatgcatgtggttaactatggcaccctatctgtgttgctgcaaaaaagatgagggacttgcgggttaattcagttgttacagttacagggaacactaatcatgggatgctaacttcttacgatatccttatgtgagtctgtgcaccaaacctgtctcctgaacttactccggtggaaaaggtgatgacacccaaccctgaatgtgtgacagtataaacaacaattcttgacgcactgcatttaatgcatgatggaaagaaattt

SEQ ID NO: 243238 - DNA, 401 bp, Gossypium hirsutum
gttaggtctaaatcaataggtttgggtttagtttaatttaggcccgaaattttgtaaatggacattggactcataaataatttggtttattatttatttctgtttaattttattattttatttttgggtttttggttttttatggatccggacaaatttggcctattacaagctgaatagctaaaattcctggtaccagattgtcttaacaatgttttaaaaatgatgataaacgattcttctggtgttgtcatcaaagatttggaagtttgcttcgggggaagagaaggtgggggcgaatcttcaattatgggtctctttcctaattgtttggagtcatgctgagaagattcttcctcctgaatcttctttgtttcagcttctttcttttctttctccat

SEQ ID NO: 243239 - DNA, 384 bp, Gossypium hirsutum
aagaaagttaagctttgaatacccagaaacagagtggagaagatgtggttagcggggttggtgaagaacaacataaagggagggaatggcggcgttgggagtctactggttcgatacatgtcgagaactagggcagtaaatgtgagaaagatcaatccaaaagtacccattccggaagctaaatccatcgccagttccctatatgacctcatcaagcaacgtggtcctctcaccgttcccaacacttggactctcgcccaggaagctggaattggtggattaaacagcaaaacacacatgaagataatgctcaaatggatgaggggaagaaaattgttaaagttgttctgcaaccaagttgggtccaacaagaaatttttgcac

SEQ ID NO: 243240 - DNA, 232 bp, Gossypium hirsutum
cagaaaaggaatgctgtggtaattgcacatgctacggagtgtgcatcccgacgtaattacttaaatgaaggaggggagctaaataatgatctttattgtgtttcatggctggtttaataatttaattacttgtttcaataaacgtaaatgttaaatgccttttgtctttttagtatactctaaacttattttactggcatttgtaatttttcttttcaatgatatgattttt

SEQ ID NO: 243241 - DNA, 406 bp, Gossypium hirsutum
  unsure (1)..(406): unsure at all n locations
cccacgcgtncgatttttatttgtgaatccgcatttctatccccgatttcaacggagaagccaagggatctcatcaatgcatttagcaaaggctcggttgtacagtggagcggagagacgtgcgaaggaggccatgtgaggagtcactcgtgggagccctaactctctggcttattctggcacgttccagaagcttccagtgctgctgagatatttttgggtgtattgggcctggggtaatgggttatttgggctattttataaaagaacttggactttgatttaattttgggctatttattttctcttatttttttatatttattatttttaggttataatgggccgggcgaattgggcctattacaaaactcttaaaaaaaaataacggctacctacaagcttt

SEQ ID NO: 243242 - DNA, 401 bp, Gossypium hirsutum
cccacgcgttcggtctgattatctggatatggcggatgatttaacaggtgatgtagagttcatgaatgctgatggcaatgggtcagttaaaaaagaggatcttagtaatgatcagagtaatggcgaattgatggcctgtaacatgagtaataatttcttagaggaggaggatgccgatgaaaatgttgtaagtctcgagatttcagacggtgaaccaaacaaaggatcggctaatgatctgggattaggctcgactcacgtcacaaccaccgtgtggtcctgcatagaatccattgatgcgtccacttcaacaactccggaatggcccagctctgagccttgtactgattctatcactcatgtgatttctgccgaagaacacattttaataaacatggtgc

SEQ ID NO: 243243 - DNA, 412 bp, Gossypium hirsutum
  unsure (1)..(412): unsure at all n locations
cccacgcgtccgcccacgcgtncgtataaatctttttttttctgtaattgaaatcaaacagtccaaaacatatcgacgagatttcgccttccaatgtagggaaatcaaaatatttttaatttaatgttatccggaactcaatcaaacgtttaataattaaagaaaaaaaaaacatacaaggaagaatttcccgtaaaagaaaaagacgaatgtgagtcttggaggtggggtccacagtgacaaccaataaggagaagcgttgtgtccagcacctgcggaaagagaaggcacacgtggatgctatctcgataagcgagtttccttttttctccttattcttactgttgagttgaaaaagagaaagaaaagaaactttaaagggagaggattcgagaaagtgcatacgtggtct

SEQ ID NO: 243244 - DNA, 397 bp, Gossypium hirsutum
gttattcatgttcttcatctccatgcaaattctatgacctacccaccatttccgcaaatgcaaatggaatcccatcggtgattcctagacccaaacctcccattccaacctttttatgtcattctaatatttcatctacctttcatatatgcctactctttgtttcctcttgggaagaccagctgagatggatgatgataaatttaagagaaggatgaagaagatgaaacgcaggtattccaaccctacgcctgcagtgttgcgtataacaggctctgttgttaccatggtgttgctcttattaaccatctgctgcggtttccaattgaccattgaacctgggcgataccgcgccatcggtgctcgggctttccatgttggcatctccaccataatc

SEQ ID NO: 243245 - DNA, 229 bp, Gossypium hirsutum
gttttgagagtagccactataggcaatcttgagagcttttaagcttggcagtcacgacaagaagaaaagaacaatggaggagcaaagtgagctgtgccacagagatccactagaaacgacttaataattctctttcccttcaatcttttttttttcaattcaggaaatatgattgcaactaagttttctgcttttaatataatcatgagtgcttaattttgttggtttt

SEQ ID NO: 243246 - DNA, 189 bp, Gossypium hirsutum
ttttaattctctatagagtaatacgaacatcattgggaatttttagactctaaatttttggaaaataacttctagttagatcttggtctgctgtaattttgtttctcagcattttcaaatcttctaagacatacattttgtaatcgctttttatcgtgtattctcctgacttgtcaaattattaaatat

SEQ ID NO: 243247 - DNA, 406 bp, Gossypium hirsutum
tttttccatttttctcaagtatatgatgagattacaaaatttatatacgaccattggtgaaactatgatttaatcttggttggagcagtgaccgaatacattctctattttctaaatttgtctacaatatgaagatttactaacaagttgttatcctcttctgcagtccaagaaaaaaaaaaagaatagtagcaacgctgattggtaagatgcaaagttggaacatttttgtgttttgcttcttagccatatagcctgacttggattgacattgtttgctgtttctgtaaaagttactccattctagttttctccatgagccgtatgtgaaagccatctggaaactgtaaacctggagatcgaaatatatttccacctttgattggttcccacctgaaagattcat

SEQ ID NO: 243248 - DNA, 403 bp, Gossypium hirsutum
cccacgcgtccgcccacgcgtccgggaaaagatggcgatgcagcagggatgttatccccgatcaaaaatattgtgcacgacacatgcacagaggtgctagaaaacagactgaggtttctcagcctgttgcagttcccagtgttggtgattgccgtccacctagtagattaacaacagcatacaaagcagcatgtccagccctgagcaccagtctgtctatttcgattccaaggtcgcagcacattgcagaagatgaaaagagtacgagcagcagcagtgagacgaccatcagtgacaccaacggttactgtcttcgagaatagtaacttagatgtgatatttggaaagttgtgatgattgaggtgtttgttcctaatgacaaactaagatataggtatcagtg

SEQ ID NO: 243249 - DNA, 284 bp, Gossypium hirsutum
acgctaatgggttgcccacaaccataaataaattatcagccctctggttatggtgacactggaataaaattttgaaaactccaacaacttggtctgaaataatattgccaaattgagcactcaattaatcaatgtatatggggagtggtgggttgcagatttcttgacaaggcatacattgaggctgtaaaacataatgtgaaagctgcaaatatatggagactaatcagggcggaccttctggaggaaccaaaattctttactccgaattgcaacaatatggg

SEQ ID NO: 243250 - DNA, 222 bp, Gossypium hirsutum
ataaaaaaaatactcactataattctactttgatcacataaaaataattttaaggagcgggcggcctgtctaaaggacacaagcttaaccacgcttacattcaaaaaatatttccttttatattgtgcccccattattcatattctctggcgggtgtttcacaaccgggagactaagaaaaccccgcgcgaacccaacttaataggccttgagaagatcccc

SEQ ID NO: 243251 - DNA, 360 bp, Gossypium hirsutum
ttagctccttgaacactttccaagttcaggaattgcatccatgttgatatcataggacaaattgtcggtcaagcgccaagtgattatcaagttgccttgttaaattcgagatgcctctcattcgccctgtgtacgtaggtgtggaaggatgtttcatttggcagttaggcatgtttaatgtgttcgtacttattttccctgttatgagattcttcaggtgaaatggcagcttggaaataagaaataaaaaaaggacaaatattaaatttatatatgaattttgatttaatgtgtaatttgatacatgaattttgatttggtgtatttgtacacattaaacttgaattgtagttgatatgt

SEQ ID NO: 243252 - DNA, 392 bp, Gossypium hirsutum
gggggatccgtcgggaatggcgttcgtatcttgcatggtagaagacaagaatgcaaatgggccatcgtatgtggagtttcttgtacatattcatcggcaaatccaaatgaaaatgtcttgataagtttcaagcttcctcaacaacaggtattcaattttgatttgggattttgcatgaagaagaaagaatccgagtggcctcctgttcggagtttcttgtacatatactgtgcggcgactggagtgaaagttttacagaatgttttatgctttttacagttggcttcacaagtagtgatggcacttggagatcaaaagctgcacacaaacattgtaatttcatatcttatatcaattatttatttcctggaaccccaattttgagctaaaca

SEQ ID NO: 243253 - DNA, 324 bp, Gossypium hirsutum
ttttaaaaaaaaaaaattaataaaaaatttttaaattaaaaaaataaaaaaaaaaaaaaaaaaaagataaaatgtgtgggtacaaataatagaaaattaaaattattaggggcggccgttttaaagaaaccagatttacgaccgcgtccatgcaacataataacttttttttatggccaccaaaattaaattgattggccgtgtttttacaaatttaggaatggaaaaaccttgggttatccaaacttaattgctttgaagaaaatcccccttttaaaaggttttgaaaaaaaaaaaaggccctaacatatcgaccttcaaaaa

SEQ ID NO: 243254 - DNA, 402 bp, Gossypium hirsutum
cccacgcgtccgcaggggtaaaggagctagttcggccagaaaactaaaaaacagggaagctagaaaatcgagtaaaatgaacgaaaactcgttttgatgaagaattagcgatggatcatagatctgttgaaccaattcggctaggaaacaagaaggtgacaagtgacaactctacttggggtgttgaaaactaaattcgaaggcagattcatgcaaatatacactctcttttgtcagtctttatcaactagaaagaataatacatatgctgtacatgctttggcattgccattaatgaccattgatattttatggaacacttgtatgttttatgccattactgttagaaaagggttaaggggtttttgtaaggaattaggcacttgttctttgtaacctcat

SEQ ID NO: 243255 - DNA, 106 bp, Gossypium hirsutum
cccacgcgtgcgaccacgcgttctgttcttttgggacgatatggaaatgattgggcatgatacattttacaacgagcttcgctttgccccagaatagcacccggtt

SEQ ID NO: 243256 - DNA, 429 bp, Gossypium hirsutum
cccacgcgtccgatatatatatacatatacatgcgtgtaatggaaatcgaaatggagaaagaaaagttgtgcatattcaactcaaagtttagcttatttatgcaagtttacaaagtttgaaaaaggaaaggaaattgtagaaaataatgatatgatttaggtgctaaatcagcagcaataaaagaattagtggctaaacaaagtagtaagagagaagatgaaactctagaaaacttagggtttaaaaaaaacctctagtttctatatattaattcaaaaaaaaaaaaaagaatcataatatgactgtgaagcctacaacttatttatataggctttcttcttgcaagttcagttactaggctttcttacaaataaagttttattctagccctaggtttaaaccctaaagataactaataacctccggca

SEQ ID NO: 243257 - DNA, 429 bp, Gossypium hirsutum
cccacgcgtccggaaaagcaaaatgaaacaaaatagtaagaccagactcaagaatcttcgtccaaacccttcagttaccagagaaaccaaaaacgcccaaatcccttccttgttcagacaatcgaagaagcagacatgggagggggattgaggtttgctttcagacacaaatgtagtagaatcctcaagccagagacaataatatagtcaagaagagctacgatggttgctggaaatgatggtcggaatctgctaactcactaactctcgacagtgcatctttaacccatatgtggttttccaaacttctcatcgccattgcatgcgcagctgagtttcctcctctggcaacaaactcgaatcgacaagctaagaagttccttgctagaaccctcacatcccaggtaatcgatctaatattcgagtaat

SEQ ID NO: 243258 - DNA, 269 bp, Gossypium hirsutum
ctttagacttaatgaacaagcacatatatgaatcatacgttgtttaaagtagttgtgtgatgaaatcaaaatttccataccagatcattactaacaacgccttttaatgtttttggtggatgctttttcatattgttagtctggccatgaacaaaatctgacataccaaatgaagtaagcataatatgagcctgcacaccttttgctggacagaaattatttcttatattccttccatttaatctattgtttggataactatcaaatac

SEQ ID NO: 243259 - DNA, 348 bp, Gossypium hirsutum
  unsure (1)..(348): unsure at all n locations
acgggaacggacagccagcactcctctatctcgttccttgtacactaggagttacagttgtattagctgcaataagaggagatttgaaagcgctctggggttacagcagcaagtcatctgccatgataaatcccactgcagaagtttgaaacctgtaattttcttcaaagcggcaatcttgatcatccaaaactacctaatggtttaaaagatggtttcggtgctatctatacaaggagtacagggtcgatgaaaagtcacggctcaagttttttaagcaaaaatgtggggcagacagatgttacatatataacttccactttaagggaatgngcccactttttatat

SEQ ID NO: 243260 - DNA, 279 bp, Gossypium hirsutum
cggacgcgtgggtttgtaggctttaaatatatcaattccattaaagttgccaaaaatgtgagcatcccaccagatgctcctgggtgcaattgtagaggatagtgcacatatccaaggtcatgttcttgtgctcaacttaatgggggtgacttttcatatgtttctcgtgatgggtgcaaggcctgagtgcgttaaccgttcatctcagcaggggcctaaaaataccagacttggggtctatcgcactaaaaaaaaaaggatgggcaggttagatctttt

SEQ ID NO: 243261 - DNA, 380 bp, Gossypium hirsutum
gggatgcgtgggtaagtaggcttattatatatcaatcacataaaagttgccaaaaatgtgtgcataccaccagatgctgctgggtgcaatactcgaggatagagcacatatgcacggttatgttcttgagctaaaattaatggtggtgaattatcatatgtttcacctgatggaggcacgtctgattgcttatgccgtccatcttacatagtactaaaataccagattggcgcttatcaagctagggaaagagaatgggaaattacaactttaagactctattgctctaggtgcaccacgttgatagcatgtcacgcatcataaagaacaatggtgcattataagatgtttgagaaaatgactactattatgcgattgat

SEQ ID NO: 243262 - DNA, 153 bp, Gossypium hirsutum
gggttagtttgggtttgggccattaggtctaaattttgggtttttcttgggttaggtctaaataaataggtttaggtttagtttaatttaggcccaaaaatttgtaactggacattggattcataaataatttggtttactttatttctgttt

SEQ ID NO: 243263 - DNA, 181 bp, Gossypium hirsutum
cccacgcgtccggattttgccctctttacttttattttgctcaataatggtggttgggattgtgagggaggatcttagctaagcaactcacttcatgtctcctgttgtactgtgttttccctataaatagatgaaatggatagtgtagttgtaatggtttataaaactttatgaaggtaat

SEQ ID NO: 243264 - DNA, 198 bp, Gossypium hirsutum
gttagaaatgtgacttattttctttccatttatattcttcgggattaaaccgaattatttatcactcttttgacctttggaaaggcggttttggttgatccgtaattaaccttggatggaaatgggaccggaatttaatttccgtcaaaggcaatggcatggcattcctaattggaatccgtggttaatttggggggt

SEQ ID NO: 243265 - DNA, 408 bp, Gossypium hirsutum
gaggtgaatatgatgaagatacaagatatcccgagaccaaaacattaactatcagacaattcaagttgggattgtgccatgccatggccatcagacagagatcttgctctctttttctgaagctgctaaaggatgcacgaaggatctacagttttatgcatttgtaacttgtgattcatgcggtaagtagcgcctaaaatttgttggaatcatgttgtgttcaagaaccatacaagcacaaatgtaatccactaaatgcataattccaagtggagagaaaggtaacctgcaagacctgcattctacaaatatgttgccttcatgttcatcttgaatgcactagaactgtttgctttacctagagcttctttctaaagatcaatataccgatattgctgtgggaacata

SEQ ID NO: 243266 - DNA, 404 bp, Gossypium hirsutum
  unsure (1)..(404): unsure at all n locations
caggagttgggatcggttccgatgtgtagactggatagtagttgttctcactacaggcacacctgaaggaagctattcgccagctactggtgcagctagtgtggcttacaagattggtataatttatcacgttttattcctcgtgatggcggatttttacttgttataagcaccaagcttctggttacagcattgttattcatttgcagaggataagaaattgaccatactctattacttgatcatatagagaaactatatatatcaccacaatatacgcactttcattagatncgnncccgnnccgacttacaaaataatcgtttcgcctcccattctttaatcctctacggtcaagccaagatgctaaaccgcgccgtgacggtctttgacgaattctataa

SEQ ID NO: 243267 - DNA, 422 bp, Gossypium hirsutum
aattatacgggatttggctaatggatctctttaacaccagaaattatattagttgatctcatccctgagcaatttagagggtgatttcaacgagttaaagaaagtcaagtgtgcagtttgggaaagacttgccagattctctgaagatttgctgctagctagtaatgttcgagttcatgtcttagagcttatgcaatttatcgctggtaaaagtgagaagggtttatcttctgagctgcagctaaatgttcatccatgggtagggtgggatgagtcactatgtgcttataacaagagccaaattacttcaaatgatgggttgcccgagcaaatagatactttcagcaggtttacaagtactatagttgccctgagatcatctcaacttatggcaaccatttcttctggctttggaatcaccc

SEQ ID NO: 243268 - DNA, 457 bp, Gossypium hirsutum
  unsure (1)..(457): unsure at all n locations
cggaatccggtcgaccacgcctccgccaagccgtccgccagccttccgtggaatttggttttattggcagtaatcttaatgtttacaactcatgcaaaaatggtggcggaggcaaggggacctatcatttcatttaaatgccataaaagtgaagactgtggaagtgtctgcgccaaatgccccacctgcacttgcctctttcacctttgtccttgccctaccgaccctccatggccattatcataatctcatttacttctcagcaataaatgatcactctgatcctttctcattgcaacaagctttcagatctaataataataactcatgggtattggttcttttcttctggtattattattatttttttaaattttccttttaccctacatatttcttattttctgtttaatcagntgttgagaatggcagacagcatggaggtcatgaaacaatt

SEQ ID NO: 243269 - DNA, 257 bp, Gossypium hirsutum
  unsure (1)..(257): unsure at all n locations
cccacgcgtccgcgaagagtgggtctccttctctttntgcanactcctcccaagcaccacctacagtccccgccaaacatgtcgagaacgtagatgattcgctggaggatcttaaggttatgatgggtgccaacttgctcttgcttggctcccaagctgggtttgtcaacctctatttcagagactattacatgtccaagttttttcaagaaatctttttcagagttttgaacccctgatanntgctactaagtctt

SEQ ID NO: 243270 - DNA, 396 bp, Gossypium hirsutum
aagacggagcagcttcaggatttggatgatcccttgcctccagcacatcgctactttttccatgctgatccaaggatccaaaacttagtccgtagtcggttacccttcttctcccccttgagcatggttgacaatggaggacatcaacaacctactgtctcaattatggattttaagaatcaattcaacaaaggagaatcatctaaacagagaggatctcggaaaggcagtggcaagaattgctcaataagtagaagcagcaaatcaaagaagccaaatgctgaaaatggtgctttcgaaggatgggtaaatccaaaaaccagtggagctgttccgaagaatgctgggaagagaagagttcatgctagcggtcaacctgctggccactggtataca

SEQ ID NO: 243271 - DNA, 299 bp, Gossypium hirsutum
cccacgcgtccgattatcattgagatggatgttgttgttgttggcctgtcatgcttatttaggataattttacttcggtataaataaaaataatgaatagtgtgcgaaaaataaaaaaaataaaaaaaaaaaaaaacaacagatgttaattttatttaaaaaaccatataaatgtgcgaatgaactggatcatcaagatggcttgctgaccatataaaataatctatgttgtcatcattttccaataaaattttttaattggcaaatcttgtattcaatggtgactctgaaagaatgtc

SEQ ID NO: 243272 - DNA, 273 bp, Gossypium hirsutum
  unsure (1)..(273): unsure at all n locations
gcgacagcttgatagtgccataaagcgagattttttatctttcaactttgagacaacnacggagggattgggttctagttttcaggcacagagatgattcttctactgattcagtgcttccatggataccccaaatcactccagctgtagctttaaggcttttggagcttgattcatccatcatgtatgtaaagcaggataaagttgaacctccatagaacagggaagctagagcatcatatataaagcttccttcaagaaccactcttttca

SEQ ID NO: 243273 - DNA, 357 bp, Gossypium hirsutum
  unsure (1)..(357): unsure at all n locations
cccacgcgtccgttttttttctcagcaaccaaacaagctaagaaatctgaaaagaaagtgaaaaagatataaccttgaattgaaactagtgtttggcttttgagtcaaagcagtcaaatgaaattactcaaattcaccctgnggcacgtcatataacacccattactctgttttttaccttcaacctagatctcgcatgtgtttttcccttggggttagccgctttgctcatttaagtagtgtttaattgttaacaaagacctccatggcagcaacaaagaagctttcatctcttttccctttgttgtctctcatttgcttcatctctttctttcttcttctctctatttccagaaa

SEQ ID NO: 243274 - DNA, 224 bp, Gossypium hirsutum
gcggataaatgttgttcttcttgatgttccgtgtttttgtcttcctggtggaaacgttctaccatggtctgaggttccagaaatggggtgaagtgcagatatccctcaaattctacatatcccacaaatcccacaaattccactattcccacagatcccacaagtcccacagaatcccacatgttccaaatattccacttatgcctggacagtcgtggatgtga

SEQ ID NO: 243275 - DNA, 411 bp, Gossypium hirsutum
ggcatttttatactacattgtattgtagtgctgaattttgaaaaattgtgatttgagtgtgtcttgttatgttgtaggttttagggtaatgagagggggagaaggaataattgagctgtggaacaaagagtctttttgttatttgtctgatggagatttgcatacggtttctatcaaatgtaggatctgctttctgctttatgtgctaaaaaaaaaaaaatgacaaacgtagagactatcacattgtaatggaaggcgattatgaggaatcagactgcgacgtcgccttggtgaggagtcccaacccggattgcaatgatccctccgaattgtggaggatatccaaggtggttcttaccacacttgacggcgtcagcgatgaacttgggtttgccaacaatcttgggttta

SEQ ID NO: 243276 - DNA, 289 bp, Gossypium hirsutum
gttatgtgtgtgtgcaattagccttaatcattttcctttttctttaaaactcattcgtatataatatctgactaaacgtgcgctgaataccatggctactgcacaggtattggattcttattaagttctcgatttgagcttgctttgattcatcaatctctgtgtgttgattacttgatgttagcattgcacctagcttataccatttggcatgcgatctttggtttatagatggagctgattataacagtgaagatgatgatcatatctatctgtcataatctgcaca

SEQ ID NO: 243277 - DNA, 320 bp, Gossypium hirsutum
tcgctggaacgggtctgacgtggcgtaacttctggtactgctcctgcggcgctgaggttccaaggaaaccctagggtttcctgctggtgttttaagtcattgggccttttggtcccgagtgacttgggtctgtaatagatgggtctgtttgtaagggttattgggtttgtacttttaacgggcttttaaaataaataattattcatttattcgttaaaaaaaaccactaggacgctcttcaaagaaggaaaaatcttaacttgctaaaattactagagatagcgcaaatataactgtggtgcaaagttcatggtttaatg

SEQ ID NO: 243278 - DNA, 393 bp, Gossypium hirsutum
atttgatatctcatttatcatcaactattttcatttgatttgcaaactagagttgcctatgcaagctattcggtttaccttgcttgcacaaacctatttatatttaaggaatgagttagggagaatataatagcatgttgttagcatccactatttcaggctgtggggattttctgtttggtttcatcaagttcgaagttttttctcctggcttcgacaaatgtggtatggatctccaacagcgcttttgaactctgattatcttcttgggagcgtcctcagcctgcttgctagcctgcattaagcatcgataaacatcaactcaaccattttgtaacaggtattggactgttagctaccgatttgctccagacataaatcgttggcaagctg

SEQ ID NO: 243279 - DNA, 176 bp, Gossypium hirsutum
ataatcccgttggaatacttatgagtttacgaagatgggaacgtgtaggcgattttcgtagagtggttagggctacgcgtcagattcatgcaaaggagggcctaccttcctttcctatgggaaaaattgatcagacacagatgtagaaagttggagcacgtgtcctgtcaacttta

SEQ ID NO: 243280 - DNA, 377 bp, Gossypium hirsutum
  unsure (1)..(377): unsure at all n locations
cccacgcgtccgagaagaggatctaaaagctgaggatttctatttattaaaagacaaaacagaaacgcagaaaatcaactgccaaccaataaaataaaagcctttaaaaaatcgaagaaaaaacaagaatggaagaaattcaaaaaaataaaaaaataaaaatctttgcttggatttagagataatggagatcgganaaaaaaaaaaaaaaaaaaaaaaaaaaaaaaaaaaaaaaaaaaaaaaaaaaaaaaaaaaaaaaaaaaaaaaaaaaaaaaaaaaaaaaaaaaaaaaaaaaaaaaaaaaaaaangggggggggccgttttaaaggatccaagtttacgtacgcgtgcttgcaacgtaataacttttttatagg

SEQ ID NO: 243281 - DNA, 304 bp, Gossypium hirsutum
agattctacgatgaaataaaatcaaccggaattatgcctagtgagaccatattggagaatttactggaggggttttgtagacgccggagattcaatcaagttaaagagttcatcaaatcttgtctagaagtttggcaggaaattagtgtcaagatggctgaggaggttgtaggtttatatttggaacatggaaaagtagaagaaatggaggagctactttcaactgtagtggagtcaggtcaggctgtcacacttttctcacaggtgaactccgggatcataaggatgtatgccgcgttaaatc

SEQ ID NO: 243282 - DNA, 247 bp, Gossypium hirsutum
cagatacttgacgagggctaacgttgcctgatctaatgttctaaaaagtccttaaacggcaagatccaaaggttggcaggaatcgttatctatttgaagatatatatcttcctaacgatggtgaaagatttgatctcgccagaggtcgagggtctttttcttgatcttaagatctatcggagtagaacaagcgatgttctcagacaagcgtgctggatcgaaaggaggattatgtttggaaggatgt

SEQ ID NO: 243283 - DNA, 332 bp, Gossypium hirsutum
  unsure (1)..(332): unsure at all n locations
ataaaatcccaagagaaacgccatattgtaaatgcaatctttgacggcaactgtagattccatagtttcttgtaaaaatctttagtttcggtctgtaataaatagcttctaggatctagattaannnaaaaaaaaaaaaaaaaaaaaaaaaaaaaaaaaaaaaaaaaaaaaaaaaaaaaaaaaaaaaaaaaaaaaaaaaaaaaaaaaaaataaaaaaaaaaaaaaaaaaaaatataaaaaaaaaaaaaaaaaaataaaaaaaatgggggcggcccttttaaaggaacaaattttacttccccgggtttgcaaattataagtttttttttagg

SEQ ID NO: 243284 - DNA, 235 bp, Gossypium hirsutum
ttaagctgcttgaaaagaatatggtattttgaaggaaaacataccgacaggcagtatgcatggtccagtcacgggaataaatgtgacgccccataggaggccgtgcaaattatgagatgcttacatggtctgtgaaaacttcggccatattagaagaacgacgaacatccggagatcatggcgtgacataccacgagtgttgactgcaatcctcttgctcaaagttacattttat

SEQ ID NO: 243285 - DNA, 176 bp, Gossypium hirsutum
aaaacaaatgtgcaatgtttgaaggacaaacaaaccgacggggcagggggcaaggacacagggacggggcgacaaaatgaaccccccacaaagaaagccatgccagatagagaacaaactgacatgggccgtgaaaactacggaaagaaaagacgaacgacgaacagccggagaac

SEQ ID NO: 243286 - DNA, 416 bp, Gossypium hirsutum
cgtgtttttaatatgtttcacgtaaacgtaagatccaagctagaattcaatgtccaagttgacacttaggctaatagaaggatttgattaaaactgacttgttgagaactcaattggaatgttttgcaagattgggattcgttagaatataggtcgaagtttggtgaagtttggtggagtttggtgcaagtaacactaattgataatgcaactgtggaattggaaatgctagaactagatgttctttgggtgttttctcggattatgttctttatggctgcctgtcatcattattcagcatttctagttcagttatcgataatcgatgaactaacttgattttgcagaatgaaaaccggaccttgtggaaattaggaacttttgcctcccgtttaatcacattttattccacgacg

SEQ ID NO: 243287 - DNA, 354 bp, Gossypium hirsutum
gattgaccataatccacaacaaattagatgacattattctatatttcctcgactgaatgctcagtaccggaagatttggttactgtcttcttcggagttgtgacatctgggacaaagagctgctattaccattttttattcttgagattagttaaagtagtaatataattccaagaaattctccaaattgttaatttaatttttgaagggagatgtatattccataatttcctacggacataaatgacacatataaatcaaggagcaatggaagagaagaggttattcctagtgcagcacaacatcggggctccgatgtgctattgccaccggggatgaatcctcggtttgagt

SEQ ID NO: 243288 - DNA, 409 bp, Gossypium hirsutum
cccacgcgtccgtccacgcgtcttgtccaatacttttccttatgcagggtttcgaggcatatgttggagtactactgctcaagacagcatttttttgggttgttcctgaatggcagataatttttgtggcatacttttggttgttatggctgttgggaactttataaacacggtacagacactcgttgccaagtcaaggtttaaggcaaagatgaaaaaaacaaatggcaagcaagagttgtagagggggtgtttgtaattgttagctcaatcctaacatagcgtttatgatctcattttgtttctaatgttttgcggtgtcttgaacatgtttgtttaaatgaggcaatggccagttcacctttgtaaatggaaacgggcaatgcctagaactctcacttaaatttgc

SEQ ID NO: 243289 - DNA, 402 bp, Gossypium hirsutum
ctaaattaataaaaagtaagaaataattaaacaaaattaagataattgaaaaaatatattaaaaaattgaggttgcgttagaaaaggagcaaagtcagtaaattttttaaaagggggaatagtggcgtgaactgtgaagaagtcctttttgttaaaaaattaaaatgacagagccaaagacttttttttttctttcatcgtcttcatcccttcagtctttaccaccagaacactcatttcaccattttggattgctggcgatccttgattgggatcgaacgatccaaaatggaaattgcacgagagttggggatttaggtaacttatgactggtcatggtgatataatgctccaagtagtacattatataatttggaaaaaattgaacatacctaatttgag

SEQ ID NO: 243290 - DNA, 336 bp, Gossypium hirsutum
cccacgcgtccgaaaaaaaaaaaaaaaaaaattttaaaaatttaaaaaaaaaaaaaaaaaaggaaaaggcaaccaaaattgagagcaaagcgttagagagagaacaaaacaggaaaggagagcgatattttttctttggctaaaaaaaaaaaaggatccgagaatggcgagcgggtgggtcaaatctttgcaatgcaaatcgagagcatatgaagatgtttatcaccccagccctaagtatttgatccctagtaccagttgtacacgaagttctcaaagcatcaaggatgtcatccaaacggccaagaaaaaacccaagaaatcgggcaccaaacc

SEQ ID NO: 243291 - DNA, 188 bp, Gossypium hirsutum
  unsure (1)..(188): unsure at all n locations
gctttcgataactatgcttgcagcatgtttttggtattttgggaataattgntacccaggactggacatgtccatgctgtgttgctggtatatcatatgtaaccactccaatagtttggcttcagcataccgaggagaggaactaccgacgtgctaattatcgcataaaacacactgtacggacgcat

SEQ ID NO: 243292 - DNA, 172 bp, Gossypium hirsutum
gccgaaagagaatggaaaaaggtttctgggatctggtgaagaccagaaaaagcgagagaactgacaatcaaccaattatccaattaccgcataccaattccttggttggtagcgcccaaagggatgcatttccttcagctaaaaaagctgaggctcctagaaggcgtgctga

SEQ ID NO: 243293 - DNA, 247 bp, Gossypium hirsutum
  unsure (1)..(247): unsure at all n locations
tcgnccacacgatctgatngaagtgtttcatgagtttaggggcagaaagaaaaacgggagtattcgaaatgatatgcgacccccgcatcctcaaagcaagcataggataataatcgacaacaaaaagatgctatcaaagcattaatgctctctatcaaagctggaggtgtcagaattaacctaaacagctgcaagcacaggtatgtctgaagagtagcaacggacgccacgtgacctgattcaagca

SEQ ID NO: 243294 - DNA, 413 bp, Gossypium hirsutum
ggctagggctgacactaggaaacgtgtgaaaggcagatttgtgaaagcaggcgaagaatatgattatgatcctctcgttgcacggaacttctaaggcgaattatggaatcatgcccctgatcatgaaggtaagagatttaataagatgataattagtccatctaaaaatgtttgtaaataatgttattcataatggcatgataagcattgaaccgagactctagcctattttcagtaaagaaagaaaaggtctacaatggatcaattgataaaataaagagcttattgtagaatactagattgaagaaattaagaaatcagtaacattagagcgaagaaaatataaagaaacactgaaaatttagtcatcttcagattagcctacttttttttggtttatagggaaagtccaa

SEQ ID NO: 243295 - DNA, 357 bp, Gossypium hirsutum
gtaaagagtcacaaagaagccgctcaattcagacaccgtactttcccttactacgaccagctgactccatatacgtaagagatcgagcgactgggaaagatgctcaaacagctgctgatgttcaataaataaatgctgacgatatacctactacagatatgaatgaagagagaaacacattctatgactgcgaagctgacgtctctttggacgacagggatgtttttggtccggagcggcgaggagatagagaccaaaggggttcctcatcttcgaacaagagaaagaagaaatctgatgctcgtgataatatgtattcttcatttgatgaagctgccactttattggccgaaaaca

SEQ ID NO: 243296 - DNA, 242 bp, Gossypium hirsutum
cccacgcgtccggaaaaaaactgaaaggtgttgtatagcattagaagatatccaagcccaatcaatgttttcagatggccaaacatttacaagttacaataatctaccatttgcagtgaaatgtttacagcttataataacctcatcatttgcagtgagtgctggtacataagcactcgccatcatccctttcatattgcctgcagtgctaacatcaactattactctggtacacccccccc

SEQ ID NO: 243297 - DNA, 172 bp, Gossypium hirsutum
gaaaacattgaaccaaggaaccgcaaggggttctgctattggatttaagttggacagtcttctaaagctcacagatacacgtgcttcaacaagcaagatgacgctgatgcattatctttgcaaggtcctagctgccaaggcaccagcacttctagattttcacctggaattt

SEQ ID NO: 243298 - DNA, 180 bp, Gossypium hirsutum
atttgaagtgattgttggtatcttgataggggagtgtatattaagagaaaaagagttggaattgttgcttttgatgcataagaatttgattttggatcatttatgaaggggatgtgtgaattatgataaaaattttatgggtttgctgtgattgtggaagaacaaaggatagtttatgtt

SEQ ID NO: 243299 - DNA, 223 bp, Gossypium hirsutum
  unsure (1)..(223): unsure at all n locations
tgatgggtgggatacttgatacattttgtttgtcataaacagaaaaagagatcatagttggcgctttttatgcatgaggaatgtggctttaagctcatccaccaacgccttganacgaagcatcataccatggtcatgctatatttgcgatcaatgatgaacacactgtcggataacccacccaaagcgtctgtaatgatagcatggaatttgatcattagac

SEQ ID NO: 243300 - DNA, 137 bp, Gossypium hirsutum
atgggtagtgatgggtgggatcttgagacatatgtttttatatacagaaaaagagatattattggcgctttttatgcagaggaatgtggcccaaactcactaacaatcgacttatacaaataacaataatagtcttt

SEQ ID NO: 243301 - DNA, 284 bp, Gossypium hirsutum
agccgtcggcccacgcgtccgggttggtgcatttgaaaccgtcatctccctccaagacggcaaaccttcatcaaacaccgtcacttgagttgtgaagaacatctctaataacagtacgtttcagggaagaggggtggagaaaaacctaactttgagagttactcgaatacacactttgagttgaagagatttcatgttgactcaactctagcttgatcacggaattcgggtctgactgcatcttaatacagctgcaagggtctttttttttcgagttctacaat

SEQ ID NO: 243302 - DNA, 409 bp, Gossypium hirsutum
cccacgcgtccggaataatcattcttcagtgttggagagtgtttctttcatatttggaatcaagaatgagggtgttaggggaattccctgatttaaatattttagaaccaaaaggtggtgttgtaaacgcagtaaataacaatcagatgcagaatggaggttcgaatgaggctagccgcagagctggtggtctctctggaaatttacatgaacccgaccttgagatgcatggaaacatcccattgcctcaggaggaaatacaaccaggctcagttggggattcagcttgtgaggccaatcctacatcggctaccaatgtggtaacgaaggccgaatctcacttggctcagcagccgatagctaaattatcaaaagatgccgagtccactaaataggatttgcctcatgc

SEQ ID NO: 243303 - DNA, 301 bp, Gossypium hirsutum
ggaagatactctaagagaagagttttcacatacattggctgataaggaagaggaaataaaggagaagtcagcaaagattgaacatgctgagcagtccttgacaactctgaagttggagttgaaggctgctgaggcaaagattaagagttatgacacagaagtatcctcactaaaggttgaaatcagggagttaattgacaaggtagaaaatactaatgccaaggccctgtcatttgaaagagaagcgaagatattggaacaggagaagacacatttggagcagaagtactcatccgagttt

SEQ ID NO: 243304 - DNA, 368 bp, Gossypium hirsutum
gaacggtctgagtcttgatggaaggaattttttcgtcaacgaagcacaatctcaccgaagcggtgacggctgtggtggtggaggattttgaggaaacggctggtacaaccgtctatgccgtggatattgtgttcgccgtaaacgtggatatggaagtggttgttaccgatgtggacaccgggatggtcgtggatacggataccgtggatcttcttactcaggttgcggccgctcttgggctcatgttaacgcagtttatgatttgagtgagcttcaggtcttattttatggtttaaggggtttgtttgctagtgtggggtttctatccaaatgatatgttgcatcattcggagtcttaaaacatctaa

SEQ ID NO: 243305 - DNA, 305 bp, Gossypium hirsutum
cggacgcgtgggattatttgttgcttttttctgtaaaagagaattttaatctctcatcatgtgtaagaaatttgtaatacgtatcttcctaatatcaaaggcaatatttattatgtgcaaaaaaaaaaaaaacaaaaaaaaaaaaaaaaaaaaaaaaaaaaaaaaaaaaaaaaaaaaaaaataaacacgggcggcactgctaaaaagagccccatatacgcgcccccgtctgcgcctaaaaatctcctattgttgctgtaccgagatgctctaaagcgtccggggttttacatcgacaagtctgg

SEQ ID NO: 243306 - DNA, 401 bp, Gossypium hirsutum
cccacgcgtccggaaatactgcttagtatgtttacattagtcactcattgttgtctgttccatcctatggcaagttgcttttgaatttatgcttgtatatctctgctgctgataggaatttacgacatggtgaatgcatttctttcatttggctgttgcactacatcacaaaaggaaagaaagttcatcatgttcatttctaaagtgcacaataataatgcaaacaaaccctatacagcttggagattcgaagcacggaccattgatggtatcacaatctcactgtttgaacatagaatggaaacgataaactaactgagaggttgaaagaaatatggggggggccctttttaagaaaccaattttctttccccgcgcgtggcaagaaaaatctttttttt

SEQ ID NO: 243307 - DNA, 223 bp, Gossypium hirsutum
  unsure (1)..(223): unsure at all n locations
cccacgcgtccggaaatgctgcttaagacgttttctttaaccactcagggcagnctgttccagcctgtggcacgtaactgttgaagtgatgctgacatatctgtggtgctgataggaatttacgacatggagaatgcgtcactatcatttggctgatgaactacatgacaaaaggaaagaacgatcattatgtccattcatgaagtggagctttataaaacaa

SEQ ID NO: 243308 - DNA, 391 bp, Gossypium hirsutum
  unsure (1)..(391): unsure at all n locations
ccgtccgcaacatacgttctggtttgcatcggagtgcctcttactaatgctcgttcttctatctctagttcattcccatagacataggtgctcgtcgtccgatacctatgtgtggannactaagcttcagatacctcgaacctgggccttgaccaagtacanagaagtgtcccacactaaagcggnntcaggtaaaagggatgtgactagtgcgtggaaccctgcaagaggatnatatttaaatgccacaaaagaagaaattgctatgcagcgatgactagcagctctttgttggtactttttataggacattaaagggaaacaacatgaaaagcangaccaattctcatgtgtctcagcnncacgtgaaagcggatccctacttcattga

SEQ ID NO: 243309 - DNA, 410 bp, Gossypium hirsutum
cccacgcgtccgttttttataacgaaaatctttacatggaaaatgaatacaataacaatgtggtcgacaacttgatgagaagctcatcgtacaactatggattcagtcggcgtgccacttctccagaaatcataagcttggaaccccattcttttcgaagtgtcaaaatatcagctgatgattttgagttcaattccccttcatctcctgcctcttcactttgtcatgaaccagtcagtgtcccaagtgattcaatgcaccaaaaagaagatgatgaagatgaagatgaagacgaggaagaagttatgagttcttatgtcattgagatcaactctgatgttagagagagtaatggtgaagcagtttcaattgatgaagcgattgcttgggcaaaggaaagatacaattca

SEQ ID NO: 243310 - DNA, 411 bp, Gossypium hirsutum
gttaaaacaagagcaagatgatgatgatggtgatcatgatgatgatgatgatgatcatgatcatgagcacgaatctacgacatgtggagatggcatggctcacgaagtacatgaaacaagcttccacaacgcaccagaaagcatgacaaggctggttacccatcttattatggaggcagagactgaacaaaactgctacggtgatggagaagccagctcttatatggttacgcagaagctggaatcatggaaagaggtggaatcaaacaccatatacatgatggcgggacaagatttgagaagatcagatgttgatgaggtggacagaattgtattgcagattcaagagaccgcattagaactcgaagacgctatcttcggactactgatggaagaaatgtcggaagaact

SEQ ID NO: 243311 - DNA, 235 bp, Gossypium hirsutum
attagcctatattaaaaattgaatcattattattctactaaaaaaaaaaaaaaaaaaaaaagggaaaaaaaaaaaaaaaggggggaaaaaaaaaaaaaaaggggggacggtatggggggaccgggcttacgttcccgtgtttgcgccctcctatctcttgtttggggggccttattttttctttattggcccttgttttgcaccgtcgtgtctgggatttaccctggggttaccc

SEQ ID NO: 243312 - DNA, 404 bp, Gossypium hirsutum
  unsure (1)..(404): unsure at all n locations
tcggtggaaaggttccaacctttaggggaatggaagtcgtcaaggaacatgtttgttgatgagtaagtgacaatgtttttacatatcatttctcatcannccttaaaaatcgagttatcaagcatcattttaataggtccggggaaaccgctagcagattatttcacaatgttttaaacgctgtcatacgcttgcaagatgtgttatttaaaaaggcagagccaattacaactaattctacagatccaaggtggaaatggttcaagaattgcttangtgctttagatggaactcgcatcaagattagggttcgaacagttgataaacctagatatcgaacgcgaaaatgtgacatagcaacaaatatgttagggtgttgtacacctgatatgcgttttggttat

SEQ ID NO: 243313 - DNA, 383 bp, Gossypium hirsutum
accccttactgtcatcccgttggatgaatgggtattcaacacggaagcacaccctttacggatcgttaaccgtaacgatgatattgctggttcggaaaggcaacataaaccaactgttggattacaaggcaggaagacaggtcggtttggaggtaattaggactcatttgcagttcatttatttatttacttttgtcggacaacaagaaatcgttgtcattcagtggttaggatatctggcttctatttattgttttcggctgaaggaactcgtacgatttgaggcctcaaacatatgacaggcttaggattcttgtagtttctggaaatagatagaagagtttctctggtttccgtcggagaaacgttggtctcgaactata

SEQ ID NO: 243314 - DNA, 404 bp, Gossypium hirsutum
  unsure (1)..(404): unsure at all n locations
acgccgtccgcccacgcgtccggaacttttgggtattttcgtagttgagaggtgaatatcttcttctttgagatcaaatttctgataataatacagctctgtgatcaactgcacgtattctgtagaatcaaatcaaccaatcaacagatttagagaagagtgtnaatttcctgccttagcctcttaaaaatcgaagcactaaatgttgtacgattcatatatactgaaagcttgaaagtactgtctttgtcgtaaagaaataaagagtcgaagagcttgcgttcttggtttgaagcctcaaacatatgacaggcttaagattcttgtaggttctggatatagatcgaagaggttctctggcttccgtcggagaaacggtggtctcgaactatatcctgaaagaa

SEQ ID NO: 243315 - DNA, 228 bp, Gossypium hirsutum
cccacgcgttcggaagaagtttatggaacatgatttttgggagaacacttcacaaatatctactgttgacttttatcaagcacagaccgtctctacagggttaggtttgtcacttgactatgacaataattatcaaacgggcttttcgggtgattcggctatgttgaccctcattggtgatgacatagataatgagctgcgacgaaacgacgctgacattgatcggtt

SEQ ID NO: 243316 - DNA, 405 bp, Gossypium hirsutum
gggttgacgaatttcgtattaacagtagtaggtgttagcgctgtggttcttttactgagaagcgacgttaaacaatcggctgccagttttaggcgcaacgttaagcatataaagaattggcttgaagaagagtcttctgctgcttccaaggcagctgagaaggtaaagcccaaggaactggactccaaggtccctcctaaggagaaagactagtgtctttatagggtatttgactttgattttctgttatcatttttgaatatctgggttgtgctttaggattcatcagtcttgattaatgtctgggtatttctgcacttcggaacttagttccgttgccttgcctctttcggtttgttaatacactgacatgtatctacttagatgttaatactatttgagaaa

SEQ ID NO: 243317 - DNA, 408 bp, Gossypium hirsutum
gaataatttcagagagaattccaaggctcaaaaggttctaaatgaagcttctatctcccatttgtaatctcaccaaagaaagtcacaaaagagaattgaaagttgcaagattctaggtaagcagctgtttacttgctcatgaagctcggagttcatcgtttctgaagatcagaaggttcatccgtagctttcccatctctttctagatttgtggagttatgcttcgcattttcgaccaaacgttgtccgtgacttcgcaacgagaagaaagcccttgtcctaatgacgcatgacgacgtgcacttcaaagaatttcagcttataaataggccttagttactttaggtttaacataacagaaatatttagattgagcgatgtgcacttcaaggaatttcagcttataat

SEQ ID NO: 243318 - DNA, 253 bp, Gossypium hirsutum
ccggaacggaaggcccgggccgaccgacccgtcacgccttcgataccaatgtatagaaggctttattatggtgcatgtcatagataaaatatgcattgctgtggggtcatttatagctgcctcaggaaacttgatgtatggaggaagaaaatctttcatgctccgaccacttcctaacgaatcgaaacgaagaacgaaaaaccttcacgagggcggatctggtaccgccctttgtttgaactgcttgctttat

SEQ ID NO: 243319 - DNA, 155 bp, Gossypium hirsutum
ttacgtgcgcgagcatgcaacaacatagctcttctataatgccacatgaacacaaatgacagagcggcaaccaacaacgatccgactgggaaaaccgtagcggtacccaacacaatggtgttgctacacaaaagcacagcggcaagtgatgatat

SEQ ID NO: 243320 - DNA, 355 bp, Gossypium hirsutum
tgattctgaggttgcattccttaagtcacgatgaggatttgttcgtatagccatggaaatggggtgtccactggtcccagttttcgcctttggtcaggtaagtagtgcttgttttctttatcattttaattctcggaatccccttttcccactctttttgcagcttcagatgcagaaaagtgaagctaatttccttgctgttttcttacttgtgctgcagtcacatgcgtacaagtggtggaaaccaggtggcaagctcattctttaactttcaagagctatcaaattcggtcctatgctattttggggagcttttgggtatgcactaaattattctacttaccttttatgctca

SEQ ID NO: 243321 - DNA, 356 bp, Gossypium hirsutum
ggattctgcagatgccttctttaagtcacttttaggtatgagatcgactacccatgaaagcggggtgggcactgcccccagaagtcgccttctgtcaggtcactagtgcctgtgacattgatcattccaattctcggaatcccctcatcccactctttatgcacctgctgatgcataaaagtgaagctaatttccttgctgtgtgaacacatgagctggattcacatgcatgcaagagggggataccaggtgggaagctcattcttcaactttgaagagctatcatactcggtactatgctctaatgaggagctttagggcatgcactaaatcatactacttacctgtgatgctca

SEQ ID NO: 243322 - DNA, 162 bp, Gossypium hirsutum
gcacttagtgtttcactaatgggaacttcctatgattcaagctcggacatctcagatcgtttggctgagaaaaaaaccaaaggtgcgttttgatttatgtggtccgggtgaggacaaatgtcccccctgcgacaaaattgttcaagattttggttacactca

SEQ ID NO: 243323 - DNA, 321 bp, Gossypium hirsutum
gttactttttctgatatgttaaaagttgtccgggaaagttttgaaaccatggcctgaaaaggaaaatgagatgagaaagtttttttgtttttttaataatttttggttgatcatctctgtcgatgctaacaatgctgagagaactcacttgaggctggtaggagaagaataaaaaaatgaaaaagatttgtgtgaatattggaatttttttgttttgtttgttactgtcatgtgagaattgagatgatttggagtttggtatttcatttctgataggatatttatatatatttgtgagcttatctcaacttacaacagcga

SEQ ID NO: 243324 - DNA, 406 bp, Gossypium hirsutum
gaaaaataatacatcttaatttttcattttctttgcgcgttccttctgttctgtcttcattttccttttgttctgctggctttcttctttttgtgtgtttgcaggtctatggaggaggtcaacggggcagaggcttcctttttggtgcaaaggacgggtagagccgtccctcgagcgatgtttgcactgagaacgcacatggctggcagaaggaaggcgcggcgctagggtttcggttggctgaacttggtttaagcatcggtcctatcgggcttaggtctttcttttaattgtgggcctattaggttgtaattttggcttgagttaattgggtttgatgtttgggttgatgtaatgggtttggattggccctttaatgggcttattatttgggttatttatggct

SEQ ID NO: 243325 - DNA, 296 bp, Gossypium hirsutum
gcaaagctgcctattgtgttttcagtgactcagctgagaaaataaagttggaatgttcttcaattttaaggttaccagtttgcctgttgggaaataattaatatgcatgtatgtatccaatatacatatagatgtgctcccccttttttaataactattagattagattagattagattagattagatttgagaatcttttagttaacttcatttggaaaggggtataatgtaagatgtaaattacatcttttacatcttatgattgatctcggagttagattgtatttttttatt

SEQ ID NO: 243326 - DNA, 409 bp, Gossypium hirsutum
cggacgcgtgggctgtttcacaggcttttaagtctggttacgaatcttctaagatagcttcgttactggagtgtttggctatcatcacttttgttgggggaatcgaaccagaggaaacagaaaaatcaatgcaaattatgtggcagttggttcaccctaaactaggctctaatgttattactgtcaaaccttctgctgttgtaataacagcggttgggtctgcctggtcatttcttttgacaactatggatagatggagtctcagtcccaaactttggctagacaaaccttgtgagattttgatgcttccacgatataatgagctaagagacccgtcaatcttgagaaattatgcagatccatcacatatttgtctagtttgctagataaagatgaccgatctgttcgc

SEQ ID NO: 243327 - DNA, 237 bp, Gossypium hirsutum
cggacgcgtgggctattacacaagccttgatgcttgtatacgaatcttctaacataacgggcgggtcttaattgttggggtaggatcacttttcttcggggaatctaaccatactaaacacaaaaatcaatgccaattatgttggatttggctcaccctccactaagctctaatgttattactgacaaaccctctgctgttgtaataacactagttgggtctgcctcgtcatttctt

SEQ ID NO: 243328 - DNA, 258 bp, Gossypium hirsutum
taacttctaggacaatggaaatggcaaaagaatactgtcaggttgtagaacaggatgaaaagcatagaaatctttcatcaactttggaagagctttatgaatgggaaaagaaattatataaagaagtcaaggatgaagaaaggctacgggttatttatgagaagaagtgtaagagacttattatgttagataaccaaggagcagagtccagcaagattgatgcaacccgggcttcaataagaaagttgttgacaaaaa

SEQ ID NO: 243329 - DNA, 218 bp, Gossypium hirsutum
ggtggtaattacacaaatatacatgtggtctagatttagttttaagcctgaaatatcagttcttaatggtaataatacgacatttatttaaaaatcttccttctatttgtaatttaaaaaaaaaaaaaaaaaaaaaaaaaaaaaaaaaaaaaaaacaaaaaaaaataaaaaaaataaaaaaaaataaataaaacaaactaaataacaatataaagaca

SEQ ID NO: 243330 - DNA, 246 bp, Gossypium hirsutum
  unsure (1)..(246): unsure at all n locations
gttttattttaggggttgttccaaaagtagtatagtttgttttattagtatgtgacctgaaaaatttaagtgtctatattctctatgttataaatgcaaatccatatgccatattccttggatttaaaatattgcaagagtatgcctgttggtttttcaaaaaaaaaaaaaaaaaaaaaaaaaaaaaaaaaaaaaaaaaaaaaaaaaaaaaaaannnaaaaaaaaaaaaaaaaaaaaaaataaaaa

SEQ ID NO: 243331 - DNA, 402 bp, Gossypium hirsutum
gggaccgacagatctgtccggttctggaaggaaaatctctgagcacacggaataatcttggaacttaattgacccgacttggtaaaagctatgtgcattatgagcgcctctggttctgcgtctggcttgaaactcgtatgcagatttggagtttatattgaggcacatcgttggagtgaatgtacaaattgtgaatcatcgccgagcccccgtatttccgtagtcgtttattcacctaatggagagaaacacacgcacaaaaattgcactttgtttaatttccatttggttgaagttattaatgtttgattagtgttttagttattttggtttgtgtagaaggaaataagtgaaatgaaatgtaagtaaccatatttacagtttgattaatttcatatgctc

SEQ ID NO: 243332 - DNA, 202 bp, Gossypium hirsutum
gtgattttccttctcagccttttcttaaaggatggagaggaacctatccgtggtttccctgctatgcatcattctgtctaaagcaaacatattgttctatgcagctgctgtggtaagccaacgcatctgaaagcgtaatcagaatcacaggcattcacctgagctggaacacaatcctgaaacgacccttggacccccaaaa

SEQ ID NO: 243333 - DNA, 290 bp, Gossypium hirsutum
gtcctaaaggttgacccataagcttactatattattgacacgttttgagagaggccttatgaaggatgcaatcaaacattcattgtggaaattgaccggaattactttattcacaaggttaccaatggtagctaatgctgtggttgttattgaaccggttgatcaacaggtcattgggaaggagggttgtgttcaaggggctgtattaaccaagcctgagaaatcaatcaagactgaggacagtgaggaggttgtttgccagggtaataagtcctgcaaggaatacataa

SEQ ID NO: 243334 - DNA, 334 bp, Gossypium hirsutum
gtgcttccatgattgaagctccagtgctttgggctggtcggctttgtatttattatgctcttttgaagtctgggttagctggatctcaggctaacccacttgtttcagggttggaggagaatggtgatagtgttggcgaatctggtgatttgggtttctctaagtggttggacaatatacgagggaaaccagctccactccactctggactttaagcaacgaacattctcggaaaggatgaacttaatagttgacaaggaagcagctgacaaaagaaagctggtcagcaaatggcatccgaccacgaaaggtacacttaaaaagaactacaggg

SEQ ID NO: 243335 - DNA, 301 bp, Gossypium hirsutum
cacatggttgctatcttcttctgcatttcgacaccgagggcaggagatatctgaagccactctttttagtattaaattttttaaagtaggaataaagttccatgatagacgccaaatagtgatggcaatttttgatgggagatgtaaattccatagttttctatataaattttttgtttcggtctgtattaaataagcactaggacccatatttgcctcttgtaatagtttataggcacttctgactgaaaattcgctagaatgttctcctcagcagacttgaaaatcattatgttctttc

SEQ ID NO: 243336 - DNA, 385 bp, Gossypium hirsutum
gagaattggtacttacttttataagggagtattgtatggaacggttggatttgcatgtggtattattggccaagggatcgcgaatttgataatgactgccaagaggagcatgaaaaaatcggaagaggacatacctgtgccacctcttataaagagtgcagctctctggggtgtttttcttgcggtttcatctaatactcgataccaaatcatcaacggattggaacggttggtggaggcatctcctttggccaaacaagttccacccgttgcaatggcgttcaccgtcggcgtgcggtttgccaataacatatacggcgggatgcaattcgtagattgtgctagattgagtggcgtgcaatatactgcaaacatgggtttcatg

SEQ ID NO: 243337 - DNA, 391 bp, Gossypium hirsutum
cccacgcgtccgcaaaaattcaatttcttgtgccactattactactactactactactcccttcccagggttcgataaggaaaaaaagggtagaaattggtgtaaaatgttggctttaagcgtgaattcaaaaaggcaaaggcgaccgaacgttaggttaggggaaattggatatgtgtctgctgcttttgcatgtgggttttctcagaaaactaaagaaaatctggttcacaaaacatggaaacctgattctctctactctcaacacaatgaacttgatactgttattgagttttcttctaagggaatttctccagatttcttcatatcggctgattcccaacacaacacagagaacaagaacccgaattcttcgaaaccaggtttcgat

SEQ ID NO: 243338 - DNA, 388 bp, Gossypium hirsutum
cccacgcgtccgattcgatcaaatgattgaatcaggattagaaccagataatgcgacatatatgactcttatatctggctattgtaaaagaggatatttagcaagggctttaaatctttttgaggaaatgtataggaggggcatacagccagatatgcgtaccatttcaactgttgaccattgtatcttgaatgccaagagagttgtgagaaagtagccatactccacacaagacggtttatcttatcatgcattgaagtatcctgctaatatgtagcaggctgaggaaagctttctctctatgagtagaagctttatgtgcacttatgattcaatatgatgaattctcttgcatttactatgtagaatagccggaggatgtcaaaat

SEQ ID NO: 243339 - DNA, 326 bp, Gossypium hirsutum
gtcgcggctgtttgtatataaagagaatgaaagccggcttacttcggaatatcgacaagaaatttgcaaaccaaaaaaaaaaaaaaaaaaaaaaaaaaaaaaaaaaaaaaaaaaaaaaaaaaaaagaaagaaaaaaaaaaaaaaaaaaaaaaaaagaacaagtgcaaaaaagagaacaaaattttaaataacggaacctaaaattcaggggggcgcccttaaaaagaaaaacagtttaaccgcgaaaaatcggatgaaaaccaatttaatatggcgcgcaataaataaatctatggggagctggttaaaaatcaaagaagtggaaa

SEQ ID NO: 243340 - DNA, 305 bp, Gossypium hirsutum
accgatgagggggctaaatatttctattggattccgacaaacgcagcaaaatggtgccgatagctgcatgcccatgtagcagataagagctctcagagaggccgcgagagcacagataaatagacgcagttgaaatctacttttgacgtggatacacagtacataattaaatgcggctatactatcatatactcccttggatcataacatcttataccatgcaaagcaacacaagctattcagaagtgttcaaacattgtattatccaatattctatatctttgcaattcaatagcattcatgta

SEQ ID NO: 243341 - DNA, 386 bp, Gossypium hirsutum
cttaattattacatccaatattttattgttttttttattgtgaaggataaaatagtaattttatttttagtagcctacaaggagataagaaaatttgaacatcatctacccatattgccttagcacacatgaatgaagtaaaccttcacatatatgtatgtatgagaaaaaaaaagtaggtttgccatttcatgcacgaatgttcagtgggtatatctattgtttctgctgtatatacatacaaaggtacgtacgtacatacatacatatatacatatgtgtctttaatttgtttttcgcttcttttggtcaagttggatatagtgaaatcgcatataaatctcgaaaatgaaggcttttgattcccatgtgaagtgaaatgtata

SEQ ID NO: 243342 - DNA, 398 bp, Gossypium hirsutum
gatgagatttggggcattcaatttggaagttattcaagcagctataagaattgccaaacaacagggtgtctctgtttcgttggatttggcaagttttgagatggtgcggaattttagagtacctcttcgacagttactggagtcaggggatattgatctctgctttgccaatgaggatgaggcaacagaattgctaaggggtgaagggaatgcacatcccgaagctgcagttgaatatctgtccaaatattgcaggtgggctgtggttacattagggtccaatggatactagttaccctgttaagaagtgaacagctttttcagtgaaattggcctaggaattctgtttgcttattgaaatatttaacttccttttatatgttttataattataattt

SEQ ID NO: 243343 - DNA, 323 bp, Gossypium hirsutum
  unsure (1)..(323): unsure at all n locations
cccacgcgtccgcccacgcgtccggggagtctcaaatatgaaaatatggttaatttgtttggctttaatcgacatagtggtgatggaagaggtgatccaaattgatgctgctatgacaactcaccacccagaggtccctggtcttgtttcttaccgtcgccttctccaagaagatgttaatccctggcaacgtggttgcttaaaactcactaggtgtcgaagttaaagaatattttgataatatgtgacggtatatttcttatataaatataaaaacctcttcatattaatgcaacatgattaatactaaaaaaaacacanna

SEQ ID NO: 243344 - DNA, 302 bp, Gossypium hirsutum
attgttcacaaactgactgttcgaagctgttttaaaccacccattgactcaaggcgtgttcgacatacatatgagatcagctgggattgggctttcacgttatcgcgtactcagcttggaagaaatggaatatgcatccaacaactttaacccatcatagtttatgggggaaggatctaacggtcagctctataaaggttggcttgtagattggtcagtgatggtaggaaaacgttagcaactacatcagaagcatgcacctcaaaatctgatgcaacacgatgtagttttgtccaagctaa

SEQ ID NO: 243345 - DNA, 185 bp, Gossypium hirsutum
gaatagtaaaggaactaaaaatgatcaaattatagtaaaaggattaaatccaccaaaagcacgatggcacaaggactttcttgcaatagatgccttgtgcttaatgcctgctcggtatacatatatgatatgtacatatcatcagcatctttgtgttttttgttcccgattgttttggtccaatt

SEQ ID NO: 243346 - DNA, 203 bp, Gossypium hirsutum
cccacgcgtacgaccactctttcggtgcagtttgaagcccgcagcagaaacggggccctatggtcaagtgcaaccgagacttgcgcgagtggtccctattacggtagtgaatactagacagacgagcagaacttcagatccataatctgatacttgacactgaaattatgagagctccgcattgtaaatttgtaacagccgca

SEQ ID NO: 243347 - DNA, 294 bp, Gossypium hirsutum
cccacgcgtccgcttggcggtaaatgcgagatcggtaaatttgtgcttcttgtgcatgttggggcctggttcaagtttgtaagtccggtttgtaggacgattaaaattatattttcgattaattgattcaaaactttacatggaaccgtgagatcatattagaaaaaaacttattttacatttgtgaaaaaaaaaataaaaaaatatttaagaatataatatagaacttttaattattaaaaataaatttaatttggttaaatttatttagaaaaattttttctttatgttttt

SEQ ID NO: 243348 - DNA, 388 bp, Gossypium hirsutum
ggccgccctttttttttttttttttacatcatacgtgctactttattattattctagtagagggaggttttcataatttattacataaagcctaacaccaagtaggtgatagagttatacaagtacggtacggagcctaagcgtacataatattggatacacggtataaggatcatggacgaggcttgtgtggctcgggatgatgacctggaccacctggtcctggcggtggcgcatgggggcctggtccaggaggaggagcatggcctggaggaggatgatcagcatgtggcggacctctttttcaccatgaaaatatgggtataccatgggaaattgcaaagcttggggtcaagctaggcatgtggggaactgttaggaagattga

SEQ ID NO: 243349 - DNA, 285 bp, Gossypium hirsutum
caacattccacacccaaagtcaaaaagtcggcttctaatcatacttggatggaatctaaaagggatttccagtccctattgaaacaaacatacccctgttaaagggtctctgttcatttaacatcactctaagacggcaaaactcaccccgtgtttcacatctatatgccttaggttactactgaaaggatcgctaaggtccttggtgaacagactactgatatgcatccatagtgatgtgacagatagatactcgatatgaatcatgtttacgttgactatgac

SEQ ID NO: 243350 - DNA, 448 bp, Gossypium hirsutum
cccacgcgtccgcaaatgtgcaagccttgatgcacaaggtaaagctggctgaagatatgctggctggaggctccttcacatgtggtttgaatcaacttgttcagagtcacttgacttcacagcaaccgattgctactaataatcacaatcttgggcgggtggtaaatgtctcccccactattaccgttcaaggagattcttcttcctatgctggattcacagacatggggaactcaccaaatcttggcctgccaactcttgatttcaccaattccaatcagaataatattggaattggtggtgatgctatgagctggccctaaagattaatttatttttatatgtatcaactgcgtccctgctttgctttgtcgattagatttagatccagttaatgtactagtgatatttagatccagctttgctgactgctgaaattgccttagtc

SEQ ID NO: 243351 - DNA, 267 bp, Gossypium hirsutum
aaggaatcgaaaggccatcgatgggcgatgttttgtggggacttgagttcgcactacaactgcaagaaagtggtgaggccaagcttaaatctgttaatggtggggctgccactgaagcagacattgatgaggaagcgccctttaaaagccaaagccttgaattggaagatgacagtggggacgttttcagtagccctcgcgatcatgttcttaacttcaagagcactagcactttcagtttgacgacaagtgatgatcaaagttttg

SEQ ID NO: 243352 - DNA, 460 bp, Gossypium hirsutum
  unsure (1)..(460): unsure at all n locations
cccacgcgtccggaagcacggaggattttgaggatttatttatctccaaataaagctttgtgactttgtttggctttccctttttgtgttctttttcccctttaaacctttaagatttatgtttagcataaataatctaccatttccaaatgcaatagaaatgttcattgcatcattagattggaccccccaagtcatagacattgccatcgtaagttattaagtggaagccacctcttgttgccccacttccccaacttaaaaaaaaaaaaacaagtgngggggggggggttcagagtctatccttctttaggagattcactgtgataggtatatgcttatttccctgtttcttcccttatgtcaaggactttggtggtccatctgttcccttgaatagaccattggttacttttggggcaatattgctctaatgaattacaggaccctttatttcctt

SEQ ID NO: 243353 - DNA, 269 bp, Gossypium hirsutum
aagccacataagccactctagatatgttgttttgtaccctcttttttctttttcttctcctgttgattgaactggctatactattatgaagtctgttttgttggaaggactagttgggcagttgaattggaagccattagttgctttttgcatttggaagtgttgaaactgtaaatcttttaacactgaatttgtgcatgcatagttggagtaagcgttcaacgaggatggtggttggtagtgttgttttgcttagtttatttcacaat

SEQ ID NO: 243354 - DNA, 355 bp, Gossypium hirsutum
cggacgcgtgggcggacgcgtgggtgcaggttgagcaggtaaggacggatgtgaccgtggcggtgcaagtggcggtggcagaggagttgatgagcggcagagggtaggtgcggcgctagggttaggtgcaatagaggctagggttttttgaaaatgttttagttttgggcttgttgggcctttagtttttttgggctgtaatttattattttgagttaggtctgttttagggtattgggtttgatttaaggtttgggtagctgggtttttgggccccgggcaaatttgggcttgtacagtgtgtatatatatacaccatactaatttaaaattatagttattgaatgtgatatca

SEQ ID NO: 243355 - DNA, 412 bp, Gossypium hirsutum
cccacgcgtccgaaggaaaatcaaaacaacgttgagtctaattgaatttcacagaccctcaagatggctaacctcatgatcatggcggttctcctggttgcggtgtcgacggcggcaaccgttacggacgcgcaaggcacttgtggcggaaaagctagtggcctggtcttcgtaccatcctaaccacaaccatcaaacctcaggatgactgttgtaacccgttcaaggaagaggtacccaacgatctttcctgccttggtaacctatacaaagaccttaaagttttggcttctttgaacatttacaccgcgcaggctttaaatgtcactcgtgaatgcggcgtcacttactgatctaaccgtttgcaacagcaacagctcttatacaagctgtgctacatccccaccaggag

SEQ ID NO: 243356 - DNA, 266 bp, Gossypium hirsutum
gacattctctacagtcaagagtggaatgattttcattcttcaaatgttctgttgtactttgcgtcattattgtagagaatgtcggttgaaagctttttaagaacacagaactagtcatatgggtttcttcttccttaattttcttggaattgtcttcaagggaggaaataagttccggaggctgttatcttagatgtttgctgatgtactgattacattgatcattacaattgatgaactatatactcccagaaattttcttatgt

SEQ ID NO: 243357 - DNA, 433 bp, Gossypium hirsutum
caaggaccaatttcgaggactatttttatattcctcgaaggaaatatcatattgttaatgagcaagagtaaatctaaagttttgtttaaggtttttccattttctttagcaaaaaatttatcaatcaaaggcttataaaatattatatttagaagaaaactgatgaaaacaaaacgaaaaggaaataaagtttcaagataaactcattggtattaggaattgactcggaaaacagctcattagttgagagaagttttttttttttgggttttacaaatttataaatgtggaaagcctctgtcttaaaatttgaaagttttgattaagaagtttaaggatcaaattgatagaatttttaaataaaaaagagttaaacttattgaattatttagatttatgaacacatttatagaatatgtaaatattgatgact

SEQ ID NO: 243358 - DNA, 227 bp, Gossypium hirsutum
gcgacactcttaccagaactagtgcaatgattttaagtcctttaacatcatgctgaactgtgggtaattagggtagttcatcgaaacatcatagctaattactaacacacacctagtcttaaagattccttattcattaattagcttgaaattaacttcatctaatgaaatgacatacatagactgtattccaagatgttagattcatgtacagaatactctgatca

SEQ ID NO: 243359 - DNA, 299 bp, Gossypium hirsutum
cccacgcgttcgcccacgcgtcctcccacgcgtccgcttagatttaagaatccggattttagaattttttaaaagaagattaatggtttaaagtcaaaaaaaaaaaaaaaaaaaaaaaaaaaaaaaaaacaaaaacaaaaaaaactgaacccacaattgaaactatccaaaatgacgttcgcaaataagccaaaggatgtcactgaggttccagaacttaatatcaaagaacaagagactcctgaagaaacagtagcctagccagatgcggaagagtccaaggtgactactttaccaac

SEQ ID NO: 243360 - DNA, 362 bp, Gossypium hirsutum
  unsure (1)..(362): unsure at all n locations
cccaaatcttacgatcttatttatttatttatttacaaaaaggggagggatattcaattatggttgttcaaggaaaaatcataccccgtaagttaggggcacaatttattgaatcttcaaaataaagaagatcacattagntttaatttcttctaatgagttgtgtaaaatagaatgcatcacatgatatgatatacaattgagcataatgcgggaatgaataaatatatctaaccataatggttagaataataacataggacccaaacattattaaattaaaataactccttaaaaaaataattaaaccatggataaaattggaattgactatcgtaaattattaatttaggacaaattat

SEQ ID NO: 243361 - DNA, 440 bp, Gossypium hirsutum
ggtatacccaatacgttaaatgtcattttttatttccccttcttagttatcggtgttataagccttgtattgtgtttttataagaattatttcaagttcagtttgcaaggtgaactatggggttggacttgttttttcattggtgtggctgctgttggggttggttcctcatactatcatctcgacccaaatgatgcccggcttgtgtgggatagattgccgatgacaattgcattcacatcaattatggcaatatttatcattgaaagaattgatttgcagaatggaactatttccatcataccgctgctgctggctggcttaatcagtattttgtactggaggttttttgatgacctccgacccttcgccaatgttcagtttgttccttgcattgtcatccccctcatggcaatcttgttgccttcgatttacacaca

SEQ ID NO: 243362 - DNA, 436 bp, Gossypium hirsutum
gactctaaaaatgaggtatcggtataatttctctactacaatatctatcactgggaacttggaacacttgcctattttttgttgttttagctctctgtagcctttccttggtttgttcagaagaatctgctactaatgagcctattacccctgatcaagatcaaggagatttgcccctaacaattgaagaatgaaaaggctaattttgataatttgcctaaacaactttatggaagggacaacgccaaagtgggtgtttcagctttcaaatgcattgaaaaacactcaacggggggaatctccagagtacatggaacttattgctgtcagaataagaaaaggttgtggtaaagctattgatttttcacacaacagtatccaagttctggtccatcctagagatggaaagtgtgccaatctggactgcattcgacag

SEQ ID NO: 243363 - DNA, 194 bp, Gossypium hirsutum
cccacgcgtacgcagtaattgctaacgatgatcttggttacataataactaccaaattttccgttattgccgatatcactatcggaatcaatgaatacatgactgatcaaacgtatgcttacgatagtcactctccacagagacgatattgagctacttactcttaactatcctcacatgcacactgaatatca

SEQ ID NO: 243364 - DNA, 384 bp, Gossypium hirsutum
cccacgcgtccgcccacgcgtccgcccacgctttcgcccacgcgtccgtccacgcgtccggcgacgcgttcgggcccatccttactttgcacaagtcagggcagcagagagcagcaggatgcggactcagtaactcaattcccttgggaggatttcatttgtaaatcagaaccagactcatctggggtaagagatttaatgtgttgtttaatgttctcaaaaatattgtgactgcggttctcaatcttaggcagttaaaaaggctgtggacgaaacataaacttctctttacttttcactagcctcggtaacttcgtttccgagtttatatacatttattttcaagaacgaagtatttatgctttaattttacaatcgtagctc

SEQ ID NO: 243365 - DNA, 386 bp, Gossypium hirsutum
gactctttggaagaaataaatctatgaaaaaatttcaatttttatatgatattttgattttgtaaaattgatatttatacttggatatttttttgaaaatttttcaaattttatgaatattatcatttctttaatttatatttatatgttttagaattgttctaaattatttataaaaatgatcttccttacattcttaaacaatatattatatataatcttaaaacatgaagaagcgtgacatggcacattctaatagcgtcatgtgaaaagtcaactgtagtcagcaccaatcaatggcgagtcaatatttctaatttaaataaccctaattgccagtgacacattgtgattgacactgtgcagcacttagttttattatcact

SEQ ID NO: 243366 - DNA, 406 bp, Gossypium hirsutum
  unsure (1)..(406): unsure at all n locations
cccacgcgtccgccacgcgtccgcccacgcgttcgcccacgcgtccgaagagttttcctatattgtacttgaatgatgtgtatgcaacttgcccaataggccctggcattacattgtccggtgacttagttgatttgaaattgctaatattgttgtaaatagatttgtttttttatcttctttttgcaggaaaaggctttttcggatgataaacgaacttccgaccatttttgaagtcgtgacaggcaatgtcaaacaaccaacagagcaatatgctaatcacaacagcagtggcaaaagcaaatcaagtgctaaagtggtacaaagttccaaaattgaaacttggatgctnttctcagttgtgttttcatcccctttatatgtgcttctcttaattgatgtcacc

SEQ ID NO: 243367 - DNA, 166 bp, Gossypium hirsutum
caaagatcttccaattgtatactacaggagtatttatcgtattaatcaggaatttacaaatcggcatactaggcctattcatatggactttatagggtactaaggacactacactatatataatatcctggccttgcttttaaaaaattcctctccactcttacac

SEQ ID NO: 243368 - DNA, 453 bp, Gossypium hirsutum
taaaaattaaaaaaaactaattaatctattccttaacccgacccttaaatccctaaatcctgacccctaaatccctaactcgtaacccttaacccctaactactaacccctaaacctttaaatcccaacccttaaaccataatccctaaatctatatataattatttgatcacggcgggtgcaaggcaaaacacgaaaaaaactgaattggataaaaaaattaaaccgagcactaaaaatactgaaccgggatgggataagttagggatatccttggatatagcttatattgattttgaagaaccaaattaatattatcttttttacaattatataataaattaattaatatataaattagaaaacactagttaatctaaaccctaaaaccataaacccttaacatgcacataacctctaaaccttaaaccccagcctttaaatcataaacat

SEQ ID NO: 243369 - DNA, 478 bp, Gossypium hirsutum
tcccaggcttgcggagacgtccgtccacgcgttcgataactaagaaacaaaattttaaggaatatcagaagagaagctggtctgtttctgtgcacaggtactcagggacacatttgatttccaatctacaataggggaaacaagttccgtggatattcatcgagttctggagttgcggtctccagttatcgttaaggtacttaaaggcatgtgcttcatgaacaataagattttcaggaatcacctcggggtgttctatccattgcttacaaaacttatttgctgtgaccagatggatattcgtggagcactaggtgatctttttagggtgcagttgaaagctctcctaccgtaagagttttaataacgaattattttgttgagaaactttttaggaatggttttcagcgtcgctgcacattcctaaggaccataggcaagatttaatgtttatcaaggaaaatggatgggtgaaaat

SEQ ID NO: 243370 - DNA, 182 bp, Gossypium hirsutum
  unsure (1)..(182): unsure at all n locations
attcacaactgtaataattttacatacatcctttcagttacgctctttccatatttaccacgatttattttactaaacatatcggcacgcncaaacctgaaccaaataatttataattatcacattttatcatcttcatcatcttcacaaaatccctatctaaaattccctctcttataatc

SEQ ID NO: 243371 - DNA, 234 bp, Gossypium hirsutum
  unsure (1)..(234): unsure at all n locations
cccacgcggccgccgcggcagacaagccttggaccgaaaccttcaacncacagccgaaggattccaccaccgggccgccgcaacaaccatggagcccccacggcgcgccgccgccggtaaggcgaccgaggaatgcgcgcgacggccacggaccgacaaacacggcgagcgggcgccgtagcagcgcgcacgtgcgaactgcagcgcccaagcatctagctggggtgatggggc

SEQ ID NO: 243372 - DNA, 150 bp, Gossypium hirsutum
ccctcaaaatgcaggcttcgacgctgaagtcctggacgcacatccatcgatagcgagcgtccacacaacgactgcaacagacgcagggataaaaaaaaaaaaaaaggcgacgcggccgcgaatgccggcagcccgggggaaccactagtc

SEQ ID NO: 243373 - DNA, 234 bp, Gossypium hirsutum
cccacgcgtccgataaagacgtgagagacagatccaaatgccttgaaaagctgaactaggggaaccggacgaggtttagttaaagccgcgtggggtgtgccgatctaaacatagccttatttctgatctcgagtaaacacactgaaaataggatgaatgcaggagcgacaaccctgaaacacggacgaccactcactctccgggacgcactaagctaattggaaagctaaaacg

SEQ ID NO: 243374 - DNA, 300 bp, Gossypium hirsutum
cacgcgtacgctcacgcgctcgtgttaacagagaaaaaccttcaagcaaacaaaggaaaaaccagagacaagtattaatttcaaagaatgtaagagaaccccatattaccgtagcctttgaaagaataaggataataagaataacaccccgcatattgatgccgacggaaagaacatcagggcaaaagctcgtacatgcaaacctaagaaacaacaaaaacagatgtaaaaatgaggttaagaagcaaaagactgaaatgaaaagaaaaagaacattgaagagacaaagattataacaac

SEQ ID NO: 243375 - DNA, 307 bp, Gossypium hirsutum
  unsure (1)..(307): unsure at all n locations
gcagtttctttttagacagaagcaataggaaattaatacaaatgggaagaagtcatttctctttgtacatatgaccttagtaactcaaaatcttgacctaatcttaaacaattggaaggttgcttggacttggttcattcaggaaataagccatctggtctgagttaagactttcaaaaccctanggaaaaaaaaggcaatgactgaattctgcttgtatatcatcttgtgcatgtgctattatattccttcattgctaatttgattcattatactatgtaatttcaggttgggatatcttctggag

SEQ ID NO: 243376 - DNA, 438 bp, Gossypium hirsutum
cggacgcgtgggcggacgcgtggggttagggtattataaatcttgtacataattgctagcactgggtctatgatatagttccatataattaggacatataatcgcttgagtggagatgaaaaaagttctacccccctgccctcgctttgattttatggttgataagtattggtatcaattctcagttcaagaatgttacagatgtccctgtgcttttcctcttatgggagctttatttgcatcttcatctatttccttattttatctttttattccacgaaagaattatatcctgtcataactgaatatctcttaatttcaaagctagaaagggctcgtgtcttctaatggtacttttctgtatgcaaacttatcggttccaatgtattgtcccgatctgaataatgcatagttaatcctataatttggggctgcact

SEQ ID NO: 243377 - DNA, 404 bp, Gossypium hirsutum
cggacgcgtggggctggacgcttctagaattctaatgagacctttttttgatattggcgtttcggtctcttcatatttgcatttcattttcagtctggttccctttccttttccataaccttcaacctctcagcatactcaggaacactgctgatcagtaactgctggatatcatggatatatgccccgatcatagatctgtctctatttcttcccttgcatttctttattactactaatgcatctctttcgatgatgatttttggccattgcatgttgataccgattcgagttgctgccctataagcaattgcttcagcagcataagccgatacaacttggtgatagatcttagaaaatgattaaagaactgtgccttcgctatcccttgctacgatccccac

SEQ ID NO: 243378 - DNA, 350 bp, Gossypium hirsutum
cccacgcgtacgccttccaagatgcttgccggtttgcctgctatacactggaatcagggccgaggttatagtctacgtggtcatcacagaccacaacacatagcaaaatccatgataatagtcattcagaccgtcattcagaccgtaaaaaagcaagtagagaagcaggtcatcagtcctagaaccacccccaatcccacccacggtcataccgacactgactactgtactaactacgttttaaatgataatttgtctgacaaattctgtacctcacagcatccatggcatctaccaatcggcaaccacactggcatggactgtggtataaaaggatgaggatgaaattc

SEQ ID NO: 243379 - DNA, 403 bp, Gossypium hirsutum
aaaaaattacataaaaaaaaagagttaaaataattaaggtgaattaatcctctcttgggcttgtgtcttttttgtttttgaagaatacatttaatgctaataaccttacaaaaatgtttaatatttgataatattattagggttttgctatataatccaagctgtaatatactgtaataatcatatatctatcttagttacttactttaatttcagtttatattatgttattctgaccctttttgtcagatgttttcagctgcaaaaaaaactcattaatttccattttgtgtttatataatttatatgtcatttttcaatttctactgatgatgctctgcagggaatatatagcaaatctcttatgtaatcatttaggttttctgtcagcaatctataatca

SEQ ID NO: 243380 - DNA, 453 bp, Gossypium hirsutum
gttgaatcatccaatgatcccgggaacctcactaacaattgcctatttgcgctcttggaagtggccggttctcattacgccgccatttgtgtagaaaatgatgaaattgttagaggtgaatcaaatacaccaatgaaattgaccgtacggaaaaccattccgtttgttgaagatgtttgcgtctccggaactgatgcagttctacccttacgtggcataattgaacaatagctgaaacttgggcggtatttatttttgatagattattgatatatgagatgcaattggcaaatttcgcaatgtgaatttagcataggcatgtctggatcttttttggttctaggcttcaaacattatctatgagactgaagcatttgttgcactccattgttaattgtgtaagtcttattggttttttttctttggcatctttattttttaaaattatcattc

SEQ ID NO: 243381 - DNA, 384 bp, Gossypium hirsutum
  unsure (1)..(384): unsure at all n locations
cccacgcgtccgcggacgcgtgggttctgatcttcaaaaaaaaaaaagatggttgaagaacacccagctccagaaatatgaaggtatgcctgcttggttattgactgtgcaggtactggttgatgatgtacccttgtattctatggtgattgatctttgaaagctgggttagatcatgtttgttgttttatgaccatctgcttcatttgaccgagtgattgaagcaggttcaaatccataaattttgtaggttgggtagaaaatattaacagattatacgagctaccaagtactataattttgtacatacatttaaataatatatattggaatagaaataaatgtgaaagttacaatccttgtgatgccnnnnnaaaaaataat

SEQ ID NO: 243382 - DNA, 463 bp, Gossypium hirsutum
cccacgcgtgcgcagagtgcagatgactatctttttcaaaagtgcagccaaagcttcataaagagcataacggatttccagaacggaggataaaggagtttcaagggtaacaaatgccaaatgcatcaagtcattgacgtcatcactcttgacatgaaggctgcactgaatgctagacgagtgctgcataaaccttagtctatttacacaaactaacactgccagacacgacattattctgctactgcaatactaatattgatgatggcatggacatcctcaattaaatcattcatcttaaaccatgctttaaatactagattactttaaccataatttcacatctggagttggaactattcgatgctctataacaaactagaaatcaagctagagtgcattacggttcaataatacccagtgcataaattcatgtgaaatactaccgactgacaaccaaaca

SEQ ID NO: 243383 - DNA, 266 bp, Gossypium hirsutum
tttgaatttcaaataatgttgaactttctggattaaagcatgaagatagcctttaagggcatgaggctgggctaatcggacataaacagtggttcagcatgttacacacaatcgggatcatgttcaaaatgaaaagccagatggtgaggtattttgatcaagttcttaaatggaaatgtcatgtgtgcaaatatttaatattgacttttcaaggattagtgggaattttatggttttagaagcaatggattatattttctggaaaa

SEQ ID NO: 243384 - DNA, 404 bp, Gossypium hirsutum
gtacacagagacacctgctggcgctttccagactgacaggaatatgacatctgacgggtcaaatgtcacaacgacaaatgtgtgtggtggtcctacaaccatgcaaggaactgatactagtaagagcccaaaccttaaagattgattggaaacggatgcactagttaagcagatgggtattactccatcgagtcagagtccaaacttgtttaaagatctactaccttgaagaatattgggaaggaaggattgacaagacttacaccaatagggtttcattataggtttacttgcatacagctagcaactgagcagttgataggcgaaccatacgagcaatgatgtatcaagagcacagatttgcatagaatgaggtattaatttgattcaaccgactcgaatgg

SEQ ID NO: 243385 - DNA, 430 bp, Gossypium hirsutum
acttgacccagtagaagaagcaaacaagcccagctttaagcatattgtagctgagcagcaagagaagcagaaggaagcagagacatctaagacccagatgatctcacttaggcctgaagcgcctaagcccaaggaaaaatggtacgttgttttgagcggaccaaaagcaggagtattctcagaagctgaaaaggagctgatcaaggaccagcccaatatcaaggaggcccaaacgtagtttgaagcccaaacaattttgaggatagcaaagaccatggcagaattcaaaaagcccaaggtcgaaagaagcaagtttatgatgccccagctcataaacagcaggatgccaggaggacccctattagcagaagaaacccaattctcattcgaggaatggaagaggtattatcttctagccaagaagatgatg

SEQ ID NO: 243386 - DNA, 427 bp, Gossypium hirsutum
cgaccacgcgtccgaacacattttatcctgccatgattggtgtcattcttattctcttatctcctgatgtggactggtgaaatttgatgaaccaaacagatgttataaatacttctaacaacccacatgaaattccctgtgacctatcactgcggctgggccctctctcaacaccttgcctgagtgctggaaacagtttgcacaaggaaattaaaaacaccgattccacctttctagagtggaacaagttcagttatctgacacccccaattgtgtaaaagtttatcttccttacccctgaacaacatagatgcccaccttaacccgtattcaaacgcaccgaaaatcctacgctgacatatggatgtagatgcaacattgagcaagcgaaagacaatttatggctcaccaatcaatcaccattttt

SEQ ID NO: 243387 - DNA, 317 bp, Gossypium hirsutum
ggaacttatggttcgcatgctggctttctcattttaagacaagcagccgatagacagcagctcagcgataatactgtcgagggtactgaccggcgcaagaatgagctacctaaaactctgagacgacgactactacaacagcagctcggcatttaaacccaaaaacctataaccctatagaccaatcagacagagacttatagacagactccttacactaggcaaacttgtaccaatcattacaaacatgaacaaactaacgattaccaatgatacaatcacttacattcaacaattacaacagacatcacaacatc

SEQ ID NO: 243388 - DNA, 419 bp, Gossypium hirsutum
ggtcgaccgcgcgtccgaactgcagccaccataaggactgctttctccttttctctgccgtttcaactccacctccaatgttgcacaacaacgatggcgcctcgacggctcgctgccgccggtttggtgaccgtggagtgcgcgcgacgggcacggagcgacaaacactgtgtgcgggcgctgttgcggcgtgcgtgtgggagctgctgcgcctaggcttcttgctggtgttttggggccattttctgttggactagggttgaaattggctattgggttttaattttattgggcctgctattgtattttattattgattgggcagggcaaataattggtattacagtgttgacaccatttttttggacggaaaacgggatcgacttggttttgaaaaatggaaacgaaaacgagagtcg

SEQ ID NO: 243389 - DNA, 390 bp, Gossypium hirsutum
agaagctagaactgaattagtcgctcaaaacttttgccctttggttcagtaagacgaacttgccgtataatgggattaggccatcgtattttaggcgtcttcttgaggtcattgattcagtgttttaaatgcgaaagggtgggagagaaggaaatttacatgactgaaccatcgaggatgaatccaacgagtatatcgatttttatatttaaagattttaatatgtgtataaccatatttaatatgtccatgtatttgttgggctcgagtgtattatttaaagaacaaaaaatctagaataacgaaattaaactatgctatccggggtatatagaatctaaaagtaaagtttaagcaaaaaaggaaataactttagggtctaaaaaagaa

SEQ ID NO: 243390 - DNA, 171 bp, Gossypium hirsutum
tcgatttgtaattagcaatgcttgtgtgtatataatatacgggtgtgtagtgttagtctgtgtatagaattttcgacgatgggataaacaagtacattttgacaaatttgttaatgcattattttagtttcaaaaaaaaagagaaaaaaaaacattaaaaaaaaccaaaaa

SEQ ID NO: 243391 - DNA, 412 bp, Gossypium hirsutum
gttatgcgtttgatgtaagcatgatttggtggttcgaaccttagtattatgcttgtgtgattagctaaaatgctcagtagtgctgggttgataacgtcaatatatggatgctttgtgctttctttcgaacaaaaaaatgcaaaaacaaaaaaaaaaagaaaaaaattgacaaagaaaacaaaataaattacaactacatacaataaaagcaaatatcccataaactaaaaaaaaaagggatgacagttctaaggtttcaaagctacctaactgggaaatccaaggccaacacgcatcaaaatggccacgtaattcaaaccccttgtcacggttttaaaaactaactaacctgggaaaaactgagcgtacccaacttaaattgcatagcctgaaatgccaattcgacaagtcg

SEQ ID NO: 243392 - DNA, 306 bp, Gossypium hirsutum
  unsure (1)..(306): unsure at all n locations
gcgtccgcaaagtatccttaaactactttaagaaatgtcaatanatttggcaatacatanacatttcttatgcaattattataaaactatcggcaccaccccctatccttcgcccattttatttttctataaaacacacttataactctaaacaatctctctcaatatctcttttactcaatctacctctttctataataatccacacttatacatcatccactgtcatctattttttttttacaacaacttctatttctagcatttcccattctttatatacattacaatacattccctcttttt

SEQ ID NO: 243393 - DNA, 258 bp, Gossypium hirsutum
cccacgcgtccgagctgtcactggtgtctccagcaatgatggggagtagtcaataagtgaatgggagttttatcgtgcttataatatgctgacaagaatcttcgtctccaatgaccattgtacgaaaggtgacaatagctttctcacatggaagaaacagacgtacatttcatcataactggaggcctacgcttgtgaaatgtgattcacaagctagtcttgctcgcatatttttatgtaagatggttaaagcaggta

SEQ ID NO: 243394 - DNA, 446 bp, Gossypium hirsutum
gatttctttggtcaatctgtaaaaaatgtggtattcaagccatttgattttgatgcacttgcagaagaactatgggacgacattaaccagagtttctgcaagtctacaggtgcagggtgtttgctagagatagagtcgaaagctatggaacaactagtagcagttgcatatgtatctgatgagaaaagggtggtgagggattgggtggaacaagttcttagcaagggattcgcagaagttaagaaaaagtacaagttcaatgctcacaccgtcgtgaaacttgttccctacgatgctcttacttctgaggagcaaacactaggactaggagtttgtgttccccccaaagttgttctcaattaataactttctttttcaaaagcctaatctggtagtttaaggaaagtgttgtatgaggatttagcatcctgtgaagtatgttcagc

SEQ ID NO: 243395 - DNA, 138 bp, Gossypium hirsutum
cccactcgtccgttttcaaattcaaaaccctttattcatacaaaggaaaaacctgatcttgatagcaatttctaacaatctcaacgccccccataatcttgtagtctttgcaataccacggctaccactcaatatacc

SEQ ID NO: 243396 - DNA, 460 bp, Gossypium hirsutum
gtgagagtgtctcatagtgactgaaagacaaattaatggcatactaaagagtttgcacatggctgagcttgagctcctgacctgtagcttataggtcattaatgggggagcatggtacaacttgggctagctttgttgttgagaggttacggaccctctacagtactgattctacctatgaatgtccttgaacttctctgtaattttgcttacactgctgatcgcataagcagctgctgattgcttcaccattttacattgtccgaaacaagatcccatttgatacaatactttttagacctgatattacatttggaaaattttattttaaaaaaaaatgtttctttccaacaaatatgcagctacgaagcaacttcttcgaagagaaatcgatgtcttgccaaggagcttatcactggcggaatggcatcaatcttcctgggcttcgggtcaattgttt

SEQ ID NO: 243397 - DNA, 224 bp, Gossypium hirsutum
aaaactgacaggtcgaaggagggaagtaacactaatctgatgcctgaatttagaaggagccggtctactgctcgcggaaaattgttggttttgccttgaggattctacactatatgggaactagtttcctacccttcgaaatattccttttaaattttgtacagttgttgcattatcagaggaggttattgatcaagatgtctttatactcatgatgatcgaat

SEQ ID NO: 243398 - DNA, 491 bp, Gossypium hirsutum
acgcgtccgagaaaattcaatattaggggcaatgatagcttattggatgactgcgtctaccatgtgatctgtgcttgctgtacactatctcaggagtctagaacattggagatgaacaacgtccaagatggtacatggcatggtcgtggtgatatatgcataggaagctatgctgaaggcaccaagccgctctttgggctacaccctcctcctaccatgtcaattaagacccctgaaccctgcagcatgcaaaatggtctaaatggcgatgataatggtcaaacatgagaagcttactcaaaagatgtaggccaatattaggtgtgaaagagaaattcaaacatccgagtcaatttattctttgatggagcgatgttgcagaggtggatttagagaggaaagcttgtgcagcttggatcatcgaatcctgcaggaaggaagggagatccagaagcataacagtgcttccatgtgcatagaaggaaactact

SEQ ID NO: 243399 - DNA, 292 bp, Gossypium hirsutum
cgcacgcgtgctacacactcatgttgctgctgttggctagatctacttccgtaccagctacatcagcttagatcatggagcctacgctaccctatctctcactgagaggcagacttaatatgaacctacttagctagtcttgccaactcggtccgaacacgtatacctcgaatactatgatcgataccagcgccattcaggactttcctggctatgacaaaacgagccacgtgaagcccgtacaatgccactggatacgaattcatacactgctgaaaacacatatatatga

SEQ ID NO: 243400 - DNA, 237 bp, Gossypium hirsutum
aaaaaaaaaggggatagagagagacaaaaagatatgatggatgggaggagggagggaggtgttagagtgtggtgtgtttggaggcaaccctgttgatgctcatccatgatactcttcatctttgtagctcttgaaagtcacggttatagctggctatttcttcgccattaagatctttaagtataatttgctcacgtcatgtcaaatgtgctgaatttctgattttgatagttatct

SEQ ID NO: 243401 - DNA, 147 bp, Gossypium hirsutum
atgggagatgctaatgcaagcattccgacacctgatccggtgctgtcaaggccaatgtttggaggcattcggcagggctgcaagtgctaactccattgcattcgtcagcagggctgctttaaatcgcggagtcaaagagtcatatgg

SEQ ID NO: 243402 - DNA, 456 bp, Gossypium hirsutum
aacacccctcttttcccccatttatacgaaccttgaagagaccaaaccctagccaccatgtagccaccgcaaacgatgagcgacaagggttggtcttctcgttctttaccccgtttagatccatattcaaggattcgatgctttcaactatgaagaatcaaaaagaaagtctcccccttttgttggatttgattttaacagagaagaactccgatgataccaacggttcaaggctcaggtaagtgaccttctttcgtccttttcctcttattttttttgtaaataatccctataataccgaaacaagaaaaaacttgctaaaaagagttgcgaaatattaaatcggaaaaagaatcacctttttggctatgaatctttttgattaatatgcttgaaaaaaaaaagagagagagagcttttacatagtcgattctggcttttatagcccttttaaca

SEQ ID NO: 243403 - DNA, 344 bp, Gossypium hirsutum
actagtacagcggccggcatcctgctgcaattcggccttagcgtcctcccgccctttgttcgcttcgacgcaacagacagcacgagaaggacactcacacatatacattacaggagggacgtgacatctctcttactagccttggtcctactacttgcttttcaccgatgcgtcacaggcatatcatgcaacaccgcagttgcagatctttaccctacgctatcatacatgacttaaagctgacactttccatcgaactggtgacactgcatcaaaacgcttaaccgttattgccaaaccccttttgaccgtcaaggcctttgtccgttcattaaaaatgcttt

SEQ ID NO: 243404 - DNA, 333 bp, Gossypium hirsutum
ggcgttggacactattcttctatgtctgagatttcccaaagtggtaatataattccaggaggtgcaccagattgtaattgtaactttaggtggtagttgcagattccataattttctaaaaaagtccttagattcagtctgtaataaataatcactaggatccagattagcaatttgtaatagtttgtaagcactgtgaactgagtatgtaccagtcggtttacccctttagacttgaaaatcttcgtggttagattctgataatgagatttgtaagattgatcaagtcacccttggctgaaaaaaaaataaaatgatataattttaaaaaga

SEQ ID NO: 243405 - DNA, 408 bp, Gossypium hirsutum
ctcgagggacgcgcttggttgccagcagatgtagctctggagctcagtggagcactctacgatcaggagatctgtcatggagctcgcttgcaaacttaatggaacgcgagccatggttcagaaagctcgaggtgaacgatatcattacagatgtggtagattacatgcttgatgaggatgactaagggcatgaaagtcaggataatgctgattcaggtactggatctgatccagatcgtggtgcagatgatgctacgtaaatgttactagtggagatgatatgaccggcatgtctgatgtggatgtagggaggtgtgatagagttgtgaatgctgttacaaaagtgggggcattttagaagtgcaataggtatgattgtgacatatgatgacttgacgctattgtatg

SEQ ID NO: 243406 - DNA, 483 bp, Gossypium hirsutum
  unsure (1)..(483): unsure at all n locations
tcggaccggattcatatggggaaagggactgttaatgtgtaaagcactttgattatcctagggacacggtgcaagagcaagaactcatgatcgcctaaaacttccagggtagagggcttagaaaactattaacgatccaataactctactttgttttactgtattatgcttatagacattgactaggattaaaaaggcacagtcgtttgatatcttggcgtttcactcaaaaaatattttgcttagagactttcctctctttttaaaggttctgttcgtttaggattagttgggataaacttattgatggaatggtttaggacctgtactattacaagtttactagactaaaactttgcttgtggtgttcatataaatggagattactgttataaaggggatgtctttttacagttacctactgtaaagggggtcgttganntattttcaattggatataataataattaatttaattaagtt

SEQ ID NO: 243407 - DNA, 113 bp, Gossypium hirsutum
aacctatcattccttcatttgcttagtccgaatgctttacccgagggttctacaacaacttggcgggcctattctggatttcctccaatcatctaatggctgctttggatcca

SEQ ID NO: 243408 - DNA, 448 bp, Gossypium hirsutum
cccacgcgtccgtaaaactgccatacaggcatagcccgattctgtatattttgttggtagcggaggtgcagaagttgatgttaaacgactaccaaaacgaccggcaccacctcgcttcggaaggaaacttactgaggctcaaaaggcaagagctactcatatttgccttgactgcggatacatatacactgcacagaaaccttttgatgagcagcctgatacgtatggatgccctcaatgtcaagcaccaaagaagagattcgcaccatatgatataaatactggcaaagctatcggcggagggctacctccaattggggtcattattgggctgctggctggtgttggagctgttggagcattgcttgtttatggccttcaatgaaactgtttataatgtgtattctttcatagaatcagtggtactagtacgacttcttaactcata

SEQ ID NO: 243409 - DNA, 449 bp, Gossypium hirsutum
agcagatctcagcatcagttgtctccaattcctggaggtagcagcagtcgcccatgaccagttgatgtggataatcatcaaggaggcttcaatgctacttattctactgacatcattagatcaaacaatgctccaggtcaaggtgttcgcatgcaatttaaaccaacaacaggaaagaacttgatttctgagactactattgataaaaatatttttgaccctcacacaccctcatcttcatttgcacctgctggcacctcaaaaagaaatggtcagaaatcaacagcgccccctgacgctgctaattctggccatggacagggaaacaaaatcagatcttctagtagtttgttttcatcattgcagcgcatttcttctgccaaatgatgaaaatgtgctgtggtgagggaagattagggaaatgataattcagggtgcaattgaagacc

SEQ ID NO: 243410 - DNA, 484 bp, Gossypium hirsutum
  unsure (1)..(484): unsure at all n locations
tcgtctcgattatttaataataaatcctctttagttatgctgttatataaaatcttctctgtcactttcatgtggttacaggtctacatattgttattatgtaacgttctttggattaaaaaaatattatctgtgtcgtggatgttcgttgaattaatcagtcaattctgtattcttagcttaanagagtaacattggtcactttttattaaaagatttcactccatttgtacgttaaaacattggtatgcattgatgaaataatcagatagtgatacgtggcttaccacatgtaccccatgctgatatacaatgaccaatttttagctgtagaaataaatgaaatttttaatagaaggatcaatttgttaatatacaatggctaagggtctgtttgtttaaatgaaaaaagttttacggaaaatgttttttgcatttttctatgtttgtttcacagaaaacaacttggtcaatggaaaatgac

SEQ ID NO: 243411 - DNA, 261 bp, Gossypium hirsutum
atccactagtcgcgccacggcattcggtcgaaactggacctataatgggatgatccttgctcttccgcttcgttgcaagcttactcaggttgagcatcgcttacatctccgcattcaacttgatcaggctgtattaccccaccaaggtcatgcatctgaaactctaatcataaattacggactatggggccttaaacatggtcaacactactaatggcttgatatattgccatatacgacaaaagctctaaaaataaaatg

SEQ ID NO: 243412 - DNA, 382 bp, Gossypium hirsutum
agcttctgctgcgaacggggacgaaatattttcattatagaatcgtctttgaggcttgcaacagacgcagtctgtcccgaaccaccaaactcgaagccgatcgaaaatttctgttgtcaaggctgcatcaaactgtatcgttgtacattctgtcgcccctgaatggtcataagatctttcgataagaggggacattgtctaaaaacgtgatggctatcttcttcaccggagctacaccgaggacatttgacgtccgtgggtactttcttggaccttagaattaattagggaaggatttaatttccggaaaatcggcattttggtaatggaatttttggtgggcaccgttaattccattggtttctattgaagcctttaattt

SEQ ID NO: 243413 - DNA, 452 bp, Gossypium hirsutum
cggacgcgtgggtccggacgcgtggggtttatttataccgattttgtgtcggaagatgacgggatccatccaatcctctattaacatcttcctgtttgaaatccaaaggttttcatactgtaacattttggaggttacatgttaactgttctcaatttcgttattcattttactgaaatgtctgtttatgcaaaacttatttgttcattaacgtcatctacaaagcaggttggtgtttcactaccaattttttgtgtcggaaggtgacaaaagtaattagatattatatttcctctgctttattagcctgctgaaatgcatttcatcttcatgcagtaatattagtagagggaacaatggtgaaatttttcttatttttaactccccgttgtgatattgatttgattttggtttgatgtttaatggactgatacagcgtatatgtttttgat

SEQ ID NO: 243414 - DNA, 404 bp, Gossypium hirsutum
acgaaaattttaagattgatgtttaatatggtattagagtgaggttttattatattgggctgaagaaaaaaaaaaaaaaaaaaaaaaaaaaaaaaaaaaaaaaaaaaaaaaaaaaaaaaaaaaaaaaaaaaaaaaaaaaataaaaaaaaaaaaaaaaaaaaaaaaaataaaaaaaaaaaagggacaactttttaaagaaacaatattaacgtacgctaccgtgaaaatcataatcttttctataggggtacataaaataaaacaatagaccaaccatttaaaaacggagaaattgaaaaaaccattcatttaacaaattaaaacatttttgaaaaaatgatctttattaaaaaagggttaaaaacaaaaaggtcaaaaccattggccttttcaaaaaattgcaa

SEQ ID NO: 243415 - DNA, 385 bp, Gossypium hirsutum
ggttttcctgactaccacatggaaacctccaaccccatcgacacagtgaaatctggctcgggtttggggctctataatggtggtacgtgacaatcttaacacagtgaaggcaattgctttggagtacgtgggatactaccgttagatgtggacactttgaagcctaatctcattgaagggaaagttttgagttcgctatctgattcgcaaagagaaaaaagttgttgaccaaatatttgtatgctttgcttctccattcattttctgaactttttttcagtttaaaaacaataacagaatatttaaattaattatgttattatgcatggacgatatgctgattattgcccaatgcctcaatgaataacttttgcttgtgcaagca

SEQ ID NO: 243416 - DNA, 377 bp, Gossypium hirsutum
cataaatattccatttctctaatgtaaactttaacctcatcttttacatgaatttcctccggtaaaggcatggatatttcaaaataaaaaaaaaaaaaaaaaaaaaaaaaaaaaaaaaaaaaagaacaaaaaaaaaaagaaaaaaaaataaaactaaaaaaagcatacaacaataaaacacatagaaagaaaaaaaattaattaagatgacaatcagctaacaataaaaactaactagatacacaaaattaaggagctagttactggggaagaatcattaccatttatttttggagctattcatgtttatcctaacagagctttaaatactaaaatgggatatgataccacatagtaacgactacaataatttcctt

SEQ ID NO: 243417 - DNA, 271 bp, Gossypium hirsutum
attatttctctcgtattctaacttttttctttatcaccataacagacatacaactgaacagagaaacatactctaaccactataacttctctataatacacattatattctctacagacattgttacttacttctaccacctagcatcatccaaaacttctatcataatttttaacccttcagtatctattattattctaactttttaattctttttatttaatcatttttacttctctagttattttatatatttcttattattttttat

SEQ ID NO: 243418 - DNA, 414 bp, Gossypium hirsutum
tgtgctggaattcgcccttagcgtggtcgcggcctatgtactttattatttttttttttttttttgagatttttttttttattttattatgaattaattttttaattttattatttattaattttaattttaatcttttaatataaaaaatatataataattatagaattagtatcacagattaagaaactaaaactaattgctttttctgaacaacatcacttcaaattaaacacaaactattataagtatatgaactactttatatgatacaccatttaactacacaattatctattgccaacttaacctttaaattaaattattcttattattactcaaacagcactttcaacattcattaaacttaacatatatctacttctttcaaaagttttaattgattttttaatt

SEQ ID NO: 243419 - DNA, 287 bp, Gossypium hirsutum
gcccccactattgttatgctgtgatcttactgttattgctcactgctcagttttcgtttggaatagatggaactagtttgctacttgttttcgaccattttagttgtgttcccctgaatctaaagatgaataatggtgatgcaggggaagtaaagcgtatgattctctattcctacttttgccatgcttgagttgtctccactctttggcttccatgagatgaattctattgccttttaaaaaaaaataaaaaataaaaaaaagaaaaaaataaaaacataaactga

SEQ ID NO: 243420 - DNA, 539 bp, Gossypium hirsutum
  unsure (1)..(539): unsure at all n locations
tactcggtctcgtgaattcccgggtacgactccacgtcgtcgcgtggatggaagggagcaatgggcacattaggcactttgcagcttgtagctcgacggtacgagaaaggattgggggaaaagagcagagctattataccctacagtaaaaagaaagagcgttttacatctttcggtatcccatatccggtcatatgggtagctgacattacccactagtagtatcttggacccaagggcagttaacagtctgctctcttgttctgtattttggcatctttcgcattatttaaacgccatnnntcgtttcaagaaagtacctagtagactcaatagaacagatgatagaattgtctttggttctttttttcaactcatcaaaagaaaataaaaaaataaaaaatagggccggcccgcttctaagaagcgatccatagcttactgtaccgccgtagcatgtcgatctgtcatagcnnttcttctataagtgggtcactctttaaattcaaaattcaacttgggcccgtacgttttttaca

SEQ ID NO: 243421 - DNA, 535 bp, Gossypium hirsutum
  unsure (1)..(535): unsure at all n locations
actgacgtactcggtctcggacattcccgggntcgactccacgccgtctcgcgttttcttctgcttactgatgcctaagagtaaatgctcagagacctcccatgnnttcctatctgtggctcgcacttccgcattgggctttgcacgtgttcttcggttcactttggccaccacttcccatcacttggaacctggtattaaccccagcataggcagtcttggagcctgccatcatatactaatcaaagaccatgccttgggatgaccacttgcggtgttctgggtntggaccccttcatntggagctgcaccttgctgcacgtttaccaacctagataatcacttagagcttattccattcaagaccagagattgaaatgattaaatctgtgtgtgtgtgtgtgttgggatcttcatctactttttgtgttcctactagtcctttgttgtgttgaactgcattttgaattatggtgttaatgtgtgtaaattatccctagagttgtgctgtattcagcttttattaatggaggat

SEQ ID NO: 243422 - DNA, 113 bp, Gossypium hirsutum
tttctgtatgaaacaattattttctttccttcaaagcttagaaatttatctcgtctgcctgtggctactgattcaaaactagccatttaaagtacaattggtttattaactgg

SEQ ID NO: 243423 - DNA, 427 bp, Gossypium hirsutum
cccacgcgtccgcccacgcgtccgctaaaattaaaaatatataaaagttcttccattcttctgtctacctggccgactcaagggcctcatcagcgtcctatgcgcctctacccgtcgtggctcatggctcgggaacaacgaaaacaagaggagccctcccttggtccaatatctacaccgaagaaaggttctccgatgatcgaaaccgcgggtaagttcccttgctactctcctttatttgttttttgaaaaagaacttaaaagcataatagagaaatcaacataatatgaatcgtaaatcaccttcaatctttgagtgaattctttgttttctttgtattcgaaaaaaaaaatcagccccgtctcttacaactgtttgtttttaggcttttatagccgagagaaaaaaaagaatacacatatattt

SEQ ID NO: 243424 - DNA, 435 bp, Gossypium hirsutum
  unsure (1)..(435): unsure at all n locations
caaatctgttcttcagggcattctgctttcttcagaaggggaaacgttgaactcgatgaatgggctactctatatgtccccaattgcagttctagttttagtgcctactgcacttgtaatggagccaaacgtgttagaagtcatcatatcacttggaagacaacatagatacatgtggctgcttcttttcattaactccacactcgcatattcagctaacttatcgaacttcttggtgactaaacatacaagtgcattaacactccaggtattaggcaatgcaaaaggtgcagtggctgttgttatctcaatacttttgttcagaaatcccgtcacaactgttggcatcggcgggtatatgatgaccgtncttggcgtcgtggcttatggagaagcaaagcggagggttaaataaatggtgggatggtgtttgga

SEQ ID NO: 243425 - DNA, 175 bp, Gossypium hirsutum
attcttcacttaatttcaagcatctttccattatataaaaaaaacccaaacccagggaataggcgagcatctcatatgcattttcattctactataagcatatttcacccttaaaactcatatatatttcacatatatatcactaaactatctcatactcacatatttttaccaa

SEQ ID NO: 243426 - DNA, 321 bp, Gossypium hirsutum
aaaaaaaaaaaaaaaaaaaaaaaatttaaatttaaaaaaaaaaaaaaaaaaacacaagagaaaggatatatataactaccattttaaaacttccaatatttcaatacacttacattcaacttcttaccctcttcttttatgtcacctaatttcaattaccttaccgttattttacatcttcgcttctcaaaaaatcctgcctttacccactttaatctctttcaactaaatccctttttactcaattttcttaatttctaaaactcctttacctatcgcccttcccaacttttcctcatcttgatttcttaatacttttct

SEQ ID NO: 243427 - DNA, 414 bp, Gossypium hirsutum
caagatcagtgcaagatcatcaccgtcatcatcatcatcatcaacaatacaatactacttacaatcaaatacataatatatgtataggtaaaggacagaggaactgatttatgcaagtggggtctttggcctttccttaccgtgacacaccctagttgctggaccacacaacagatagtgtagaaacaaacaaaggctggtagtaactagtaactagtaactcttttttttttttatctcatattgtaattttttttcatttcctaatcttttcttttaccctccttttttcaaagtgaggtgaaaaaagagaactaagaaaaaaaatctgtatgaactatgtcactttgtgtaaaaaaaaaaaaaaaatattataattaaaataacttaaaaataaaaaatataaagaaaaat

SEQ ID NO: 243428 - DNA, 420 bp, Gossypium hirsutum
tgaagcccaaaacttggtaatttctgcattgtaacactgggaagaagttgtttcattcgaggatgaagcctcactgacaagctcagtcaagagggagatttctaatggtaccaagtatttggcttctcaagagatacgtggatttgattatgcacaaccaagtgcttcttctgcagatatcatttcaaccatctattcacttggaggtttgagcggcttagacgattatgcgctgcatggatatgagcaagcattgacttatcctggccaagtcactaattccctgatctgtgacacagatattactcagactttctgtgatgaacatcaccttcggtatttcgatagtgatcttcaaccccaaatccttggtttggaatcacaagcggatctactaactgttgttgacagattcttttg

SEQ ID NO: 243429 - DNA, 196 bp, Gossypium hirsutum
cacgcttccgccttcatcacatacccacggtctttaccttcctaccagctgatcttgagagagggaactggtaacaacattcgaatcatccagctcgtgatggccgtggcgctaccgcttataagcttccttatggttctacaccaacggcgataccagcttctcaaccacatgcagaggcatgcgcatgatccat

SEQ ID NO: 243430 - DNA, 337 bp, Gossypium hirsutum
cccacgcgtccgtactttttgacaggtacctgttggtggaacactttgaccaactaaatgatttatccaaatagttcggtgtctaccaaacaagctcctaaagactatgttccatgctaccatattattttctttggagttaggcctttgtttctttatataatatatatatattctgtttcttgtgtgcaaatggcatccaattttaaaggcaaacagatacttggtgaagggctaaaattatatttctacaaacttcatttggtagacatttttgtaatattcaagctcaacaatccgaggttaagccctttcaaaaaaaaaaaaaaaataaaat

SEQ ID NO: 243431 - DNA, 245 bp, Gossypium hirsutum
  unsure (1)..(245): unsure at all n locations
cccacgcgtntcgccacgcgtncgctcagaaattttgaatcggaatcaccttcgaatgctcgttgctttttttgtatttcaaaatgcatcgattgtgcctgtatagcctattgtgcctttatgttgcgtaaaaaactcacctaggctattacatggcctttatagccgaaaagaaagaaaaatctaaaaatgaaaatgctatttctcttttttcctattcgctgctgctctgtgtgtctttttcg

SEQ ID NO: 243432 - DNA, 431 bp, Gossypium hirsutum
  unsure (1)..(431): unsure at all n locations
nncgnccacgccgttcgtccacgccgttcgtgattttgaggttgatggttatcttcacaatgaggaggagaggcgtttcaaaaagatcatttgggaagaaataaaccgggaatatcttgaggaacaagcagccaaggaagcagctttagcagctgctaaggaggcttgcatggccaactatgataaatgtccagaggacctccaagctgcacaggagcttgccgcagctgctgcagaagtagtggcaaaatctaaaaaggagaggctacaaaagcgagctgctgaagctaaaaatgcacgtcctgctaagactgctgctgaggcaacccgacaaatgctggttaagaagagactaagctcaaaaatcaactatgatgcgttggagaaactttttgatgaaccggtggctacagagaaatgcaagaaacaaa

SEQ ID NO: 243433 - DNA, 179 bp, Gossypium hirsutum
  unsure (1)..(179): unsure at all n locations
cgcgtncgtatgaaccctattttatcctcacatatgattacttcaaaaacactcaaacggcagcgcctggcttgctttcttcgactgcggcattcctccccttcatccaaggtcagataaacatttttccttctgctgttcctttcattttcctgaaatgcttttttttgtcttaccca

SEQ ID NO: 243434 - DNA, 415 bp, Gossypium hirsutum
cccacgcgtccgcccacgcgtccgcttttttttcttctttatttttcattctcttctgcttctccatttgttttcctctcttcttcatctccgttttcaacataattaattcaaagaaatgagatttcaaacatgaggcatctgcaaagttgttttgcttcaatgatctaataattaattcaaagaattgagatttcaaacttgaggcatctataaatcatgtcaaacagtcaactaaaggttacttgttaatgtgtagcatttaaccatatgatggatttaagggcttgattgcatgtaaatcatttgaggcagctcttgaaaccgccattagaatatggagaaggaagaagggaacataaaagaaaaaaaaaggaaagttaaaagaacataaaagaaaaagattagattgctc

SEQ ID NO: 243435 - DNA, 369 bp, Gossypium hirsutum
gagatgcgtttcgctggaaataatgatcactctcttctatacagtggacgctcacaaaccttactgaggcgaggagtttttcaagctagcaacgagatatgttcggatgatgctttctgatcaactcttaataatcaacaatctctctcgcaacttttaaacaatctattcgctaagaattatgatgtgcattattagctactacgttttagcatttattctggccatgtgttgatacaccaacttatgtaccccttttttttttcttgtataacttcggaatacatgcccatgaccaatgtaataacctataatgtcttttggatgtttttatttaaatgtgattttttttgtcgttttattatttat

SEQ ID NO: 243436 - DNA, 413 bp, Gossypium hirsutum
attgtacaagagaagtggaaatgagactatctcaagggaaattaaaccctggaattgacgtgagttctgcatttatagactgaatgtcttaacatattgggttatataacatccaatggttgttatttctatttgcagaaggatataaagaaactgctggcttgaatttgatgggtggaagagattagctgatcacctcatggagttaataaattagatatgcctacgaataaaaaaaaaactaatctatctcttgttatgtttcccccatcttctaatgattggaacgactcttctacacatttgaatgcgtgccctttgtacaaagtttttttccatggtgcaacctctaaagttcttcctccaattctaatattccctttttatttttgatctttttaagattttttatt

SEQ ID NO: 243437 - DNA, 222 bp, Gossypium hirsutum
acgacgcgttcatgcacgcgttcgattactcctgcgagcacgcgtgcggacaatatgtgaagatgcgacaggggcatctaagaaacagacaactgagaaatccattgtttcaaatcatatcatgggcaaatctaaatcaaactctaagcgacgttcttgatctcaaacccagcattctaaggcaacagcataaaatgatgatgtttgagattgcatggaaga

SEQ ID NO: 243438 - DNA, 447 bp, Gossypium hirsutum
gttgcgtactgtttttgttctttgatcctctttgttttgattctttgacggtggtgctttgtaaatatatagggattcacaagagagcaaaagagaagcttgattttgtgtgtagagaataatggaaggaaataaaaaagtggggtcttcttcttcttctttagcttcagagctatttggttcaaaagacctaccttcttcttctactgggatttttggctctatttttgctcctccatctaaggtatttaggtagggagtcactgcgtcatgaccttattaccaaaaggtacgactcacccaaagagccatggaacacaacaaatccaggtccctatggtatgttcatcagtctagttccattccacaccattttgttcattacatatagtattaagtggtattgtgcactagaccaaaacaagaaccaagttttttttacagaat

SEQ ID NO: 243439 - DNA, 377 bp, Gossypium hirsutum
gtcggatgaagaggatggagtagaagatgatatatagaggagaaaaagaagaaaaagaaagagaagaaggataaggagaaaaagaaagaacagacgtccaataaagaggatgatgtaaaagatgacgaagagaagaagaaagataagaaggataaggagaaaaagaaagaaaagaagtcggacgaagaggatgatgtagaagatgccaaagaggcaaaggagaagaagaagaaagataacaaggataaggagaaaaagaaagataagaagtgcgataaagaggatgatgtagaagatgccaaagaggagaagaagaaagataagaaggattaggagaagaagaaagataagaagtcggttggagaatatgaaaggac

SEQ ID NO: 243440 - DNA, 463 bp, Gossypium hirsutum
  unsure (1)..(463): unsure at all n locations
cccacgcgtncgtnttaattatgaaaagcctacttcatgatttaagcattttatcttttgtgagagagattctctacaaatagcccattaaaacaggagacttgaccgagacgagacagacgtgtgtgtgtaaataggaccatagttgctatatttttcaagttcaacggctgtgtcctaactttggatctaatttttctactcaagttttgtcttatttttattaaaaaaaaagtatgataggctaaaggctttgtaatagagagaggaatcggtagtatcaaatatttgaattcatataccgtgtatttttttctcatttttagtttcttctcttataggatactcttatatttttttttgtgtttaattattttatggtggatgtctttttattctctttttgttattatttttttatattattttcttggtggggggtgctttttattatttttttttt

SEQ ID NO: 243441 - DNA, 248 bp, Gossypium hirsutum
gtcatttccctagggtcttatctttgtaaggccaaaatgaagtcagctattagtggctacagatgattaattttattgggaggttcaagtgggggtaacacaaattatgaaaagatcccacttttgctctccttcaatgcgcctacgtgtgctaaatttttaggtgaattacttttaatttcttgtagtcccaagtgttgtattcatgtctcattacatgaaagctaaggttgaggacctattcagtt

SEQ ID NO: 243442 - DNA, 446 bp, Gossypium hirsutum
gccggaaataacatgggatatggcataggatatggcactggaaatgggaaccagttaggaactggtatcggatatggtattggaaatgggaaccagttaggaaccggtattggatttggtaccggaaatggaggtcagtcaggaaatagtgttggatatggcgtcggaattggatcaggtggaaacaactggaatggacctgggactggagttggaatcgggtcaggatcaggcggactagggtcagggattggcgtgggatacggctcaggaggtgttcctgcatgtactaccggcaattgcaatctagtgaatggccctgggagctgtgtaccagttggtccagctcattatgaacttcaaggacgatctgctgctggagctgccaaagagatgtcgaagattatgagtacagttactcagccctagacaccacataaactgtg

SEQ ID NO: 243443 - DNA, 376 bp, Gossypium hirsutum
catgctgatcgaactaaaaaaggggcgtattgagcttgattggtatctgagtaaggaagcacgatgagctgttggcaagcacccttcaacctggtacctacaggaagaccttatctttggtcattgttgatggttttgcagtcgaaatcacagaggctcaggccaatgtgctgagatctgctaatggggtaagagttgtggagaagaatcaagagcttgcttagtgctgctaaagcttgaaagtttgcagaaacgaagagaaaataggtttcaagaacttcttgtagatgtggggtttcagactggttctcttctttaataatcattcaagacttgaaatatagcatattgcagctttaaatagaagcaatttatt

SEQ ID NO: 243444 - DNA, 183 bp, Gossypium hirsutum
  unsure (1)..(183): unsure at all n locations
ggggnatngggaaaccaaaaggaaacttgttggatccggtaccttaaatagaagttagtcaggaaataatgttggatagggggtaattgatttacaaatgttaatacagtggagttggtttacaaatttacattttatttggttaggatcttattttttaattaaagtttattttggttaaaa

SEQ ID NO: 243445 - DNA, 383 bp, Gossypium hirsutum
caacttacaataattatcattaccaccaatgctcttcctttaaccattctagggagtcatccacttcgaggttctcggtttccggtaacatcccgaggactctttcgggttggaagcacgaacagattggtcatggtgatgatgataatgacgaggaggacgatgatggccgcagcaatagtaataatgtgaggcttccttatgttttttgcctcgttttagtgttgcttgtggtgtttgctgtggtggttttgattaggtgggatgctaggaagagatatgagcctgaaatcttcgttaagcgcatagtgtttgagaacttgtattatcaggcaggaaatgatgaattaagggtgccaacagatatgctttcacttaattcg

SEQ ID NO: 243446 - DNA, 234 bp, Gossypium hirsutum
  unsure (1)..(234): unsure at all n locations
natatttttttattattactttcttttttttttttttttttttatgcatttttatgggcagccttttttacttattaatcacaaacacttactttcttcatatatcaaaactataaattctatatttactacaaacttctcaaacataaaacaattttatccattctaaaaaatctataccatcacacaaattctttttttntccctttcttttaaagcactaccaatttttac

SEQ ID NO: 243447 - DNA, 307 bp, Gossypium hirsutum
cgggcgccacgcgtccgcaaattccttagatcgaccaacaatttgtcttttcttaaaggccctaaccctaattgcaggttttgttgttagtcttcacaatgtcaaccacagtccccagaaaaattaccctgcggaccgcggacaatcactaattctaagtcgatgagagcagtatccatggaactcggcaccgtcaagaccttcttcgacgaaaacccttacgccaccgacgaacccatccctctacccaacgtttcctccaagggtttgtctacaatgatagagtactgcaaattacacctgtttc

SEQ ID NO: 243448 - DNA, 416 bp, Gossypium hirsutum
cctcgggcgacgtgcgcgccaaggtcttacatggaggctgcggcgcctagggtttccttcggctgaaagtgtctaggctctgggctatgttttggggggtttttagttttgggcctgcaaaatttgggctttttatttgggttatttgtttgggctgatgacttattgtaaatggacttgatatttggacttaattatttttggtctattattatttggaacgggttggtccatctttggcttttattgccccgggctaaattggcctattccaattatttttaagtcatttcattcaaaggttctttattcaatatgttaattggttattttcaaattaaatttaattttctctcttttatattttttaattttttctcctatttattgctgcttatatattatttttatttttt

SEQ ID NO: 243449 - DNA, 350 bp, Gossypium hirsutum
ataaactgccagggggggttatataaaaaaaatatatatatataataaaataaaataatttataaaaaaatataaaaaaaaaaaataaaaaaaaaaaaaaaaaggcccccccttttaaaaaacccaaatttacttcccctttcttccaactttatattttttttttttggccccctaaattaaattatctgcccccccttttacaaccccttacctggaaaaaccctgccttaccccaactaataccctttgaaaaaaatcccctttttcccacttggtataaaaacaaaaagcccccacccaatcccctttccaaaaatatttccacccttaattccaaatggaccccc

SEQ ID NO: 243450 - DNA, 107 bp, Gossypium hirsutum
gccatgtacacatgctctttattattgtagtggcataaagaggaagagagtgttttttctatcctaattattgggttttcactttaatttattcgcgtatagaaatg

SEQ ID NO: 243451 - DNA, 151 bp, Gossypium hirsutum
tattattaagaaatgaactccttgttggtatcaattcccaatagagtaaatggagtctcaagtaagtttcttttatgatttagggtttgttcgttctagttttgtgggtgatttaactgacatttctactggtcttttcttcttaatttta

SEQ ID NO: 243452 - DNA, 261 bp, Gossypium hirsutum
  unsure (1)..(261): unsure at all n locations
cccacgcgtncgcggacgcgtggggtaagacattgcaagatgttttgagactgttgtaggagactgcatatgttccatgcatctttgtacagcattaaaggtcctcattatggcaagagttgtttggtttccatcaaataccaaatatagatgtccattcaactactcttaaatggctttggaaacaataatcaattctgacaagattacttcctttgntgtttatttatagctggtgtagtcatacaaggtaattatatg

SEQ ID NO: 243453 - DNA, 372 bp, Gossypium hirsutum
atgatatcaacgaagcaaactcagagctacagtgagtccattcctcaccccacccaagacccctctcctaaaatcaagtggagaaaagatcacacacttgtctacaccgaactatagcttcacaattctgccagtttagatgagccaaaccaaagaagctcatgccgagccacaaatgaaccatttcacttaagatctgatattctctgcaccaatgatgaataaaacagttcattacaggttaacaccaacctatatgctacaggatcaaatggatggaaaatgttgaacatttgacgacaagctggcatctctttagatatgttctcctcgtcccaataatcttgccctttgcctgcaacacagagaaaa

SEQ ID NO: 243454 - DNA, 422 bp, Gossypium hirsutum
cccacgcgtccgcccacgcgtccggattgctcgtctgtatcatgctgcaaataccaccagagtttgccaagatggcctaaaaggaaccggttttacagccttggctgctaagatcgaggctataattaagctctgtgaaatttgtgtcgtctccaccaacttctttgttaacggtgctcattaaaagcttttacccatgaattgtgtgtgcatgtaatagataaataaagggttcccttttgagtattgcacaaaatatttctaatggaatccctcgtaatattttacatcttcaaataccaaaatcaactatcagtctgtcatctcaagtctgcttgaaggcttaaaaaaattgcgatgaagaatattcacatatgacatacgttgtaacaaatatagaagatcattggatacccttcaca

SEQ ID NO: 243455 - DNA, 370 bp, Gossypium hirsutum
aatggatcttgcaaggaaagaagcatacactcaccctattaaagcatgcattgagggattggtttggaggagagataactaatctataagcaaaatagcaagcattcattaccatgaagcactcaatcgttgtttgaaagattagaagaaattaccataaaacaattaaatcatctttaacccttcttataaaaaagttatgtacttgcaagattagaagaattaacaaaaaaataaaaaacagttttcttatttcaagaaaaaaaaaaaaaaaaaaaaaaaaaaaaaggaaaaaaatatattaaatataaataaaaaattaaataaattaaataatttatataaaaatataaatttggggcggccgttt

SEQ ID NO: 243456 - DNA, 427 bp, Gossypium hirsutum
  unsure (1)..(427): unsure at all n locations
cccacgcgtncgaaaggattctgcagcagctacactgcacacttgaggaaaaattagagtgtgttgtatccttacttaagaaggaagcctaccaatggtgggatactgtatcccatatagttcaaccctcatagttgacttggaagtactttctagcggaattttaaaagaaatacatcaatgagatctatctggagcaacgaaagagagaatttttgtatcttgagcagaataacatgactgttgcagagtacaagagggaatttgtaagatgttaaggagtttgtgtctacagaagctgatatatgtgctcagtttgagcctggtcttaattatgggattagggtatacctaatagctctaaagattcaagagttctctactttagtcaagcgagctttgaaagtagaacaggtcatgaatgaat

SEQ ID NO: 243457 - DNA, 405 bp, Gossypium hirsutum
gaagtagcttataagaagcagcgtctgggtaaaagctccaaagcaagagatagtgtatttgcagctctgtgttcgaccctaagccaggcagtgctgccaagtaagaaaactacaaacgctatgcctttatctagtcaatcagctgaagggaccaaagccttgggtgagggaaatcatacagagatggaatctagcagtcctagaagttctggtaaaagtggttccgaagaggatagccatagagagaaggaacctcctagaaattgttcagattgcttgcatagcccctcagacaatagacaattaagtggcgatgactgtcccttggtaccaccaaaatcctcacctgaaatgactgtaaatggatcttaagttattttggagaatcatcatgcgcagtgtcac

SEQ ID NO: 243458 - DNA, 410 bp, Gossypium hirsutum
catgtattcaaatgctgggtcaagggtaggtgttccattttcctttgatgagctttctcatttaaagggttatagagatgctttgcctttacagttgggttcaggttctggcactggatccctttggtctagacagccttttgagcagtttggtgtagctgacaaaagtcacactgctggcaatgaagcagttggaagtgggttgaactcagtaactcgggatactgcttctggtgtggatttagagtccaagcttcttcaatcttttcgacactgtattgcaaggctcttgaaattagatgggtctgactggttgtttagacaaaatgatggagctgatgaggagttaattgatcgtgtagcagcaagggagagatttctttatgatgctgaagctagagagatgagcc

SEQ ID NO: 243459 - DNA, 425 bp, Gossypium hirsutum
ccctcccatttatatgcaacttccaagctttggcatatggtttacaactctttagtttatgcaggcaagaattacatgtttctgctttgcaatggactgcttgttttaattgccaccagctctggtttgatcggtagttgtagtgtagagactgatattaaagctgaaaaggctgtgaagatgagcaagggaggtagtcaaacagaaccagaggcagagccaaaagggtccatttcaaaagagacagttgttgcagaatatgatcaaagagaagaagaggtggccttggttgtagaactagaagatgaaggtgaagaagatagaccaaatgagggtgtttcagtggaggaggatgaagatgaagatgaagaagtttgagtcaatgtgtaatgtgaagattttattagaaagatgaaagaagggat

SEQ ID NO: 243460 - DNA, 102 bp, Gossypium hirsutum
ataatttctgctcctacaataagacatctatctctctatcgagaatgactagctggtactatcatcgtaggtcgccacaatgagagctctacaaagtctatg

SEQ ID NO: 243461 - DNA, 420 bp, Gossypium hirsutum
tcgcccacgcgtccgactacttctaaattgtgattttctattaacatacaaactcggacatgcttatacatgtatatgcatgtttactattacacctgatttatttgattactaaattggtatgcttttgtttcttaagataacacttacaggatttatgttcttggttacctcagcagtgcttggctatgtgagtgacgaggtgtgctagtgaactagcttcttccatgtctttattaataaaagacatggcagaaacccaatgctccttccaaatttcttcggtcaatctcgtatctatcctcaattctaagctggctccagtttaactactttgaaaacacggagaggagcaacatctatagaaccaattagatatttctttcaatggcttgaattgctactacttgttaatatttg

SEQ ID NO: 243462 - DNA, 290 bp, Gossypium hirsutum
caccatctttgcctttattggttactgcttccttaacctcttccacataccatgactcggaatgatatggtggtgaagtccttttcctcccaataacacttccaagccctatctctttgggtcatgggataccgacttgagattactttttgcaaatcaagtcacagcaattgggttttaccttgaacctgaagttgagggcatttacaacattgggagggtaagcccgggaacgtgctagctgaagaagataaccttcttcgaggctcttattaaatgctccagtggag

SEQ ID NO: 243463 - DNA, 421 bp, Gossypium hirsutum
cccacgcgtccgcccacgcgtccgcagcaatcacaatggaaagaatcttcggcacccaccgagaggatttatatacccataacgtctcataggaataataatgcagctccaactgttcagaggtcagacactgcaataggtttaactcaagagcgagcatatatgccaacatctcataaaaatgacggcctggttcctgtttcaaacaggaacagaagcatttctccagcttccgaccagatatacatgatggcaactactcacctgaatgacaccatgggtcaaaggattcagagaactgatgcacctatgttcccaacttctgagcgcatatatttacctgcaacccctcacaggcccgaccacatgggttcgacctctcaaaggaatgatgttgcattacgaccaggctctgagagtt

SEQ ID NO: 243464 - DNA, 360 bp, Gossypium hirsutum
  unsure (1)..(360): unsure at all n locations
cggactcgtgggcggacgcgtgggtatgaactagtccggacgcgtgggtgagtattagaatattggttgtaacccatttctgttcacttatagattcttatctcaaagcttgagattttatgggaggtgtctacctaacaatgcccttaaatttatggccatctgtgataaggcttcacatattttttacagttgaacaaggtttcctcttaccagttgattttggtttaaagtaatacttgataagcttcctcctgatgcttgtttcatgcgtnaattaataaaccttgctctttctgattattttattttatttttttattttattttttttttttagttatatatattttttatttt

SEQ ID NO: 243465 - DNA, 416 bp, Gossypium hirsutum
cccacgcgtccgcggacgcgtgggataatttttgtagcagggatatgtgtacttctgttcccagtagagaccatgggtcgggatttgagtgatagcatttccagttcaaaacaaacgagtgggttgatttaaaatagtgagggctttccctctttctgtataacagttgttttattaccaaaaaaaaaaaaaaaagaaaataaagaagtccttggacttccatatcaaaatagcttttctaaatattttctccctgcaaacatatttttcgttacattttcgagaattcagtagcttttatggtttagtatcgggggtgggggaacctttatgacgtcttcctcttttgatggcatccatgtcgggaaaagaaagcagtttacaatggcagcattaggatttcattttggggaagc

SEQ ID NO: 243466 - DNA, 256 bp, Gossypium hirsutum
cccacgcgtccgcccacgcgtgcgtggacgcgtggtactcgcaattctactagcaatttctctatcaagtgcgctatcaagagagagagttatgtgacatattttgtgacgaggaaaaggactagggttgggtctttggttggatgggcgcatggaatcgcacgttaaagcatgagtatgaccatcattatgaccaccattgtgggcacagatgatgataagtatttcacgaataacttcttagagacagagttgc

SEQ ID NO: 243467 - DNA, 417 bp, Gossypium hirsutum
gattaactgagagtggtttccaattcttggtgtgcatcatgaaactcatggcccctttgcctcttttctgtgtaatttacagttgatggatacaaatgcttagctttggtatattatcagagagtatatctccaattcagaggtatatttgatgagataattattgtgttctgcttggaacttgtttgttagagctattgtgttttgctgttgttaagttcttgaaggggaaattggcatgaatttattgtaaatttttatttggtattggtttattagtatatattatcctcttaaatgtgaatgtacccaagggggtgtgactgtgcgcatgcactaaagtaatagcttgtgtattcttgtgtggctgagcattagcaactacttttagttcaagggaaaaaggtgccatttcct

SEQ ID NO: 243468 - DNA, 213 bp, Gossypium hirsutum
cccacgcgtccggagaaatctgagtaaatttctctcatattattttagtttatgctctgatcgtcgagttgcaggtttggttagggaagtcttgaattatgagttctcgtaagacataattttggatggttttagtcaaaattttcatacttagtatttcttttcatgtaataatgtaccttgtatatatctgtgatatatatcacttacatt

SEQ ID NO: 243469 - DNA, 221 bp, Gossypium hirsutum
  unsure (1)..(221): unsure at all n locations
ctttatcctttttttttttccctcaattttaataattatttgcttccctttgcttatcttaattaatcgttatattagttgtaattttctctctcctttttctaaacttaacagctgaagttagtatttggttgactggtcgtcaacgttggcgggtttcgggatcaggagtgagaaactaagagattaattaattacaagtatttgtcattttnnaaaaa

SEQ ID NO: 243470 - DNA, 258 bp, Gossypium hirsutum
  unsure (1)..(258): unsure at all n locations
tcgcccagcgtncggtttnttttctcgatataaagggcggtcgggtagaatttggattcgagcctcgagaagcacatcaagagtacaggctggcttagtttcgggggcgattgctcgtcttaagctggaaaatgctgacggtcgactggactcggttactcgcgcgtctgatatttgcgtgagtctgactaccgaatgcgcaggacacagaaaccgatctgccctacatcacttgcgaagacgacaaactgacagctg

SEQ ID NO: 243471 - DNA, 360 bp, Gossypium hirsutum
ctcaattgggataagcaatccacgaaggccaaccaaaagccaagccgaacttcgagcctcctatccccttctactcctaagtcagcatccataccagcccgaaagctgaagtcagcaagcccgaggagtggtgtggctggtttagatgatgaaacaagaagcatagtcagtatgaagtctgacagaaaccggagacacagcatcgcaggctcctcagtgcgtgataatgagagccttgccaactctccatcacttccaagttacatggtaccaactaagtctgcaagagttaagaccagtttgcagagccccttgtgaccagaagcaaatggaacacctgagaaggatccaattggatct

SEQ ID NO: 243472 - DNA, 418 bp, Gossypium hirsutum
attgaagccttgcagtttatgaagggttcatgttctgttctgagctttggattgctgatcaaggctatggcctcctagctctggaaaccgttccaatgttgatgtggctttcttatttcaccttaaaaattgggaaaactcaatacaaaggtaataccgtccacataagttcacttgaaaatagtaggcattgtcagtaaaattcgctctgaccaaccttctcataaatttgaggaggagacggattggcttcattgtttttcacattacatggtgcatgtactctttcgtgccattgtagatatccctgtctgtggcatggctttgactatgttgatgtatttcatgcctgtgtgctgatttccctttccattttatttccatcttttgtacttcaatgctgcatatttgaggaaag

SEQ ID NO: 243473 - DNA, 417 bp, Gossypium hirsutum
  unsure (1)..(417): unsure at all n locations
atctccactgactgtatctcaaccagagattgacctgatggactccaacccatctgcaacctgccaaacggataccgttgagccaacaacagataagaaggaaaacccgtcccccagtataatagatcaaatggattctattctatcgaatcaagtaaactcgggtaccaaatcttccgatcaagtaaatcaagctccaacaagcgaagatcctgctggttcataatgcanatactaactaatggtgttaaaaacttagaataggggactgcactggtatatatatatccctttgcttgatggtttaatgcttgaaactgaaccatcagattatctttttttctctttgatcttttttgtgcatctaacttgtaaatttcacttgttagtgttaagagttgagtttttttttctttt

SEQ ID NO: 243474 - DNA, 260 bp, Gossypium hirsutum
ttcccaattcgacccacgacgtacgcgtgtcttgactccatactgactgagaccctttcattaacatcaaaaacactgcctgtgtatcggttaccacataatgccatgctagaaattgtaacatgaggatgcggaactgactgcttgtgtggcagctgctaatagagatgcacgaccttgcatacctggacgccgccgaaactaccacaactgatactctggttcttgctcttgcacccgagaatgcacactttgaagga

SEQ ID NO: 243475 - DNA, 264 bp, Gossypium hirsutum
gaaatgccgaagagctttcctgctagccggtttccacccagcccgataggataaattcttgacaaggaaaagaaggagagagctccagcagcggctgataatagacctgtacgggcgtcggctatcaaggatcacatcctacgctcgcggacgtgcgacgttaaatctgctcaatgagcgggcgtgaactaacttgacttgggagtcttctacaacgaatgaactggtaaaaccctgcgagttccatacttaatgcggttggag

SEQ ID NO: 243476 - DNA, 408 bp, Gossypium hirsutum
gcagatggtacacgggaataaatcatgcagagcacatgcaattacttttcttattgaagcatataaaagggcattaccagtataccttccagtttatttgattcctgctttgatagttcatcatcaaggtctcttcaaaaggccttgcacaatattaggaaaaggtattgttgatattgccagatcaagcttatttttagccacctattgcacatcagcttggatgtggacttgcatcctgtttgggttcttgagaagatgtagcataccattgatagcaattggatcgtttccagccggtctgagtgttgctattgagaagaaaagcaagcggatggagatatcactctactgccttgcacgagccatagagagcttctttacatggatggctgacatcgggtattt

SEQ ID NO: 243477 - DNA, 367 bp, Gossypium hirsutum
ggaccattctccttgagtcaggcttccaagtctcaacactcaaatgcaatcaaatctcagcttcttgagttagagattcgccatcctgtttttaaggtaatactgtcaacaagatagccatagaaaatttcctacactgatgactgacccatcttataacttgtgctcctttggtgttttccgttattttggttgccgataagctagtggtaggtagggcatgagtcttgagggctaccaactttgaattagagcagagtagaaatgtgtagtttggaattctataggtaatatgatcgtctaatggtagggggattttcaaagtccaaggcgatgaacttatttctttatttctggacataatatg

SEQ ID NO: 243478 - DNA, 444 bp, Gossypium hirsutum
tgttatctgtttacttctcatttttatccaaaacgagactggtagattctcgccattcataactttgtaggtctcaattagtaggacttaggctttcacaagcctcttggtggtcttctggtaactatggcatgctaggacatggagctttttcaaggaaaggcaatggtaccacaagatgatcttagtagtgccccgaccacccagaaagacttgagagttcacaatttcatttgctcccccatgttgcctaggaggccaagagttctgaggtgggaagccttgcttggtgagcagtcaagatcaatgttgatgcagcctagattttcaaaggagccttgtgtgcacaacgtctcgatggagcttgataatgctcattcagctaaggccttattgttggaggtcttatgatgggtaaggagcatggattccaccacattacta

SEQ ID NO: 243479 - DNA, 217 bp, Gossypium hirsutum
  unsure (1)..(217): unsure at all n locations
gcttctctttctgtaggaagatcacttcaatcaacaaactgaacttgtaatttttattaactggtgtgctcggttggttctctagtgctccacctatggaaaattttatgtaacatattatccgtttcaatccgaaaatctcaaggctttgtcccaaantaaatattaaaaattaaaaataattaatatacaaataaaaaatataaaataaataaaa

SEQ ID NO: 243480 - DNA, 387 bp, Gossypium hirsutum
gttgtaatgtcatggtaagttgagtaaatttctaatggagttactaagcattcaatatggttacccgttgtttccttttttttttgtagattgttgacttgtagaatgtgtcgatcgaatcgtcccgaagctcacactatcctacgatagactctgtagtttatgatcgtttttagacttgattatgtgtcttgtacataggtgttgttatggtaacctaaaatgatagttttggtttgaactttggttaatgcttgatcttgtcaaggttaatgtcaattggtatatgtaagtttggtaatatgtaatgttgtgtgtatggtacttataatttttaagtttggatatgtaacttttggtggatgttttgataattttgcaatttgg

SEQ ID NO: 243481 - DNA, 246 bp, Gossypium hirsutum
ggaccactctactggagccatgcttacaaattcaaacacacgaacgcgaacaaatatctggttctggagcttaaaaatcagcgtcctgtatttaacgtaatacatccaacaatatagccatagatcatttactacactgatgactgaccgaccttatctcgtgcgctcccaccgtgatataggggatttggagtgcctatctgcttgtgactacggagtgcatgagccttgacggctaccaacctt

SEQ ID NO: 243482 - DNA, 438 bp, Gossypium hirsutum
cttcaaccccaaccctatgcgccgccgatcaaacctagcgcccatgccccgatttcgacggagagggctcctatttgacgattccgacgaccaggtaagctttccctctttcttttatgttattttaaacaaaataaaatgaaaataaaagaaaataaaacatatgaaaataaaaatggatactgaaaaacgaaaagaaaaacctttgtaaaaaaaacacttcgatatatgtattttctattcccttttacaccgaaaaaaccccgatttgcactcgtattgaattttctctctgatttttcctctcccccattacagtacttgaaatcggtcttttatagccgaaatagaaaagagaaaaaaaaaagaaaaaaaatctaaaaaaaatctgttctgttgtttgttggcccgaattttgctcttctgtttgtgtgtgtt

SEQ ID NO: 243483 - DNA, 370 bp, Gossypium hirsutum
  unsure (1)..(370): unsure at all n locations
cggatagcatggttcggagagggaaaccgagttctaaaaataaattcgaatgaaacatacagtttttgtttattttggtgccaattggagtccatggaagcggccgtgttgccatagaatctgttggcactcttagtgtgtcctttgcttatgattttattgacaggtaattagggattgatagattttgtttgctatttataactaatgcattgtggaatcatattaaatgttttatggtgttttgtggagtttaatctaagtttgtgactcaatttggtgcagaaatatgaatattggatggttttattnaaaaaaaaaaaaaaaaaaaaaaaaaaaaaaaataaattaatataaaataaaaaataat

SEQ ID NO: 243484 - DNA, 367 bp, Gossypium hirsutum
tgattatcaagctttaaaattacaataaatgaggttggcatttagttctcctgttaaaaaagttgatgcaggggaaaccaagaaactcttttcttttttttttccttaaaatgataatagtaaatttaaatctaaagtttagaaaaacaaaaaattatgaaaaaaaagcaacagatatatgcatagtaagacaatacataaataaagtaaaaaacaaaaaaaaaaaactaaaaatgaaaacgtaatatgtaataaataaaaaatgggggggccctcttaaagaatacaaattttatttccccggcttggcaaaagtattttttttttaataggggcccaaaaataatttctcgggcgcgcttttaaa

SEQ ID NO: 243485 - DNA, 400 bp, Gossypium hirsutum
cggacctgaaaagtccggtagagacaataagctgcctcggcatataaaatttcctttcacatatcctgttagatgccgcattgttcaaataacactaagccttccccttcagcggcctggttcaagctccgtgaattttgataaagacattaatctcttgtctctagatgatactccctttcctcaagaaactcgatctttcgaagcagcaatgccacgggatccatgccttcatgccaaacgaatcgtgatagctggaagccctgcaaacgaagagataggacttagatcatcacaaagtactgatcaaataaattatataaaccggttgaaccaaactccgcagttaagattcaaagttccgattgaggctgagaagctaatgtaccatgatctcgtc

SEQ ID NO: 243486 - DNA, 421 bp, Gossypium hirsutum
aagcgattgaaagatggtgaagaagtgcatacccctttgcacattgatacttctcttgcggcacagggtcagcatattgggctgagttctgcacctggggacaatagtgggtttctggtaaaggtcatgcacctacgaaggaggcttggggcatgtgattccagatttgctaggttttcatatctttttaaacttaatcggcgatctgttcaaatgatactgacagttgtgtttgccttcatgcttttaggtatattggtctcccatgtcacttgaaaacggttgtttgcaattcgagaagatcatcattgcatgcctgaacaacaattcttgggagtatttcgtcgattcgattgttctcgaaggtttcatgtcaaactgctaggaagtggctagtcgctgccgtttgctgaagcaagtc

SEQ ID NO: 243487 - DNA, 310 bp, Gossypium hirsutum
ccaacgcgtccgcggacccttggccggccgcctggccggaacccctgtgggagttggaacggttcgtcactaattataagaagaagggcagcaagatcaagcgacaggctttgatggcaaacaatgttgcttctaatgacagcaataggagagatacaactgtggagaagatggatgttgcaatggatatgaagaagccgaagaaaggtgatgccgccgatgaagatgttgacatcggggatgaaatgccaatgagcagttttccacctgtggagatcgagaaagattatgaccgtgccagtagcagttc

SEQ ID NO: 243488 - DNA, 322 bp, Gossypium hirsutum
ggccgcccttttttgttttcattcacaggctaatcaaaacaattataatgcatcatcatttggtggatctatgcatccccagttgcgaacagaccctccacgggagggaaaagagtatgcgggtaatgaaggttttgagtcatggagtcctgataatagtccaaacaggtcatcagagtatgttgcaggaaggaactacatggaacccagaatgaattctgggtggaactatagagctgataggccatcatggcaaggaaattcatctgggtatagagacccgaacagacagggaaatagacggcgtgacagaagatgacga

SEQ ID NO: 243489 - DNA, 359 bp, Gossypium hirsutum
ttgggggctgcgggtggacatacgcatgcaaatagtttgtgtgatactttagtggcaatgtagctttactatgattatttattatttgaatttcatcccaaggatccgattagcttttgtattttgacctataaagatgtagaatatagaatttagctgcttggtaaataccatttatcataaaactttagtagcaatgtagctgttctatgaataattatacttaaacctggcggcaatatattattaaccgcgtggggaaataccatttaccttgcaagagattaaaaatgggattttaattttagttaccccttttttgggtgattggttttgaccttcaaaaaaatcatttatta

SEQ ID NO: 243490 - DNA, 344 bp, Gossypium hirsutum
cccacgcgtccggcagaaataagaagctacaagggtctgatggtctctgaaaagatgacatcaaacaaacaaattgcagcgacgagcaagtctttccaggaagtagaagaggattttatgtgaaacttgctgtccgtcaaagaagggtggtttctttttacttctttttcattgcaagcttaagttatttgcctcgattaagtcggctcacttaggatttttacctccattttgcgtgagatgaacttctgctataggtgccatagattctatgaaacacgattcagatttccattgctgattaaggtgttatttctctttcaaattatatttattctgattcc

SEQ ID NO: 243491 - DNA, 478 bp, Gossypium hirsutum
  unsure (1)..(478): unsure at all n locations
ttccgcggtgtcgacgccacgacgctcacggcgctatttcaaccaatgggtgtgggagaaaatggggaatnncatttaaatnntcgttggagccccatattggtgttaccagatgctcnntctactnnncagataagtttaaatatatcttnnntccggtgtatgacangnntgctaactcttttttgttatacctggtggagagtagagcccatcttaattnnttgttgataccccttaaaggcgatttcggggaaccaaatcttgataacaaaccctcttganntcgttggatccgggtttttaattataatgccttgatanttaaaatgccttnntatatcaaaagctnnntctggcattttatnattnnattgattctgaatacaagnngaagtttgttttggaagttgtcaaatcaaattctaaaatgggggggctcttttgcatctgtgggcttttggaatctacaacttgc

SEQ ID NO: 243492 - DNA, 313 bp, Gossypium hirsutum
  unsure (1)..(313): unsure at all n locations
ccacgcgtncgggagaaaggagtgaagagacaaattaaaaagaagagctcatcctcattcccctctacttcattaggttttatatataatattatagtgggtggaatagaagacatgaaaaagagttagaattgagaagtttaacaaatggcttctcaatagattaaaaaggagtggtttttatttgtgcttcagagcagagcaaatgtctggttttttcccttctagtggtgtgctgtgatcaaagctttgcagcattttataatttccatattaaaaaacaaaaaggctcgganttgtatgtgtcttttgg

SEQ ID NO: 243493 - DNA, 301 bp, Gossypium hirsutum
cccacgcgtccgattttaaaaaaaaaggagggcatgacatagtggagcctgttagagaaattatttgaaaagcatacggcttttgaaatttctatctatgatacaactttctcactccatttagctgaacagataccattttctctgatcaggtaatgcaaatggtatgtggttagaactatcttaatataagtgtcactttgtcttgaaaatcatgacatcgttagactaattaatgttattcttacacgattcactgagctgttctgatatgtgatgtaactttcatgtgcattccata

SEQ ID NO: 243494 - DNA, 303 bp, Gossypium hirsutum
aacagaagttccattttttccacttgacattaagctatgttgggtgaagatgtaatggtgggccactcttctggtttgcctcttcccatgaatgactttggttttttgcttgagagtttgctccacggtgaaagctatttccttgtttcaagaacaagttgaagaggaaataaagttggaaactagtgggagaaatttatgataatatggcatgctatgcaacaaagagttacaagaccccccctaattgccctatctattttgttcttatttatatctcttcccctaaatattattattttt

SEQ ID NO: 243495 - DNA, 227 bp, Gossypium hirsutum
tccacacttccgaaaatagaagtattttttactctaccgcagaggcatcgcttctggggtggttatcaattacgagcggtcatctgtctttcatcccatctaccataataaccctttctgcagctctttcccttgaatactaacaaatcttggactatactatctcatgatccaacaaagataattgctactttttcatgcctcacgtgttaacattccaaaacccc

SEQ ID NO: 243496 - DNA, 303 bp, Gossypium hirsutum
cggacgcgttggcggtcttttttctgacgcttggaacaaaaggggcctcatatgtatgagctgaagtctctacttacatatcatagctaatcctcgcttcttgttatgggatataggtgttgtgtgtactgtctgcctgttggatgagttttaaattatagtgcattgctgaatggggggacaattatgagtcatggaatatgattgaaaatactaaacagtgcccatccttttcaggcgaatttttttcaatttaatggtgtcgttaaaatatgtctcaatctacgttaaacattttctcag

SEQ ID NO: 243497 - DNA, 306 bp, Gossypium hirsutum
  unsure (1)..(306): unsure at all n locations
gggaaatgcagnnggtttagagcgcctcagnngcattaccggttaacaaattccataaaggcattagcttttgttccaccgtttctctaactcattctttcccccaacaataagatgttgggggtggcacaagctatgtatcaccttgcttgctcaaaagcaagtccaacaacagattatcaagaaccccacaaattgtggttgcaaaacagaatcatgctttcatgccgagatgagcttgaagatgcctgctactgtacagttcttcatctgccagctcttgcatctaaatagtcttttgagaaa

SEQ ID NO: 243498 - DNA, 286 bp, Gossypium hirsutum
cggacgctggccattcttatgtgaatgctgagagctaacgggagtcttcgagcatacgttgctttaaaggttatacaaggtgcttattataaatactattgtacccttatcaacaattcatgcagggactgaacagcttcgttagtcttctgattctttcttttgacccattttaaagaaaatcatgatggacccacatgtggcagccgttgggttcacctatgaggcaatgagagatactgttatggctggatggtgggcacgatacctttccttgtacgaatat

SEQ ID NO: 243499 - DNA, 247 bp, Gossypium hirsutum
cccacgcgttcggggggaaatagctgtacagatatatcagctaaccatctcttgtaagctataggtccagactttctttatatcattcaacttaaagctgatgttgaagctttaatgacagatatttgacataaagatgcattgatcaccttaactacataacggctgttgtattgatgttgaagcttatactttatagagaggaactcgtctcatcatctatggaaaaaaaaaaaaaaaacaaaaa

SEQ ID NO: 243500 - DNA, 234 bp, Gossypium hirsutum
ctgaatacaaaaagaaagtaaggtgtttccttttcattaatcctcaagcttttatttttgcggataagtttaaccccagttgggcttaatcctccatgggcaaaggcgtaggctgtgtcccaagcaaaaagagacaaccttcctctgccgaaggctctgccgctgccactgtcactgccactaccgtcaccaacaacgcacccaattgaagccgatgaagaaacccacaaaact

SEQ ID NO: 243501 - DNA, 262 bp, Gossypium hirsutum
cccacgcgtccggccgatgccgcagtctatcttgctcagatgatgcaaagtatgttagtgggcataatttggtggtagatggaggttttacatcatttaagagattggaacttcctaagagctaaagtcttataaatgctgctcaaaggatatattttggaaattgaagtacgaggtatatttcaagtttcttctagtttttgacagtctggggaacaacaattagactaaacacaaatgaatttcagtaccttgagatttt

SEQ ID NO: 243502 - DNA, 298 bp, Gossypium hirsutum
ccggcgggaccccccccgcggacgacgcaacaaatgtttttttcgggacctaaaatgtagcttgcgtcggtcgaatcgacgggggctaaatctatgttgagtggtgttaggatgcatagatcatgttcacaagctcatgatgctattagcttcaataatgtagtgatgggaaaacttgatagatatcccttagaatttggtagagaatagtgaactggacctgtttgctcagaaaacggtgatgttgtgtaatataaaatgactgcccttgccttggcagtgaacatagattggtgat

SEQ ID NO: 243503 - DNA, 143 bp, Gossypium hirsutum
tctctttccggctagtttcccaccactttattactctcctgtacctaataagaccggcagagggtgttccaaacattcaaaggcctaacatgatttaaaacttttcttgtgtgctaaccatttcccatccctcacagaattcc

SEQ ID NO: 243504 - DNA, 389 bp, Gossypium hirsutum
  unsure (1)..(389): unsure at all n locations
aaaccaggggcgacccacgcctccgacataatcgcacgaaggtcctggctttccttttgacgcccccnagacacccatcagggacggtttttcataaacaaggggccgataaacaaactttccttatcactatcagttcactcctgtaaccaacaacgcgccaaatcatattgatggcctacatgctgtaaaaaaagccatacttcaaatgcttgtgctcacaatatcttaactttcctttctcggaaatagacctcccttaactcatgatataggacattcttccatctatcatccagttttacgttccttgtcacatattggacaatgtgtatcgtttctctcgttctcccaaatcctcatatccaacaaaaaatttttttgaattt

SEQ ID NO: 243505 - DNA, 232 bp, Gossypium hirsutum
gttttactaaaaattatttcttcacaacaaagcttctaagccgatagtctgctttgacatgacctgatatacactaccatctgattacatccgcgatggaactcttttccgtttgcactcccccaactgttgaataacctacttgctctttgtatctgcaaaaaaagcgtaagacgcaccagcaaaaatttctcaatacaaatgctcatccattacacgatgtgatccccaa

SEQ ID NO: 243506 - DNA, 297 bp, Gossypium hirsutum
actagcgcgatcccccgggctgcatgaattcggctttatgttccctcaacaattacttccaatacagacaacaaaaatatcaagtttcaacccaaacacaaataaaacatgaaaaagcataacagacagtataccatttcaggtctgtaacacgcttcaaagaatacaagctagcttaacacggaagcaactggtagtaaaagacatcatacgcacactcaatcacaggaacttgttagtactcattatgttcacgctgattacccttaggctgctcattaccaacttgtccataat

SEQ ID NO: 243507 - DNA, 270 bp, Gossypium hirsutum
aaaagggagcccacgcctcggaaacctcttcatacttcattttattgcggacctgcctcgttaggaagggttttcaactccgtgagtttgaaagctaataaaatggtaaatttgtgctctggcccccaagaatcaaacaaaatgtacctaataataatagggcggacgtttaaggatccaactttcttcgcttctgcaactcataatcttctatagtgcacctaaattaatcactggccgactttacaacgctgactgtaaaaccctgcc

SEQ ID NO: 243508 - DNA, 304 bp, Gossypium hirsutum
tgcttatccggtcacatggtcgatcgagtcagcaggtaaccccccaaagcgcctgtgagaataacgtagtaaaagagtagcagttgaaatgataaaattctactctttttttccttttttggctaatttggcctatttcaatattcatattgcggtattatcaaggtcctggattatacggaccgagaagagtgccaaagttgatcaaagtaccttctttgtgatgtggtcgccatcgattacgtattccttgtaaatggaaaaaaaagtaaagggcttttgatatatatgcaaagaaaacacc

SEQ ID NO: 243509 - DNA, 298 bp, Gossypium hirsutum
cggacgcgtgggcgttttcttgggaaaaggagagagctcaagaccagcagatgcggctaccttcactaaaccgtatgtttgtggatgtgcttagtagccctcgttaatctttctttgtcataataactagtactgttaagcatgttattagattttcctcatctgcaaatcagtagtaattgttctttaatgtgcaattgatgtgtttcataacttatttgctgccttttatggccaaattttctaacatggatcggagatgtactaatatctgcttaattccatttgattcatcttt

SEQ ID NO: 243510 - DNA, 112 bp, Gossypium hirsutum
ccacgcgtcccacctcgttttttgatccttatgttggcttgagattggtcctacaagatcacacattgttgtgattactgtcggcctacttaaaggactgctcaactgtctg

SEQ ID NO: 243511 - DNA, 302 bp, Gossypium hirsutum
cccacgcgtccgctaatagttctctggacaagaggaaaccagaaagaccctgtccccatattcgacttgaacaccaacatcatgaagagctggacgacgacaaccattaataagacccattctctgtaatttatattgtagaaattgttgtgtggctgaggctgttcatttggaaacttaatttagctctagcataaatcttgatgacctttgaagacaaggcatgttatcaattaacaatagtctgtatcattcaaaaaaaaaaaaaaaaagacaaaagaaagcgtgcattgataagcttc

SEQ ID NO: 243512 - DNA, 223 bp, Gossypium hirsutum
ttcctttttaagctattaatgtaatgaccgaatatttaatgggaacagtatttctgtatttgttctttccttttttacattgtaatagttacggtgtaatttcgttgaatgtttgctagaaagagaaagttataatgtcaaaaataaaaaaaaaaaaaaaaaaaaaaaaaaaaaaaaaaaaaaaagaaaaaaaaataaaaaaattggaagattatttaaaagg

SEQ ID NO: 243513 - DNA, 242 bp, Gossypium hirsutum
  unsure (1)..(242): unsure at all n locations
tatttaggggttatgtatgaattgatgggtggaaaaaaatattaanaatagagtataatagaagagtnggtattgagtgatgttagttatattgaaaaaagagatatgaagattttgttttggagaggggtaaaaaaaaagacatttattatttgaagtgatttttttgtanttgagattagnaagattagggatatatatttaggaaattggagaaatagtgattggaattttttagggga

SEQ ID NO: 243514 - DNA, 396 bp, Gossypium hirsutum
ctagttctagatcgcgagggccgcccttttttttttttttttttttttttttttttggataccactcaataaccatatcataagaccatatatataaaatgattataatgttatacatgccatactcaaaatatacaagccattatgccaagatggtatacgaatagtgtgaacgagcctccgaccattcccaattttcgagtttacttgtcaaaactacaaaaaatgaaaaaaagggaatatgcataaatgcttaataagtttacatgcaaatagcaagtaagataaccatataagcaaacataaaacatcatttgcataatcatcaccaagacattcatatcacattttcatttatcattttaccataatggtgtttatatcgattttttaacc

SEQ ID NO: 243515 - DNA, 168 bp, Gossypium hirsutum
cgcgtccgcttgtattgcttgaaaaagggaaagcaatttgttttaagtgaatcccatgtcacagatgctggggctattatgagagaacagacggtagtgactatataatgattgtaatcattgtctaaacttttatgagattattttttataggattggattgattaa

SEQ ID NO: 243516 - DNA, 404 bp, Gossypium hirsutum
tatcatagtgctgttttaatagattgtgtattcaccattcactctacaaaagccagggatgcttgtaatggttctagagtggtcccacctacttctgttgtgatggagcctaaagtggccagctctgaatacaaataaaaacctttcttggaatcttcgtattcagcttctcttgatgttagttcttctagggcttatgttgctagagagtcttctgtagtgactgcattttgttcccttgagttcagaccattcaatatctagatcttttcctgatcagattgcaatttccatttgaaagttacatggaatccttctgtttataaatttagaaatcttttttttatttctaatagttgcttgaaaccttcactttattgcatactaaatttgctttgattgtt

SEQ ID NO: 243517 - DNA, 384 bp, Gossypium hirsutum
cgttcgggtttcacgaaggtacggcgagaagttgaagctttcagggcagttgagcttgggttctttgaaacctgctgcaacgccaccgtccacggctgctcagaaaccggcttccggtaaggcaacgacggtggagaagggacaggtggaggcagagggtgggaagaacctcaagcaggtgaacattccggctggacttagggtggtttgcaagcatttgggaaagagtagatcggcttcctccgccgtggcggcttcccctccggcgccaactttgtctaagaggagagatgattctctattgcaacagcaagatggaatccaaagcgccatcctacattgcaagagatccttcaatggctgtcaagattcttcagagtcttc

SEQ ID NO: 243518 - DNA, 404 bp, Gossypium hirsutum
cggacgcgtggggtctaccgtaatggactaaattcttttcccggtacatggtgattattccgatattattacgtatatttataaatatacgggaaatcttgccttttgaggccgaagctttgtggttgaacataagcgcgagcaattcggaggtatgaattagtttgttttcgtttttggtgcaacagaataaaagaaacaaggttaagggatgtcaatgttgtgagatggtggtgactgtttttgttttctggcaaagagaaaaatgatgtgctcatgtgtcatgctcagggacattaaagagggggaaaatattatattgttgatcttacatggtattttagtggtggaagtaagctttgaagttaaaatttgtaatagcagttgactcaaaagtcatttta

SEQ ID NO: 243519 - DNA, 301 bp, Gossypium hirsutum
  unsure (1)..(301): unsure at all n locations
cccacgcgtccgggctaggctaacgctgaattagtacatgtttatatgctgtacagtcgcatattggctacagtaattgctctggcagttttaaatttgccaccgttgttccatttaaatctgccttggaagtagaggctcgttaacgattcatcacattgttgagtctttcctttgttgagaccctctttgcaggtagtctttctattacattttaggttgtacaataattgcatcaaattagtttattgctaccatgtgttggttagtnaaaaaaaaaaaaaataaataaaaaataaaa

SEQ ID NO: 243520 - DNA, 311 bp, Gossypium hirsutum
aaaaataatatgagagatagagagtttctttttaagcgtgactttacatagtccggggggcacctactaacactatggtagctattaatccactcattttaatcctatgacatgatctatattttatactattcattcttaaaaagaatcgctgcattgtatttttttcattttctaaggtctttagttgtctacagaacctcactctaccatgatggtttactggatgaacatttcaccctacatttattcactttcagatgaattttatactataattttgctgctgtatgtataatattttttttttt

SEQ ID NO: 243521 - DNA, 344 bp, Gossypium hirsutum
gggtaccttttctttttttatgataagctcctaaaataggattatatttctcctcactcataacttcaaaactcttcttgtatgggaacgtggttggatgaaaattactgttattatgattcaagtcaaagtcacacattagatccaaaaagggaaagattctgctaccacgagttcttgaactatgcctgtagcatgtcttcgtcgattttgttatattttttttctatttccaattcatgacgaggcaaagcttgttatttgtttgacaggaaagtattgcagcagaatttttggacaggcttgtgaaatggggctgatcaattaggaaccatagtcgagat

SEQ ID NO: 243522 - DNA, 403 bp, Gossypium hirsutum
cccacgcgtccgagaacacacaggaactgctcagcagcaatttgaaaattcacattcttcccttgctgctgctctacaggaagctattaaatctgcaacttcaatcacacaaaccttaagtggtgaactggccaacgcgcaacgaaatcttctagctatagcagctgcaggtggcaactccaatgcaggaaatcccttggtttcacaattgagtaatggaccactgactcatctgcatgagatgcctgaggcacacttagatccaactaaagagttagcaagattgatagctgaaaagaaatatgaagaagcattcacctcagccctgcatagaagcgatgtctctatagtttcctggttgtgttctcaggttaatctgcaagggatattgtcaatgaaacca

SEQ ID NO: 243523 - DNA, 402 bp, Gossypium hirsutum
gtttgataagtctcgaaaagtaggtggaccaagggccttgcatcctagccagtgctattgcttgggggttgaagacatggagctactatcaggagaagagcttcatacgccaaattcattcctagttatgttaaatgggctgattcttggcaaacatagaaggccacagctatttcaccaatacgctgatccttctcgtagttaatgggccaactgagggtcttgctctgatatatgtaatactttttgacacaatttttggtggttgaaaattataaagattttgcattcttagactatgcaagagttggtagggcattggccttatacgaggttggaaacgaagaagaagcttttgtagagatggaagatgtttcaatatctttaaagggatatccaggt

SEQ ID NO: 243524 - DNA, 401 bp, Gossypium hirsutum
cccacgcgtccgcccacgcgtccgtgtaggtgcaaactcgacatccgtgcagtgatcggcagaggagagagcagactttgaaacctcgtcgttatctgagccaccaatgctttctgttacatgaagtttgtgacatcaatccgattaattcccggcctgaaatttttttttctgcttgattgtgccggtattagggaggcgggtcacaagatttcaggtaacaaactatggatggatcatcgatcactgtgggttcatttgtattaaattataaacagacagctatagaaagctttatatctagttttagtcttatttgcaaaatgttagctcgagaagttaatgcatgttcttgtctgtcaaggttttctttatttttttgatgatgcctagattaaccc

SEQ ID NO: 243525 - DNA, 399 bp, Gossypium hirsutum
ggaagattttgggcaactttgaatcaatggcctataccgtgggaagaagaaatctgggtggatttcaggtttttcaatccccggtttgtttagtttctatcagttgattgtgttgtagcttaaatttatatttgagtgagctcttagagcttaacaatggtttctttttcttgttggacttgtcatgtttttcatgttaccaatcaatgtttgctactgtttcctagagttactactgagatgggaacctagtttgttctaaataaaattatttattttattaattttctttagatatattattttttttaatttgtggattttttctttttttagctttcttatttttcattttgtctgtgttttttttatttgttttctctttttttctaacttttt

SEQ ID NO: 243526 - DNA, 403 bp, Gossypium hirsutum
ctgagacggaacctgattttgatttggatattaaagaggatgttgaagaagaatgcagcaaatatggcagggtgaagcatatttatgtggacaagtaagcatcggactgtctattgcattggataaactcattttttacagcaattttttgttctttttagttggcttgataattgtgtactccagaaccggataaatatattttatctgttctttattgtttatgaaggggcaaatgttgtatcaatgttgaggaaggggataatcacatatttttacatctattaatctgttagtaatgttatttctgtgcaagttatggacattatgcagtcattcagcaacttggttaatatctgtagctgacaatcaatgactaatggcatcttattttgtattataa

SEQ ID NO: 243527 - DNA, 264 bp, Gossypium hirsutum
cccacgcgtccggtggtggtatgcctgtttttggtggtaacaatgagggttaaaaagggattggaggtaagaaaggtggtggtgctggagggaatcctaacggggggaatccatatcaaggtggcggtggttaaaactggtggtaaaaatggcggtggtttaccttatgagctgcagaagaatggtggtatcaaccgtgatggaaacggtggcaaaaagggagctccctactttgtttccgatgggatccctatcatgggatgc

SEQ ID NO: 243528 - DNA, 217 bp, Gossypium hirsutum
tcgtccacgtttttttttttgtcattgtgtttttgtgccgggtcaaaactcataaatggcggatagcattggtccggagcgtcctgtttatgttattagatcatgttcggctttcatttataaaacacaccttaccttataccccaattgttttgggtattaatataaataaaagtttttttgtaatttgtttaaatatgggcggccgttttagagg

SEQ ID NO: 243529 - DNA, 404 bp, Gossypium hirsutum
cagagccgttcactcataaacaaggctaaaattgttgctgccaagaaagatataaaagctcttgaggagcttgcaaatgttgaggttgagaagtttatggatctctggaatggtaataaagccttcagggatgattatgagagaagaattctgaaatccctggacactcgactattaagcagggatggtcggataaggaatcctgatgagaagccattagttctaccagagataacagtacatacgggaactgaagcacttccaaaacctggtgcgaaacaaccaaaggaagaagccaaatcctctccccaaccaggtactaaacacctgaaaaagggccagaaagatgctgagaccaaagcaatggagtcaaaatcctcttcagagaatgttgtagcagacaa

SEQ ID NO: 243530 - DNA, 187 bp, Gossypium hirsutum
agaatgtgatgatgtagtgatgtaggccatcttctattcagcattgcagattgactgtcattttatgcccctgccgtctgggccgtatgtactcacaggtgcggttcagaggctttgttgtatatatagaggataattgtttcagtttaccaattgatcaggtataatatcccaagaaattacatgt

SEQ ID NO: 243531 - DNA, 247 bp, Gossypium hirsutum
  unsure (1)..(247): unsure at all n locations
acgcgtgggctgattcgtgggcggacgcgagggnggcagggggaatttaaagaaaaaaatggcccccccaaaggctaaggacattatatgtatcaaaacccgagaacgttttcagaaagataaaaagaaccgagctgagaggaagtaaagcaatagctataaaaacttggagcttctttcaaggccatagaacttgacaaagaaagtgatggaactgatattcaagcagctctggctgagtggaccg

SEQ ID NO: 243532 - DNA, 282 bp, Gossypium hirsutum
gacccacgcgaccgaggaagagaagcagcaccgaagaagaaggaagtagtttttcggcttaagttggctatgaggtgtggtgtgatgaatccatctattttaggaaaagttttatgggaacattacatgagaaagaagggtgcagcagcttcggcttaagttggctatgaggttgttttgatgaatccatctattttagtaaaagttttttgggaacattacatgaaaaatgtcaattattacatttggatgcctttaaatatttgcggtttttatttttat

SEQ ID NO: 243533 - DNA, 240 bp, Gossypium hirsutum
ggtgtattggattagaggtgtaatagcaaatcaactgtttggttgaatctaatggaatagaggcgtaatagtaaaactgtgtttggaatagaggtgtaatggaatagaggcgtaatagtaaatttgtatattctctcagttgctatattttttagttttcttactttaaaaaaaaaatataataaataatgttgtacgttaaaaaaattttttattttagtaacgcatgcattaaaattt

SEQ ID NO: 243534 - DNA, 210 bp, Gossypium hirsutum
cccacgcgtgcggtcttagtgcgggatcttttttctgcgacctaaaccgctacccgtccagcgagattatctctagcgtcatgaagagcttacctgcataggttatgagtttctatattagaaacccaaggcatggcctcaaaatatgacgactgacttcacacacatcatgtcgacggacgcatatgtcacttacagatgtccttctat

SEQ ID NO: 243535 - DNA, 427 bp, Gossypium hirsutum
ggagtgcatcatgaaccacctttctagatgttgcggcataggaccaaaataacatccagctgttacattcatacctcaaaggcagggtgtgcaaaaggttttcaatcttttgagcttaggatatgaacgcagttgtacagaggggtaacctttctttggattgagaagaggtgtcatatttttccttctcaaccttatctttatgttactggatttaaaggtcagtaatgattcaggtaactgcttccttgatgttcttatcaaaatgaaacatgttttaaggaatattttgtgctcagcatgtataattatatttgtatccacatcaagagtccagttttcactgctcggggatcatcttctggatatggtagcaaaaaaaataaaatcctcaatccggtggttgcaaggaatttcatggaggaac

SEQ ID NO: 243536 - DNA, 474 bp, Gossypium hirsutum
  unsure (1)..(474): unsure at all n locations
gccacagcagtccgataccttgcctaggctttctttaatatagcttaacagtccgtcgtagctattatgtacctgctagctaataggacacgtagctcatgctcgtagcatcttgcgacgctatctatagcagccttagnctgattagcggtgtggtacccgccaccacanttcctctgcttcaaatccaccgcttggcagccatccgcatatccccaaatttccttcgaaaaagaccgatgaaaagcaaaagggtaaggtggatggtggtgtgaagaatgaaagaagtgatggtaggcaaaacatttacatcaggatcgaggaggacgatgacgacgatgaagagaagtgtagcaaaagtagcaaggatacaagtaaggggggaggtcttgaaaacaagaaaggcaaaatattttcaaaccctaaggttcatgaggcatttatgggaaggggtgaatatgagaatatgtgttt

SEQ ID NO: 243537 - DNA, 421 bp, Gossypium hirsutum
cccacgcgtccggtcatttgccggtgagtttgttgaactttgagaacttgcaggagatcaatttagcatacaatggattgacgggtcgggtaccggtggcgtacggacagcgattggggagaccgtggaaaagcttgtttttggatgataacttcttgtcgggtcggattccacggcagttcaatagtagtgcccttaggataagcggtagccttgcgaataattgcttgagttgcccggtgacgatcccgatttgcggcggtgggcagaggccggcttcagcttgcattggtgagattggtaaccactgattaaaacggtgaccaaaggatttgaaataaattgggcaaaaagaacggaaatgtaatttctctttctctatagatttagatcttacaatttgtttacactggcatcattc

SEQ ID NO: 243538 - DNA, 177 bp, Gossypium hirsutum
cagcttcttaatccccttacaagacatatgtttatgcggcgggtttaccaatggctgctggtagggctatattcaccaggtgggagacgaaagctgtagctgctgtgaagactaatacgagtacatatattatgccaaaacccgaagcttaattggaggcgaagcctattgttaagc

SEQ ID NO: 243539 - DNA, 388 bp, Gossypium hirsutum
cccacgcgtccgctccaaaggtgccagatttcaatctttagaggccaaggctgtagatgataatcaaagagctaaaccgaagagcattgtttgcgctgattgtgacggaaatggtgccaaacagtgttctcaatgcaaaggtaccggagtgaattccgttgatcactacaatggacgatttaaagctggtggattgtgttggctttgcagggggaaaagggagattttatgtggagactgcaatggagctggtttcattggtggatttatgagcacatttgatgactgaatgtaaaagaggctcagtctttttgaatcagtttttttcatggatgtttactataataatctgttgtaacttctgttttagttcttagatgaacgatac

SEQ ID NO: 243540 - DNA, 190 bp, Gossypium hirsutum
cttagtactttagcagttttaaaggactttgttttatggcctaacatcatgcagtggggaaagggatccaatatgttgaggcagggtaggaaatgcaaatggaaagtccatttggatggagctaaagctgagttctttttatcaatatatttgaacttgctggtgtaaggtaccttggttttgctatcta

SEQ ID NO: 243541 - DNA, 279 bp, Gossypium hirsutum
cccacgcgtcctcccactcgtccgcggactcttttgtggaatttcaaggctaatctatatattgggattggagcagctctcattatatattttgaggttccttcaaatttccaggctcaataatttatatcttgccaaaaaccgaaaataaaacgaaagctaacccaaaggaaaagccatctaaagcttggaggactgcaactttagacttttcctgggaagaaggcggttgtccctattgcttctcccaaaaaggctgctcgcgcctaataaggctcc

SEQ ID NO: 243542 - DNA, 181 bp, Gossypium hirsutum
atgaaaacgacgatgctgttgaggctattgcttttgttggttgtgcaattgatgaatggagtgatgaaattgcaaggaaactgggacgaggatgatgacgagctacgaaggtgatgatgctattgaggctattgctgaggtagaaggagcaatagatgttgggcgtgttgaacttgaaatg

SEQ ID NO: 243543 - DNA, 428 bp, Gossypium hirsutum
  unsure (1)..(428): unsure at all n locations
gcaccaaagaaaaccccggtatcttttttcttttttccttattttctttggtgctaagctttgaacataaaatggtagtacatacaagcttgcaaaatctggagctgctggtgtggtgggtgtctttgacagtctccaccactgattccggtatcacgcagtctttaatgcaattttcagacgaggatcctttggctatgtaggtaccaaagcaagtcccgtgcaatatatatatatctttaattcccattctctctgcactaacaaaatatattagatttgtagataattattttgcattgcataagatagagtttatatacactntatgtaggagagacaatgtcatattctcccataatgctttacccatgaatatttcatttgtagtttgtatcatatgagaaatgttaggcacttcattgcat

SEQ ID NO: 243544 - DNA, 397 bp, Gossypium hirsutum
tgtaatccagtttatatatatgtttaaactagttgagcagaaaatagaaagacataaaaaaggtagcttgattgggaaaaaaaatagggttttgggggttatatgcttgaatgtgcagataatatgactttgaattgatgatttgcatgatctgtatgaaggtactttgttttaacacccccctgagaagtctgaaaggtgtgaatgaatgcagttaaaattggagatttcagtccttggcttttgagttggaatgatgtacgggtgttttattaggtaaaaatccagtggggaacaaattgtgctaataactttttgtaagtaaatattataagctgggtatctgctagttttcttatttaacacataagatgtacgtttattgtggtttcctttt

SEQ ID NO: 243545 - DNA, 320 bp, Gossypium hirsutum
cccacgcgtccgcccacgcgtgcgagaaagcgtggagaagaccttggttggtgtggggagatgatcgtcaaggatagtttttgccaaccccgttcccactgtacacttactatagcactatctacatgttcgatttgcatgttctaatatatataaatatatatatgtgcatgtacgaaacgaacaacatactggaggggaagccattatgcatcgtcttccttttagagctgcacgctactggatttatttattctggatcccatgctgcttgattgaaacatgcttgaagagacacttgctgcatgtagcatgttatg

SEQ ID NO: 243546 - DNA, 178 bp, Gossypium hirsutum
cccactcgtacatacacacatgctaaaacgcgttgagcagaccttggatagtcataggagagggacctcatgggtagaaaatgacaggcctgtgcccacatatacacttgctattgctcattctacatctgtgatttgcatttgcgcatgaacagaaagatatatcttttcatgaaca

SEQ ID NO: 243547 - DNA, 236 bp, Gossypium hirsutum
cacatgactatgagcaaatgcttttgttgttgctgacagacctacgggtctgtatcctcacttggggtctccacgaaggttgacgataactaactttgtatgacttccttgttaagatgttgccgccacttatatctggagaatgccttactgtattctttaatataacatctagttgttggtgtacaaggcatcaataggcatccgctatgggttcaaccccaattcattaggtg

SEQ ID NO: 243548 - DNA, 283 bp, Gossypium hirsutum
cttttagcagatgttaccacaaaattatagttcattttcttaaatccaaccgttcaaaccgcaactgaaactacagattggttgaattggtttatgtgatagcacaacacaatttaactttcatagctcattttgcagaggcagattttgttatgctactgcgataaatacatttttccatgtatatagatggatggtgacatacatttcaagtgtaacctatgatgtctgcatcattaaagattcaatatcgatggtgatcatctacgaacacccttttccc

SEQ ID NO: 243549 - DNA, 112 bp, Gossypium hirsutum
cttgggtaaacgctgaattcttgctagaaaaatgtttggttggcactttggatgatggcgtaggcacccatacattattaaaccgcttgttggtactttgccatgttgtcta

SEQ ID NO: 243550 - DNA, 385 bp, Gossypium hirsutum
ccttcttgaaacttaaagagaacgttaatgatgaagtgcaaggtgagatattaggggtaattaaagggattaaggacggtgtctccggtattcaacagatcacttgtggggagaatttctcacccgcaagagctaaaggcttttcgattgcctcggttgcggtttttaatggagtcaatgaaatggaagagattgagggaaacgaagaatatgtgaacctacagaaacagaaggttagggattatttggatggtgtcatagttgttgattatgtggtgccatcatcatcatcatcatcaaatctttgatatgttattaactacaaagaaaaccttgttacttgcttaattaatggttgctgttggaacaatattcaactttgaat

SEQ ID NO: 243551 - DNA, 432 bp, Gossypium hirsutum
cccacgcgtccgagctgttttcctattagtcatggtccatctgccagacgcctccatgaattgtttctgcgccaattttgtgatgctcacacttgctctggaaaagcaaaacctttccctagaggaggaaagaagcaaacaaatttactctacatggctacatcaatactacttatgatgctgcttcctcttttctatcttctttattatttatatcaaagagacatgaagcaagaaacccaagtgctaagacgagtgtcacaagttggacggaaagcaaaaccttcatagttgtgaggaagatgataaaacgatgaatattgcttcctccgagttttgcccttaacttcattatagcttcgagtcagaaagttgaaaaacaatgtggttgcgtcctttgaatgtcacggacatttcagtggcatgaatgcc

SEQ ID NO: 243552 - DNA, 312 bp, Gossypium hirsutum
gttaaaagggaaattttaattgtattcccttcaaaattaatggtgcattttggtgtcttttaacccaaaatttttaaatttggcccaatttcattttggcccttcctatacaaaaattttggcttccttttaatcttataacatttttagctagtatactaacaaagcctttaaacagctattagactatattttaattaaataagcctctatctcatgataagtactttgacaaaattctaatagacattaacaactcaaggaaggaagtgaataaagctctagtttgacttatttttggtactagcatct

SEQ ID NO: 243553 - DNA, 345 bp, Gossypium hirsutum
cttgtgaatcactgacctagagtctccctcaacttccacgcccttcaggccgagttggaatcccagatctagtgcctgataacacaccaacacctcggccgcaaaagcagacgccgcgtcaaaatttatcctcagtcatagccctgatggagcaacccatctggttgtatggattcttttgtcagttatcttagctactgaaggctcggggatagtcgaggattgtcaccatactatcgaattcattttggtacttttgaaagtgtaaatatttttaagtatagcatgtataggatagaatgtctatgtatttaagttttgatatgtatatatgttatgccatga

SEQ ID NO: 243554 - DNA, 293 bp, Gossypium hirsutum
gacgactccggcgaccaggtatggaggctgttggggagtgcgcacgctcgtgaaggcgcgattcttgcggaagagactctggctcctagtcgtgcggtgactggagttgctggtagcgacggcttgctgcctggggcttcttagttttgttaggctagggtttagtttgggcttacgtgggtatttagtttgggcttgtttattggtttgggcccgggcatatttgggcttgtacacaactcattaacatataacaggacaaaacaaatatataatataaaatttatataagg

SEQ ID NO: 243555 - DNA, 335 bp, Gossypium hirsutum
cccacgcgtccggtaacccttttacagctttttactttgctttatatagccaaaaataatgaaaaatctttcaaaaattccccctttttgtcgtaatttctgctgccgtttgctactcgtgattcctgattttgttgcaagtaagcattggattaaagtacgtgggctatgcgagggcgacgtgcgtgacatataggctgctgtgcgttcgtgcgtggagacgattactgcggtgtcgaggctgggaagaaggctgctgctgaagattgtagggttttcagatttttcagttttgggttgatttgggttttagggtaatcgggctggtgaaattg

SEQ ID NO: 243556 - DNA, 312 bp, Gossypium hirsutum
gtggtgcgcagagagtacaatgcgctcagcaatgataaaaaagccgaatgtccgagacacagacggtggtttttggcgatggaatgtactgtggttaaaaaaaaaaaaaaagaacatttgagagtaagattctcaaacattgttgtgttttggtagtcctttattttttgtttttaatagtgcaagtattttagtaattgcaatggtgttatatgttctgaaacctgatactaagtatgcaacgattaaaaaaaaaaaattaataaaaacaaaaattaataaattgaaaaaagaaaaaataagttttttttt

SEQ ID NO: 243557 - DNA, 335 bp, Gossypium hirsutum
ggggggggttcgagggttgatggtgagtgacaagaaaggttgaagggaacccaagttggaggaggtttttttttgtttgtcatattgtcaaaaaacccaaactcccttttgttcttttttcttacatcacagtctgattggagctcttcatttcaatccttttggtttttattttgccctctaagttcattaatcattatatcaccaccaaattgctttcactggctctttttaaactctttttggccattgcagcatcaaacataaagttgcaatggacggttatatctttttaaaacaaaatcttatctaagcattcaaacgaaagaaagtgg

SEQ ID NO: 243558 - DNA, 116 bp, Gossypium hirsutum
gccacgcgtccgaagcttgtggtaaagatgttctgttggcttaacaaggttcttacaattggcttaagatttgtaaacctcggaaaatataattcattatgatgattttacccggt

SEQ ID NO: 243559 - DNA, 343 bp, Gossypium hirsutum
cccacgcgtccggaaaaaagttcttcttgcattgcaagcctttactctgcaactccaaggctgcaatttcaatctctcaacaacatccgagttcccaaggcggattggcagattatccgaggaaggacatggcttaacaccatgcaccgaaggaagccttgctccaccattccctgctagcacaaggtacaagcttggaagaacatctgaaacatatgattggtctgatttggagacctgcaacaacgaaagaagtgttcttagtcagtttcaagatgagcatttcaggctcaagaataaaaggtacactcctaatgcaagggaaaggatgtataaatttgga

SEQ ID NO: 243560 - DNA, 227 bp, Gossypium hirsutum
atggattttcctcatactgaatctctggccataaaatttccacttttgataagtaaactttgttctataaaaaacttttaactgtcacagatttagatttagaccaaattttgttccttcactgctttcaccagttggtgtaatgtgttgtggctcatgtacagaagagttgtgtatcattgtaatctgcagaccaacacgattcaattccaaatggctttatatgg

SEQ ID NO: 243561 - DNA, 292 bp, Gossypium hirsutum
  unsure (1)..(292): unsure at all n locations
gttgggaagaagcagaaactcaaatgtagctagtaatcagcaacaaaataaacttgattttaaagttgaactcttgcgccttcaacttcatctttagcatgagaatttgagtgttaatttgtttttattttcagtggtggaggattactcaaaaatcatggataattcatatcagaccggaatttgatatcatctacttaatttgtttccctacgnnggaaangccacctaaaggtaactggaaaagcttacattacattgaaaactaaaggcttgataaatataaannccg

SEQ ID NO: 243562 - DNA, 325 bp, Gossypium hirsutum
gcagcattttgcccaaggaaaagtaaaaaaaagaagctccactactatgaattactttttatgtaaattacaggttctttttgcagtgcaaggtagatattagatatgttagtttgctaagcaaaataaatcaaatggctaagcagccctttgtttctttttctgttagtagagtgcatttaatttatctctgcaaggcggagtcagaatttttctttttggtactgaaattaaattatatatttttatattttattattttaatagtctacatctttataatttttaaaaaattaaattaaatttttattattttgtggggagc

SEQ ID NO: 243563 - DNA, 336 bp, Gossypium hirsutum
aaaaggcagagcctccatctgtttcggccctccgagctccggcgccaaactcaaccccctctttccgatttagacccggcgatggcgctggtacacagcaaggtcaacttgccatttcggtgaaaggagggctggcggtggcagacatcgggcgtggtgcgcgctgaaggcgcacatggcgtagcaacggcgcgaggggcgccagaaaccctagggtttctggccattccaaaattttttaaggttttgggccaccgggctttgtttcagtaattgggcttaatttagtttgttgggctggagcaaatttgggctttgtacagtatttattatata

SEQ ID NO: 243564 - DNA, 344 bp, Gossypium hirsutum
cccacgcgtccgcccacgcgtccgcccacgcgtccgcccacgcgtccgcccacgcgtccgcccacgcgtccgcttccttttattggaatcaccgaaatgggcggaggaggagtcatgagggcggtggggaaggtcgccggggtcggaattgttaactccagccttcgtggtggtgttcagggaactccgctgtctgctgagcaatccgttatgcgtgtcgccgccgcttcccgttctgcttcttccgtggtttctgtttctagtgaaggagtttcgtctgttgccgacacgactgcgtcggtcagtcacaagtcatcttgggagatggtggatgattgggaatt

SEQ ID NO: 243565 - DNA, 331 bp, Gossypium hirsutum
gtgagtttgcaaatgttgctaggggaaaacagggttctggaagtgatccataatacatgacaaccagcaggaagcatgtgagtgcttggtgggatgatattagcagcagaccgtcctagcagaaggttctccagctctatgctcctcatttctaagaattgaaaatgatgcaatctggggatggggtctttttaatgatgtctgctttgttgtttagcagtttggtttggtttggggtctggtctttgactgttttaagaggccaactagttatcctgtgttagttatacttacaataaaatgttggtaggggtagggggttacaattatc

SEQ ID NO: 243566 - DNA, 328 bp, Gossypium hirsutum
atctcacttacatatcatgcatataggctgttactgaagattcactgtggtagctcaaccggtttggatgctgaatcacgttcatcatgtaagtccccttttaaaggattgagactctattgggatggcatggaactcggtaccatggtagccatgaccgtcggatatcggatactaacctatgctttcttaaggtgaatgaacttaatgacaataaattagtctagattcttcaacaatcttgactggtgaacatgaactttatcgagccaataagtaggattaaaagaaaatgtccacgttgtaaaaaaaaaaaatccttaataag

SEQ ID NO: 243567 - DNA, 332 bp, Gossypium hirsutum
gtaccaagttcacttccactgaaaaagaagaaaaaaattaaagtatatgttgaagctttacaaccaagccatgtcagattgtgagttgattcatcccatttttcacgacttgttccatggttaaatagtgttattagtccttggactatgcataaatgttgatttagtcattgtgctttaatttagttaattttagttcctatttcaaattttgaaaatttagcttagactaaacagtaactgttaaattcaatagcagcctccatatgaagtactccttgtttgtgacgacctccatggtgttagtatgctaagaatggttattgtataac

SEQ ID NO: 243568 - DNA, 344 bp, Gossypium hirsutum
atcacgaacctcggtgttattttagcccaaatgagggtttaaatagatattgcattagtaaattatataacctgaacaaattgtccagatatgttgtagcgaaatctgaacttgctggggctgggacacctgatgcttcctattctttatcagaagttaaactatcttcgaaagttagaggagtatgcttttatgctgtcacggcaattgcagctatttcacttattgggtttatgatagtggcacatccctttgtgctcttgtttgatcgctacagaagaaaagctcagcattttgttgccaaactttgggctgcagcaactgttgctccgttctttaaaatt

SEQ ID NO: 243569 - DNA, 330 bp, Gossypium hirsutum
aacatatttaaaaccaaaaaagattacctattcttttcttttaacttgctacttttttggtatttctccatgggtaaaaattacaatatattgttatgacctttatagccaatattacactatttatttctgttttgctactattttgtgtctgttcttgcattatttggtctttgtcctttttctttctttttcttgcagatggcgtggaggtcaacgatggagatgggaagcgtacccttgccattttggtgcaacgatggcaatggcatgtcagacctcgggcagcgagcacgctgacaaggcacaaggagcggggccaatggaaac

SEQ ID NO: 243570 - DNA, 325 bp, Gossypium hirsutum
cccacgcgtccgcctgcatttgccttcgctatgaacggggacgatattgtggagtggagtgctgattttgaggcaagaaactcgttcatctcccccctcaccaccatacccgaagtcgatcttgaatattcgttgtcaaaggttgcatcaaaatacatagttgctatcgtatttcttgtgttctgtctctgacgtctgttatcacctaaggtagatggtctttctttctttccatcaatttctgctatggatctgtggacttcgtttgacatctttcgccctgtggatgctttccccttgtcgaaaccatttttaaatttgaaaa

SEQ ID NO: 243571 - DNA, 340 bp, Gossypium hirsutum
acatttcaaccaaattttacttgccctaaaatcaatttgtttgggctgattctagcaatcggggaaccaccattccatttggtggccgacaatgcacaagcagcgaccatattatcactgacgagtgctctgctcaaggaaatattgcaactgctgtactgaggaaacgggaaacggctcgtgggcacccatccccttaacaatgttctggcgtttcccagaaatgaatggggttcccggctgctgatttactttgacaacaatatgctatagcgtttgcgagattacaattgctttttaggttcgcgtctatttaattgggaattaaaaaaatggcttt

SEQ ID NO: 243572 - DNA, 325 bp, Gossypium hirsutum
gtttcaagtactcatctatattttttttccttcttactttcactttttagggtctgaaatttctaaaactttgttcaatttagttgaatctgaactgcactatggatgcttatctgtatgcaaatcaaaatattgtagtctataagtttaaatcggtataaataaatataattttccttttagctctctgggtttttgtccttttgattgttttataacagactcttcttaaaggataagtgatatacgaaatccatacgaaatccgggagttgaatcctggagttgaaatccaagagttgaatcccttataaagtttaaattta

SEQ ID NO: 243573 - DNA, 343 bp, Gossypium hirsutum
ttccggtagtatgcacgggattccgatggaagtttcagtcgcattaggcgtattggtatcggatttaagtgaaaaaccatggaaaggaaagcttataacttttagtgaaagccctaaacttatattagtagaaggtgaaaacttgaaggaaaaaacagagtttgtgagagatatggaatggggtggcaacactgattttcaaaaagtatttgatcttatattgaaagtggttgttgaagggaatttaaaaccagaacaaatgattaaaaggttgtttgtgtttagtgatatggaatttgatcaagcttcaatgtcaccatgggagactgattatgatgttatt

SEQ ID NO: 243574 - DNA, 330 bp, Gossypium hirsutum
gcatctccctcgatttctactgcgtccaaacacatggttatccccaacctaactgcatgagcgcatgtacaagcttccgcgacaaaagaggaggcaatccgattctccaccactgacttggagaccaaaacctcccccctatcatttctgaccaccaaccccacggcagatctgaagtgatgatggttaaaagccgcgtcaaaattgatgcgcacggttccgttctctaggggtttccactctaaacaagaaagatgtttgataacccaaagtgcgtagcaaaacgttcgacactagctgctcgatccttctgcaaaaacccagatcatt

SEQ ID NO: 243575 - DNA, 343 bp, Gossypium hirsutum
cccacgcgtccgatcagagtaaattacaagggtagtatgcttcagggtaagttcccgaaacagattgttccagccgatgagaagccggaaaaagtaaaagcggtggccgaagttccgaacccgaagcctgatcataagcctgcagatgtgccggagaaacaaaacaaggcagttcaagaaggtcatccccagaccaccctggaaaaacaaacaggtgatgattcaaatacagatggggtagccaaggaggctggcaaagtttcagagaaaacaccagacaaacaagaagaaatggaagatcaaaggcatgcatctaatggagctgatcacagacttatggaga

SEQ ID NO: 243576 - DNA, 341 bp, Gossypium hirsutum
cccacgcgtccgcccacgcgtgcgcccacgcgtccgcccacgcgtccggagaaaaacaactttgaacttcatgttttggaattggaagcacaggacactgaagatagggtggaagctgttaatttaaaagttaaaaaggtttgatggtcagaggatgctgatggtgattgggactgtgtgcaaactttaggtgaatctagcaagtactaagcctagaactctttctatttgttctgtttcaattcattttcttgttcattgtattgtctgatatgtacttttatatgtacctattaagtattgtggtgatgtctttgaaatttgtattataccttaaagat

SEQ ID NO: 243577 - DNA, 332 bp, Gossypium hirsutum
cttagcttgcttggttagtctcagattctaatgttttctaagctgaaattgcagaagaagctagtaatcaaagtggaggccacgggagatctgtatctaaagaatctggtgaagattcaaagggatctagaggtcgtaagcgcgttgagaacatccagttcaaagggaagaacacatttgcagtgccaagaaatgttaaaccacttggatggactaacaaacctggaacccgggaagaggaagatgagaagccaaaatcaaatgatgagttcagaaaaatgtttatgaaaacctgaggttcactctcaagtttctggttaagatcaatgctc

SEQ ID NO: 243578 - DNA, 266 bp, Gossypium hirsutum
tttccctcaaaagggtggaaaacttttcttcattggatcgagtctaaaagggataaatggatgtggagaataataataattgtaccaataacaagaatttctttctgggcataaccaccgaaaaatacgtatatcatattctgaataataactttagcaattgtcaaatctgtattatttctctcctatcagtttactgtttaacctaattggcactctttcgagtgctctctccttatttttatttttttatattttctttttta

SEQ ID NO: 243579 - DNA, 336 bp, Gossypium hirsutum
cccacgcgtccgttcagatctatcctctagcttctcttgtagtttacgaatcaccggccgagaatcgccttcaatctccacctccctcaacccaaggtgaaattcgagttgccagtgcttggagacctgccaccacttttgctgcaaaggcggatgtatgttcgagtttattattgattttgagcaaataacctctgctttattatttcggataactaacccagaacacgactcttttctatgtttgttgaaagcggcgtcaaagttaattttaagccccgttccccccggtgcaacctatcttacctaacagagccgtttttcagggcactcccg

SEQ ID NO: 243580 - DNA, 235 bp, Gossypium hirsutum
tttttattttttgggttactttatttttgctttttttcttttttttttctggaaatttacctttaaagcctattattttcgattgtaaaggggttcttttttaggcaattttcccacattgaaaaaagcatccaaaaaatcaacgaggtgattattcggcagaagatcatttttatgacttgaaagccttattacccaaggagaaataccttaacaatcttttgatggaagggga

SEQ ID NO: 243581 - DNA, 359 bp, Gossypium hirsutum
gggttgatttggccgtagaccacggcctgattcaaagcctgcaatctcggctctgatggtgggtggctggaacgacgggacacgaatagacgcgtttgattctggccccgaatgaccccacaatcccagggtgagacgaagaggcgtttctgcttgcggcgcaaaccctggctagggtttcctaaagctgaaaataagttgggccaattgggccaattaagtcttgggttattgggctagcttagtatgtaacgggtctgctgggtttaggctaaaaccgagtgtaggacttttagtatttgcgtcaattgggcttgtgaatgtaaatggactgtaataaataaacttttgcttatttt

SEQ ID NO: 243582 - DNA, 276 bp, Gossypium hirsutum
tttggggtttttcttttgagtagggaataagccatgaggcttatacaaataatgagatttatgtagtttataacagtgcattagtgcttagtttttaaagaaaaatggtgtgttttagtagtagaactcttggtggtatgccacctgaccatgaagggaatccatgccctttttaggtacccttcttggaatgttgtggataagtgatggcaagtttggctttaaataaaggggaattttattaaaaaaaaaaaaaacacacaagctatttttttt

SEQ ID NO: 243583 - DNA, 452 bp, Gossypium hirsutum
attcccttaggctttcatctagcatgctgccgccgacaataggagtatttgagtcatgaaatcaatttgcagccccaagatccctcctctgacttcgatttcaacgaagcaaagaagaatccatggcgaatttgcaaagctcggttgtacggagaagcgaggagacgtgcgaaggaggccgtgcgaagagccactcgtgtgagccctaactctctggcctattctggcacgttcctgaagcttctagtgctgctgagataattttaggtgtattgggcctcgggttttagggcttattgggtcatggtttattttagtaattgggctaaggtattggacttttattgtattggtttttttcattttagctttgggttttggaattggactttggccctattaacaatttatttttggttgggtttattaatatatatatttttatttttttt

SEQ ID NO: 243584 - DNA, 470 bp, Gossypium hirsutum
  unsure (1)..(470): unsure at all n locations
taccgagcgaatcccggtgcgacgcacgcgtacgcttggaatccttatgagtaggcctcgtactgtttgccaaaattccccatagcccgcagcaaaatcccatgcactgttcatttgtccctttgctgaatacccagatttggaagacgtggatgctatcttcttcgtcctggctacatctcaaacaacgaacctcttctcgattttagattagagaaagtggatatgtaattccacgttattctccatactgtaattttaatttttaagggcaactgtagtttccataatttcttgtaaagattttttgtatcagtctgtaaataagcattaggctctaatgttgactcctgtgnaaaatatttttattttttttcttttaaaaaaaataatattttatttttattattaatggtttttttaaatataaaaataaaaaatttttttttttttttaattttaatattttt

SEQ ID NO: 243585 - DNA, 302 bp, Gossypium hirsutum
cttcgggtgggggtcatggcaattcaatatccggcttacatttattatgggcacagcaattggatggttactagtaaaaattacaaaagctcctcaacatctaagaggtcttattctgagttgctgtgcagcaggaaacgtgggacacttgcccttaattgtcgttccagcaatctgtagggagaaaggcagtccctttggagctcctgacatttgccatacgtatggaacggcttatgcttcactttccatggcgattggagccatttacttgtggtcagtcgtgtacaacgttgtccgag

SEQ ID NO: 243586 - DNA, 324 bp, Gossypium hirsutum
cccttggccgaccccttggaattgctttgaaggaaataattaaaaccgagtccttgaggaatgagtggtggtattggtcatcgctatctgcagctgcaaaaatttccactgtgtcttctcttgctctacgtgtatactcacttgatgctgctattgtttatgaaaagtcatgcgactttaattcaattgacaatttgaagcccagcagcatgccaggcccaaaactgccctccaacttggatctgccggagaagtgcaaggtgagtcggaggactatcaagaaaagggaggaaccagaaaggctgatctttgtgaaatttcaaa

SEQ ID NO: 243587 - DNA, 329 bp, Gossypium hirsutum
gagaccattcttttgccgcaacagggtccgtgggctcttctcctttgtctcattcacttggaagtgaattgcacagggctgaaaccgtgaccagcgatgttgctcttattaacaattgggaggctttctatatttctaaagacttcatcttgaatcaatcccatataggggggaacacaattgctgatgaaaagtttatgtctgttctggtcaagattatgcctaaacttaagcaactacatggcaaactcttagattgagtttcaatacatttgctcggtaatctctacatttgatatgcactttaagtcccacacattaccatattc

SEQ ID NO: 243588 - DNA, 307 bp, Gossypium hirsutum
gattctcaggaaccagccgcccccttttgtttggggtttctaaataaaagatcggggggtgtgcatgttaagaaatgacctgatatgattaaaaaagacgaaaacgctccgaccccctttgaaaatcgagatacgcttgccatttctatgctacaaacggatcacaatggatcgagctattacatactgtaaatccatatcccttctacctagtacatatctgctattaacagctgccttattgggcaaaacatattgttgaccctatcaggaaacgcgtgggtgtatgtctgctatctagtctctc

SEQ ID NO: 243589 - DNA, 244 bp, Gossypium hirsutum
cccagaccttctagagcgctcgacaatttatgattagatatcgatacgattctattgcattcaggccaacaaagcacaataaagggacgtaatctaaacgattgttaaaactatccgagttaatgcttgctctgagccgttagaggtctggtataatccgacatggtaaatatatataaaacatctgatagacagtgctgtgtgatttaaatgaggtgtgatgaggcctgaattggtgatgaaa

SEQ ID NO: 243590 - DNA, 410 bp, Gossypium hirsutum
agccttcgggaaggggatttaccattgaccgaccgctgacaacggttcaccggcgttgattcgggcgtcgaccacggcatgattcaaagcctggaatcatggcctggaatcacggcattgatagtgggtaactggaacgatgcgagacgaacaaacgcgttgattgaagtgtttgcggcgcctaaagtttgtgaaaccctaggtcttccgtccttggcttacgatttgggccacttgggcttctctgagttgggtcaagggtgtaatgggttagtgggtttaggtataactgggtgtgggcttattgggttgtaaccgggcatagggtcttaggctaaatgggtcttgtatcatcaggcctataggcccatttgtaaactggacatttcaacatcgagatttaattattt

SEQ ID NO: 243591 - DNA, 254 bp, Gossypium hirsutum
gcctttaaccctggcctgcctgctactgctaaatttcaatcccccttctttctgtttcgggcagcaatggcatgtcaaagaaggttgtttcctatttttctgactctgacgctgcttattgcttagctgctaacaagcctttgctgctagttcctcttcagtcggattttttgtcgttttaatggagtcaacaagattggccatgttctttcttttctttctgtacagacatgtggatgaacaagtttagtttc

SEQ ID NO: 243592 - DNA, 244 bp, Gossypium hirsutum
cggacgcgtgggtggaattggtggtgggcatggtggtggagtcggcggaggaattggaaaaggtggtggatttggcggcggtgccggaggtggatatggcaagggtggtggttttggaggtggagtaggtggtggagctggaggtggaaagggcggaggttatggaggtggttggggtggtggaaatggacaccattgatattcaatgctaacgatgcaagcatgcttggttcaacattcaata

SEQ ID NO: 243593 - DNA, 412 bp, Gossypium hirsutum
agccttcggttcagtcccttttttcatggtttttatgccaattcaaagggtttttcttcttcttttgaaatgtttgaaaaaacccaccgtttatttccctttccctctccttgttatttgattatgacattgaaccttgtttttttggcttgagatttccccataaatacctccctttccctttctccccatccatccttattcaccaaatgctatatttctaaccttttagtataagggttcgaagatgaagaagaagatgacggtgatgatgatcatcatcatcatcccaaagcattgcactctccatccatttttttttcattcaaaacataataccatgacatgctaccatgcatatttgttacatcatcatcaacatgacatccatgtatgtatgtgcctggcttcc

SEQ ID NO: 243594 - DNA, 371 bp, Gossypium hirsutum
cccacgcgtccgcggacgcgtgggttttcttttgatgaatatgttagatggagatttaattggtttttagacttgtaatatattagattcaagataatttctttcaaagttgccaattcatgataatattttgttgacataataataaatagggaaatatttgtagtttatgatttatgactgttttttggaccaaaagatgcttaggaatagcttttgttttgttttcaggaaagagttgttgatctcacggcaaagcctactcagtttgcagctcgacctaatctttctccttatgcacccccagtgattcctatggactatgatgatggtattccatacagaggtattagtggggtgacaggagaact

SEQ ID NO: 243595 - DNA, 269 bp, Gossypium hirsutum
gagagtttggcgagcgtggaggccgaaacgtgcggcgatcgggcgttgggcgcggcgtgggtgctgttgcggcgctgaggcagatgcggctagggttttgtttttgtgttttgctgtgttgatctttgggtttgggctgctttgttgggcttgtaaaatgtaggcctgttcattttttgttttggcttattacgtgggcccaggccgattgggccttattacataaccattttaataaaaacaattctatgccgaccaatattaggatt

SEQ ID NO: 243596 - DNA, 255 bp, Gossypium hirsutum
cttcacccgtatagatgtgacccccgagcttgaaactcttcgacaaggtatggagtacggcatcaaggagtatgtcttgaaaactaacatgaaactaaatgatgaatttaagctggcaaagaaagcccttaataacaccgtgggagttataatgcgagcattaatttttgagctttaaatttgcattgccaagcccaatcttatagaggaaattttgtccaggatttgcaccctttacggggacttaccatttgg

SEQ ID NO: 243597 - DNA, 362 bp, Gossypium hirsutum
  unsure (1)..(362): unsure at all n locations
ataagggttttcttgccatcggccagttgaataaaaatttcatgctcaactagtaacggataatacaaactgcccttgcaaagatcaaaaaacaaaagtcaattcatctggtggtgtcagtggagctagtttttggaatttctgacatgtgcagttctaaaaccatgttttagtggacaatctttttgatttacttgttcaggctggctgagcttcattgttactaaaatttgttattaagattttgctgactagtattctaagaacattctttaaggtgattatatatgattagaatattttcactaannaaaaaaaaannttntnnaaaaaaccaacaaaaaaaaaaaaaaaannaaaat

SEQ ID NO: 243598 - DNA, 394 bp, Gossypium hirsutum
gggggacgcacgcggccggagagattcactagcgtggaggccgaaactttttgcgatcgggctttgggcgctgcgtgtagcctgttgctgcgctgaagcaaatgccgctagggttttgtttttgtgatttgctgtgatgatctttgtgtttgggctgctttattgggctcgtaaaatagaggcctgtacattttttgatttggcttattacgtgggcctcaggccgattttgtcttattacataaccattttaataaaaacaatactatgtctgccaatattaggatttttaaaaatttaggaacattttctatccctttaaataaatgaggaatatttttctttttgttgaaaataataaatcacaatttttcctattatattttttcatctt

SEQ ID NO: 243599 - DNA, 313 bp, Gossypium hirsutum
aatggcaaacctgtctaatttggggactaagtcaacccaattttgaactgcacatggatgatcataaatcaatctttggttaaattacacaaggcccttggagagctaaagcaatcagcgcttttcctgcagatttggaggtgactgagtcttagtcctgagttgtggtggcactcaaattgaccaagaatcaatcagattgagccacatttcctcaattcatggtcggtcatccttggaagaagcttcaaaagatggaaactactatttttagcagactagctctcttgcctcacctattaatcagagctca

SEQ ID NO: 243600 - DNA, 141 bp, Gossypium hirsutum
acgcgtccgctagcaaccatgagatcatactgaatcttttctgattgatgcgtcatgccttattggggggggcacactttatatcataaaggaagtatggatcccttctctcaagtacatcattacgagtatagtactagg

SEQ ID NO: 243601 - DNA, 348 bp, Gossypium hirsutum
aacgagctgattctgggattcttcttatcaggtaaaaactctcttttttttagtgcctcctatgtaataacatgagcatcgacattctttggtttagggacaaaatgaaactcgatctcctggaatctgtcttttctgctttgtatatcccttacgatggctccaatgaccgatttatctgtaccagtattttggcatttcttgatgacagcttttgagtctcccactatttcgattgtatataatcccataaaaatccctaagttgactgcttgtaacctcgcatatgcttctgccatgaacgaaattgatattctcgagtgtatgactgcctgtgatgcaaggatc

SEQ ID NO: 243602 - DNA, 389 bp, Gossypium hirsutum
acggtaaatcgctcattggagcgtatgtctagctttagtaaattgagaatacatgcaatgaatactgcagtgaatggttctgctagtgctaggaggagaagcaggaataggggattctttttcatttctattttaggtgcattgtgtgctgtcttatggttcttgataggaacagttagggtcctagggagatctatctcctcctgaatatatatatgtataagttggaagtgaagtgaagtgaaattattgcatggacaacatatatgcatagttttaatatctaactaattttgaatgtaaaggaagaaagtgatagctgaagtaaggaaatgaatgttgaaccccttttttcgtttggagaagacctttttcttaacttaatattt

SEQ ID NO: 243603 - DNA, 425 bp, Gossypium hirsutum
cccacgcgttcgaccacgcgtgcgcccacgcgttcgtgccgtcataaaggaagttcgtgctgcagaagcctagttttctagtcgaaatcaggaattgattgtgtggtttgctggaggccacgtgttgttctcagatatggaatgcttttaaatcagttgcttgggaggagcagcagatgcaatgccggtcggttttaactttcttattgtagccttgttaagaacttaaattggtattcagctttatcttttgggaaaattttcccttttgaggacattgttttcactatgctagagttgcatgctatattttaagatctgttatagttaggagatagtaactacctatctgtttaattaagatagaagctcattatgatttactaattacaaaaatgatgatcacgggtttttgttttggatgt

SEQ ID NO: 243604 - DNA, 369 bp, Gossypium hirsutum
  unsure (1)..(369): unsure at all n locations
ggaaacaatgtcatcagaggctaaatccaaaatacagagcgagataaaagggctgttggagatggtaaacacaatggttgaatcatcatcatcttaggcaaaaaagtagtcacttttaggatgtatggatatgtagaagtgtatgttacgtcattgctgttacatacattgggttaggattttgtaagaaatacttaggtaagtagttcatagttaccatttgcatatgttgaaatcagcacatgctatatatatatatatggcataagctgcagtagttgaattctgttttcattggatacaaattctgttactattgagcatactggaatcagatttttcttttaaaanaaaaannnnntttttttt

SEQ ID NO: 243605 - DNA, 386 bp, Gossypium hirsutum
  unsure (1)..(386): unsure at all n locations
cacagttgtgcactctttggagatgagcagacagggattccggagaccgatgaggtgatcaggacatctttttcaagtctgaagaggttagttttggaagctgtcgcctttggttctttcctttgggacattgaagaatatgttgacacggtctataagctgaaggacaactgattcggggaagaagtcacagcagtttgagcataatgcttttgtatagaggagttgatgtttttggcattttctacttcattgctctggtttgatagcactgggcaatacgcattgtatagttataagtngatacgatgaaataatgtacagtagaagactntgttcatcaatgggatcaattcccttgactggtatattgttgatagtcctag

SEQ ID NO: 243606 - DNA, 308 bp, Gossypium hirsutum
cccacgcgtccgctttttcaaagaattctctcagcttgataccaagatcaccggtgacacttagatcctcttatccttgatgggaaggtacacaataaaccaaaaataacacttccacatggctgctttcgtaagttatttctcaaaaatggacttgttttagttggtgcatatttctggatctacaatttgtatggtggctcggtaaaaagtgtaatggcttcagcttctggtacttgacaattataagcttgcagatggattgaatttgactaattttaaatgttctgccacaataactatgttct

SEQ ID NO: 243607 - DNA, 325 bp, Gossypium hirsutum
acgcaaaaaagctgtagaaccaatgaacttttttgaagctctagagaatgattagcctagcgggtgcttgcttgttgctaagtataaaaaagacggatttgctaccctctagagtcatacacattagcagcatggtaatactattgataatgcctacattccaaaggcaaacagcattgacaataacacacaagtgtcagacgtgttatcaaaaccaactattgtaattcctaatgaaaccctggtttttcgtctcaatgcacctattcacgatatttattgaaaaagaactcatctccgtttgaaatagatatgcccattccca

SEQ ID NO: 243608 - DNA, 230 bp, Gossypium hirsutum
atttcccacagtctataactcactctttttttcccttcatccaatgtcatatcctagggggatcttaataaataggcggtctcactaaaaattgttaacaatctgcttttccaagcccattcttaatcatatcatttctatgcgtattaaatctttaacaaaatcgtcctttccaagcccaatgtagatgtccatctataaatttaaatgttctctttttcttaacttca

SEQ ID NO: 243609 - DNA, 340 bp, Gossypium hirsutum
ccacgcgttcgcttattctacaatataaataacatatatttacatttcctttcccttttaacatgcactgatggggattatatacatgcttatcataccaaaatggcctaccttttttattatgatcacctgattgattgattacatccatgtttctacccctatgccacatgttgcttcatttgcaaaacctctatactcttctgctatatccaacattggatcacagttatttaatgctctacaattcttatcctaaactgttttcagaggtttaaatttataactgaagctccttattagcaattgctaatttttttaaaatatatacaccttttac

SEQ ID NO: 243610 - DNA, 324 bp, Gossypium hirsutum
gaaattaagccatcaaatgtgagggtcatactaacatgtttaaggagcttatatatgtcatagaaggttcttgaatcagcctaacatgctaagtcgaaacaagttttttattacatcatcgtagaattcttgaaaaatacatttacctatgagtggtgtctgcccgcaagttattaattaacatttattctcccaatagaaaccgattattctgaaaatgcttattcaccttggtcgatggaatctaacttgatttattagtaacgggttgagttgatttttttagctagcttattttagtcccgatgcactttctttttgtaa

SEQ ID NO: 243611 - DNA, 405 bp, Gossypium hirsutum
cccacgcgttcgaaaaaaaaaaaaaccaaaacctaaaaaagaaatcctctcttaagaacgcccaatccccgatgaagcaaatccggtcaactccgccatggctctgccttatatggtggccagagacctataaacccacctttctcaccgatttttggagcccatcatctataaagcatagattcaagggcaaaactccgagaacatggccaaaatcggtggagcaaccaagaaatgcatatttattctcctttttcgatttgacccgaatggagaacggccatcaacaaggtgtcagaggcatgtggaggcaagccgagcggcggtggcaaagccaacggtggcgtgcggcgctggttaagctgaaggaagctagggtttgttggctgaaaagttttacgatta

SEQ ID NO: 243612 - DNA, 414 bp, Gossypium hirsutum
caagaattggaagaagagctttcaataacgtgacaggaagctgagctccagcaagctgcgatactcgaacgttgaagtgaagatcaaacaggaggatttggccgttgctgctggaaaacttgctgagtgtcaaaaaacaatatcatctttagggcagcaactgaaatctcttgcgacacttgaagactttttaatcaacaccacgagcatgccggagttttctagaggagtgtcgttgattacgaaatctaatgaaccttggaagttacattctaatgaaacatattcacccaaagcagatccagagtcaaaaagagttggtgctgaccattctagccctcaaggaaataagaatgatggaaatggcaacacaccaccattttcatgctcgacttcaattgtgtcaacaactca

SEQ ID NO: 243613 - DNA, 396 bp, Gossypium hirsutum
gttaatgcagattcacatgaagcacttacaaaagcatctatccaggagaaagctaattgcttctctgaacatctccgtagtgatcagaacattgcagtgagcaaaatccaggatggactccaaaatttttcgtatgtggtcctttcgaactcaatgccagctgcttgaaaacctgaattctctgcatgtcttgttagtgcgaatgtaaatagttgcatcttagatgggttttaacccccagtattactaaactttttatgctctacaccattgaaactgaactcattttttaagcagggggtaaagcagtttcttttgtgtagatttcattgttaaacttgaatgttaatctggaatgttaaacaaaccatttccacgttaaggatgaaatgaaat

SEQ ID NO: 243614 - DNA, 302 bp, Gossypium hirsutum
gccgaaaataataccgacttcactttcaatgaatgaactgtttacaagcaatggagggggcaattcttcaagtgaggtcggtctgatgcctgttattggaaaagctatgacttcaataccaatcagtcatgcagcaccaataagctacataatgcagagaaagccacgtgttgatgaagaacctttcactgttgttaccttgctgaactcactcagatcggggaaatatgccattcattttacagctgaagacttggatataactgcattaaggccaatggcaaactgatacctcaaacagc

SEQ ID NO: 243615 - DNA, 219 bp, Gossypium hirsutum
acgtcttgattatttttttaccacccccactttacaaaaggtcattaatacacattaaaagatgttttccaaatcatctaggtcttatttcctatccccaaacggtgctagaaatatgaattccttctatcctcatcaagaatgaaattgtgcaatgtatatcatgcattgtaacggtgcacaacatttggcgccttcaattaaattaaacttattctt

SEQ ID NO: 243616 - DNA, 324 bp, Gossypium hirsutum
aagtagacctcaacttggggatagtataagtgacgtgaatgctgggattcgagataggctaaattctgcttagtccatgtattttatgaaagttgtggttttagtccctaaaaaaaaaaaaaaaaaaaaaaaaaaaaaaaaaaaaaaaaaaaaaaaaaaaaaaaaaaaaaaaaaaaaaaaaaaaaaaaacaacattaaaaaaaaaaaataaaaacaaaagaacaaccatttaaaactacaaaaaacagaaaaaatcaaaactaaaaaaaataatataaaaaattgaggtggcgcctctttataaaataataccttttggaaaca

SEQ ID NO: 243617 - DNA, 395 bp, Gossypium hirsutum
gcatcatatgaagaagtgataagaggaatgtgcttggacttctcatctcccattgcagaagaagaggaaatcaatggaggaggggatagtgatgatgctgataatagagttactcaaacacctcgaactgatatctttggcatatccacgtcccttgatcactactttgatgaagaacagcattaggtcactcgcaaaccaaattaagaaataattttgttaattactgcgtcaagtttgaagtaggttttaagattgtatactttgcttccacttccatcaatcttggtggaagttatcagtgtttccttctcaattggagatggttatcattgtcctatgaatctcaaataatatacaactcttggttatgcaaaaaaaaaaaacaaaagggc

SEQ ID NO: 243618 - DNA, 319 bp, Gossypium hirsutum
gctttattttcagaagcgataagatgactttactggtcacttgcatacccaatgggcggaggcgggcaaacaaatcatcgatgggaatggactgctgcacataaaaacaatgctcacacacgtccaacagaactccaggggatctgacactaacttgataagtacagtcatcaacaacagcgttgctgactgaatcaacgagaactcacactcctgatcgtcagtgctgactcaagttttcaggtaactgtcagaggcgttactgcctttgcactgcgcttactcatgcttgcagggatcaggcctgccttcaatactg

SEQ ID NO: 243619 - DNA, 211 bp, Gossypium hirsutum
gggatcaaatgtacaatacattcattctataaaacagcaaaaatatgatacaagaatatctgctttaataacaaaaatgtaagaaaaacgaacttgggattgagctccgtacgtgcaataagcttggattcgaattccagcctccttatgtaactaagccttttcctccccagaaggaaacctgactattctttatcttgtgctattaccc

SEQ ID NO: 243620 - DNA, 321 bp, Gossypium hirsutum
cgcgttctttgttcatcatgtttgagatctctatcagaatcaaagctaagtattttggggtctaaaccttgtaactccgaaacataactattaatgtgattggaaatatctgagcttgttgtgtttctattttcataaaggagcttgtttctacttgtctagatgatccataatccacagcataaaagacgacactgttcgcttgtcccccgttgaaagcccatgacattgccgaaaaatctaaatactgtcttcttcatttcaatgacacctggggcattgagtctcaacagcaactcgctttatcttaatattaacaaa

SEQ ID NO: 243621 - DNA, 165 bp, Gossypium hirsutum
ctctgaactaatatatcttcccaattattttttaaactataaaagcgcattattggtgggacttttattgagtgcggggcatctatcttaaaaaacccattacaaaaacttcaaaccccagacttagattgtttaaatccaaaattctgtattccttacttttta

SEQ ID NO: 243622 - DNA, 387 bp, Gossypium hirsutum
acgattatagaaaggagagcgggcgcacggcatttacgagatgatatcctccattatagtaaggaaccagctgaatacttgcttagtgacctgccaagctcttatggcgaaggtgcaaccagtagctcaatggggtatgatagcattaataacaaaatcatatttgaacttgaaggtgcacactgattatataatcagacttttgcaggagaataattgtgttaagtttcagcagcagatgaagtgtaatctgtatgcgtggtttagatttcagtgttcattgttgttgtgttgctaagctaaacaattcttccataatatataatatcatttattgttaataaaaaacaaaaacttccagcgtacatgttaaaaaaattttttatt

SEQ ID NO: 243623 - DNA, 218 bp, Gossypium hirsutum
acgatactccaatgaattcgagctcactttttttacactacataaactccctatgaacgtcgccatttaagattcggagagaattaccaacctaacaatattggatatcatactgcataactcaaccatcacccctgatcagcttattaacatattttataaaaactactacatgctcctgcacatattcaatacacagggcttgctggagataacat

SEQ ID NO: 243624 - DNA, 345 bp, Gossypium hirsutum
cccacgcgttcgaaaaaaaaccctaaacaatatcttataccatgcttactccttgcttgtcgccttgaataaagaaaagaggctaataccgaggcttctatcagccgctggaaaccatcatagcaaggccctacaacggggtgagtatgattcgcagtaagacccacatactgtctctgatccgatacaggagacgagggtcctactgtgcatcatgatgaagaggaggaacagggcgaaattctaggcaataatctccttagaaataagcttggaagaattctatggagctttgtatggatttcgggcacagtttctgtcacaaaaaatataaaagggcggacg

SEQ ID NO: 243625 - DNA, 216 bp, Gossypium hirsutum
  unsure (1)..(216): unsure at all n locations
caaggagccagaacncccgggtgcgacccacacgtaaccttacacgttgtcgaacgcccgcccttttattctacagtagctacatatatagagctgggggatgatggactatacaaaggaagctggttcactgacaattggtctgataaagaacacatgccaaatattccatgttcctttaggaatgctaaggaaataatgaaactccatgctcat

SEQ ID NO: 243626 - DNA, 267 bp, Gossypium hirsutum
ctcacaccttccattacagcctgcatgacactctgaatggcactcctcatggcaatggtggtgccctctaagttgaccactcattatattacccccaatttcctcaccctgtctctttcacagccttttttggacattttttcgtccaacacaacgtcacactggacggctctatgctcccatctctctatccaagccaggcttccaaccaaacgtacgtggtaaggaggactgttgtaactactgatatgactgaaaatagtggaa

SEQ ID NO: 243627 - DNA, 233 bp, Gossypium hirsutum
tctgttattgtcaaatcagtggacttgtcgtttacaggagtttacaagctcctgaggtgtatggacattatgaatggacactatgcttatgtcaacagagagttgacaggcctatggtgtccatctttataaaatacgaggtacacatagctcgagttcatcttcctagcaagaactaactgttgaatattcacggcttaccgagcattacgttaacttattccacaatgggc

SEQ ID NO: 243628 - DNA, 382 bp, Gossypium hirsutum
ctgacattctctaaaaaagccgtgctattttttactttccacaggataccaaaaagcgggggcatttggacaacgtaaaaacattcttttacaattttagcacagtattaaatactatatgtgtacccccatactcttaccaatgaattcatttccactgtactttacctttcttagtacacgcttgataaaattgctgcttaactgccaaataaggttacgaagaaacgaaaagaatgcaaatttctatggcagagcgtacaacaagtctgaacgataatagaagtacattatgacaaaccatccgttacattaggactaaaaattgattcattgtcactgaaaccttgcgaagaaaacatttgattaaactctgcttcac

SEQ ID NO: 243629 - DNA, 129 bp, Gossypium hirsutum
acgctcacaccctctgatatactagcgaccttctttttttttctatatactagctacctttttcagggaggcactatatataaatggggtcattattaacaccacactttgcatttcactcatataact

SEQ ID NO: 243630 - DNA, 288 bp, Gossypium hirsutum
ctgatggccagtcttgatttctctccatctcgaggtttggttatgccctgtacctgtggggtttagggaaaaaaaaaattctcggttcttctgttttcttcaagaggattccatgaacgtttgatgaacttaatacacttgtgtgaaatgtcttgttctaaatttacgggtcagctttgtcctttctctcttgtccctcttgtccttctgtcctttctctctttccctattaatgaatgagctagttaaatgcattccacacacacttgaattgttatgacttgatcc

SEQ ID NO: 243631 - DNA, 273 bp, Gossypium hirsutum
cacgcctccttcaagcgagagcgtcctattttttttttcttcctttcccgcgacgccgggggaatcaccaaccggccggtgcgccaaatgctagggttccgcggagcgcgggagccggctcgactttcgtagcctcgccgccggcgcgcgggaaccggatgctgctaagctgcgggtcgctctcctcctgggtgcgccgcttcgtcgcctgcattggtggttgttttggatgtgcccaacctactccgataatagctgtcgatgaacccacaa

SEQ ID NO: 243632 - DNA, 286 bp, Gossypium hirsutum
cccacgcgtccgcccttttactaggcaatttaggtaccttccaatgtcaaatatcagtagaacgaatccggcggttggcgttgtaacattagactcagtccaacacggtccaaacccgaacttcagagtttacgtggcaggcgggatgtccgaagcaccacgagggggtgccatgtacgaactcaagctggaaatgtacgactcgacggacgacacgtggcacgtcgtggggttcgtgccaacggaatttgctgtgagactaactgtgtggacaccaaatgagagt

SEQ ID NO: 243633 - DNA, 383 bp, Gossypium hirsutum
cgggattctattttggcgtgcctacttttttatccgcatgctcgtgcaactgatggggagctcttgctgcgtccatgtgttaagaggcttttattcacacactcaggctcaccatctactcatcttggtcgtcggatatgaatgtacagccacgaaactaaatggctacatgtaatccgatacccatcttctgctgaacataaatacgtagccaacatgctccttcggtcatgtcacagaagaaacattgtcctggaaccttcattatcacaccatgtgtgctatccatatcctatgatacctgcatattattcggttacaacggtccatttttggtatcagttgagcttcattcagcgcttctatcttgtgtttctttgcag

SEQ ID NO: 243634 - DNA, 153 bp, Gossypium hirsutum
aacctcaaatcctctttttcttcctaccttttttttttttttatcaataacaactaagggtgaaattatttacggcaatccaatacatacaaacctttaaatccaaatctttctacgcccacacattaaactttacacatctgatacaactac

SEQ ID NO: 243635 - DNA, 207 bp, Gossypium hirsutum
acgctcacacgttctagagcaaccgcactattttttttattgctatgacccctacaggcgggaggattcaatcaacgacactatatgcaacataaaaggacaggttattgagggaccattccgccattcatacccaatttccatcatcctcacactctgatatggatcaggagcataatcggaatgagacccattaagtgacaacat

SEQ ID NO: 243636 - DNA, 290 bp, Gossypium hirsutum
gttgcaacctctgctaaatgcttccacattttagtgggaaggaaaaaagatggttaaggggtttctgccgacatgatattcctggagttttcttaggactcatttcttgatgtcgattcttgaagaacctctatggtctgcttggagctttctgtatttgttgggtttgtagatatagttagcagtagcgcgggtgcgccgatttatcaataacagctggtaatgactgtcttccttcttaagagaacagcacactggttgatgctttatggatgtaatattacacttga

SEQ ID NO: 243637 - DNA, 318 bp, Gossypium hirsutum
acgtgttttctcagagtcgaacctcctctaatcttactccctccctccttaccgctctgtgggctgtcgcttccatggctgtcttgtttaaaatgcctgtcgttacgggtttatacgtgggtcttatgatgctggctttggctagctcaactgagtatcatgagctatttcaacctggctgggccaacaatcattttatctatgaacgaaagctcctttagctcaaacttgataactcttctggtgctgggtctgcatcaaaaagcacgtgttttgttgccaaagtatccatgcacattaaacttgtacaaggtgact

SEQ ID NO: 243638 - DNA, 332 bp, Gossypium hirsutum
acgatagaataatggaggtgggtcactgatagtggtccacagctgggtcagaaaagagaagaggggtaattgtagaagtcagtcgctttgcaagagagaaagggtacttgagtaacgaacaaggaactcttatgatcttcaaaacgcataatcacatatagctgtcggctcatggcattatgttttaatatctttgaagtgtccaccttgaaggctattaagtctatttacaaagatgttttcttgatcataaatctaccttaataacttattatgaaaaaaaaaaatattttaaagatatattactgtatacttaattaaagtaaaataca

SEQ ID NO: 243639 - DNA, 294 bp, Gossypium hirsutum
cccacacgttctagatcatgcactattttttttttgtagtgccaaaatagccatgggggggatcctaagaggcgcctctgctccttatttaactgcagaagtaccctaatgagccaatcccgaaacttagctcttgagttgatggtcacccatgaaagggttaacatctgccaagctgctaaacttgttagacattgtttaaatatgtgcgagcagtagttatgcctcaaactaccgcgtgggcagagagcatatatgaacactcttctgcttcttttgattacatgtgagggc

SEQ ID NO: 243640 - DNA, 325 bp, Gossypium hirsutum
aaccttaagctcactccggaccattattgtgaaatgggagaaggtattaccacagggtgtgagtggatttatggctctggatgtctcccaccaagaggtccttatggatctgggatgttatgggggtatatcataccgattgactatggtatcttgaaattggttcagaactgtatttccattattcgattggtctaccattatatacatgggatatcgtgtttgtctgggcacaacaattattgaagttttttgtttaccatcagctgagactactcttagtttgctctggtttatgcatgcttgggctgggctcattcaatcc

SEQ ID NO: 243641 - DNA, 401 bp, Gossypium hirsutum
aaaacctataaaacgaccactctttttttaaaatcgtacacaataaatcaaacgcgtgggcaaaaacaataaataaacacataaaacaaacacaaaaaaaaaaaaaaccccctccctttctcccaaccttttccccacccgtttacccaacctttcccccaacctgtttgttttaaaatcgaaagcgccctttttaaagaatcaaactttattcccccgcctttgcaacccaattttttttttttggggccccaaaatttaaattaatggccccccttttaaaaactttttaatggaaaaaacctttcgttaccaaatttaatattttttaaaaaaaatttctttttccccaattggtataaaacaaaaaagcccccccctattctcttttcccaaatttt

SEQ ID NO: 243642 - DNA, 431 bp, Gossypium hirsutum
acggttctatctctccctgtgttctccctcaatctcagcccttaagtacaagactccaccggcgcctccatggccagtggccggagttgcgcgaaacgggcttctcagccctcctttcacggcgtgcctgaaggctaagccttctaatacgcgggaccgagagaaaaaaggaagagactcccctccccgctcgactctggtgatggcgaaagtgggttccggccggccctctaaacaaataggtatattggtttaccttcttcgattcgtttttgataaaaagagttgttaaacaaacgagccttaaattgactacaacgaaaatcaagaaaagacaaagacgctagaacagaaaaagaaccggaaacaacctttttataatatttgatctgataattcatattcactggtgtggtaaaaacaactctgaa

SEQ ID NO: 243643 - DNA, 412 bp, Gossypium hirsutum
acgaccgcttctttatctttaaccatccttatgcttttcacagcggtaaatactaacaaaggggggatcaaatacggggaatctagattcaccgtgctgtaccgggggatccctttgggtaaagcttaggtttctgggttttatcaagaagctcatagtactcgtaacgtggaagcaaccatcgccgctgatcgagctaacttaatgcaagctgacgccggcgatttaatcagagacgcctgcatttatgaccgtgttcagctccgagttctcagcgacgacggcgcctagatccgtgtattagacttcgattcttctgtcgtacacgtatcagtggattgtgcaatagtgattagtccaaggcagcactcacttacatacaagcaatgtggatatgcaggattgaatggtt

SEQ ID NO: 243644 - DNA, 195 bp, Gossypium hirsutum
cccacgcgtccgcggctttgattcttttattagcataaatagcgactgataatggagtggttgtggcagtgtctttattgtttcttttttcttttctgcaactttataccagagatcgctttgtcttttatttgaactggtggtttttagttgtagaagcttcaatcatccttgctcatggacaggtatggactc

SEQ ID NO: 243645 - DNA, 226 bp, Gossypium hirsutum
  unsure (1)..(226): unsure at all n locations
acgcccacgcgtccgagagaaggcaacaataataatangactncaactgctttccgagcttgaagnctctgattattcaatacaaagcagttgaagtcaaattatgattattacattcacttatgccacactatatgaggtatgactccccatactccatgcttttgcgggcaggaaaatcacttccacttactgaatacgccgcctccatgctttccgtgcttga

SEQ ID NO: 243646 - DNA, 347 bp, Gossypium hirsutum
accgacgcgtacgcccacgcgtccgcccacgcgtccggccaagattaagatcagcatggagtaccctctcaggcctcctttgtttactgtgaatctttactctcctggagaaagttcttccaagaatgactattccgggtggcagaatgaagttcgtgctatggaagctgaggtaaatcttcatatgttaaagatggtacccccagatgatgaaaactatacattatcacatcaagtctactgtcttgctatgttgtttgactattacatggatgaggcaactccatcttccgagaagaggaagagtagttctgagattgatgttggattgtgtaaacctgttagtg

SEQ ID NO: 243647 - DNA, 140 bp, Gossypium hirsutum
gagatggctgatactggtcgaagattgagatttacgtcgtggcgtttgattggacctacctggcatattgaaaggaacgacagcttggacacagagtatttcggaataagtccgacctgattttttaggaatgtttagac

SEQ ID NO: 243648 - DNA, 219 bp, Gossypium hirsutum
cggctcgacccattcgtacacggacccgtgggtgtggatggcccatagtgggaatcaaaagagatgactttgatttgggggtaactgctgtagcgcccagcacagtcacggaataaatgattcatcgtatgagctcctaaaacacatcggggacaccttgtgatgactgctaatgtccggtgttgcagatctaccattgaaagcaaatagtgccatgat

SEQ ID NO: 243649 - DNA, 249 bp, Gossypium hirsutum
cccacgcgttcgaccacgcgtgcgcccacgcgttcggctgttgttgctgccacagagtagtcctttgctttctccttctaaaactaaggatccatggaattataggagctgcaaatgcatagcatatggatcagtctgcatatgaaagtacttgttgagtgggaaacgaaaagaagaaaaagaactgattggttatgagaaatggtagacactcactgatatgtagctttatgttaaaactagcttaaa

SEQ ID NO: 243650 - DNA, 244 bp, Gossypium hirsutum
cccacacgtccgacggcgcgagggcgattggatgaccatcgacccatcaccacaacgcatgaactagaagctgacgccgagcaccattcggacgagcaaaggggtcgcaatggtagcactgctgctgaccaacctgacatattctgtgatgaaaataaatactgtgagcggtagcagaaaaacccaatgcaggataccaaataacacgacgagacgaaagcaagaagaccatattcgggcggac

SEQ ID NO: 243651 - DNA, 249 bp, Gossypium hirsutum
  unsure (1)..(249): unsure at all n locations
aacacagggtcagtgcaattcctcccatgaaatgcaaaantcttagcgatcctatctctgattttgatacactatatgaaaaatatatgatttgcgtgacattatgattttctttgattggcgttactaggctgaaagcgaatactgctcgtatacacagatagatgagtacttcggcggatgaagttcgtggtgaaaaagtcaaaaggatgtcggatcagagattgacaaaaatatgttgtgatattt

SEQ ID NO: 243652 - DNA, 140 bp, Gossypium hirsutum
  unsure (1)..(140): unsure at all n locations
cccacgcgcccgacagcgggcaccggatgatgggaataacaaagcagaaccnnggaaaaaagcacgaaagccaggagcnngcagaaaagggannccgacccgaagagcgcataaccgcagggacaagcacacaccaaccc

SEQ ID NO: 243653 - DNA, 223 bp, Gossypium hirsutum
  unsure (1)..(223): unsure at all n locations
anngaagccacgggacgggncagcaacgggggagcanccaaaganccacngcaaaacaacggacgggcaaaacacggatgacgcaaagcaaagcacngccganangaccggacaggggcaaanaacgcancaacaaaggcaaaccaagaancaaacaagggcggannccagnaacaccaagancgacgacangggaaacgcgggaaacgaaaaggagcaaagc

SEQ ID NO: 243654 - DNA, 287 bp, Gossypium hirsutum
gacccacgcgtacgcccacgcgtccgaccacgcgtgcgaaaaaaactaaaagctttccccttttctctcctttctcccttcttctccggccaatatggtcatcgtccaaccaccatggcttgtggcctccaacgttggtggccgccgtatatggcggtcggacgaatacgaaaagaggtctgtttgaccgattggtctccccaaccctgatgtaaaaccaaaaatcctagaaaaagccttttaaaagtgaaataaaacaaccaaaccctgggttcccttctccgatc

SEQ ID NO: 243655 - DNA, 127 bp, Gossypium hirsutum
ccgaccacctcgattatatgtagtgatgatgttgttgtataactccaatcctttggctccgtaagatagctcactactgttttgaacatcgggtttctgggtaaacacgatggatttaattgatacc

SEQ ID NO: 243656 - DNA, 341 bp, Gossypium hirsutum
cccacgcgtccgaaggaatttggttaataatatgcaccgtcgttatctatatattgtttagatttatgagtggatagaaaattgttgtgaagagcaagcttagcttcatgctttcctttgtttccacacctcaattccaaatgaaatgaatgaatatatcatgacagaggcattgatggctgatgatgaactggagaccgacaaacgggctgagctttaagaatgtgaatggcaggctgtgatttgcgcacctctatccattatatagtcaatatttgttactccctaaaatctgtttggaaaccttatttatagagtatctcgacattaacgggtgacga

SEQ ID NO: 243657 - DNA, 124 bp, Gossypium hirsutum
  unsure (1)..(124): unsure at all n locations
cgacgctaccaacaacgaggagggccaagccannnnngcaaaaagagccagcagggcacgagggccgaacccnggacgncgccaaacaaaaaccacaagggcggaaggacacagccgagggagg

SEQ ID NO: 243658 - DNA, 330 bp, Gossypium hirsutum
  unsure (1)..(330): unsure at all n locations
ccggcgcgacccacgcgtacgcccacgcgttcggcagttcaagtagagcacacaaatggaacattagatatggattaagcatatatatctaggattagagaaacaaaggtatagaaaatttaacattaaagttctcaatatacaagtgcaacttccagagcggaatagctgtattgtaatgcataagtgcataaaagaaagggaggcttgcagtagatgaagaatataatccccccaacccaaccacccccaagaaaagaaaaaatatgaagcaattatggganattannctctggggnnaaaagaannnggangaaaaaaaaaatacaa

SEQ ID NO: 243659 - DNA, 201 bp, Gossypium hirsutum
cggacgcgcgggttgacggatgctttgtaaagcaccaaaaggactggtagaaccacagtcgggggcttaaatgactgtatcgaaagagtacttacagaataacttcttgatgaatgtttgtttcggagggacccaaaaaccggacaaaaaaattttggggggctcaccgcctataattcccaaaacaaaaagttgatgctg

SEQ ID NO: 243660 - DNA, 404 bp, Gossypium hirsutum
ctttttcacatacctcaatttacgtgataagaagctacaaccacaaccggggctgcaagtttcatccgctttgcccaagtccaagttgagtgagggaaatggggagatccgcgatcggttcggtactgaaactgtctaacaaaaaaaggaatctatgaggatactggagatgctaaaactagattaaccaaacccttttgcataggaagctaatcatttcagtgttgatagcgagtaatgggttttaattatgccttttaacagatacaagggctttgatatgccaatatgttggctgaatattgagtttgatgggagatatgattattagcctctcttcacccaagcttttgactttgaagcaatgagtatgtatgatttaagtttattagatgaatgttggg

SEQ ID NO: 243661 - DNA, 174 bp, Gossypium hirsutum
  unsure (1)..(174): unsure at all n locations
cnnagaaaagcagcagaggccaggaacccacagacagnngagggggacaanaacccgggcccaaagacaaacanacanggaaaggcagancgagccaacagcnacgacagcagacaaggaagaaaccgggccaggggaacgcacnacnnagaaggacgcccgggaaggaaagaa

SEQ ID NO: 243662 - DNA, 185 bp, Gossypium hirsutum
  unsure (1)..(185): unsure at all n locations
ccggaccggaacgcccggggcgacccacgccgacgcccacgcgcccgggaccgaccggccccnngcgnaccnncccaggaggcaaagnggaaagacacgatggccgcggcccngaccgcaaanaacagaccaagaacgaaganggagacacncnggccgcccnnagacgcaagaaccaagacaag

SEQ ID NO: 243663 - DNA, 352 bp, Gossypium hirsutum
cggcgcgacccacgcgtacgatttttgggtaactaattggccttttgatcttattttattttatagcaaaatatcccagatggaaaggttgtacgttctcaagatggagctaggtctgtaacttcacagaagccaatggtcaggtcgagtttgaagtcaatgacataatgtgttgtagatgatgcatgtggagagttgttaccaaaggagtaaggccggtgcctcagtaagtgttcctttaattgcttgcataaattgcctgttttgctctgaagttttagattggacgaaccatgaagctaagaatgctggtgctttgaatggctgctatctcaattttaaacactcgtac

SEQ ID NO: 243664 - DNA, 171 bp, Gossypium hirsutum
aacgggaggatgtaacctagatagtggactgatgtcagttctatttgttgcattatctctgccggtgaagctgtctgtacaacctttttatttgtattggaattgaatcaaacatctatgtttatgcaaccgaagcagatggcagcattatgctgttgtcgagacttgacg

SEQ ID NO: 243665 - DNA, 247 bp, Gossypium hirsutum
ggcatgtataatataactactaggatccaagttagacttctgtaatagatgataggcgcttctgactgaaaaatccccggatagttcccttcgccatactcgaaaatcttcatgcgccggctctgccaatgggaatctgcatgatttgatttgctacggccaaacaaaaggtattcatcacaacctctactgtccagcttctagtcgtagcatctactaaatcagaaactaactcaatgttatcatt

SEQ ID NO: 243666 - DNA, 313 bp, Gossypium hirsutum
  unsure (1)..(313): unsure at all n locations
aagaaagggcgatngcagaacgcgcagagatggtgaaacaatcaaaggagtactgggaatctcaaaccaaatatgtggtgggctattaactaacatttttatttttaaaaatgaagccaatgatgaatatgcttagctttccattaagctatggaaaacagagttaggcttagcttagctttagacgtattttgagtttttcaataattttattggaattattaattttttgtatgaacaagattaattattgaatgaagattgtggttaagggtaagccagcttgtggtgtatgaccaaatgtttcgactcg

SEQ ID NO: 243667 - DNA, 198 bp, Gossypium hirsutum
  unsure (1)..(198): unsure at all n locations
ggcgcgacccacgcgaacggncgaagncgcggcagagcccgcccaggactcccnaccgnaaagaagaacaaggagaggcgcangaaaanggccggngcagnccgcaccggcgggaaggggagcaagagaagaaagaagaaggcgggccacaagacaacgaccacagacgacaaacggggacaaagcacccncaagaga

SEQ ID NO: 243668 - DNA, 309 bp, Gossypium hirsutum
  unsure (1)..(309): unsure at all n locations
cacggaccggaacgcacggggcgacccacgcgtacgctnagaccaggtacagaggcagccgctggagcagacattacggcgnagagggcagcagccgcgggccaagaaccagcaangcagaaagggagagagacngccaggagccaacacagggaccagaaggcaggaaaaganaaacnataaacccggcaaaacacaacacgcacagacatagatttcaaagcgacggagtataacaacggttctgagatcttgaactacagaacttgcaagaattacctatcttgcctgcgactttgaaaattttat

SEQ ID NO: 243669 - DNA, 373 bp, Gossypium hirsutum
  unsure (1)..(373): unsure at all n locations
acgcncacgcgtncgacaacgcgtgcgcccacgcgttcgcccacgcgtacgaaggcctttaagtatattgtgcaaaaggcttcatagatggccatgattggatgcgcattggatcttttctttatagagattgggcacccatcatatatgtatacaaagttttgtacatagtcgtggatttcatcgaacgaaaaaacttagacatatggcattatctatttcagtagatcatattgatgtaatgtaattaggcacagaacacctgggaacagacatgtgtgattggcggattatcatacgggccacattcccactgtaatcttggatcgttttgatgccgtgagaatgcatttttaaaccgcatttattaact

SEQ ID NO: 243670 - DNA, 326 bp, Gossypium hirsutum
  unsure (1)..(326): unsure at all n locations
atctcgcgaaagctagatttatttttaaaatgcattatgtgaaaagagaaataaataaataataataatgtgatagaaatacggataaccaaatgtgttggtgaataatattccatctattttcaatatgccttattttgtgttttgagtttatatgttaggatttgtgaaacagatgcaatctacactcttacttactagtctcattttttgtcaagttcttttctagctcttcgnggagggaaccttcgatgatattagttgaatgtgagaatgtcagttttatgtagtggataatgaatcagcttgaaagatgaaaaatacta

SEQ ID NO: 243671 - DNA, 353 bp, Gossypium hirsutum
  unsure (1)..(353): unsure at all n locations
gaccaagccgtccgccaacccgtccgaaagtcttgaattgagaaccttttagcaagtgaggagacaatattatctatgagagatggtacagtgcttgtgataatgattctgtcaacgcactccattaagtggactctaacgcctcaaatttccaatatagtaattggtagtgatcagggaacatatatagtgaattttggaggaaaacttggaaataagttattaaatgaatgttcttatggnggaaaaacttcanngngattaatcaaaggacaacataaggttttgtttaaaatcctttaaggctctggtggatttatattcaaaataaggcagaaggaatgccttaaaaa

SEQ ID NO: 243672 - DNA, 217 bp, Gossypium hirsutum
aaggaatgatactgcttacaacaactcttatctacaaccctctatctggtggaaggtcgtgggttataaactgggactcctcttattattatggatagcattacttgtactgcaggttaccaagaatagtacaactgcttgaccagcggtgtatagggtgttgaacttgctgcgtataccacgattatgatgtgtttctctatagaaaggacccatg

SEQ ID NO: 243673 - DNA, 345 bp, Gossypium hirsutum
gcaaaataaaaaaaaaatggagctttcagctttttataatgaaaacccaaattcattatgatctgagttttctttatttttgtctatcaagtgacttttcatttttttgggtagaaaatggaaaacccagaagcaaatcatcttcctgaggtggattcattaccagatggctttgttgagagtcctacagattcattggctccaaaaactccaattttggaacaagaaaagcctttgcaatctgattataaagaagaggatttagttgccaccgagtttggagcaagcaagggccaaaagcaaagaacatttccatttccattgtctgaaggggacaggtttaat

SEQ ID NO: 243674 - DNA, 342 bp, Gossypium hirsutum
cccacgcgtccggttatagtgtaaagttactgtccgataaaatcatataaagctatttttctaacaattacctgattcatctttaaaggttttatgaataggcttctctgttgtataaagttacttttgtagttcagaccagatctttcctcgtctgggaaagtaaaaccagatctctatcttcacttattaaagaaactaaaactgaaaatgcattcccttatgaagcaaagctgcagtgtgattagtcaaagtacaacataagttttgctttaaaatccttaaagtcttttgtgaatttatatccaaaataagcaagaagaattccttaaaaattttact

SEQ ID NO: 243675 - DNA, 366 bp, Gossypium hirsutum
acgcccacacgttctagaacgcccgacctttttcgtcctttaaaatcatatacaggttgggggtaacaattacctgatgcacctttcaaggagcaatgaataatcgaaggtgatgtttaaagttacttttttaattcactccaaatctttgctccaccagaaaaaaaaaacctgatcactatctgtactcaatacacaaactcaaactgatggtgcattttcttataacgcaaaaatgcttatttattaatcaatgtacaacatccattttgcaataaaaaaaatatcaattctttttgaactatagccaaaatcttaaatgtttatgccttacacttttttcttaaccgtttaatgtaactaaaa

SEQ ID NO: 243676 - DNA, 311 bp, Gossypium hirsutum
  unsure (1)..(311): unsure at all n locations
tttttgacaattgaaacatggactgttgttatggaaggaaaatctgcatggtgtgagggtatccttatattatgcaaacaggctaggaaagttgagctgttgttggataaagtaggcaggtgtgcaggacctgtgaaaattacggttagatatctggattaagaaaggcatattgcggttttgtcctgtcaagcatgaaaaccatcctgctgtcactgaattacgcccactcagatctgagtgctgagatgctattttacagctgctatangctgtcttgctgtcatccgtgttgagaatgcaatagtgac

SEQ ID NO: 243677 - DNA, 372 bp, Gossypium hirsutum
cttgtttcaatcaattaagcaagcttctccaatctgattcaaaggccattacagctctgaggagaaatccgtatttaatggtatgtaatttcgatacttatgtgttgcctaatatcaaaactttgatagataatggtgtgcctgaatcgaatatcgtaactatgtttaattaccatccatggtctttcgttatgttgccggatcggtttaaggagattgttaaggatgttaaggaaatggggtttaatccattgatggttaagttccttcatgctgtcattttgtttagaaaagtgagtaaacctgcgatggagaagtagtttgatgtttataagaaatgggggtggtctgatgatgagatttgggaacttt

SEQ ID NO: 243678 - DNA, 297 bp, Gossypium hirsutum
cccacgcgtccgcccacgcgtccgatcacttcttatctagcgttagctatctttaagcattcaaagaagctttcagaagtaagggagcaaacagaaggtattgctatggagagacggcttccaatgccattattaggtgcagccttggctatcggaatcaatcttgctgccaagtgggttggttaccggcatttgacatggatgatagtgtgaggacagttaatcggtttcacacatctactgtaacgacattgatcttttgtctggaaataattttgtgtcatgtagattcatttc

SEQ ID NO: 243679 - DNA, 365 bp, Gossypium hirsutum
ttttaaaaggtattgtaatggcctttggtgcagagggatccagctcggagaaattttctcttgacatcattgaattacagtttaacaagtgctattgatgttcttgaatctattgatgcacatggtggggttagaaatctccttaaacagaagcagcatgttgagttcatacagaggtggcacttgttccggtacaagctggataaagcagtttctgctttgtcacattttgacttcgagatggcattctattacataaagtcttcagatcacgatctttatgcaattcacgatctcgtatacacttcatcacaagaaattgaagcatcacttgtttgtttcaaggacccaccattcccgtgggc

SEQ ID NO: 243680 - DNA, 331 bp, Gossypium hirsutum
cttcgggccggttaaccaccgggggaccttccaaggttccactgcaaaacaatggatgggcaaagttcggatgactcaaagcaaagcactgctgatatgactgtttttgtgcaaaatcttcttcaacaaatgcaatctaggtttcaaacaatgtctgattccattatcaccaagaatatcctttcacatgttctttcataagataacaacttcgtcaaatatatcaaatgtcactagtaactggtttgtcgtatttggtaatgaaaaaattgtctagttttcttgttgagcttttaattttattgttacataaataggttggattgtctaa

SEQ ID NO: 243681 - DNA, 149 bp, Gossypium hirsutum
aaaacggacccccctaaaacggcgaatccggccttggccaaagcaaacgcaagatagatcaaagacaatcgtccccattattatgacgggaagcaggcccgcttcatgataatgaactcacggcttgctcatacgtgcacatgatgcag

SEQ ID NO: 243682 - DNA, 296 bp, Gossypium hirsutum
  unsure (1)..(296): unsure at all n locations
cgaaaggattgaactgttgaaaaaaccacctcattttggtaaagtggaaggactccctaatccgattcttcctagtaagttatgaccttggctataattcctggtgctccatatatatatatatatatcatatcgaaaaagatcatccnccgaatatgctgaaccaagtttaaaacacttttgtatgatgacctcggtcttgcccgagttagctcacagatcatataaacaatgggttttggggggaagtattaaggagtcccctctcatttgtaattacatttctcaactttact

SEQ ID NO: 243683 - DNA, 334 bp, Gossypium hirsutum
cttcgcttaaaaatcctggttttgggcctaggattcctatatattttggacctttttaaagaaaagaaaaaaaagaaccctttttacattttgtttcatggcttttatagcctgttttcactgtctgtttgttctctttgttgctgttgcgtgtctttctcattttgcagggcatggctggtgttggtggagcaggtggccggcagtcaggggcatggggctgtcagagggttggtggcgcaagtgggggtaggtttggttagggtttgctaattgtatgtgtttgggcctttgcttggttaatttaggtgggtatttgggctgttgtaaaaag

SEQ ID NO: 243684 - DNA, 423 bp, Gossypium hirsutum
  unsure (1)..(423): unsure at all n locations
gtgcttggttcctttgatgagaatgatcctgaaggaggagatgatgatgatgatgatgatgatgatgatggagaaaaatccggtgggggtgaagctaatgaggatgaactggaatctaaaatgaagaatcttgaagttggccaagaagaatagatagtttacaaaaatttctcagctatgcagctttaggttttaataattgtagaattcattgctgagcttattttcccagcgaatacccaactcgtgttttagtagggtagcctcttctgcaggatcgttgttctccttttattttcgttagggtatgtatgatccttgaaagttggatcttcctttcaaacttttataagtcttgttgtgatagccattagccaagctntctctggacatagctaatgatgcttgagatccgttctgttc

SEQ ID NO: 243685 - DNA, 172 bp, Gossypium hirsutum
gcaaagggcaagagatcggttgaagaggataaaggccgaaccttatttcaaaaaaggcaaattgaacctggtgattgccacctgtttcaaaggaaaatcaactgttgttgctgaagaaaccaaggttaatttaactgcttcttttctttgcaaaagatttcgacttttaaat

SEQ ID NO: 243686 - DNA, 432 bp, Gossypium hirsutum
cttttctgcaagggaaaaaagaaaagatttttttggatcaaggccgaaaatgaaatatgatggtaaacctccactggctgctaaatcgcctatccgcctacgaccccgtcgctcccttccatcaaactctgcctccctgcaaacccctccaggttctttaacgagatcccagaagccgattcttacttggggcattgaagaatccgagattcgacccgagtaccgctctatttcttgtgagttacgagttttggctcggacggttagagatgaacttggaaatggggaaacggaagccgctggtttaggcaagaagactgtgctcagcgtcaccaattcttgtccagtggtcgagagaggtcggttttacgaggaatactcggcgagaagaaacgagaggcttaagacgaagaaaggcgaaacccagaatga

SEQ ID NO: 243687 - DNA, 240 bp, Gossypium hirsutum
cagcgttcggccagccttcgggcaaattcgatcctgttagattgagtacgatctctattgtcaaggcatcatttaagactaccgagagagcttgagaatatttactgaactggaggaggagagaagagctaggtaaaagcctgagaggcagcagctcggggtatgttatcgagtgatagtgaacgacaaattgagagactgaggactatttggagggctgcctatttacaacttgtatgc

SEQ ID NO: 243688 - DNA, 267 bp, Gossypium hirsutum
ttaaactgaatctcaaatttttacacagggaaaaccacacctttttgcttaccattttctttcccggcacacaattggcctaatccccaggggccgggtttatgccaaatggagttttttgggagagaggaattggttttaatttaattggagatggttaaggccttacattccaattatgtgttaattccaagacttatgtaatttttaattatgtagtgattcaaagacttatgtaatgtttctaattatgtagtgattcaaaga

SEQ ID NO: 243689 - DNA, 379 bp, Gossypium hirsutum
cccacgcgtccgggcatgttaagaatggtgttaaagctacttgttttcagacgatgaatctgcaaaactaacgatcgattcttcttgtttttacacttcattgggtgattgggagatttgccctggatcatactagcaattgactcaccggtgtggcatatggtcttcgtaattatgattctgtttttgagaatcattagttagtttgctgcgtaccattgaatttatggttctcaaagtgttggatttatgtctctctctctctctctctctctctctctgtttctgccttcagtgtcagtctttatgtcgatcacatgatcgtaaaggagactgctgtgtcaatagtttatataaaaaaagaaaagcagctctgctc

SEQ ID NO: 243690 - DNA, 338 bp, Gossypium hirsutum
  unsure (1)..(338): unsure at all n locations
cccacgcgtccggtccaagagaggttgatgcttggccttatttcactgattgtagggcactgtctaaagatatggttgctatcttcttctccgagactgcaccgaggacatctgtcgttggcggtcacttttttgcatcttaggttagctaataaaaggaaatagttccaggagatccgccatattgttattgcaatttttgatggcatctgtaaatcccatagttttcgatagaaatttttagtttcgggttgtaataaatagctattaggatctaagctgttatactgtaatagtttataggcgcttcttattgagaaatccctngaaagttcttc

SEQ ID NO: 243691 - DNA, 228 bp, Gossypium hirsutum
cccacgcgtccgcccacgcgtccgatcattttgcattgaaatgttctcgaaatgtaagggcgcttgtaagggtgtttcttagaacattaggaagaacagttgctgtaggggtcgtgacccgaatagttgaggagctggtatagtttgaagctaagactgaagacggttgtgtactaattcaaggctgacagtgattataaaatgagtaaaaggcaattcattttgtgc

SEQ ID NO: 243692 - DNA, 433 bp, Gossypium hirsutum
  unsure (1)..(433): unsure at all n locations
tcgccacgcgttcgggtcaaaggattcaagaaattgaagtccgcaggactgccggttccatggttgaatggggaacgaaaatttattcagcgaagttggttgtgtatgactttgtttgttcatgactttatcagctgtataattgacaaagacatcaatgtttctaggtttaatgcaaaggaagtttattttaaagttctttcaatcaatttgctgcttctcagcacttctttcccctgacaactttccttatatgcagggatgtcttttttagcattcagtcagagactatcatgcaaaagtcatgcagggctttctcttctggagacggaacatcgacacctgtggttcagttcttcgcacatagttattggattccagcttgcaagtggcacaatacgtctnctcttcatttactttctttcatctatga

SEQ ID NO: 243693 - DNA, 432 bp, Gossypium hirsutum
tcggaatatcaaaatgcccaattttggttttgggcctttttaaatgaaaatgacaatgtctattttcactgaatcctgaaaatgaaagatttttcaggtattaaaaagaaaatggttactgttattcatactctgtttgatgactgttgaaaattgcgtgtatacttgttgctaaaatggtatgcagttcaagggttcagaagttgtggaacgccaaaatgaccatttctcacgtacttattatggcatttgtatacctctgagctaatataggtttggttttatttagagtgacagatgttgtttagatggactaaaattcttgtcacatagtgctaaacctattgtttgaaaaccaatcattttaaacttaaaatgtatgcccttttggattttaaagactcttgctaaacttttcattttgtccctagc

SEQ ID NO: 243694 - DNA, 425 bp, Gossypium hirsutum
gaaaggtcacttagcaaaccatccactgccccctaaaacaacccaccaccaactcagtaaccgcaccgactcagcttcttcctcgtcctcttcatctggcgatgatgagcaagagaaaagcagggaaacactactcgaagacaaatctttggtttatgggttaagagagaatcccaagaagagtttcaggttcgcagatcctgaattctcattcgccggtgattccgcctccgtcgtccaagacagagagagcgagactgagtccaggaacccaactcggagacgatccaagagaaaacccaaggtgggtactgctaatgcaacaacagcaactgacgaaatcaagaaaccgaagctgttgacgagtttccccagtttgatcgactcaccggcggagccttgaaccgtgagctcagtctccgata

SEQ ID NO: 243695 - DNA, 355 bp, Gossypium hirsutum
cggacgcgtggggccggtcggtgcctcctctcttccatctctttcgtgtcgattatacaaattctgaacttgtgaccatgatgtcttgaattttgattttgcatctacccttctttgatacaacactgcatttggtagactagttttccctcattcttttccaaatgaaccttttcttcgaggatctgatgcaatttcatcatgccatggaagtgtctttttggtgattttctgatgttacaacgtagaatttatattccaaatacagatatttaacatcatctgtttattactctgatccttgtactgaaaaaaaaaaagggaatagaaaatgaaattctcgattaaggatggc

SEQ ID NO: 243696 - DNA, 369 bp, Gossypium hirsutum
  unsure (1)..(369): unsure at all n locations
ccaggaaaaaattgacccattgttgccaccaactcttatggagcctaaaggcgaccatagggcctggtaattactcgatggaggtaccattgcaagtgagaactatagggtgagattttaaaaattttcatgtttacgtctcattatgattatacaaacacatgattaagattgtgaaagatgattacagaataagcaagtgctgttagctgtgcagtatagaaaacaaaaaaaaaaagaaaaagaaaaaaggagggatttcttgacagtgtcatttatgatgaagttttttattcttcattttattattctctatgataccatttatattcaatgaaggaaactcatactgaatagtttttattcnna

SEQ ID NO: 243697 - DNA, 352 bp, Gossypium hirsutum
gttggttgatgctgcggtcaggagttcgagctctgataagacagcagtagttgctctcgcaggtggtgttggtactcttgatgagatgtttgagatactggcattgatccagcttgaaaggattggatcagagcttccggttcccttcattgtaatgaactatgactcattctatgcaaagctcttagattttcttgatgattgtgaggattggggtaccgtctctaagggagaggtttcgtctttgtggaagatctgtaacactaattctgatgctctagtgtacttggcagagttttatgatctgccattttcggatgaacacaagcatggaacagaagcgagaagcgca

SEQ ID NO: 243698 - DNA, 323 bp, Gossypium hirsutum
  unsure (1)..(323): unsure at all n locations
caacgtaaagtagcaccgcttcatactgtgcgctgatctcgacctctaagacaacacaaataagcggttctggcatcatgtgtacgctaagtatttaacaaatctgtgttgaatatatacctcacgcatcgaagttcctaagaatacacttccattntgaccgaataaatgantttcttgagaagaactaataccttggtgaacgtaccatcaaagggagccttgaagcatactcttgcatacacacaggaacttgataaagactttctctcagttttgaaaatgagatccttgactctcttgggaaatcttcagataccgac

SEQ ID NO: 243699 - DNA, 397 bp, Gossypium hirsutum
  unsure (1)..(397): unsure at all n locations
tccggagtgtacatgatgtatgggggtctgaccccacccttgttggtcaagtgggtttgtgacatggcggaaaagttctatggcgtgcagcgtaaaaatccatttcaagatatgttcggagacatgctgaaggtgagtgatgcatccaactaatactcatcttatcttaagctgtttattaacaacaacattccttgtgcagatgatgtgatgagttgtcggctcaaatccctttccagtttctgattagagaagcaatttccttttcatctccaaatatttatgatattgtttcctatttatttataatattaattaatgttataccctttgtaaacaagatggatccattctttgttaaatcaaattttgcctccgnnnaaaaaaannnnnnnna

SEQ ID NO: 243700 - DNA, 394 bp, Gossypium hirsutum
  unsure (1)..(394): unsure at all n locations
cttcggtgtaaaatcccatttgaagtttgcaatttccccgtaaccgaaactcgctttcaccccctccctccctttgcttggttgaaagaagggaaaataagtaggatgtgtggatcaaatatgttattgggttttagggggagcataagttcttgtttcagaggaaccacaatacgagacaaggggaagctggagcaagcagaagagaagatgacatttcaagagatcaattatgggtcttttagcatcattattccttgtttctcaaagcaatgattgttaattttgccttgtcttttcattttgaaacaatatgtaattttgaatagctaaagctgagttattcattagaactcaatatatatatatctgngtgtgtgtgtgtttgagctac

SEQ ID NO: 243701 - DNA, 386 bp, Gossypium hirsutum
  unsure (1)..(386): unsure at all n locations
ccgtccgnnggttggctgatgaaaatctcagannggtttttctctcctacccgcctcaaagagggnncgaggacccttagtgtggtgctgtnnacttgtgaanntttcggagcccaaatgcccactcgtaacccatttgcnnattttcnntcctttgaagggcatgnnngcttggagcccctgggattgggtgttttaatgggtgtttgnnngagtgatangcnnntatattatnnnctctcnngtctttaatantnntcttcaaattgtacnnncggagacccgaaggngnngttaacntcnnntcgagnngaaatcnnngaggtgannaatgtctaatagnnngtttcggcaccttgtgcttacttnngttcaatgnngctgaa

SEQ ID NO: 243702 - DNA, 302 bp, Gossypium hirsutum
gttggagtggagaattcaacgggacgcattcacctgcccttgcgcatttctggctacaatccccgtcccagatttgaaaaaaaatccttatcaaaggctgcgtcaaaattaagtttgatgcatattcccaaagggggcttccattttgcatagatcaccttcctgataacccccttttccttgacgccttctatttctttcatgtatcattgaatgaaccttgatatgtcaaccgccgatttagcataaaaaaaaaaaaaaaattcgataaaaattttattaaaaaaataaaaaagggtaat

SEQ ID NO: 243703 - DNA, 225 bp, Gossypium hirsutum
gtcgaatgtttcagatttaagattcgttgcatattattgtaaatggataagaatatgggattgttcttgtagctggctgcattttgaagataaaaatgtgccttgctaaaataaacaacaatcctttcaatttcctgtttatagaatgtatgccattatggggttttaaaaaaaaaaaaacatgaaaaaaagttcaataacatgtaatatttgtttataaaaata

SEQ ID NO: 243704 - DNA, 439 bp, Gossypium hirsutum
  unsure (1)..(439): unsure at all n locations
gaaaaaaaaaaacaccccccttttccatttgccttctctgctagggtttataaaactcatcatcgccaccgtcgtcatgcctccttgaagccacccatgatttccaccgtagacggtggtcggggccacgtgaaatcgggttagtctcttcttcttctttgattcttttttttgttttaaagtaagttaataaataaaaaaataaaataaagtaaaaaaataaatataaagatcgagataacagaggaaaaaaaatcgaagttaaccttctaaattttcttttttgtttttgatttctgatgttcgtaaccaaaaaaattacaaagggatgtttcggcttttataaccgaattacatagattcngttttgtttttttgcttggtgtctgctactattttttggtttttcttcttggttcttggattttgcatgttagtt

SEQ ID NO: 243705 - DNA, 451 bp, Gossypium hirsutum
  unsure (1)..(451): unsure at all n locations
gtttcgtgcatcatcatgtacatatcattacaatcatataatttagtccaacaatttaacatagataagttcatttcattataatccattatcttataaaaattatatatcattagcattcatcaacattcgacgtccaaatcaagacgaggacattttcattcgtatcataatattatgacttttattcatacctctactactttctatttattccgttcatcttatcaagtaagccatatacactacatcatataagcattaagcaaatatgaatatttatcacatatgcatcataaacttttattcatacttttctgaaccgagacttatcataatcataattgtactcaaataccttcacataacattgaacatggntggggcagctcggntggagagnaccctgtctaaataagacggtactcatacgcgtcgaaagacatgacac

SEQ ID NO: 243706 - DNA, 338 bp, Gossypium hirsutum
acggtcaaatgttctatattggaccatctttttttatgatggtgatcagagaaaaagatgcgactgctttggcaatgggctacacttcgaacatataaaaggaacctctcttagattaacgaccataatcagacccttatgtgtattcaatagaccccatcatgtggttgctttgataagatcaccggacaacttgttcaaggtattttatatttctcgataaaatacaggacacaccatttgtgaatggggtatatcagggaaatttggatttttcttttcacaaaaacctgtgtgtaactcttacgaggggcacaatagtgatacaccagcaattt

SEQ ID NO: 243707 - DNA, 396 bp, Gossypium hirsutum
ggtaccagcacataagttgtatatattggaactataaccatttaatttgttctgctttcatggataccataagctttgcctcttagtcttccttttataattccttctgaaggcctcataggaggtaagggaattctgttttgcagattctaaagggataaaaaattcaaagagtaaaaagaagaaccgaagaagaaaagatcagcagaagaccacatctgccaatgaagccattaaaaaccataataaggaaccaaatggtcttaaccaagtgtgccatagtgccgaagttggtcagaaagttcgggctggtgttggtgctacctcaaacttacatgatgtcgaagataatatttttgacaataagaatgagcttgatgatggtgatattgatga

SEQ ID NO: 243708 - DNA, 357 bp, Gossypium hirsutum
  unsure (1)..(357): unsure at all n locations
tccggaaatatatgaaacaaagctccatgcctataccaaatagaaaccagggtttcatagacatggacacagaaaaaagcctggaaaatatcgaaaagcaaagtgggtggtaagtagctaaaatcttaatacccaccaaaaagaaaagcttaaaaacttgaaattaagagattttccatggatgattgtaggtggacaaggagcacttgggcattcttgaatgaacctccagttcttgaccgacctacanacaattaccaaccacagttccatgttgccagcctcgctacttcaaagtttaacaagacttctggaatcagtgccaactacgcgttttaactcctaatgggatcttat

SEQ ID NO: 243709 - DNA, 317 bp, Gossypium hirsutum
acgctgggggacggttgattgaacagacggctatagagaggcatgatgaagaggaccatgcggctaatatactcaaggaactggttctagtcatcaactattgacctgatatgcgtgatgggtatggtgatataaagcctgagaatatacatgatacagttactgaacatatgaagctagcacatcttgtattaactgatatgatgtcaaatgtgcataactggacatgtagagtaggcaaggctgcttatgtatgcctaaatgtattaacaggccattataccgaaaaagtagacatctggagtgatggtgttcta

SEQ ID NO: 243710 - DNA, 358 bp, Gossypium hirsutum
acgctcacgcgttcgacaacgcgtgcgctcaaacataactgaaaacataatcatatgcaaaccctactccatcgatgacatggtctcaagctaatcagtgcgcctagtattgtagtgcatgaaggatatggaacccatggcctcaactgctctaacatgtgtacatgtgcgacgtcaaacgggtcgacgtataaagtattagcagcgtggaaggaacactctaactgctagttgcaactgagcatggaacctaaacatgcaagctagaaccactcgagaccgatatactacatgcacatgcttgcaaactgtcgataggaccatatccggctttaatactaaattggctggcggtctt

SEQ ID NO: 243711 - DNA, 217 bp, Gossypium hirsutum
cccacgcgttcgggacactacgttattttttacttttactttctccaaagatccattctagattgactaataattatctatagactccgtattgagagtcattaacagaacagtttacatttgccggacatgttatattgatgcgtatgatgcatgattaacggacagcatcaatcatatttaaacatcaatgtcatttgcatctgaaaaagaaaaa

SEQ ID NO: 243712 - DNA, 342 bp, Gossypium hirsutum
acgcgcgcggggtttttttgctgtattgagggattgaatacaccaggtaacaactgatggatcatcaagagctaaactagtctcacacaagacagaagcgctataagagcaggaatacacgatggagcaagacccagctgagctttaggtggcacaggaacgatcggtacatgccaggcacatcagcggacaatttttaaatatcgacaatcccgagttggtagctgagcacagttcataggaacctcagacatatatagcacctaacagtcttattgcatcacctacagaacaatcagctcctgtgatgtatgcacggctagcatctaaaactgataaagc

SEQ ID NO: 243713 - DNA, 374 bp, Gossypium hirsutum
cccacgcgttcggtaaaaggttgtcttaacataaccacaagatttagtgttgattcagagaaatcagtgcatgccaaaacacaggcaagccaatcagttgaagaaattatagtggaagattctgatacagcttaagaaactgcatgggcaattggtagtgatatatatatgcggacaattgaagatagtgatttttgaattgaagatagagatttacgattgaagattaatcattgttaatgtttaaatcgaatgccatttattcgttattatgcaccttcaatagctcaatatttgcctggccccgcgtataaattaacataaccaatgaacaatactgtgttcaattaaacagtcctgattaaaaaaaatat

SEQ ID NO: 243714 - DNA, 448 bp, Gossypium hirsutum
gtgctacaatgattgttcacaaatcgatgctttcttaagaagtgatcagaaccgttgtgctagtaaacttctttctgcttatacagaaggtgatgtagaagaaatcaaacgtgtagatcataaagcttgcaaggaagttgcctactggtgatgtggctgaactaaaggaagaagctgctaaaggtgaggaagaagcactggatgaaaatgacctgacatgagttttacctgtaagaaattgtttcatcctctgcatccatgggatttgtgtgtgctgctcatcccatcctttcttttcatgtaattacataggcatagaaacatgttccatttaagtttgctttaactcttgttgtgctttgcctacttgaaaaagaatgatgtttaatcatttttaaactgttgcttgtttatacgagtgggcttcacaatgcaattgcccttattg

SEQ ID NO: 243715 - DNA, 342 bp, Gossypium hirsutum
cttggggaagaaggaaaaaaccgaaacttagataactttcccatcatggaacctgcttgttcgtatgtatgctcgttaaagctgctgctgctgttgttgttgttgttgttgttgtaatgttcgtgacagtctataactgattgctattaataatgtcttagaatgtcgttttcgctcaaaaaaaaaaaaaaaaaaaaaaaaaaaaaaaaaaaaaaaaaaaaaaaaaaaaaaaaaaaaaaatattaaaaaatataaaaaaatttttacattttaataaataccacctacctaacccttttttttaaacataaatatttttaaaaaaaatttatataaatttaa

SEQ ID NO: 243716 - DNA, 265 bp, Gossypium hirsutum
tctttggtacacaaaatcttgcatatatagcattcttgtcggttctatgagactgagacaaatttataggtataccgactgtctaccatattcgtggaggcacagatctgtgggcctttttcacgctataaaagaatttccccgcaactgatgaatatcagatgctgagggcgggaacaaaagcttataatcaactgacaaaagcctacattcactccctcagaaacttacaaggccctgtaactgtccctatgcatcaaaatac

SEQ ID NO: 243717 - DNA, 229 bp, Gossypium hirsutum
acgctttgatgcgttttatccagcgcgctcacttcataccccaaagtgattctacaccagagggagagcatgtcccccaagagaaagggttctggtggataaaatccctgttcgggaagtaggaaaagatgaatcatggtgaagcgtacaaaaaataaatatattggcatcaaaatccaatttggggctttttttattgaaagtcgattcttattttttgcttatggga

SEQ ID NO: 243718 - DNA, 281 bp, Gossypium hirsutum
  unsure (1)..(281): unsure at all n locations
ctacgggttaatggcttcctttttttattttattaaatgttagaaaatgctatgtcaacttttatgattcagggagcttggagaaaccgagaccctgcangcttatctcctatctttggtatctctntaaccacaatgaaattgtttaatttcatatgtttaagggtgttttattgactcgcatgaaatccaaaaacttgatggntnaaaaaaaaaaaaaaaaaaaaaggataaggtttttccaaactcccttaataaaaaaaaatggaaaaaaaaannaa

SEQ ID NO: 243719 - DNA, 377 bp, Gossypium hirsutum
tttttggccatcgaaatttgtgaaatgatgctcttatgtatctcagatctgagtgagacttcttgctctgtaatggcgggacaacgttcactttctttataaaggacgcttaacgaaaataattgatagcttatttgagtccttaattctcggtcgagagggccgaataaacagggttaacattgtgatggaacattcaggctgatgttgcacggtgcacgtacgataaatgtccggcgtcttttgaccggagactgtatgtctgacagacgaagaccgatttcattaagctttttggaaaaatgagctcgagaaatttcaacactttttgttgtcgagaaaagaggaaagaatacatcatgtagattgaaggaatt

SEQ ID NO: 243720 - DNA, 416 bp, Gossypium hirsutum
acggttgcaaccattatagcgggcgacatgtttttataccactggagcctgaatttatcgggggaaacattccccttactgcatatactgttgtcaaggatggagaatatcgtggggagattaaacttggtctcactttcacccccgaggaacgtgaatgcagggattttgaagttgaagaatattttcgagggtggaagcagtctttatacactgattatgctggccacttatagttttcaacctttattcccgatttcaagaaatatcttttttgtttgattctcggaccatggttgaaaggatgtgatgaccatgctatcatttttactggagataacttgttacactgggaaaattttttatctttttgaaaaaatttttgccttaatattcttcctcctggagaatttaat

SEQ ID NO: 243721 - DNA, 294 bp, Gossypium hirsutum
acggaatatgtctggagcatggactaacaacataaaggcttgaatcatacacaaaacaccgagccgacgaagctaaacattgggtgcgagatgtaacggtccgagcccagatcgggcagttcgtgaacctaagggaagtattgggcgcagtattcaatgaacaacgtgactaggatgttactatggaggcaacatttatgggccgtatatcgtcggcccaagatacaacatggaggtgatgcacataacacatgaatgattttggctattacgtgtgatctattcgggggatta

SEQ ID NO: 243722 - DNA, 198 bp, Gossypium hirsutum
acgctcgcatacaccgaaagcgctcgcatttttatttattacctttccacaacggaacggggcattttttaggaatcgaataagctaactaacaaagctaaaggtgtgtataaagtactagatttaatggaatttcataggttaattaaacctatgagggcttaatttgttgggattacaatcaagaattcatcaaaa

SEQ ID NO: 243723 - DNA, 128 bp, Gossypium hirsutum
acgcgtagatgaagtcataccataattcctttggcaacaatgtttcttgtctcttgcaatctaattttaagtcatgtatttctgcatatcaattttcagtgtaagttgaaacttaatatatagtatgt

SEQ ID NO: 243724 - DNA, 312 bp, Gossypium hirsutum
gcagctttggaacactgatgatgattatagttccattagtcacaaactagattctaagagaaaggacggagattcatctcaaggatgtaaaaataggggaacagcaacagcctttatgccattcaagatgaatttgggttttgcagtgaggaaagaagagaaagaggagataccagttcatggattaacgcttttgactcctggaatcaagaatctgaaagaggaatcatgttctacggggtctaagacaagttgtaacaaagcagtttcttcttctgcccccaatgctcaatccacttttcgctctgtacc

SEQ ID NO: 243725 - DNA, 246 bp, Gossypium hirsutum
tttgggtgtcaaaaagtctttaagcttagtgctagtgttcagttttacatatatgatctataatatgatcgtttttgagtaatgttttgtggcaatggtttacatgtactctctttttgtaataaaataaacttttgtgtcggatacgtatttatatccgtagacggtggctttagctctccaataacaaaaaacatttttaaaaaacaaacattttataaattatatattaaaaaattgaaaact

SEQ ID NO: 243726 - DNA, 229 bp, Gossypium hirsutum
attctatataaattttaccctattttttttttattattcttaaatatcctatagagggcctttttctgaagcaaaaatcactctcttctaattaaaaagagcataaaaaaagctgtgtgttatacagcttaattaatgcctcatataggatggcataaacttatattagtgctaacagaatacatggttctctattgttaaaaccacatgttaatttatgggtataaag

SEQ ID NO: 243727 - DNA, 298 bp, Gossypium hirsutum
  unsure (1)..(298): unsure at all n locations
aaattaaaatttttttattaaaaaaaataaatctattggtaaattaatttttactaataatccaaataatttcataataaatttagaggtggttgatttttcaaattatccaacattgcataaattaaaaatttacctacttaaatatttaaaatccaaaaccctaaatttgaatgagttcatatacggcatctatatacagaaagaaaaatgggggagggagggtggcggttcaaagcaagcttgaattgattctgttatgacttctncaagttcctttgatctttcaagtatttta

SEQ ID NO: 243728 - DNA, 376 bp, Gossypium hirsutum
cccacgcgtccgtgtatgttgaggtctaatcagcttaatttcgaattagtttgttctgggtgttttgctaacagactgtagatataaacaatctttaaacatattggattttgctcaaagagtattgattctctgaagaattgaagagaaagaatggtggcagcgaaattggaattaaccaaagattagaaagcagagctcaagatccatggcttctgctctccgagattggaaggagaagtttcttcccatgtatgaagattttataaaatgcataggctgaaataggaatattggttgaagcaaatgtacaagacgctttaactttgtaatttgtcatcttgcaacttataattagcagcaaaaagctgttttt

SEQ ID NO: 243729 - DNA, 195 bp, Gossypium hirsutum
acccacgcgtgcgcggacgcatggttcacatctatctttctactatgttcgaccagggccttgcatatattaaaagagcgggacttgactcatatgaggcagaatattgcctagggcacaaggcaaaggctgtatggagctattattatgtttgtgtctactcactacaaattctgtaaagatactgaccgcgcg

SEQ ID NO: 243730 - DNA, 336 bp, Gossypium hirsutum
  unsure (1)..(336): unsure at all n locations
gggttggtggttgaaatgggacctttgcttcccactttaccagataccaccttcgttcggccgttggatcctgcaaacatcattgttccactgaggttcgttgatccactctggaaattgaaaagatttctcaatgtgggctccgaagctctacttggaaagagcatcaaagtcattgatgccttcacttacaatgtcataaggagaagaaaatctgagataaaagaaattcgagaatcttgcaaaaccagcaagataaagcatgacatattgtcaaagattatgaactaagtgaagatccagaaggaaatttaactgacanaagtcttagagata

SEQ ID NO: 243731 - DNA, 336 bp, Gossypium hirsutum
  unsure (1)..(336): unsure at all n locations
ccacgcgtncgcttgtattcgttggacaagttctctccctgtcgtctctttcctctcgtgcatgagctgatttctggagaaccagattagccataaagcaatacagaaaatgcggcattggttctcagttcctctcttgaaaacccaggacattgtctgaaaatatgaggactgtcttcaaccccaacatggcaacgggggcatctgtcacttacagtaatccttctatatctgagatttgctagatgggggatgaaatcccaagagattcgccagatagttatagtaatttttgaaggaagttgtaaaccccattaatttttgtaaaaatttgta

SEQ ID NO: 243732 - DNA, 195 bp, Gossypium hirsutum
accacgcgtaagatgtgtttcgcccggtttataacctgaaaaagttcccaagaggttgttagaatttttccttttaaagtttggccatgattttggggggttcttaaccctttctttttggttcacccatttatggaaatgcttgcgcctaggttcacttcccttatttttaactggccatttgccatttttttt

SEQ ID NO: 243733 - DNA, 230 bp, Gossypium hirsutum
cccacacgttctataactctcttccgcttttgttttgaaacccatcatcgtccgtcgtgcgtgtctatttccaacacataatcggtttttagaaacaaaacgagactggctttctggtcctttgataagacacccccgaaggccattctttcttagtcctaaaagtgccgacaaaaagggtcttttcccaacatattagatccgatcccgccgactgaagagagaccttc

SEQ ID NO: 243734 - DNA, 314 bp, Gossypium hirsutum
attgacacctcatcaagctctcatggttatagaatgcttatctcgtaaccagtgggagggggttgttgctaggagcttctgtgttctaccctttgattctaggtttcgattctccttacaatcggaggatgatagaaactcactattctctacatcttaaaaccaaccatgtttcttattctaactccaaaagttagttggcaattatttatcacaagggctgttttcatgtaatctattgcctagcaaaccgatgtcattgtacaatacctatacctgggaaaaattttaaaccaaagaagctttttttcttt

SEQ ID NO: 243735 - DNA, 404 bp, Gossypium hirsutum
  unsure (1)..(404): unsure at all n locations
ggtttttagttaaaggttttggaaattgcattatcctattaaccaatggtgtttcagaagaaaaagtcttttacgtgatagttggttgatctttgtggatggatttctgttattgcataaggatatcagtgccaacagattttgtcatcactgaagacatgatattgatccttgcaggatgaatggagggatacagtacacgttacaacatggcattagagagctcaatttaacacatgtaagacaacagagttcccaaaatattgttctgtcaaatctcaaagatgtccttagttttcagaatttctcagaccatgaatccattcaaagtttgtagatagttagtggcaaggtattttatttttatgatgtaatttcattgtaatctncaatttttagtagtg

SEQ ID NO: 243736 - DNA, 332 bp, Gossypium hirsutum
  unsure (1)..(332): unsure at all n locations
atggttggggccaaggttaaggctgggtggctggaatctgcttaactgcacctccaggaaggcaagatctgtaatttccagcctattaccctactgcttagggggtttaggcttggtggcttaaatctgcttcactgcaatttcaggaaggcaagattcaccgttgtgatttcaatctgtcccactgcatcttcaggggtgttggaattttatttctttagtctgttacaccattctttagagaacatgatctatttcatggacctatttatgcntaaatgataagatgtcatgatcaaaatggatcaaatgctcctaactagatgtgcatg

SEQ ID NO: 243737 - DNA, 383 bp, Gossypium hirsutum
  unsure (1)..(383): unsure at all n locations
aaaaaggggaaaaaattggaattaatttccggcaattattcaccttaaaggtttatttggattattttctattgatctttgtatgtattctgtatacaatttctctgaaaaaaagaaagaccccccttttacaatccaaatttgacagcttttatatccaaatacaagtggtttcttgccgttttcttgctcaaaatgcaggttgtgaagacgtgggagcggagcacacgaacgtggggtgtgcaacgcgcaagccagggtcatgcgtggagcgtgcgtggggctgctgcgcaaaaggggaactttagggtttctgaaaccctaaaaattagggcctatcgggccgttgtaaaattttgngcttgtaaaccgaacccatttaa

SEQ ID NO: 243738 - DNA, 248 bp, Gossypium hirsutum
  unsure (1)..(248): unsure at all n locations
gaattacccgggatctctagaggatcaagcctgcttgaaactgtggtatccatgataaactcatattctgcagaaattttcnntatgcaggcacctacacgtggaaagagttaaatatgcactcataacttcctcttaaaaaaaaagaaaaaaagaaaaaaataaataaaattaaaaattgcttccaaaaaaaaaaaaaagaaacaaaattaaaacaaaaataaaaaatggcggggcggtctgttcta

SEQ ID NO: 243739 - DNA, 403 bp, Gossypium hirsutum
  unsure (1)..(403): unsure at all n locations
cgcacacgtcgccnacctcactccggttttatgttcctatttctgtttcacatacctgagccgcatctcaatagtgctgaatcaattatggtttcaagtacaacctcaacatgccccttttttcctataaataattgttggcatagaatgtttacaacgatggtggggtgtttctttttttttatcttcacttgtacttttggttattgcttgtgatgattatataacaatgagagttatcattaataaaaaaattcgaatctttatttctatttttaatgtcccaattattttttaactttttttccattactttttattattatcctttttaaaaatataggggcggcctttttttaagttccaaatttttctaccctttctttccaattgaaattttttt

SEQ ID NO: 243740 - DNA, 347 bp, Gossypium hirsutum
  unsure (1)..(347): unsure at all n locations
ttaaaagccaaaaatttttcctttttgtgcccggatccaaatctttttggggctaaggaccctcctgctggaatttaaggggaaaactgactgcactccatcatcttcttccatggttctagctgggatgcttagctttccaccatcatcttcttccatggttctggctgtgatgcttagctttccagtgtaaattttgttcaaagtttgtaaaaagcaacatctgagtataggctttttctctcttttgcatttgtgcatctgtgtgggtatagtttcaaaaaagggggaaaaaaaaagggatctttgagagctatgtgaantagtgaatagataatgtcttagnt

SEQ ID NO: 243741 - DNA, 421 bp, Gossypium hirsutum
gaaaaataaaattttaaaatttttctcaggcaattgggccagaaaggggggttcaccgggagccatttgctggtcaaatatgctgagacgcatttttcttctctctctaaaatcgatctaatccgataaattttgaaaaatatgacctaatctagtaattcttcaaaattttcagcattctgggtgattcactctcagtagagctatataatttcaattaatcaaaatgtaatacattcagcccatgatatatatatcttattggctgaaggttaggaagtatgtaggggcagttaaacaacgagatgatcataaaaacgtggcagttccaggtattttggctgatattgacaagctctagacggtgctgtttatatggatctcagtttgatctcaccaagctgtgacgatatttaaagat

SEQ ID NO: 243742 - DNA, 264 bp, Gossypium hirsutum
ccgcccacgtttccggccgttggaaatgttgtcggtgaggggaaaacctaaggaagaggaagaagagtgttcggagttgtggcattccctgcaaggaacacatggatagttccaactattattctcatttcattattgattgttggcactgtataattatccattcatagtttgattgaagaacaatttgtcaccactttgttctttgtaacataaagttctcaaatgttgtcactgaaccataaatgccaagtgattgtttgt

SEQ ID NO: 243743 - DNA, 355 bp, Gossypium hirsutum
gccacgcgtacggaaaattgaaaggattcttcaatgcgggcttcgaagctatacttggagagagcgttgacgtcattgacgacgtcacttgcagtgtcatatggggaagaaaatctgtgattgaagaaatccgagactcttgcataacccgcgagatatagcctgacatattggcactatttattgaactaagtggagatccagctggcaattgaactgacgatagtgttatagatattgtgctggatggtgtgaacgctggccgtgacacatcaacttcgactctcacctggaccatgtacatgagcatgaccaatgcccgggtagactaaaagctttactcataacttaaagc

SEQ ID NO: 243744 - DNA, 430 bp, Gossypium hirsutum
  unsure (1)..(430): unsure at all n locations
aagannatcattgaacctaaaagtttaaggttatttatattagtgcnnctttattttggttttttgtgggttcttaatggtcccaacttttgcnnctttagcnntgtctttnnatagttttaatgatcccctattagtnntcctcttatntnnttttatatgaaataagaaagttgtnncacatgnnatttgcnntatcttgctnnntctatgggaaatttcaagaaaaaaatatgttggttgaatgtacccttgctcttttagggttcgtacttttattattatgggnntatgctntttattccgactctttatgatttaagtaccagtgtccganacccatgggatgtgggaaacttgaaaaaaattgacatactcattagcatgcttataccatattgcatgtttatctgcactacactatactggt

SEQ ID NO: 243745 - DNA, 290 bp, Gossypium hirsutum
ctttccgggcatatagatagcacttcagaaaatgctcgaaaggtggacgaggaagagaaagcagctgatgaattaagtgaagactctagagaacctgctagtaaagcaactggatcagaacccgaagaggctgaagaaagtgatcatgttgagagtaaatctccaatcttgaaaaaaacatcgaaagggtcttcctcaactttggatgttgcagattcccgggatttctgatgatgagccccttagcaagtggaagcataaggtcggaaaatccggttccaagaaactga

SEQ ID NO: 243746 - DNA, 305 bp, Gossypium hirsutum
  unsure (1)..(305): unsure at all n locations
gcagtaaccaacattttcttttgggccagtatatgttgtgttacgtagtaatgtgatgatgtatcgatgtttaagacttcgcatcagttgtaaccaagtaaaaaagtatattatattggtgtctaagtaggtgtctttctggcttgatttgatttaagttaataatattttacattagatttcttattttgaattcaattcaagttattttttnnagaaaaaaaacatgatgaatccaagctcttgtgttatatgatggatcaaaactatgttgctatgtttactggtccttgctggcctatgtg

SEQ ID NO: 243747 - DNA, 368 bp, Gossypium hirsutum
ccttaaagactcaatttttaatcaaagcgcggtttgcagatgaggatgtagtggtagcacagccgcaaaatgtgagatttgctccaccacctgcagaggaacttcacagggattaatctgccgtatggaaactagaccaacgaagtgtaccttggtggggttgatctctgcttggacacgacaattgcctaaagaagtgtagtttgccccttcgtaaaagcgttcaagcttacattgctaatcatgaaaacaatatatcttgattcgcattagaagttagctattgtatatatgacctactacagttatgctgatttggagatttgagttttgtaattttatacctacactgagtgctttttgttggt

SEQ ID NO: 243748 - DNA, 439 bp, Gossypium hirsutum
  unsure (1)..(439): unsure at all n locations
gtaaaccccaaatccaggcccagttgaatactttgaacgcatgcaatagcctccgccgcgaacaccgatggtacattttcatttaactcaaccgtgaaactcaatacccgccccatagaatctctgattgcaatccctgagcaagatttgttttcatgttttctgtatgctgcatcaaagtttattttcacaaatgggttctccgatagctgccacttttccaattccattctttgaacatgtatggaattattcaacccatctagtttataaacataattcctaataaaatctgttatggctaaagctattttcctttgcccctcatgcaccaatttgtttcattcagcccatatttcccataaagcatagacaaaaagacaacattgaatggtggaatngttctaaaaaaaccaggacaatcatgcagagcatgttc

SEQ ID NO: 243749 - DNA, 319 bp, Gossypium hirsutum
  unsure (1)..(319): unsure at all n locations
cggacgcgtgggtgtgaatctactattcacgtagccatgaaaggggtgatatagaattattttgggggtgctttttgtgcatggttgtgatgtaattgaactacatatcttttgttaatttcatctttctttagaggttatggtttcaaattagttttcaagggtttcaaatgcaaaccgagaaaacagtcatgatgcgtgattgaaatgtactttttagccactttttgccattgaaataaactggatttcatgaaccgnnnantnaanaaaaataatataaaaaaaatattatttaaaattaaaaaaaattttataa

SEQ ID NO: 243750 - DNA, 368 bp, Gossypium hirsutum
atctgaactccaataaaagcgaggtgtcttccgtggagggcacatcttgaaattttggaagcaattagatatacatgcagtggtcttattgcttaaaagccagaaaaataggtttgatcagcctttttccaacagtagcatagtatcggaattacttctttttagctcagaaattacatcttaatagtgtgtatagacttcgaagtaatagcaggaccttagggaggttgttaaaactgaagcaaggtagagtgttgtttaagtgcatttacagttcttttgcacatttttatctgagggaccgatagttaatccgcatggacgtgtttctttgcacttaaatactaagataggagaaaaaactggag

SEQ ID NO: 243751 - DNA, 265 bp, Gossypium hirsutum
aaatcttaaccccttggccaggttggccacccgacctgggttaaaagaaaccaattctgtcaaggccaaaaactgatagtagtatagaaatactttctattaagcattagttctttggcaagaatgattcatctgttcttctgggattccctttgttgattgatttacattgagtaatgatggaacgggaatgaagtaaagaagcacggaggattttgaggatttatttatctccaaataaagctttgtaactttgtttgggcta

SEQ ID NO: 243752 - DNA, 405 bp, Gossypium hirsutum
ccgaaagtaaaaaaaaatgaagaaaaaagaaaaaaaatacaaaaagctgctccttttttgtctctattttgctgttgtctgcttgtctgcttgcaggaacgtggcggtgtacggaggtggtacgattgtgtcgacgtggaggcgcgaacgatgttagtgctggaagatgctgaaggctgctgcagcgccaagcgaatggggctagggttagggtttccaagaaactttcaaaggattaggcctatcgggctctattagttgttgggccattgagtattgagctaggattaattcggttttgagttttaaatctgagtttgggtttgaaattgggatatgtaacttgtacttgatgacatttaatcttggttaatttttatttattttttaaattttagtttttag

SEQ ID NO: 243753 - DNA, 218 bp, Gossypium hirsutum
  unsure (1)..(218): unsure at all n locations
aaaaaggattttcttccaatattttccgaatggatggaaggcttgtaatgatgttaaattccccttttttcctgcttcatttctactttgtagtcgtcattgatggattgtattcatgaaaatctggtaaatttcttccaccaatctctatgcctgttagcatttaatggtactctcaagcaatggaatattgatagtttgtgcccgannaaanaata

SEQ ID NO: 243754 - DNA, 341 bp, Gossypium hirsutum
  unsure (1)..(341): unsure at all n locations
tttggatttttttggggccggaattcccccccccccccgggggggcattcaatgtcggtaaataaaataggttggggcacatggctgccctcgatggagtaattaattggcgttaagtcatcatctgtatggaagctttgtgaagctaagttgcctggatttaattaataatttcttcccagtcaacataacgggttgattgctagtttaggatttagttaaagaacatgatgattccaagctgttgtatgatatgatggatcanaactatatttatatgtttactggttattccaggcctatgtggccatgtcaattataacatccaactcttgaagtcc

SEQ ID NO: 243755 - DNA, 276 bp, Gossypium hirsutum
agggttgggggtggctttttttggggaacgaaacctgtttcggcaattacattaaaagctggattctgacctttggctgtaccgggaagttttaaaagcctagatttctagttaggtgcaatggatatatatcctgttaactttgaactcgcagtaatatgttttatgtactcggtttcccaacttttttgttttttatgtctgatttgatttcattagcttaaaaaaaaaatgtaaccagttaataccaagcctataaaaaaatggaaaatataa

SEQ ID NO: 243756 - DNA, 420 bp, Gossypium hirsutum
caacaatataccccccaaaatgaaagcattattagtgatggtatgcattctcctggcttccaatctctttatccctacttcaaccatggctcgacaactggtggcgaaggacatcaatgatcgaccagtgtttaacactcctaggaggaataaacctgctgtaccatgtggccgtggaatgccttataaatcctgcatacaacctcccacgaagcagccctgtatacccacgtataatcgacactgccattaatttccacctcaaccttgaatgtgctggagaagctaaaggaataggatccattggcgaatttgtaatggaatatatataaacatatgcagataataaatgagttggcaaaccagatcatgaagttgcattagttgaccatgatttgtgttcttttaagactatgtact

SEQ ID NO: 243757 - DNA, 362 bp, Gossypium hirsutum
ggggtgttctggtttttaaccttagttaaggcaccattggaggtggttagtttcagtccagttgaaaagagcatctgggtttgttctgtaatggaagctttgttggctgaaactttggttcttgctggaaaatctcttgcttgccttctcatgctgacaggatcgatgctgaatgataagaatgcatctcttaaattgactgcagtggatgagaggtttccatttgatgaacttctaaaaatggaacgtcctggtccagaaaacaaagatgctagtgatacagaggatgatgatgatgatgaagatgaagacgaggacaatgcagatgatcaagatgatgatggaggtgatgaagatttttc

SEQ ID NO: 243758 - DNA, 338 bp, Gossypium hirsutum
ggtacaaaggacggacaggtggtttttttcatggagagggatatagggaggtttgacgctatttaaatggttcacgccacccccaaggatatggctagggacatggctatggagagggtcatggcatcggtggggacaattaaaatctaacttcgtgggcatgcccgcttttaaagagaaaaaaaatatattatccataaataatatgaaggttgctatgtttatttacccccgcgttaattgcattcgagctaattgggatgattcatactggggttccttattaactttaaatttgtcagggtcccccaatctgcttctgttgtttttattctaaa

SEQ ID NO: 243759 - DNA, 273 bp, Gossypium hirsutum
ggggcaaggcttcccccaacggttaggtggacccgggggggccggatttgggggtcgtccactttttgaaggtgcggcatacaacattacaattacagttttatgagtctgagatggccaacattgacacgtgagatttatgttattagagagggatggtggaacgtgttatatatgaaataatgagagttagcaactggcatcgaatattccattataagaattcatcaacttgcatcgcatatttcattaaaaaaaagcagacggactaaa

SEQ ID NO: 243760 - DNA, 204 bp, Gossypium hirsutum
gataatcctccaaacacatttaacagtatttcataaggtctcaattacttgaaaaagcggcgattttataatatcctgcttcctcaccttactaaataaacttctatcaatcaaataatgtcatattcactcatctacgggataaagaaaattcacaaagtcatataatttaaaatacatatgtgataactaaatttgattaat

SEQ ID NO: 243761 - DNA, 188 bp, Gossypium hirsutum
agggctcctcgttgcgactcaaattgaaccctaaagccatggttattaccatgaaagaccgaagcaagaaccggaagccgctgcagaaaggcaaggaaccttagcatcgaaacgattcaagcggtgcagtcgttgaagcgagccaaccgcaacgtttccaacacttcgctctcggaaattggagcgcg

SEQ ID NO: 243762 - DNA, 441 bp, Gossypium hirsutum
gaaaaaaaaagttctgatgaacttgaatgatgaatagatggcaaaatcgttgaagccagcgtcctccgatgaagaactgtacaatggttcgagttcatcgaagaggagcgaatgaacgctcatgtcaacggcgaagaagatgatgaaagaggagatgattggaaagctaaaagaattgggcaactctgttctgggtcgttttgggatgagtattgacaacttcaaagctgtcaaagatccaaacactggctcttattctatatcattccagaattgacatcgtcactacccacaagcaacatgtgagagaaaaatgaaggcagcctttatcatgacacaagatacgttagcttggaatttttttatgctgaatatttctttgcaagtagactgtgcaatctgtgtcatgttcatatattttctcgatattctagtcgcttt

SEQ ID NO: 243763 - DNA, 393 bp, Gossypium hirsutum
acgcccacacgttctaaaaaaacccatcgttttacatgaggatggtatttcttctattacgatggaggttgaagcaaatgggaaggtattcaagcacacatccacagcttgtgataagaagatggccaagaaactggctttcaaagaagttttgaagtctctaaagggagccaatttcagctagattttgcatttgacttgagcggagattgaacatattgccttgcagtatctttaacaaagcttgaaaacatatgtgactgatgttcattaaattaactataattatgacacacgtaagtgctcttattattaaacaatagtataattatggttactacaggaatatcgaattggcgaaggttgaaaatatcaataactattattatttta

SEQ ID NO: 243764 - DNA, 191 bp, Gossypium hirsutum
cacgttgggttttaacaaagggaaccaaatggtttttgaattttgaacaaaaaacccgggggccaaccagttggggggactggttttttcttccaccttttgagggaaataataccactgaggatggcagggatactgcaagtcgttcatccgaagacttgaggaagtcgagattgggatttccgcagggc

SEQ ID NO: 243765 - DNA, 147 bp, Gossypium hirsutum
gacaagaataaacgattcgcatagctgtggtcaaatgtctagttgaatgtgtctcaggccctttagatatgacaggtgttcaccagacccaaagaagagatggtgcttcgtataagtgactgccctaattgctgagcgcagttgcgc

SEQ ID NO: 243766 - DNA, 185 bp, Gossypium hirsutum
acgctcgtatcatctataaaagccgactttattaagcatttggataaaactatcggggggaggtttactaccatagcacctaaacttaactatattatacagtatatgctttatagtataacaaaactaacagagtctgctaaggtcagagatagttatgatagaattttccaatccaactacta

SEQ ID NO: 243767 - DNA, 137 bp, Gossypium hirsutum
ggggtgcgcgggcaagcaacgtcatatctcttctatagcgtcacttaaatacattttactggccggcggtctacaacttgttgtttgggaaaaccccgatatatctcaacttattttcacttgtaaacattctccat

SEQ ID NO: 243768 - DNA, 373 bp, Gossypium hirsutum
  unsure (1)..(373): unsure at all n locations
ctgattgcatttcccttctccatttggcaccaaattcccaggaagcgaagttatttgaaggatatcaaaagctgacagaaaggaaccccataatggccactaccaccccatctaccaccgggaagtccacaggcaatggtgcatagaagagtgggggaggaaaaggaaatgaaatggctttgggagcttctttatgggttttcactatgcttcttcttaactttggtgtggaatacacaactggaatttaccaccaactgctattattatatttggtaaacacaggtccacgaaaaaaataaacttatggagtttaaatataggttatatcacaaatcacacccttcttttntntaaaaaaaaacactcactg

SEQ ID NO: 243769 - DNA, 413 bp, Gossypium hirsutum
gggcgacccacgcgtacgcccacgcgttctaaaagagagaagctctttttttgaaagttatgaagaatatcgacaagagcttacttgacgaccttgattcagattaatgagaacaaatgtacgacttataagtgcagtacttgactatagctaaaaatttgagggttgatattgtttgtctagtaatttgttaaataaataaaaagagagaattatacttaacatattgacaatgttactgaacataactaattaaagttaactaaccacgatgacaatagtcttgctgcattccatttatatagctatgatttatgtataatccttgtgagcggcattcaacttttatttattgcatcatgtagtacaagttggtaaacagtttaattaatttaatgaactttttaacctgt

SEQ ID NO: 243770 - DNA, 371 bp, Gossypium hirsutum
gcgagatgttacccaatacactaattttggctggaaggttgattgagctttgcatggattcatgcccctttggggccgaaaaggagaagtcatgaaatctttatcttgatgttgctacaaaaaaaaaaaaaaaaaaaaaaaaaaaaaaaaaaaaaaaataagattaaaataaaaaaaaaaaaaaaaaaaaaaaaaaaaaaacaaaaaaaacattttttttattacaaaaaaaaaggaaaaaaaaacataaacaaaaagaaaatgaaacgggggcgccccttttatggaaacaattttaaaatccggggatttaggagttgaaatttttttattgtggccactaaaatcaaagtaactgcccgtttttaaaa

SEQ ID NO: 243771 - DNA, 280 bp, Gossypium hirsutum
cccacgcgttcgctcaagttgtaatggacatgatattaatatatagctaacatataatgggctggtttccatatgtcggctgtggctgcttatttaaaatggaggtccttgttgttattgattttaccaaaaaacgtagaaatcttttttaaatttccaaattgaagatagcaacaactttatcttctctttggctttattgggaattcacttttaaaaaaaaaaaaaaaagctgaatatttaaaaaaaaaaaaattatttctcgctcctttatataaat

SEQ ID NO: 243772 - DNA, 344 bp, Gossypium hirsutum
ctagaatctagtgtcggcttcggcatcatcaaatagcactcgcatggttgcctcagctagccacgacaagtgtgtgaagctctggaaatgattttactccctgcattttatccactctactgttaaaaaggtatagttccttgcactaaaatatataacagggttttctgacattgttttgtcctaagctcatccaaactattttgaagcagcaaaaaaaaaataaaaaaaatggtggtgccgcttaggggccccgggggggggggggttagttttttccaccaaagaaaaaaaatggtaaacctcttggccaaaccagtcaactaagacatcttttttttttt

SEQ ID NO: 243773 - DNA, 425 bp, Gossypium hirsutum
ctgacattggctttgaagttgacaaattccataaaagaaagaaacaagatggagggttcaatgcattttatgacaatgagccagggcgaagtgggtcaaatagtaagcgttctagcaagggtgtacttgcccctgctaattggaaaagcagtaccaaggagaaagagtggtcggaattagagtcaagagatgcggagattcagagttcaacacaagaagctgttattgataataatgaaagcaaggttaaaaaggttaagctcaaggttggtggagttacgcgcacaattcatgcaaactcgacagttaatggattgccagggactgggtcctatgcaaggaagaacagtctccagggaagtagcaatgatgggcactcacctccaggtaggagtggtttgcaaggtgtaccctggaaagatttc

SEQ ID NO: 243774 - DNA, 257 bp, Gossypium hirsutum
acgccacgcgttcgatagttgtcgaccgcgagctgcgcccttgatttttttttttccgttgggtgatggccgacaaaaagaaaaaatgaaatcacctatcatatattataaggagggacatatgttcttgcaaaagcacttttgggttttgaaaaagaggccccagattgattttgaactttgtgcgatgacgacgaaggaatttaccctacgaactattacaagaataatgagggttattcttttgaagaactcta

SEQ ID NO: 243775 - DNA, 190 bp, Gossypium hirsutum
acgcccacacgttctaaagaaaccatccacttattgacttgtttcatgaaaaacaacatttacggggagccgtccaataaatccatcatccccacaatcatctcttaatgaggaaacgcttagccaatatcagtacatattttaactgcgatgtttacagctcttaacagtaaccatataaaagatctgt

SEQ ID NO: 243776 - DNA, 434 bp, Gossypium hirsutum
aacgctaaggagatacgtgagtctgcccacacgcttttttatcccattatcataagacaccagatacgagggcgcggggccttcatgatctgcagcacatcctcgtttatactcgtgctggcgaagatgtcattactccacaagaactaatggctgctaatatctaatcattggaaaacgagcagcttctctacgttctatatgagtgtaagaaggatctcactgctcccggagcgataggaacagcaccgactgactacctggatattgatactcccgttgggaagacgaatgaaagccaacatcgtgatgcatcattagaggaatgcaccatctcggtttgcaaacctcactggatgcatgctaggagctgcagacgagcctaactttctggattctcactggaatggaccaaggttctgtttacggaatga

SEQ ID NO: 243777 - DNA, 380 bp, Gossypium hirsutum
ctcttttcctttgttttgtaatccaaagacttttaaggcatgcaagtatgttaattgaagttgtttaagctatgtttattatttcataggtagtagtacagaaccattaggttcattttggttgcaatcaaagttaataagcttaactgcagacttgaggcagtgagcaattacggctacattttctaagttagcttaatgactgatccagacttgtgaattgccatttaaattcagacagatttctgatactctgctgttgtttgaaggagtttaccttctgtaaattgttgttagtgctgtttttgcaattcagaaattgtttttgttgttagtgagtagaagatgaaaggggaaattgttgcccgattttgatattt

SEQ ID NO: 243778 - DNA, 243 bp, Gossypium hirsutum
aacgctcacaccttctatatatttcaaccaatcttttttttctcatcttatttaaaaaaaaagggcggtgtttttttaaatgaatctatttccactattatgtgacctctcgcccttatactcccatgacaaatttaaggctttcatcaacctttattctcataaaaaggagcacaaccctctacaaaatatctagacaccaaaaaaccttgtacaaaattcttaacatacataaaatttcat

SEQ ID NO: 243779 - DNA, 232 bp, Gossypium hirsutum
gctaattattccagccaacaaagtaaaccattagagaaaatattttcttttgtaaaaaggtgctgaacagaggaaattttagtatgcacctgtttagagatggcttttgtatgcctttttggacgacattagtgtcgcttatctgtttgttctctgtttcttttgtgtttttgcttgtgacacctataggctttgcttcgggaacatttatattcatattaaatcgtctttt

SEQ ID NO: 243780 - DNA, 356 bp, Gossypium hirsutum
aacggttgaatcatcaataaataacattcttttttttaagatattactaaaattttaatggcggttattttaatacgttttaattataataaaaatattttagttaggagcaagttaaatagatataaaagttttgatcttattttttaaaatagattaatatattttttattgcaggtgcatggaatgaatgtgaaggctcgtcaaaatatatgtatcatcatatatttttatctgcggagaaaatgaaaagaaaaaaaaaaagttaaaaaaaggactgtctgaagtgtatagtattaatagcgcatgatttattaaacaagctatgaatgtactaatgaaacaaaataaattat

SEQ ID NO: 243781 - DNA, 428 bp, Gossypium hirsutum
acgcccacgcgttctggccgaccgatggttacccacgactgttcctctgcctctcctttcaaccgctagaacagtcaatcgaggcttcattggaccaaggggatccgcgggtcttgcttaccagccccaaatcgccactgtgtttagatggtggcggaacacgcgggcgactcgaaagctttggaacgcacaaaatttctccactttcttttggttctttttgatgatcaaataataaagatatcgagtcaattaaattctgaagagcagcgaattcataacagagaagggataattacctactctgtattctcgagtgactgcgattatctccgtgtccgcattgcctattttgtattcgtacctttacaacgattaaaagcttggcttttatcgccgataaaagagagaaaaagaaattgaaaata

SEQ ID NO: 243782 - DNA, 359 bp, Gossypium hirsutum
acgctactatgaggaaaatgtttcgctggagaggatatgtcgcaggcctattacttaaaagctgaagttgtgcagaaacaaattgacgaaattaaccgtaaacaactcttcaatgagttggtgtttacatttttcgcaaacaagagatgtcaggggccttcatccaagcttcttaaaacggcattttcttattgagggagtgatgtagttcgtaaggaggaatacgtctctcctttgatgagcaatttgtaagtttaatgtaagccttcattgaagtctatgatgaaaagaagaaaataacaatttcttggtacagaaaaaaaaaaatatttgtttaaaaaaaaaataacacccccctt

SEQ ID NO: 243783 - DNA, 414 bp, Gossypium hirsutum
acgctggtattctatgcatcatactaactgttttccacttgtatatatgtgtaattaccaccggaagaaaaactaatatgtgcacgtgatgtctactgacccgctacgaaccgtgtgcgctgtctgttatttataaaaaacatactgcaccgcactaagtgtttcttgcgcgtcacgtcagctccgaaatattaccctacactttaaacaaacctactatcgccacgaaatctcctgtattattactatggaaactggtattggtatctgagtcaattacgattccgtgatctaacggttccatagattggactcagaaactcatatcctatcatttccacaaaatcaacaacaccttgacctctcccttgattcacatcaaaggctgtctcatatatttgctccacctcaacc

SEQ ID NO: 243784 - DNA, 390 bp, Gossypium hirsutum
acgtacatatcatagctactcacaaccgagaatggaccccatttttgcaaactcagcaccctggctgtacccaccatacaatctgtgtgttcctcagtctaatgtatacaacgataccagtcgtgttcagaatcaaagtcatcctgcaacatataatgggtccacaaatggggaaggaccattcaaggtaaatgggggagataagtcttattacaatgagcttgagagcctacttttggataaccagtgagctcctggagggtctcttactgcaggacttaatgcaccatctcctcctgatcatatacctctagaaactggtatgcttttctttgatatctaaagctcttgggatcgtctaactcgcgcatagagcagattagcatttgc

SEQ ID NO: 243785 - DNA, 227 bp, Gossypium hirsutum
aaaacccggactcgacccacacgtaacctcatatcatatcaaccctccacccttttttttccctattaaaacaaccataacgggcggcttaaataaaccatacatcctccccttacctccatacaatcttccaaacttatcctctaacttccaaaatcaaccaacaacttcttccccacttaattcacattttccttacctacccattcaatataaatccttatact

SEQ ID NO: 243786 - DNA, 398 bp, Gossypium hirsutum
gaaccccgggtgcgacgccacgcgtacggacccaccctttcgatcggtgctctttattgttgccgcacatgcatgctcacaaatggagcctgcgagcaaggagtaaatgtctacaaacctcgcttctatcaggaatgcaggaaaggctgatttatgtgccttgatttgctacttacaattttcattactgtctctggaatatgttcactgcagaggttcaatttgctgcagactttcgccacgcataaaggattctgagagctggtaagcactaatcaagttagttcgatagatttatagtcacaagctgtcagatcctcccttcggatgtttgtgggacaacatctacaccattgagaggctatacgagctgaaaccttatgtagaagtgatctggc

SEQ ID NO: 243787 - DNA, 376 bp, Gossypium hirsutum
cgtacgctattatactttatattacccaaacttaattttttataaaataaagattgagaactacagggggaaaggtggaagttgcaataatacaacactcttcattgctttacgtttccttgcctgataaactgtcacaatggccacaattgcttgtcccaccccgaacactttgtacttcacattttttcctggacaactatacttgtgccgcactttcattaacccccttgtcaccaccactcttctaccaattgtaactacagtctaagcctaaaacgcagacgtagtaacatgaccccgtaccattggcaaacattggctcaggcactgtctccgccatacagaaatgcaacgttacttttgtcaattactg

SEQ ID NO: 243788 - DNA, 415 bp, Gossypium hirsutum
gcaaactctagacccctttttagcctcaacatcgatccaccatcacgacggcggtcagcagttgcaaggcctcgaaaagtcaattcttaaccttgaggttccctctagacttcgatttcaacgaagtaaaaaagaaccaacggcctattcgcaaggtcagatcacactttttcttttacttttgcttttaagatgtagataaaaaagcttgatggaaatagattaaaaaaaaacagagaattaaaaggaaaaaggaaaaaatcaccttttgaaatcgtttttgaatttttctattcagtatgcgtatagtgtgcatgcgtaagttttttttaggtacattcgacggctttttatagccggatttacagagtaaataaaaataaaattacattttatttgctgtaaattctgttat

SEQ ID NO: 243789 - DNA, 385 bp, Gossypium hirsutum
cccacgcgttctaccacgcgtgcgctcactctttctgaaaaccataaccgtgtgcgaactggtagaatgcgttccacttgtactgatctttttggtccaatatctacccgcgatgacctggtgagaatggcttctgaggccaaaaagtcggcacatgaagaggtgcgcaagatggtactgaaaatggaggctatggaggaaaaatatgctcgtatggaaaaccatataactagaatgacttcaagcatggagaagtgtctcaagaaggtgggtgagatcttcaaatactttgggtctcagaacaggctgcagaaccagaagaggatgatgcttaatggacttctttacccaccattatgctgaaagtggctttatgctgattcta

SEQ ID NO: 243790 - DNA, 411 bp, Gossypium hirsutum
acgctgtaggcctctcaaccaaccgaccgtcatggatagctttcctatacctttcattgaagaactgcttgatgaactaggccaggaaaatttcttctctaagggtccgtttgattgccagtaaaatgttttccgtaaaatgatttttggaaaatgttttatttttctgtaaaatgatttactgaaaagtattttctggtgtttgattgaatctgtgtaaaatattttctgctgtttgacagatttcctgaaaatattttccggaaaagttgtttttacatatagtaatatatattaataaatttttatattttaaattatttttacatatattgcaatgatttatttataataatattcaattattaagctgcaatattgatcgttataaattgaaaaaaaactaatatc

SEQ ID NO: 243791 - DNA, 414 bp, Gossypium hirsutum
acgctcaaatcctctgaagcagccaccctattatgcatccacgaggcatgcatatgggggctgagtccacagattggagaattgctctagatgatagaaccggctttgaattaacaggaaaaacaggtcatggagctcatcaatctccggaaaacggggactacgatcggatcactggatagacatttgtctcacggttgaaagcactgttttccccactttctcttttttttttttcttacgaagacctaattgatgtgcaactccatggcccttccttctttcacagagtgtaacatgatatacatgttcaggtcggctcgttactattatggtaggctctatttggagtacggtgggaaagtccaattgtaaaccgacatccaataacgtgcgattcgtatcaccgtgcta

SEQ ID NO: 243792 - DNA, 415 bp, Gossypium hirsutum
acgcccacacgttctgtatccttcgattttgatctttggccattcatgttcaaatcctattgggactgcttttcgacatgcgattgctttagctgcaaaggcggaagttaccccatgatggatctcagagcaagaaagtaagactaccccttcttcatttctgatcactatacctgaagctgattggtggtgagtcccatcatatgcaccgtcaaaattaatttttatgaactcactagatagcccaaagaccacaacagaagaggtggttctggcttggagtaaactgatcaaagatccaagtaatccgctgtacaaaatccatgttaggatccataaaaatattctgaatttttaaaagtgtccacagttccactgtgacaggacattcacgaaaaatacggtcgattgtttc

SEQ ID NO: 243793 - DNA, 247 bp, Gossypium hirsutum
aacgctcggatagaagtctatcattctttcttttatatttgctactcagcacactatgctggcggatttacattacaaatattataatctattgaaacaatactctgattaaatataagaatactttagctctgtatcttatatttaacactaaaatgttcctgaatggaaatagatcctttaatcttaaatcgcacaaaatgttgtgtaaaaaaaaaaaaaaaaacaggcaagtccatctattatt

SEQ ID NO: 243794 - DNA, 378 bp, Gossypium hirsutum
cggacgcgtggttccgagcacgcattgatagcttctacttttgcatttacattgataattgagtttgctcttgtttaaattgtttgtactctttatctcttactgaagtctggtaaattttgttccttttaaatagatttgacatcgttccttgttataaaaaggaaaaagaaatatcaccttttattgttcatgtgcatgtacgtgatgtgtttgtttgcaggcttacatgcatatgttcgcatgtccgtatacatatctctgctgctgtgtcaccatactcatgtttcaaatagcatttatttaacataaccaattaccagcatctcgtcgtaaaataaacagtttaatgttgtttgtgggggggggttacaattc

SEQ ID NO: 243795 - DNA, 386 bp, Gossypium hirsutum
  unsure (1)..(386): unsure at all n locations
ggcgaaaaagtgatcgggaaaaaaagttttattttgcggtggtggtgccaccgttttttgtttgttaattttctggggaaaacaaaaatggaaaatcggaactctttgtatagagatttgtttgtcattttgtctcgtatattatctctttactttctttaatcaatgtaatatatttcttcaaaaaaaaaaaaaaaaaaaaaaacaaaaaaaaaaaaaaaaaaaataacataaaaaaaaaaaaaaaaanaantttttaaataaatcaaaaaaaataaaaaaaaataatttttcttacaaacccactnnnngggggtgttttttaagaaatccattttttcggccggggggatgatcaattaaattttttttttatgggcccaaaa

SEQ ID NO: 243796 - DNA, 295 bp, Gossypium hirsutum
aatccggtcgccactcgaaaatacccacgagtcatattttgcttggactagccgggggcttgttattattttcaatttatgacttttctattaatattttactcttttgagagcttttgtcaaagtgacccttattttgcattcccaggaaaaaatgctcatacattagtgagaaattgttatcgtaaattaagattgtttaccaccaatatttgatcactgacaatacatccttctggtaaagtaactaattaaggtaaaacaattttagatcaactaccaatgacaattttac

SEQ ID NO: 243797 - DNA, 346 bp, Gossypium hirsutum
ggggcccacgcgtcccaagaccctgaggataacgattaggctcacttcttttgatgacgacgactatcattatggggggggggaggatgaagaggatgttgaataccaacaaaatgaagatgaggaagaagaagatgaagatgaggaagccctgcagccacccatgaaacggaagaagttaattgttaggaaataagtggaagcctcctccattaaaaaaaacccttttggtttaggtaaactggttcatctaacactatgtgatgttttatttatgcattgaggaggatgctgtttagggttaaatgtcttacgcattatatatcactccactttatcttacctt

SEQ ID NO: 243798 - DNA, 241 bp, Gossypium hirsutum
gatcatactcttaactaggggggggatctatttgagtacaaaactatcacctttattctcatgagacttaaatgaggacaatgtccaaaaccgaaaaaaagcatcaatttttcttgtcaaattagtgacttggggggattcaccattacctagagcttcaattgagtttggaaaaatcgtgaatccttctaggattaactccccaataacgtataaattgaatctaaattcaactttttta

SEQ ID NO: 243799 - DNA, 406 bp, Gossypium hirsutum
acgcccacgcgttctgacccacgcgtcctaaattgaatgaattttaagttagaattgaaaaagggattaaattgttaaagaaactatgagttttatgttttagggactaaattgaggaaaattcgaaattgggaaaatatgctgaaattttgatagttaaatttgagtttggatggaatttgaatagaaatagagtgtgaattgagttaggaaaataagtgaatttagttaggattaaattgagaataatgaagaaattgaatagaaattcaattatttatcataattagtgctgaaattaatagtataaattattattttcgtagctaacaaagaacccgaggcaccaacattaaaggtaaaggagaagattatcgacgagtaaactctagaaaatcacggtcga

SEQ ID NO: 243800 - DNA, 296 bp, Gossypium hirsutum
agcgtacacgctcacacgttctcaaacacccgtccttattttttttttttaattaataaaatagggaaaggggtcaaattgcgatcaaaatattcacctttattacatacttaatcctcttaagctcacttctcaattaacatcaaatccttttctctaccttttttccaataatcatttaacttaaatgaaatccactataaatgaaaattaataataacaactctcgactacttttcatacttaatcaaatatttacccaaatcccccctatattgaataaaatcattttttta

SEQ ID NO: 243801 - DNA, 353 bp, Gossypium hirsutum
  unsure (1)..(353): unsure at all n locations
caattctgctgcatctgtttccggttttaagtagatttcagtccaactcctaacgaagtttctgcacatttttccccttgaatcaaagggcaacagagatcgaaaaagcctcttgtctgagatgcttgttcactggaaccttgcaattttgatatgttgctgactagattattgcatggttcaagtggtctcttcccgaatgatccgaaaaagctcgagattatttattttcagttggatttttgtatcgtcacttgtaagataattntcaagatttatggttgatggttagaaacatttgttgacattactgctatttatgatcatgcttcaatcacaagacacaacatgtc

SEQ ID NO: 243802 - DNA, 444 bp, Gossypium hirsutum
tgtggatgaagaacagccattatgcattagtggcgatagtggaggtggcatatttttatggagcattaatatccctttcggacaagatccgttaaagaaatggtacgaggaaaaggattggcgctatagtggaatccatgctttggcagtttcagaaaatggctatttatacactggaagtggagataaattgattaaagaatggtcattgcgggatggcaccctgtcaggcactatgactggccataaatcggtagtttctgccgtagcagtgaataatggagttctttacagcgggagttgggatggaactgttcgattatggagtctaagtgatcatagtcttttgactgttttaggggaaggcatgctgagatctgtgtccactgtcttgtctcttgcagctgaccagcatacacttattgctacttacgaaaatggctc

SEQ ID NO: 243803 - DNA, 478 bp, Gossypium hirsutum
  unsure (1)..(478): unsure at all n locations
gcgacgccacagcgtaacgcaaggcaattcctgtatggtcagcgactaatctttgtattttctcggaagttggaagggtaaagcagtgagcgcgtatcagtctccttcaagcatatacctacgagatnngagaatggctgccctaagtnagaagaaaccggaattttgtgaagtacacattggtgagctgcaatggcaaggccgagacanccattgagagaaatttnagcttcggcttttgaagagcnaaaganggagatggagaaanagactatgcagacacacgtgaaaggagatggatttgcttaaaagaannaaactagctggtattagaaacttgcacaagaaagaaaggccaacaacatatctaacatagttcactttcggataatgtaaagaactcgaacccatgacgtgnngctttccttataaagcagttctaagatgaaatactcaaaaagggagcttgcactcgact

SEQ ID NO: 243804 - DNA, 392 bp, Gossypium hirsutum
cattcatggatcagcacgaacaagattaattgatattcatcatgctatatttttcttatttcatggtgaaggcaggctttgtaatttatgatttgagatgaacagtgcccagcatgaagttagtcataggtactgcacgatcaatgaatgaaaaatatgccaaggctggagctggagaaagcagttgtagctatcaatggtattatcagaatgtgttatatttcctcaacaatgtctaatttgagtttatagaagcaataaactcatgtagtaaacagtggatgtagtaaacccatttcagtctaatttcagagggtttttgaatttcaaaaaataaaaaaaatatggcggggggcggttgattttaaaaataaaaaaaaaaaccccgcttt

SEQ ID NO: 243805 - DNA, 298 bp, Gossypium hirsutum
ggccgacccgcgcgtacgcccacgccttcgacaccacccactcatatttttaaggctttgatggtgagtctttaaagacgagggttctttgagctcgttcccagaggctgaacttctttccaagcggtgacacgagttcgatccttttagaaaccaaaacaaccggtggttgtggtgatgggtacgtcccttctaaagaaatcgagactctatctatgctatctgatgatccgggcgtggactttcaaacgacgcttgaacatatggtggagacacatggcatgaaagattgggaatg

SEQ ID NO: 243806 - DNA, 226 bp, Gossypium hirsutum
acgcccacgcgttcgagagcagacaccatctttttttataatttatacacgaacatgaggagacgcacttttttcatggtaactcactccactttaccacctacaaggcgttgataaccctatcaagaggagaattaacaccctagacactgcacaactttggatgttcactatcatacagaggccagattgatttgagaaaatatgaaagattttgctggataac

SEQ ID NO: 243807 - DNA, 182 bp, Gossypium hirsutum
caaacacgatgggaagaatcctgctatccattgcttttctctcgcaaaaaatactcagaggtgtttttaacgtgcgctgaatactatccctcatttctttcctacaaaccctaatgcgagcactgaagccatttaatcatgattgggcgaagtgcataagaaaactgaatacacttactttt

SEQ ID NO: 243808 - DNA, 395 bp, Gossypium hirsutum
  unsure (1)..(395): unsure at all n locations
acgttttgggaaaaattgtcaaaaaattcggggaggcgcaaaaagagcttggaggttgccgtatggaaacactagaaagggaaaggaaaaccctccgaatccaggaaatggaggctgtgatcggaactatttcggaatccatctctagcaatgaggcaagattgagtcgattctatgagaggtctatggtggatgggctactttgtctttgaccccccaactgttacgaactatcaccactcaactggaccaggctgcgtctggtgagcatcgtgagcacaagatngatataagtttctttgagctgaacgggctgaacccaagaccttatcgtacaagaagtcactatgcgattctagtgactcaccaacctacccactttttttatttattta

SEQ ID NO: 243809 - DNA, 224 bp, Gossypium hirsutum
tcggcgcggagaaagcgaagggttaaccattccaccaattggtggccttgggaatcgaccaacatcagatgtattgagctgcaggggtactgattgttaaggagagctgtgaatgttagaggtgtattttgattttgttgagatgttttgccatgttattgtgtgtttgcaaaatctgaagaatgctgttttgatataaaatccatgcttcctttcggcccccc

SEQ ID NO: 243810 - DNA, 432 bp, Gossypium hirsutum
acgctgacgcgctggataagcgttcggcctcacggatggacaaaagagtaaacacagtggcaaagctaggatataagaagtgtatagtgcccatgtcagctgaaaaatcattagcaactctggatttgggggagctggagattattggctgcaatgattcgaagggggtcatcaatacagcgatgactaaaaattgaacagagtttagcagcattgcttcacaaattatgtaaaatatattagatcggcatgcttaaaattgtgatttgtgagtgtaatgattcaccacgaacaaacaaggttgtgggtagaacatgaaaaattgttaatataattaacactaggttgtgttcttatgttgaaatcaaacttgttgagttgataatatctgctataaatctcccgaatgtaaagtgctagatgccctacttt

SEQ ID NO: 243811 - DNA, 456 bp, Gossypium hirsutum
  unsure (1)..(456): unsure at all n locations
acgcccacgcgttcgcgaagagaaagcatcttgaaatacaatttataggcgaagatgaagaagggacttcctgtatggtaactcattccactgtttcagcttcaggtcgtttcttacgtaataagaggagagttaacgccagaaacaccaggcaacaagggatgttaaatagcaaacagttttcagattgctttgagaaaatatggaagatcttcccggataatcagagggcttcttttacttacctcgattgcttgtggttttcatggtacatggatgaattgtttaaagaaaaagtgttggtatggatcagtaggaaacatattttcaccaagaagtatgttttcgttccgatattgcactggagacattggaatctattgatattctgcaactntgataaacctttgcaatctaaaactcaaacaacttgtatgttattgcttgattcaatgc

SEQ ID NO: 243812 - DNA, 333 bp, Gossypium hirsutum
  unsure (1)..(333): unsure at all n locations
agattaatgaaaataaatccagaaattttagattagcacaatagcattaaccaagtaagcggtgctcctaatatatgtaacaaaatactttatacactaattttcatgctagtagtgctggtcgtttcatttgtttagggtagtatctcttgctaaaagtaatgatggtacgtagtagagctaagagtgaggaagggatttgagaaggtgagcttcaagaattaacttgttgcaagtagagacgataaaagcagttgaacacggggattcanatgctactttagaaatttttgagtcgagaataataaatatcctagtttgtaaattactttt

SEQ ID NO: 243813 - DNA, 226 bp, Gossypium hirsutum
tgagcttttgcagaaatgctataagtaagaaaatgttttgaattaataaaaataattaccatgtttaaacggttcctcatatagtatctttaagagtttttataagcccttgaaaaatggaaaggagccctggtcattagctgtggaaaaaaaaagtgcataaatgtgcagaaatgcataattattacatgcatgcataattatgctattgctatctgtagatggg

SEQ ID NO: 243814 - DNA, 325 bp, Gossypium hirsutum
ctacatggggcccccgttagttttgttgtcaagaggggcatacaccccatctgggccggttaggcttcagacaccgtcggcgctaaaaatttcatgagtgcggcgaacacttacagagagaggagcccaaggttacctcgaccgcgctgaaggtaaacgggtccattcgaagatctaactaacatacatcacatggcccaagctacagtggctacagatcaacatgtggaccctacgactcaagacgcagctctgttgggcttagccatgtctgaaccaccgcgtggaccatacaggtcactcggttacctgcgatccaattttg

SEQ ID NO: 243815 - DNA, 403 bp, Gossypium hirsutum
agccttcgccttgatccttttaaaccggggatcaaaaatgctgggctggagtttcactgaattttacgcgggggacttttgattgtgagagggcatgtgtatgcaccacattatattcagaagtgatagcttacactctgtgcggagcctctaggactcaatgttgtaatctgtaatatgattataagtacatggttactgacacgcctccagattgctctcctctccacacctgaaagtcttcatgggtagactttgttagcggaatttacagtattttcctagcaatatctgttggaaatgtacggactatcaaatcactttttcatgttcgattatcttcgtcgattaagtcagacactaatctaatgttcgaaaaaaaacaaaatggagacggggaaaa

SEQ ID NO: 243816 - DNA, 209 bp, Gossypium hirsutum
ggcatgagcaacatccaagggggggaagcctgatggagtgcagatgctgaacagatatctgtgaagcgaaagtcctactgctcttcctcagttagctggggaaaaaatagtgagtgcttaaacatcagaggatagatcgacatggcctcttgtaaagtacgggactcgctgtgcatgctgtgatatgcataatcgattcactattgtac

SEQ ID NO: 243817 - DNA, 360 bp, Gossypium hirsutum
gacccacacgtaaccttacatcctctaaaaccaccgatcttttttttttctctttacattaacaacatgcagaggcggtctttatacaataactaactcccacttattatacaaatatcaatcaatccccaattatcatatactcttcatcttttacacatacatactgttttttttccaaaaacatcataacatacatctaaaatacctcatttaaataaatttactcattaattacactgttatattcatatttatacaatttttatcattatcatactcattttctccttatcaataacaacaaacttttattattcaatagtcaaaaaacttccactctaacaaacacctttttaa

SEQ ID NO: 243818 - DNA, 442 bp, Gossypium hirsutum
  unsure (1)..(442): unsure at all n locations
gccggaancccggtgcgaccacgcgtacgcgttctatactgtaacgcccgcgctcgcgattttaaagttttttgtaaaaatttctgttgatgggttgtaaagcataagctctaggattgtcaatcgatctctgtaatagtttgtgggcgcttatgaccgtaaattcacccgacatataaccttcccagaacagaaaatcttcgtgcggagtttgtgctacagggattctgaggattcttgcagcatctccttccgtaaaggagcaatttctgtacaatcatgaagactgtgccccaacattccacacccaaagcaaaaagtctggggctgtttcatacttgaatggaatctaaaatttatttcccaacaaactattcctaagatcgaatggcaaatctattagctttgttttacaaaccctcttcaaaaattttttcaaaaa

SEQ ID NO: 243819 - DNA, 227 bp, Gossypium hirsutum
  unsure (1)..(227): unsure at all n locations
tttaactttaattatttttgttgaaatatcacgctgaagttttatagtgtcaaacaagtctgtccaattgattatggattttgcggcaattaattttttgtagtgaaactgtaccgttttgaaaaattttaatacacagttatagtattttttgtccaaaanaaaaaaaaaaaaaaaaaaaaaaaaaaaaaaaaaaaaaaaaaaaaaaaaaaaaaaaaaaataaaaa

SEQ ID NO: 243820 - DNA, 369 bp, Gossypium hirsutum
  unsure (1)..(369): unsure at all n locations
aatggggggtctgagacttgagccattaaccacgactcgctttattttgagattgacaaaggatgggatgaaattccatgatatcctccatactgtcatttgaatcttcgaagggaaaagaaatttccatagatctctatggaaatttttcgttctggaaaaaaaaaaaaaaaagggggggggggataaagggaaatttccccccctcttgggaaaaaaaaaaaaaaaaggggggggggtaaaggggttaggttttaaggccccctttaaaaaaaaaaaaaaattnnnnnnnngggggcggggggccctttttaaaaaaaaaaatttttttcccccggaattttagacattatttttttttttgccccc

SEQ ID NO: 243821 - DNA, 323 bp, Gossypium hirsutum
accagatcggccatgacgtggacaggtggagtacttatatagccaatattaacgtggttgtgtgctttcaggaggtgaataatcagggaccgaatgtgtcaccgaaccacgagagtccttgcattgagaaactggcaccaataatgagatgggctattgcatggatcatataactaaaccagtagatgtaaaggaaccatactaaaagaacttgacgaggtgcctatgtaccaggcatgcaggcaggggtgcgccgagatcttcaagatgactccacatgataagcaagttatgatgtttacagctacactaagcagggaaat

SEQ ID NO: 243822 - DNA, 247 bp, Gossypium hirsutum
gacccacgcgtacgatcatatattccaaagcctccacacattttttttttatctaccacatattaaatctgggtgcctgttttttaaccaccatattcaccttcacaatgatataccaatccacgaatctccacatattttacattacacacccataaaaaacttttctcatacaaaatatctacatctaaccttatacaatctaatgaaacctatcttaattccatcttacaattttctcaaccct

SEQ ID NO: 243823 - DNA, 297 bp, Gossypium hirsutum
cacgcgttctataaaagctctgcaagccggatccatcatagctagactactaaaggatccttcggtcattttaccagatgcacacatccctctacaggccaaagagctaatgcacacatgttgcgattctaacatgaacaccaaggaagatcttagaattgttagcagtttgctttacaataagatcatcagttccatgatcgctcgcttgtatcatgctgcgaataccactagagtttgccacgatggcgtacaaagaaccggttatacagtcttagctgctatgatcgaggatat

SEQ ID NO: 243824 - DNA, 251 bp, Gossypium hirsutum
accactgttctcatgactggaagcatgagttgatagaagggtgcataggacgcaacacttgagttaagacgagatcttgtgcggagtgctgcggcgaacgattctgcgtaactgtaagcgtgtgtgacaccgactggcagttctgctgagcataccgcagtacatactgcgtactacgacctggtaaaagagcgggtcaaaactgacgagcatcttgctatgcatgtctgtctcactgcatgactaaaaag

SEQ ID NO: 243825 - DNA, 327 bp, Gossypium hirsutum
acctgaaggcggactcgcctggttttttatgatcaccaccaaacctttgtccttcgagggatgagcgataaatgaaaaagtaccacaggttgatgccgatgacgaatagtacagagacaagttcgacacctcagacaccgacgtatccgacggctcataaggagaacgtgtgtaagagtgcgttccataccggtagggacctacccaccataagtatacgttctgatgtaatagacaaggcacaacccaacttttctaccgattatgactggctttacaggggggagaccaacatcaagcatcgttgaaaaggtggcgactgacagg

SEQ ID NO: 243826 - DNA, 360 bp, Gossypium hirsutum
actcttgttactcttaaattggttttggttcattgtgaagctcttctagaattcctattattattgccaaaaaaaaaaaaaaaaaaaaaaaaaaaaaaaaaaaaaaaaaaaaaaataaaaaaaaaaaaaaaaaaaaaaaaaaaaaaatttaaaaaaattttttttaacaaaaaatatttaaaaaacaggggggggggggcaatttaaaaaaatcaaagataattccccgtccgtgggaggaaaaaatttttatttgggggccccaaaatcaaattaactggtcctctattaaaaactccttaattggaaaaacctttcatttccaaaaattaaattcctttggaaaaaatttttttttat

SEQ ID NO: 243827 - DNA, 295 bp, Gossypium hirsutum
tccggtaggcgtttctatgaaagccgtcaaacactagccaagcaacaactggagacgataatgtctgcgcgatggattatcagagaacgtattcgagattgctttaaagagcttagcttagttttatagcttagctgtttaaatggtatcaaataacatttgctgctctgctcattgagttatagacaaagaaatattaaaccaaaaaaaagctgttaattatgtcataaagtgaagagtgtttttgtgtgtgtttttagtattgtggaagtgagagtgaaaggtttttatcttg

SEQ ID NO: 243828 - DNA, 302 bp, Gossypium hirsutum
acccacacgtaccaaacgatcctatagagcactcacccttttttttttttccattatcaatcacaaaaaaaggcgagtgtttttaatacacaacctcccccatcaatccaacaatcattctctttaataaaaacacaccccaaaccaattactccttacaatattatctacctgccaaaacatcactcctccacacactaaatttaatccttacaatacccaataccatacacaactagccctttgtcaaaaataatcaaactctatttgccactcaataccatattactctctctcattta

SEQ ID NO: 243829 - DNA, 257 bp, Gossypium hirsutum
  unsure (1)..(257): unsure at all n locations
ccacgcgtncgatataaattcaattcgggttatatactgattaccgataagcatttattatgtgcaacacagattaagctagacaggataaaaaagcttgttgcgttgccattatatcctcagttctccatttccacaactggaagagattgacatggaatataagcacttagctcttgaatccggaatcgagaattggggtcgtgttcctgccctccgcatgttgatacattggtggacggtatcaaatgggatga

SEQ ID NO: 243830 - DNA, 268 bp, Gossypium hirsutum
cacgcgtacgcggacacgtggtgctccgctcgttgcttatgttttcatcctgtgccgtcgcctcaaatgaacgcgagcggaccgtcgccgtccaaatttgagcgtcttcaaatttcaactccactcttttttattccttcctttttaatttcaaatcttacaattgtgtatttttcttttatcataatggtggatgattattcaagaaaaaaaatatccacaactgccgtattatcaaaaaagcccgcttcagaacgagcttacaaat

SEQ ID NO: 243831 - DNA, 407 bp, Gossypium hirsutum
cacccacgcgtacactcacacacactaaagagaaccccaaatttttttactttcatcattaacaaaaacacacccgctgtttttaaaaatacatcccccccctccaactccaaacttaaaaccactcctttttattcctcccatcataattacaaaactaacaactttcaaaatttttttttattctcaaacaataaaaaaaagccaccattaatatttccaaaaaatacacaaaaaaaaaatcttacttaccaaattttttcttccttccacatacaaaactctctacataatcaacaactccttattatttactttttactcttcattccttacttatttaaaataaaatattttttttacttttttaaataaaaaaccagcgaattttcatcacctcctttttt

SEQ ID NO: 243832 - DNA, 319 bp, Gossypium hirsutum
aacggctggatcctgaacgactcgcattatactgttttgttagggcctagggaaaccaatcactagtcagctggagcagccaaatcataatcaaaatcgtatctttttaaatacataccgaaaattggggcgtactctagatacagatccactatatgctatactgcatgagtcaatatactgacagggagcatattctcggtggcctgctcacagagtgatggctgatcacgagagcaaatatgatgcaatcaaagctgcaaaagaagggcgtcctgggctattcacaagcgagatgatattttcatggacgcttgat

SEQ ID NO: 243833 - DNA, 275 bp, Gossypium hirsutum
agtaattttctgcattaagaagagttgtaactcttattttaatcaagctctgtaagtagaactcgataaccgctcttaacagagaactccccaatagcgccatgcttccagaaaaaaaaaaaaaaaaaaaaaaaaaaaaaaaaaaaaaaaaaaaaaaaaaaaaaaaaaaaaaaaaaaaaaaaaaaaaaaacaaaaattattaaaaaaaaagggggcggtaactttgaaaagaccgataattacgcgccgtggaaaagaaactttaatacatagtt

SEQ ID NO: 243834 - DNA, 449 bp, Gossypium hirsutum
gtttacactatgaagaatgtaattcattaacagtagggataagcagggtctaaattgatccatttaatagtaggaggactaattttatccggtccctatggtagagggacttgtaaggcacattcacctcaattatttgattcatggggtgccagctttttgatccttttcttttttggttttctttgcccttgtaattgtagtataccacattgttccgaagaggagaattgcgttctgtcccttcatccattcaggggacaggatctattatctcttctgcatctctagataactcactctctgacttgtaccaatctcctccaagacccttgccttatgatgctgaggctaaatatttccgcttacaacgtgatggtcttgtttcaagacatgagaagggttcaagtcagtcacacgaagagtcagaacctttaagaggcgaaaac

SEQ ID NO: 243835 - DNA, 347 bp, Gossypium hirsutum
tcgtccacgcgtccgtccactcgtccgtccactcgccggtcccacgcgtccgcccacgcgtccgaaaagagtcgtctataatctcaaaagctaatatctgaaaattgctagttatcttctagaaaatccctttcttgtttcttctcccttcgaccggtcaacggcgagttgtgtgacacggacgacgcgtgtgttttgtgatccttcaataatgatattgaccgccgcgttttttctggcgatgggagatgacttatctgcggcgttgacggcgagtactgatcgtgagcttcttattccagttgctgtatccgtagaccatgattcccccaaaacttcttcttatt

SEQ ID NO: 243836 - DNA, 288 bp, Gossypium hirsutum
  unsure (1)..(288): unsure at all n locations
acgcccacgcgtccgcccacgcgttcgaccacgcgttcgccgacgagtgtcccaaatactatgaacgatgctaaggagggtgaaattgagtgagagctggtttgcgtacgccaaactagcgtaacttgcccaacattaacagaagagagtagagaatatcatgtgatctctataaaaatcctgccttggntttttggggattacttgaacctatgtagtacgtagaaaatatagtcgaaagatgctcaagagcacttgcgtaggatagtgtgggcaaagggggaaaac

SEQ ID NO: 243837 - DNA, 190 bp, Gossypium hirsutum
tcgaagcaaagtctctgcctttcaaaagaatttaatccagtaaatataccaactttcatatgcgtcggattaaagataggagggatcaatgtcaactgccacttttcaagaagggatgaacggttttctttacccaaaatcaaaccttgaagagtataaacctacatcgacagcgtatagagagtcccat

SEQ ID NO: 243838 - DNA, 213 bp, Gossypium hirsutum
agtaaatgttgaattgttgaaacaacaacagcactcggacggttctccgctcaaggacgtttagctcggcaaatctcagccttagatatgtatgttcttcatttatcttttgtttctttttcaaaaattgatttggctaatgatttaagctcttggaattggctcgtcaaattttaaaagtttactaatttttttcctacgttttcttttttt

SEQ ID NO: 243839 - DNA, 159 bp, Gossypium hirsutum
gttaatttggttggatgcatcccatgaagggatgtactaaaagaactcgtaatgttgatgttagtgcagtcttaatgcttagtgaggccaaaactatatgtacttttggttttgttggtgctacttttttaaaattttgacttctgagatgtttcagtt

SEQ ID NO: 243840 - DNA, 534 bp, Gossypium hirsutum
  unsure (1)..(534): unsure at all n locations
cgcccacgccgtccgtgttgaatgcatgcgagctaggtacctggagaaactaccttgccctcgtatagagggttgtacctnnacaactcattacccaatgcacgatgggtgacaaaataaatattagtgggtggtgtacttcgagatatttgattgtaggtatgatccaagcgtgtatttgtgcctacatggctttcctagatatacattgtccactagtgatgccgggtagcactcatttgttattgtgcatgggtatcaacatgtgtacaatgccctaatgatagtatatataggaacttgaccgatggctagggaaagcatactatggtgtgtgcttggactttaggtgggcttaggtcaatagttgcttgtgaaagatcggtaaaggcctttaggattgaatagtcaactgtcattatgtagcttccccacagatatgagtcttgaagcaatcaatagaacttggtgctgactcattccttgtttctaacgatcccgcaaatatgaagtcagctattggtaccatggact

SEQ ID NO: 243841 - DNA, 297 bp, Gossypium hirsutum
gccgttttcatccattcaaaccccaaagaagacaagcccaagctgccatgtagccaccgccaacggtggccgacggagggtggtccattcggattctaaccccgttcagacttgcgatcaagaatctaacctctatgatagcaaggaatcaaaaagatagtatcaccctctttattagatttggtttcaacagagaagaaactccgatatataccaacggtctacgattcaagtgccatgcgacgcgtggaagaggcgacagtcatgggcgtggtggccgatgcggcatgcgtggga

SEQ ID NO: 243842 - DNA, 359 bp, Gossypium hirsutum
ggttcaggtgctatgaaaccagaaccaaaaaagcgtgggaggaagcgaaagtttgatcctaatgttcaggattcatctgctggacgtgaagatgatgctgacatgcgccttagatgttatgaaagtgcttctgcccgaaagagaaccgtgacagctgaagaaagagagagagcaattaatgcggccaaagcatttgagcctattaaccctttctgcagggtcgtcttgcgaccatcatatctatacaggggatgtattatgtacttaccatcgtgctttgctgagaaacatctaagtggggtttcggattccattaaacttcagcttcctgatgggagacaagggtctgtacgatgtcg

SEQ ID NO: 243843 - DNA, 334 bp, Gossypium hirsutum
caaagaacctgcagcaaccaacatcttatcagccagcaagacgtttagcttctctttctgaagaatcaagatttgggaggagaagaaaacaaagctttgaatccaaaaagggaggagcggtgaactttcaccaaaatcaaagctaaaatagtagaacccaacatcgacagcgtatcaagagttccattccaatttgtccttcgtcgccatcgtcatcacagaattaagtactccatcatcctaagcaccataagcctgtcttctccgaccctccaccgacagcatgtgagccgttctattgacagatctgggtagtgagtccccttgcacgatc

SEQ ID NO: 243844 - DNA, 341 bp, Gossypium hirsutum
ggtatatgctgtcttaaaccagtggcaaatacgtgcgcgcacattcgaaagcccgatcatagaggccaggagtcatcttctgaacacgtagatagattctgccgtgcgcctttgacgagatgaaaatgcttatgtccgtgtgcgatgcgcccctgctagtgaaagagtgatagctgctaatgcgggcttagaacttgagcgtattgaccatttgtggagggtcttgttgctaccatcatatcgatacaagagatgtattatgtacacaccatcgtgctctgatgagaaacatataagtggggtgtcggattccattaaacttcagcttcctgatgggagac

SEQ ID NO: 243845 - DNA, 337 bp, Gossypium hirsutum
gagagggggtgggtgtttattggtgaatcaattctttaccaaaactagaagatctagataaaatgcatgggccattgataggtaagctcgtatactctaaagcgctacgggcagtgactaacaagacagatcctatgggtcctctacatggtgaagattatttgtcttctttgttcctaaagcctgttttaaactcacgtttgggaaaaattgaaaatctactcgacatttaacataaatgatattcactcacgcaccaaacatgcccgccaactagaggtacactctcgacaaaaacaagaacgaatcccatttattggattaagattatatatcc

SEQ ID NO: 243846 - DNA, 273 bp, Gossypium hirsutum
acgtgcacgcgtacgcttgatcgatattacattcgcacactaattgctatgctattcatagaggcatggtgtggcttttctaccacatgaaagattcaccggcgtccattgggcatgatcgaaattaagagagagttgatctggcgcaccctatagagccagtacgctctcagtgcagattacaaggttcacctgattggactgtagaatcgcaagagtttatgcgatactcacaccatcgggatggatcccgattctgtgaagacccatacg

SEQ ID NO: 243847 - DNA, 263 bp, Gossypium hirsutum
acgattatttatctatctaggaaaaatatttttatgcttaaaataaaaagcaaatatcaaatgcaaagtataaggagattaataggaactgccatctttgcccctccggaaaataaagccaagttcgggggctgcttttacctgtgcctcaataagaagccatgacatgggagaacctgctcctctatatgtccgcacatctgtaaaaaattgaaatcctgcacgaagtcatacaactgtcctattctcggacttaccaattt

SEQ ID NO: 243848 - DNA, 145 bp, Gossypium hirsutum
cgatacccacttttcacagagtacttcttattgccttcatgctttcaggctcgcatatattgcgatctatcaccagaaatcgccatgaagaaaatacacgtcgcttgagcaaaaaacaatagctgaaaaagctccgaccgaaaaa

SEQ ID NO: 243849 - DNA, 466 bp, Gossypium hirsutum
  unsure (1)..(466): unsure at all n locations
ccgtccgtcccacgtccgtccnnngccaaaatannnaaacttggtcnnatcaacanntgataatggnnngcagtgtnngatgaatgggcatnttnntcggaagggacccttatnnactggnnccgaaagannnagcagannttgaatnnccacatangnnccttcnntcgaagtggttngnngtaagaattggcaaccaacctaaannntaatctaacnnnaagttgtgnnngccacaanntgaaaggggtgcggtgnnngctgatnnncaagtttnnngtggcaggacctnntgggtgggaaattggccaacncnncaatgtttanngaggaaanngggaccanngaaatnngcttaaagaccaatnntattcccctgcatttttcctttgaaaccaatcagcagaaaagaatatgnaaggttggctttcttgcnnccttggggaaaatcaaaatgnncagtatc

SEQ ID NO: 243850 - DNA, 301 bp, Gossypium hirsutum
cggagtatcctctaatgcatttgatgaagtactgaaagcaacaccaccttctttgtcagcatttttggctggcttgccttctatcgagggtccggcaccaaatgtagacattgcattgtctatttgtttgcagaatgactatccaactgtccagacaaaaaaagcaacgagccttccatctcaaaagactgcaggtcctgctcctagcacaagagatctctctgggtcaagcaagtcccatcccattcccagtaattcatctttcaagccacgggacagacagctcggctaaaggaaggat

SEQ ID NO: 243851 - DNA, 229 bp, Gossypium hirsutum
  unsure (1)..(229): unsure at all n locations
tagtaattcaattatctactcgagcttagccatggacaccttactttccctactactatcttaacctttctctcttgcaggtttcaatttgttccatttccttgtttgcttagtgaagctcatgtatcgattccagatcaacataacaaagcatatatttgtacataaagttattaatttcaagtattttatattcnctgctcctaaaacaagtgaaattcttgggtct

SEQ ID NO: 243852 - DNA, 405 bp, Gossypium hirsutum
  unsure (1)..(405): unsure at all n locations
cccacgcgtccgcccacgcgtccgggagagtataatgttattagctgtgtaatatttgtgatatttagcatttggaaggtggtttttgattcatgttgttacctttgcattagtcagatctgttattatattttctaatatgaaagaggtgaaatggcaacaaggtacaagtttcttccctataaaaaaaaaaaaaaaaaaaaaaaaaaaaaaaaaaaaaaaaaaaaaaaaaaaaaaaaaaaaaaaaaaaaaaaaaaaaaaaaaaaaaaaaaaaaataaaaaaaaaaaaaaaaaaaaaaaataaaaaaaaattttannaaaaaaaaaaaaaaaaaaaaaataaagggggggcggttttaaagaaatatttttattaacggtggtttggaaaatattttttttttt

SEQ ID NO: 243853 - DNA, 411 bp, Gossypium hirsutum
ataatgctaaaggttcacttatgtagccttctttcgatgtacacttccttttttgtgctctggcggtcaagcaaggcacttcctaaaattgagccaaaattcataattcaagcaggcaaaagttatcttaacccaacaatgcctagtatttcttatgtcattgttggttggttaactctgtaatatccctgtcaacatggctgatttgatgcttatgtgatccctttgatgcttatatgatcccctgcaagatcaaacaaattccccagagtggagaagttaaaagtgttgaaaatagtaattgcaatgaaacagtcttgcatgcttagtcatatctccgaaagtagctacttttgttttatgcttttgtgaagcagtacatgataatttgagtcggaaattggtgattga

SEQ ID NO: 243854 - DNA, 354 bp, Gossypium hirsutum
cgacccacgccgtacgcccacgcgttcctccaagcgttcagtccactcgtcctcccacgcgttcgctatattctctgcgtagttggtttcttggaaaatcttctgatcaagaatggcgcaccttatcatcatcaacgcgttcttgtacgttagctttgcattggcgcttctctcatcgagtgttgtgactgcgctagatactgaactggcaccgtcaccttcttcgtctccatttattgaaactggagctgggttttttctgtgagccatatgctatagtcctttttttttattgatccttttatgatctttcttttcttcgggattaaaaattcctgacatttttattggcaa

SEQ ID NO: 243855 - DNA, 433 bp, Gossypium hirsutum
ccaagttgcttgagaagttgcattggctttgttacaaatatttcctaagaggtccaggggggaatgacattcataagacaaatgttccaaacatgatgattgcctttcgacatgagacatggatagatgatatgcagcatctttactcagggagagcaagaattccagaagaaatatatcctgcgatgtaactgaatgtaatacgtgaatcatgaaatttcaggtagtgggaagatgatgcgaagatttggagagctacgggttgaatgaggctggctagctattctttgaagcttaaccttattagtggcggaagggatttttacccttagctattttcttacagattggaaatcattcaattcttgctgcaatcattattgatactaatatatatagtgaattaactatgttatatatatttctttcaata

SEQ ID NO: 243856 - DNA, 351 bp, Gossypium hirsutum
cggaggagaaggtgttggagacggtggtggtggcggtggatgtgaagagaatctagcggggaacgtcgaacaaaacggcgggtttttgactcaacaagaagttttacagccgttgctggaaccgggaacggaaacgcaaacgcaagctctattcacttctttgcttatgatgcaaacgcaagagagtgagcgcatcgttaatggaggaaatgtggtattaaacggtaatccgtacaatcaaacttctcaggtactttcctttatttcattaaaaaaaaattcaatgttacttggctttagaaaattgtattaacaataaattggttagaattgattacaaatttgggattt

SEQ ID NO: 243857 - DNA, 405 bp, Gossypium hirsutum
  unsure (1)..(405): unsure at all n locations
agcagtccgctgatagcagcagaaaaatgaaacatagtttctttaggagtttcactagatcccttgagtagccgacagttcatgccttagtgccaaatgctctcgattatcgacaaatgacgagcatcaatctcggtgaggttccggcgagaaaaaaggtacaatctggagagcgagacgtacgtgtggggagagccgatgcattcacaagtgaaggagtctggctagagctgcggcgcaaaatcgctccagaaaccctaagggtttctggatgcttcaagaaaatgggccacttcgagttgggctatggtttgggtctggtgttgagctattcgggtttggaaatgtatttaggtaaataatngngcctgctgtgtaataaaactgacattattttttatttta

SEQ ID NO: 243858 - DNA, 308 bp, Gossypium hirsutum
cccacgcgtccgggaaaatgtcttaccgatttctaagccgtaagacattttcccttctgttcggtctcccttcctctctgttcatctctgtccatcgtcccttctcttcgttggcttcaccaagtaaatctctgcctcgtcatctccgtcggtcgaccgaccgtcgtccttacctctgtattttgaagaaacttagcaaccacagtcgagaaaagaagacccagaataggaagctagttggattcctgatcaatggggtcatactcgatgtagagccttaaattgttctgcagacaacgcgacaaatc

SEQ ID NO: 243859 - DNA, 149 bp, Gossypium hirsutum
cgctatgagccccgtttttttaagcttctcattacacattgcttccgacatcataccggcaaaacatgacatctattgagcctcgcacttttttttctgtctccgatggcgacggcgctacaagagcttcacggcctgctttcaaagca

SEQ ID NO: 243860 - DNA, 346 bp, Gossypium hirsutum
cccatcatccggttaggcttgtactttcttttgagcttgcgaaacacgcctttcggggggaccaaggccgtaccaagtttacttattcttgaaaaatgtgatttgtggtttgtgttaaggttttattttaacagtcaatcgcgttgtttttctgtaccgttgagaatcattctgctcttctgttatatgattccgtgtgtattttgaaaataaaaaattatattttttaatttaattacataaaaaatttatatttttttatattatataaataatttttgttttttttatatattccatatcttttcttattttttgtatataatatggcgtcttgtttttttta

SEQ ID NO: 243861 - DNA, 329 bp, Gossypium hirsutum
  unsure (1)..(329): unsure at all n locations
cggacgcgtgggtttattcagatgctttgttctgcgttctcaaaaacaaatgtaagaacacagaattgccctaaaatctaatcctctactcaacagctcccaccatgaaaaggaacaaaactaacaaacacacaacacattgcatgccattgccttctccactaagcttcagattctaaaggtatgaattgcagtgtgaagttaggtttttctgtttgttttgacattaaccaacatgcttgcttgatcttccatttgagttaaaaatcgaggttcacttctgaattcaaactcgaattaaaattgactgtncnaaaatcattcctntt

SEQ ID NO: 243862 - DNA, 429 bp, Gossypium hirsutum
  unsure (1)..(429): unsure at all n locations
caccaaacaaaggaatcctgcctttctttgtaggagcaatggaaaaaaatgacaatcggaacacacctcaagataaggtaaccaaaaagcaagaggaagacgatgtatctgcctccctttccctttccctttctttcccttttccagagatggagcggaatgtaaaacccgttcctaaaccagagcagcagttgcctgaaagacatcctgtgaatacatcgctgctactattccggggcttccctgaaaaataaggctcctgatgaggaggatcctaagttgttaatgccattacagtttcctactacatgaatgtggtaataatgtatactactatggccttgcattggggtttgtaggaaaatccacattcccatctgttcataacccatacagaacttagcaattaacntctcatttgtttttttt

SEQ ID NO: 243863 - DNA, 127 bp, Gossypium hirsutum
ttttgcagatagattcttttgctccttggagttcatgtaatcattaaaagaaaaacgtataggtctcaatgtaggaacattagccttgatccaagttaggccttgaacaagaaaaaatttagaccct

SEQ ID NO: 243864 - DNA, 420 bp, Gossypium hirsutum
ctcgaagataagcatttttcatcactgggtcacagtgatgatgctattctaccagaaacacaggcaaacggccaccagaaatgtgatgtgactgagagtgttgatgaacttgctcctgactttgaagaggacctaaaaaatgtaggtggttcttcccaaggtgcggaagaatcaaccatctcaccaactgcctgggtagaaatagaagagcatcagaaactgcctgaccaatgtgaagaccaaacgggtgaaattacctcttcaacttgcactgcacctgttggatcggctagtcctcgtgtccgtcactctctgtcacagatgctgcaagaagaaagtagtgaagctgatactactgaatggggaaatgctgaaaatcctcctgcaatggtctaccaaaaggatgcacccaagggattg

SEQ ID NO: 243865 - DNA, 433 bp, Gossypium hirsutum
taaaggcttgtttcgtgaattggagatgagttgcttcatgaagctaagatggagatgagttcttcatgaagctgtcagatcaatggggtgtgtttttgtttgatggggacttggggtctagcattgactgcctgagttttcttttttggagtttgttccccttgttttggtgtttgagtttgttgcatctttttggagtcataagtttatcgaataatattcatttacattatttttgtaacgaccatgttttgactcgaaattaggtacagtgatggatcgggtttggaattagtggagaattttttaaatagaacaaataggcactttgagtatgaaattagaaagtttgtcgacccgataggaaattagaaaatactccttaaataggaaaactttaaataaaagcattgactaaattgaaagagtaaaa

SEQ ID NO: 243866 - DNA, 229 bp, Gossypium hirsutum
atcattttctcctgttctagaccatcaagaagtttggctgaaattttataggattcgcatagaagcggttctcttgaagtccaatgttcttagtgaagtccagaggtcattgatagatggtggaatgcgtgttgaggatttgccagttggtccattgcctcgatctggatcatctcctcatcttggccagcaaacacttacatcataatctcctggaaggcctagggaa

SEQ ID NO: 243867 - DNA, 374 bp, Gossypium hirsutum
  unsure (1)..(374): unsure at all n locations
gtacctgaagacgtgggtgctatcttcatcggaatgtgacatcggggacaacgagcttgtactacaacttttttattctttagattagctagagttggaatataattccaataaattctacaacatgtaattttaatttttggagggatctgtaaattccataattttctatagaagtttctaatctcagtctgtataaaattattactaggacctgaattagtctcttggaataatttataagcacttgggactggatactcttctaacgggtctcctcttcattnnaaaaaaaaaaaaaataaatataagaatataaataaacaataattaaaaaataaaaaaatatcaaaaattgcaaaaatgtccaaaaa

SEQ ID NO: 243868 - DNA, 281 bp, Gossypium hirsutum
  unsure (1)..(281): unsure at all n locations
cctttttttttttttttttttataaaattnnnncnnaaggagatttaaaaaaaaaaaataaattttatatctacgcatttttccagttacatttattatcaaagtcaactaacaaaccctttatcatgtcattatacacataatcttttctatttatctttgcacattttctcaacctgaccacactccaatctctatttccttcctcacccgctgatcatattcttccagaaccttcaactattatataaacacttacttttcataacattcacatctat

SEQ ID NO: 243869 - DNA, 447 bp, Gossypium hirsutum
  unsure (1)..(447): unsure at all n locations
ggcagatgtaataatggcattggctggatcaaatggaggatcttggtcgacaacctactctactaaatctgctgtgaggacaggggaaaattatgcacccggcggagaacctgaagcagtaggaagcattgctttctcacgtgaacttcggggaaagatggctgttactgataatgcaagtcaagcaactggttccggtgaacgaatgccgatacaaacaggggttcctcaaggcacaattgttatggctagagatggaagaaacctggaagctggtactgaagataaaagagaggtataaagtttaagcaaagttttcggaatagcttcaaatccagatattacagaaattgcagatttccaacctgctatcatctctacttattaggaatagtcccatccatttcatgtctctgtcattaatgcttaaaactttntcgaattttt

SEQ ID NO: 243870 - DNA, 410 bp, Gossypium hirsutum
cggacgcgtgggtgggtatgaagtcctagagtagaaaaaggagaagaggtgaccagctcttctcgtggcaatcctcaacacttacattagaaaactggcaagtgcctgctttcttacactgacaggacagcattaaggacatgggactcataagttttatatgcaagatgtttcaagttgtataaataggtgattatacttcaaaagtattgcggctgaagaaataggtttgtataaggatagagaagacatccatagacagaggccgattggtaaaattgaaaaagtggagtttgctattgttttggcatcatcattccccggaggctgtttttgttcacctgagatattaaatttagtgattctattttagtttggagcctcttaaggaaaatactgcgacaaaaagc

SEQ ID NO: 243871 - DNA, 444 bp, Gossypium hirsutum
atttatacatgctattataacttatagcatgaccccactctcttgtcttgactccaccattcctaatactgacattctgcgcggatctcagacttgttggacacatgtttcactctaggttgcttgtggagcatgcggtccttcttgttcctagaattgacattctgtgtgggctctaggtctactggacacctatttcactctaggttgcttgcggtacacgtggtcccccttccacgagctccttggacaagtgcaaactaggactgtgaccttcgtttggctcgtgtgagctaaacttacgagcttgccttgtgagttgggtctgcgaaatcctcttgatgtcctctcacggttcacctcaccctatgtcatttggcgaagcctatttgggtcacgagtgggtaacctggatcctatttaggactcgggttgatgattaca

SEQ ID NO: 243872 - DNA, 403 bp, Gossypium hirsutum
tataagaagaattggtggtatggtatgttctcttgttgcagtgggattggtgaatgagtgtcatcaaacagcagctgtagcgctatttttggtcgctatagttgtttcgatagtttgtatccaactcttcccctatgatacgaagggacgggagcttagtgatactagttgataggaagtagttaacttctaaagacaaatggctaattgggtgccatccgtaattttgtttttaagggaaataatgcggccgcttcctatttatatgaccataataaccggggaaaagaatatgacctcattctctctctctcaacaagcagggagaattctgaaacatcctcccttcacatgttgctttgtgacgacgagaggtttgtgaaggctgaatatagatcatcta

SEQ ID NO: 243873 - DNA, 238 bp, Gossypium hirsutum
cccagccaagcactaaaatcaagcaatcatgtcatgatgtcttagctcgtctggggtcattattattttttacttctgttttgaccccccacccaccccccctttaacaactcgtgtttttgatttttttaccctctcaatatcccatattaacacatacatgcatttcctcctttgccgtgctgaattccctggctccaaatcttttatatttttttctatcaagtctctttcttaa

SEQ ID NO: 243874 - DNA, 386 bp, Gossypium hirsutum
gaaaaaaacccagacagtcagacaaagtttatctcgtattgttcaaccaagatgatggggtatatggtaaactggagctggacctccacattcgtctggacttcgtcctccacagtggtggctactcttttcagtacaggaccaaataacccaactttccacttaccttcaatcaaacttactgattttaagcttaaccttcctcacgtggacactgagttaattcctaacgtgcacgctactatcatcatcatcgtacacatccattaccgctacaccgccatgtttattttttacgaaagcaccttgcttatagcggctcaagtgaaatgcctgtcacaacgtgctcggtcttgtcaagtactaaagcttccgactcggcttga

SEQ ID NO: 243875 - DNA, 431 bp, Gossypium hirsutum
cggacgcgtgggaagaaaacaagctggttaacagtgttactaccagccaagggtggtcgagctcttaaacttaacttcgatgattccaaaaaccatgttcaacctcaattgaaatccacttttgcattaaactatgatggtttggttgcaagaagaaatgccctggtggcaccagccagaagaaattattgacccgatgggagctttaacttgccttaagaatgggcttactggaaatttaatcccaattttggcccaattttctcttaaaataatgtttattttgatggaaaaagatagtagggtggttgcttttatgtaagggcatatgggagtttgggtcatatatctatctatatgtatataaagaagaattccagaatgtgagtggtgtttatgaattaattaaactaaattgtcttttttaaggt

SEQ ID NO: 243876 - DNA, 340 bp, Gossypium hirsutum
  unsure (1)..(340): unsure at all n locations
gagttntctactggagctattcagaattttttagatgcccaaacactctgtaaagtaggactggtccacaatagttggtcaatattctctgtgactgccttgcaaaggggacaaacaacactatcccgcaaggttctttgattcagatttcagtcattaggcaagaaaatattgagtaattccagacctgtctttcaactgattgctgccatgcgcataccctataataacctataataattcttgaaaccgacatcgccttgactgatatacttactgcttaccaaatgctctattattaaaggcacccgaccacattcttctccgtttcagcaataac

SEQ ID NO: 243877 - DNA, 272 bp, Gossypium hirsutum
agcagactcatagacggacttcgtagagacgagtattcttaaatcaacccagagatttccaggtcgagatacctagtcagtcagttcctaccattaccttttatagagttaaattaatacatttatgtatcactcttttaagtcttataacattgattttaactattatattgcatatcacattacataaactaattggtctaaattgactaattctttaagaattaaaaatttttttatataaccacaatttttatactatttatttaata

SEQ ID NO: 243878 - DNA, 425 bp, Gossypium hirsutum
cccacgcgtccgttttgaatgttccgaggatgatttcaaacaatttcaaaatggatttgatgcatcaccagtatctgatgcaaaggtggagtctaaaagacaaaagagatgagtaaaccatgggaaagtttattgttgcatgagagaagactcattacgcagatttagcttgtggctggttagtaacttatgtgtaggagacatcatttgtatctgtgttaggtttaggagattaatgtctgtgcaggaggatcaattgtctgtagttctctgatgttgaaccgatattttcgggtaactcatcttattgacttattgattatgctttgccatcttacttgggaagaagtgcaaaaactctgttgagaactcaagaaaagcatttttccagagtttatgagattgtgattaagaaaagttagtgc

SEQ ID NO: 243879 - DNA, 423 bp, Gossypium hirsutum
ccagttttcacagcaatcttcactccattagctctagtcataacagcaatcttctctggattcttgtggaaggaaacccttcactggggaagtgttgccggggttgtcctactggttggtggtctttacagtgtgttgtggggtaagaagaaagaagatgagaaaatggttagaaatgaacaaaatcccggtactaataaagaagaaattgtactggagtgcattacacatcagtgattgatgggactcaaatattagctataatggcttttggttttggccattttgatgctcacattttccacagtgtgaacctcttcaaggaagacaacaccagcttagatttcatcctttttttctcttcttttctttttttgcagcttgtgttattagctagtttgctgtctttggtctaacttggta

SEQ ID NO: 243880 - DNA, 396 bp, Gossypium hirsutum
  unsure (1)..(396): unsure at all n locations
aaccactctttcgcaattattnttctagttaattgatatttttttcatcaaaagttcaagaaggctatagagagttttttaacatacctgattcatctgtagttgcggaaactgcaaagcggaaatccccaagctcatctaaaggacagggaaatgatcccaagcctgcaaaaaagctgcgagatgagccaaaagccacttcacctgtaccgtcataaccaacctagatggatcttgtccattgtcaaacttatctgaatcctagatttcattggagcctttttaaatgtccacagtgcatctagccatgcatttagaattgtcatacgcttacgcttgctgctaaccaatatttcacagtacttatgttttattggggtctaatagttttttttt

SEQ ID NO: 243881 - DNA, 386 bp, Gossypium hirsutum
tcgttcgctttcatcaaaagctgttttgaaattgatatttactacctttgcaggattgttggtcttcttgtagaatcctgttatttctgtcaccccaaatttcccataatgcacagcagacaaccttactctgagatggagaactctgcaaaaacacccagatgagccactgcgtgaactccaggttcggttcttgtagcacatactaatatgatagttctttccatactggtactgaaattaaacattctctgaataggtgttccatatttttttatcctcgtccacatcgagggtattctgtagtatttgaaactctctgtttatacatattagcccttgtagctaaaaaattttttgaaatcttccagaatgtattttttatc

SEQ ID NO: 243882 - DNA, 342 bp, Gossypium hirsutum
ggcgcatatggcgagggactgtggacagggctgcggcggcggcggcagtggtctgtcttgttacaactgtggaggctccgggcattttgcaagagactgtgcaaacagtgatcgttaaaagcatactctgttccttattcaaagcagcttcgtttgtttgttttttgctaatgttttttttttgaaggattgttgtttattcaaatttttttggcttttggtcctttgtttttgacaaatgggaatagatttagaattttgtttttttatttgaaagattttgaattttgttaattgtgaaaataaattggattttattaattatattttgtctttgattct

SEQ ID NO: 243883 - DNA, 286 bp, Gossypium hirsutum
cccactctttcatccactcgtgcgcgagtgtacattcgagataagtacccatcccttagagaaagatttattggagagcattttaagcatcgacgccttcatgtgaaaagttggcgacaagacgccaaagtcgctaagtattgaaaggaaaacaaatcacctactcttagtatattcctaattagaagaatttatttttcttttgttttctgtttcttgtatttcacttcaaagttcttaattttagtttcctattttaaaaatcaatttaataaacaaactattt

SEQ ID NO: 243884 - DNA, 204 bp, Gossypium hirsutum
gggtcctctttctacacctgaaagtctgtatgttctatctctgctaaaggaatcttagaaattttttgcagctatgtccgattgaaaggtattgttgattagatttcgcttccaagtcctgttagtactgttaattaaatctgaaactaataatactccactgtttgtctcaaataaaatatataaacattatattaatattaa

SEQ ID NO: 243885 - DNA, 417 bp, Gossypium hirsutum
cttcacagcttcaacaacagcagcagcaacagccacccacacagtttcaacaaagccaacaaggtcatcagaacactagcatgtccagtggttcatcctcctcccagaagaatttgcagaaccagcagcagaggtcacatggaggtgatgtcagtagtggcagtggaaactctcaagtgtttcatgcctctaaaaaggattcacctcatcccttacaactatggcaacagcagcaacagccgagtcagaatgattctcatcaacctaggcaacttgatggtgaatcagatggcaaagatggcccatcaactgctactgatagcagagtatctcgttcaaatatgaatatctatggtcagaattttgctatgcctgtacagccttcaaactttgctttgatgaccgctgcttcaatga

SEQ ID NO: 243886 - DNA, 184 bp, Gossypium hirsutum
  unsure (1)..(184): unsure at all n locations
cggtttcggaatttcccgggntcagacccacagccgtccggttaggcatatcacatgctcatagtagccattcctttagctagataccatgggagatagaggttataggcgctgcggatcataccatgtctgccattaggtagctagaatgataattagacaaagagagattagctagaaaaga

SEQ ID NO: 243887 - DNA, 305 bp, Gossypium hirsutum
gaagaccgggcccgacccacgcgtacaacgacgcatccgcatacccgatttggtgtgattgatgtgtgcacattgaagcagcggcacggcatccaaactctacgaactaatgtgcaattgggacacaccgattggtggagtacttatatcacataggagaatgtttgttgcgctgtaagaacaaagctcttcgacgctcccatcaaggctttacatttgaacatgctcacagctggcactgatacatcttcaagcacaattgagtgggcaatggctgagctaatttggcattccaacatcatggc

SEQ ID NO: 243888 - DNA, 191 bp, Gossypium hirsutum
  unsure (1)..(191): unsure at all n locations
cccacgcgtccgggtttacaatttttctttttatccatgcacgttcccattattggtgggtccatgctcttcgatgttgccaaccatgagtacatatccaaactacttgtttacaattttccatataaaagctaattatttgtcccaacgtctcanagcacaagatttataaaatatatttcaggttattc

SEQ ID NO: 243889 - DNA, 386 bp, Gossypium hirsutum
  unsure (1)..(386): unsure at all n locations
ggcaattgacggatgtccggagttgagcaaaagatacagacaaaatgggggtgaagattggcacaaaattgctcacatccaaaaggttgttattaaggatgaagattgagatggagatggatgaatcaagcagaggttgaggcaggacaaggaagacttttgctttatttgcatttgggtttcagttgtaattctaataagtgagcttttgctttggatatttcagactcttgcttaatggcttcatgccatggattgtaatgtttgtttgacatgtatcaacttttagctttatgcatatttatgtttctcatggttnanaaaaaaaaaaaaaaaaattaaaaaattaaaattaaaaaaataaatattttaaattattataaaaa

SEQ ID NO: 243890 - DNA, 344 bp, Gossypium hirsutum
cccacgcgtccgatcgacgcctgcttgggacagaagtgagcttgccaccggaaaatgggaacaaaactcatgattcctaccttagcgagacaaatttcgataccaacttggtggttatattggcagctcttttatgcgctctgatctgtgcagtggggttgaactctatagtccgttgcgctctacgttgcagccgaggttttcgacggagaccccagaacaagcagctgctcgcttggcgacaacgggcctgaagaaacgagatttgagacaaatcccggtggcagtgtatggggaaggagtgagtttgccgtcgatggaatgcccaatatgcctgggagagt

SEQ ID NO: 243891 - DNA, 244 bp, Gossypium hirsutum
gcaagaatagatgatgtcctttatgttaacgatgttatcaagcgctgtgctgaggcagaaacagtttcccttttcgacaggagaggattgggtggtcttccaatccaaaaacgaatgtccccaagccccttctcaattcagcacactccttatgcctctccttttgcaacgccaaccttctgttcttcaaccccgctcactggaagccctggaagggcaccttcctctttgaagagaaacattc

SEQ ID NO: 243892 - DNA, 414 bp, Gossypium hirsutum
cccacgcgtccgttttcctccttcgaaatcagctcaaggagatatggctcaaagaaccgaaaaagaagagactgaattcaaagtccctgaaaccctgacgctatgcgttaacaactgcggggttccggttattcaaccaccaacaacatgtgccagaagtgttttagtgccaccacggccgcaacatcctcctcttcctcttcctcttccaccaacaacaccgctactttcgctaccgacgataaatcctcgagatctacgccgactcgttcacaggacaatcgatccgattccgctccacctacaacagctgcaacaacggcaacagcaacgacgaatagtccgatgaccgcttcaaatcggtctggatacgataccgcggaaaaaaagtcggtgaatcgatgttcttgttgc

SEQ ID NO: 243893 - DNA, 294 bp, Gossypium hirsutum
ctcggttgatagacatttacagaccctacttgttcttcgatgcaatgtatgcatctataaattcttctaattttatttttttacattgaaatctctaaatttaattatattatcaaatcttaaaaaacaacatcgaactgcacaatggtgtagctacggcttaattacaagattgaagtctgaaaaaatttaaaattcttaagggcaagttaggaaattattaataaaatatttagagcgagacaaaatgcaataatcaattataagaacgcgaggagatctctgtttggttaa

SEQ ID NO: 243894 - DNA, 421 bp, Gossypium hirsutum
ctgaaaaataacttcttgaaaatctgttttcttcttctgaatatctctgattatggctccgataactgacttgtcatttgaagttgcttgacattttttataactgtttttgaatcccccataagacagactgattggatactaagtgaacttcctaattttgcaccttccgggcacgcataagcctctactgcgaaaggtgaggggacgtttctgtagataaccgtctttaacaccattaagtttcccctcaaatcccaccctaccaaacctgtcgctgaactgaaggttttactgtcgaatgctgcatcaaaatagattctcgttcttgtaccacaacatccataaagcgtaccagaatagctgacactgaccattgttgcttctcttgaaaacccagtgcattcatggaagacatgga

SEQ ID NO: 243895 - DNA, 333 bp, Gossypium hirsutum
attcaatttcagcaggcaatcagaatccattgatttgcagatctgttcttgcttcctctagttcttgatttttgtatatatgggagcagtggttgtctaggatgttataaggagcctaaatctgatcctttgatgaatgatacatcaaaaggattagaagttccaggtcagacggtgaggaaaaccagtatatctgaagatttctggaccactagcgcttgcgatatggataacagtgcagcgcagtcacaaggaagcatctcgtcaatcagcgtgatcaatcagtctctagatccccatggcaatgccaatagcccatctgaattcgtaaat

SEQ ID NO: 243896 - DNA, 236 bp, Gossypium hirsutum
atagactgtggcccaacacggaaacgggcgcatcatgcatgcgtatgcagcattttaaggaatgctttgatactaacttatggacgcaatcgaaaatccataactactgcatagaacaaactcaagggggcaatctgactagctttaccaaagtaaacagccatcttgggtatcgagcctttcgcagttcaactatgtctggttccaggggatataatatgcgaatgatgtgagga

SEQ ID NO: 243897 - DNA, 305 bp, Gossypium hirsutum
tcttttaggtttttaattaataattttaaaaaatttggaaccttgttcgacatggattcgaaatcggagtggacctctgtattggcgattacggatgatacaagttacgctgttactgctttaaatgcatattgggagtttgagaatgaaaaccccaaacgcttcgaccctcaaattatcttgcaagcttcttctttagctcggttgccgctcgaatcatacaatgtagacttggtcatttacatctctaggtcagttgaatttccttttgatgagctgtatgctgaaatctttatagttttggt

SEQ ID NO: 243898 - DNA, 220 bp, Gossypium hirsutum
aataaatgataaaaaaaaacaaaaaaaatttactaaaaaaaaaaaaaaaaaatggtagaggcctattttcgggtcgcactataaagaatccagattcattaccacttatatgctacaacaagccttcttatacttggtatttaactacattcatctggcctagattattcaataatttgattgagataacgctggtcaaatccactataagtagtttgta

SEQ ID NO: 243899 - DNA, 258 bp, Gossypium hirsutum
gtcctcaacaaaagatcatcaatttaaacggagggtgatgacttatttgtagaacatactgacacttactgaggcttgggttcagtatactgacccactaatgcagactttattaaacatctgtaatggtacctataattaagcataatataagatcctattataaagcacatgaggtaactatcatattatgcatttccgatctgccccagcaggcaggactcagtggctactcgagacctatcactacaaatgact

SEQ ID NO: 243900 - DNA, 329 bp, Gossypium hirsutum
cggacgcgtgggcatgaattcatggcatgtttaaatttatttgtatcactcaatatcagggacgcgtgacaagcactactggcattggaggtactagtgcctatgcagacccctactagcaatgcacaaacacatccgacctatctgacgagccataacgacaccgcacctttagcgttcccaagccatttgtggctaacctaaatattgactgctgtgacgaaatcacatcgggcaccattaatgtttttgcagcactctaatgatcgctttaaaactcccttttgaatacaaaattctatcaattacttgtgctttaaagaaatgca

SEQ ID NO: 243901 - DNA, 420 bp, Gossypium hirsutum
tggctattcaactcttctctcgtcagatcccgagccaccagacctgttgctgatctgttgtttctgctgtcaaacgctgcatcaaagaagatcgtgactctcgaaccatattaaccataaggcgtaacaaaaaagtcggctttgatcatcagttcctcccttgaatacccaggacaatctcggaagatatggagactattttctgtccaagaacagcatcggggacatctatcatttgttgcaactcttctatacctaagattagctagattaggaatgaaatcccaagaaattcgccagatagtgattgcaatttttggggatagttttaggctccataattttctgtaaaattccttagtttcagaccccaaattagcatcttgtaatagtttataggcgctgcatactgaatattta

SEQ ID NO: 243902 - DNA, 207 bp, Gossypium hirsutum
gcgaccggccgaatccgggtccccacgcgtcgagaattcgcttcgtacatctaggaactggctcaactgctgaaaacaagactgattcaccacaaaagactcgaagaaggggaagctcaatgggcactgctaagacattacatggactcaacacaaactttaacctttaatgcaggactcagaagtgctaatgccacgccagagcac

SEQ ID NO: 243903 - DNA, 393 bp, Gossypium hirsutum
gactaaaagtaatttctgtcatgttccttccctaccttccctaccaaacaaggcctcagcaaattttattttatactgcaactgctacattcttcaggccatctaaagactcgtttagttaattagttgacaaagtttcagaaccaaatgcacttgtttatactagttttctgagaaatacagaaacctgtgtttacaacagaaatccggaacttagttcatgctaccaccctctgcaaatatgggattcgaattttggcatctgtaatattttctgttattcgtagactatggtgtcttttgtactaatattacattatatgactctctttattctgggttatgttgaaatcaatatgtgaagtttggcttaaaaaaaaaaaaaaataatta

SEQ ID NO: 243904 - DNA, 324 bp, Gossypium hirsutum
gatgcgcactatataaaggtaaatggagatgctttcgaatgctcttttcgatctctaaaatttgtcaatatcacttttgttgctgaagggaataggattcctgtgcctaagttaaccaagagaaacgagacgaggatcaagctgagttttggaaatggagcttgaactagaaaaggtttggcaagtacatgcagtgatgaccagagctttgaaaccaataggcaagatggatctgtatggtttggggttcgagccagatatgggctaaagaaggaagcagttgtagaagaatcaagaaagaagaatggcaagaactttagatct

SEQ ID NO: 243905 - DNA, 349 bp, Gossypium hirsutum
  unsure (1)..(349): unsure at all n locations
cccacgcgtccggggttaatggtgtttcctgatgtgttgagcagcagcagcaattggtgattatataagatattgtatacatgatacatttaaaagaaacaaccaaatgtttagcttatggttgagctctgaagcggaactgctatttgtagatctagaagaacaggatacttacaggctgcactctaatcctttcttgtattcatttaatttttcatactaatttctcagaaaaagcgtcttttaccttgtgaggattttaaattttgtttcagatgacatcagttgaagacagaaattcacctgngatgcatatatatgcntgtgtgtgtgtgtgtgtgtgtgtgtg

SEQ ID NO: 243906 - DNA, 371 bp, Gossypium hirsutum
agatctaaatggtctctttattatttgttctaagatgaaattccactttagctcatgtaggaaatacgttaccatagtacacaattatagatgctaaacataagaacaaagtgatgattcctgacaaagcaatcttgtcagcgcctccgctttcacctcctggtgaggggtggagcagatgtggaagaagtagcttatggtgtaggagctagaagaaggtgtaaaacaagtaattgaagcggctgcttttgaaccaggttgctgaaatttcctcaatttgtaagtgttcctaaacaatcttaactatatgtcattggaaggcaaatgctgtggctccatccaaaaagggtgtcggattcgattgcttttta

SEQ ID NO: 243907 - DNA, 462 bp, Gossypium hirsutum
cccactcgtccgaagaacaagccaaggttcttcaacattcgccagtgtgcataggggcggtgtgggggtgtttcataagaacaataacaagtcgaatagcccaaatctctaacactcatttgtcaaattaccttgcactgtctatttcattccctttagatatttttccagtaatttgcctggacaatttattggcatatattattattatttcctgtttatgcttttttagtttaactctaaattactgatttctttctaaaaactatttacatacctctttattttatctatattgatatgtttttctatatatcaatttaatattattttatattttttacatataattttatattttttattaatcttatctttaattatatatttgcttgacttcttttttaaaacttttatttattattttatttattacttatttacttttactttatatctatt

SEQ ID NO: 243908 - DNA, 394 bp, Gossypium hirsutum
gaggcagtcgaaagacgatccgccgactgagctcgatcgggccgcacgttcttcatgtccggtcatttttcctgcatactcccggcctgaatttttacccttgtaaaaattttggccagggagaataacgcgctgaaacagcgcgtcatctgctcatgcacagcccccgcaagccctttcagacccacccccatcgcccacgggagacaagatgcccacgaaccaggattcacgcccgacggccgaatcggatcacggagaattctcgctgagcgaagtcccgctcgagaaacgcaccggatttctgtccatcacgatggtgctgctgagcttcacgttcttcaccggcacgatgtttgccggcggcaagatcggcgtcgccttcgacgtcgtc

SEQ ID NO: 243909 - DNA, 393 bp, Gossypium hirsutum
cccacgcgtccgatactgtgaagcagatccagagcacttgtagccaaattattacattttctcactttgttcctaggcaagagctctgtccagagaaaagaatgctgttctatccaaacctcccaaaaatcattggctctgattggctcgaggatcgtataaggtctatacacggggttgaaagtagttcctttgcatgtcatgtgttcggccacacgcatttttgctgggatgctgtcgtggatggtatcagatatgtacaggcaccattggcatgccctatagagaggaaaagaagaatgaatgggggtgagactttggtaccatttcgtatttatttggatggggaatttggtgccaaaattatgccttgctattggtctgatttttatg

SEQ ID NO: 243910 - DNA, 352 bp, Gossypium hirsutum
aaaaaaaaatatataaaaaaaaaaaaaattttaaattttaaaaaaaataaaaaaaatatgtttaaatttaaaaaaaaaaaaaaggggcggccgcatttaaggtatccatgttttctttcgcgtgctttcaacgtattattttttttatatgtttacttaaattcaattccctggcctttttttaacatagtgcgccttacaaaaatacggtttttttcctattttacaactgtggatttgatatcttatctgctgatcttcgttatattattttgtattcatttcgttttgattttattaaaaattttccatcttattttttcattgttatttactctttattccgattttt

SEQ ID NO: 243911 - DNA, 342 bp, Gossypium hirsutum
  unsure (1)..(342): unsure at all n locations
cgcccngattcccggtcgaccaccgtccgggaaaataagggaagatggacttacacaacagtgtaaggactggttggggagtgcttttgggttcagacctggcctactgttgaactgtgttctacataatgtgctgtttaaagaaaacaaacatgccttttaagtaattggtcatgctccacttggcttgcaaatttatctaatacttttatcctttcttaaattatttaaatcctattaatttttgtgtgtattgagcaagactagaacactttgattgtatggacggtaagcttaactcctattcaattcatgtaccaacttatattaaatttatggcaa

SEQ ID NO: 243912 - DNA, 381 bp, Gossypium hirsutum
gattgtctgagtcttggttcatgcaggtcctagttattgcaagagcacaacgccagattatgcatcagttagacaatctgagcaatctaatacatgaataccggggagaaagatgtcgccaagaaaggaacgatcgatcaaacagagcaattgacgttgagactattggtgttccgcttatctttactctagcaattggtggtttaggagtaattttgtttaggaatctaacatcccaaaagtaacatcatcacttggaggtccaaattgcaatttctggcatcatgaaaatggtcttatgcccttgtgctttaaaggaccatggaaggcaaacacacgtaccgtaggttggcatggaaaaattgtaaatattggaaaaac

SEQ ID NO: 243913 - DNA, 263 bp, Gossypium hirsutum
  unsure (1)..(263): unsure at all n locations
ttaacatgctccaaatcccttggaaaagccactatccgtcgtcctttactgtcttggataacaccttccaccacccttttggcggtcccttccacctattgcagttcgaacagtcttttagctactacctaaacctacaggcgcaacatcaaatatgcacaaaaaagaagaagaagaagaagaagaagaatgaagaagaagaagaagaagaagaagaagaagaagaaaaagagagtnaagaacacaagaataatagataaaag

SEQ ID NO: 243914 - DNA, 305 bp, Gossypium hirsutum
cccacgcgtccgtttcgatgctattacttctgagaagttccatgcggtgttattacttttgggtggaagtgaactgacttcacgtccctatggtgttgaaatgtcagctcagaaccaatgggttgttttggactttacgagaggatttaactaatcgtatagagcagtctttttagatatatttctttagaagagataagagcgatgcttttattataaagtcttgtttttggtttgtttagaaatttgtttttatttagcagttgtatttagtggtctattttaattttttaatattaattttt

SEQ ID NO: 243915 - DNA, 328 bp, Gossypium hirsutum
tggaattctgcaaatggcttttaacatgttatcaatcaatagttgaaaaaaaaaatcatgttaaattcatatctaatttattttagcacttagaattgattgcaacacatctatatttgtttttccactttgcacccttcaaggttagctgaggatgtcttagtgggagtttatattagcctgttgtgcagaaaattcatacatgtattggggatagagattcaagggttcccccccccccttcctgtatgggtattgattttgttccattatgactctgttaatgcaacgcatagaattcagtagtgcatagggttataaatatacc

SEQ ID NO: 243916 - DNA, 214 bp, Gossypium hirsutum
attttacaataagattctttttcttctttttcttcttcttcttcttcttcttcttatttttgattaatggttaacaaagtataaagtaataactattgtgaggaaatgacaagggagttttaactgcgataactgaatgtgttgttcacattgttttcaagttaattatataccagttgcatattatggttggaacaccattaccatccagctt

SEQ ID NO: 243917 - DNA, 211 bp, Gossypium hirsutum
cccacgcgtccgtttcgatgctattacttttgagaagttccatgcggggttattacttgggggtgtaagtgaactgacttcatgtccccatggtgttgaaatgtcagctcagaaccaaagggttgttttggactttttttgtggttttaatcaactaaataaagcaagctctttagattgatttctgttgtatagataagagctatgcttt

SEQ ID NO: 243918 - DNA, 225 bp, Gossypium hirsutum
tttacatttcagacaacaaagtgatattgactgagggttttgatggggtggtacctgtcaagtgctttgagaaaaatagaatcatggccagacagaaaacctatacctttctcaaatgtttaaaattggatgaaatgatcagcttttttttttttttttcactttcttttaaacctgtgtgatgacaaattttgaattgggatcttataaaaagatgttccattt
